United States Patent Application Publication US 2014/0230087 A1 - sequence listing, part 2

SEQ ID NO: 479 - DNA, 3309 bp, Zea mays
  Intron number 5 from transcript GRMZM2G140432_T01 (locus G RMZM2G140432) derived from phytozome v7.0 (chr-ID 1; pos 4 9209329 to 49212637)
ctgtactggtatgtagagcaccattctaagcctaacttgctaaaatttgcattggtactttttctgtttatttaaagatgaactcctcctgcaacatctactgcgcctcaagccctcaacataagcttacaaaccgataatagaaaaatatagttcactttagtagctgtgtggaaatagaaagacttaaagccatccaagttagttaaatctcaattttaatgctagaaatgtaataccgtacaggaacattgtaatgggactagaatgacaatcctccttttatgtttatttatggttatggtctcaacttggatgatttgaactaaaatattttagcgcccatccattcaaacgtatcctcatggtttaccttccaaattaaacattttttgaaacttaagcgccaaatttagcgacccagaaacaaaacatcaatgccaatgctatcgatttttctataaaagatcttttccttgtccaaaatatgggtaagtgcccatattagtatcggatatgtttatgtgcaaacaaaatatgtgttcgttaaaaattgatagaatctaccatctatgactttgagattgactatcttaaagaaaattggtttgatggaacagtttatgttcttttgttggttccacgaagcctgacctagtgaccttacatcaaagaatagtgccaggtgtcactaagcaaaaaagaatagtttcaatatagtaagttctatttctatagcagtataatttcaaacagtaacatctgcattctgcagtagtatagttgcattttcatagcccttgatgggacacttcttgattgaaacttgggcactcctcttcaggggtctgaactgccggttgaaagtgaaacataatggtagtttcatagtttgcctatcagcatatgagatgaaaatgtttgctttcttggtaaccataacttttcctttatcctttttacttagttctgactatatttgattagctccatatattaaccaatttcacataaaacggagttatgataaatatgacttgatgccaatgcatgtttttctttttgcaacattccaattgtaccactagtctctctgattccaaatttagaccgtttttagatttgtcctaagtcaacatatttagctttgaccaccaatagctaaaaatctaaatagatttacagcataagagcatctttaagtgtctttctaaatttcactctctaaattgtcatttggagagtcatttgcataaaagtcgctttctatatcttttcactctccaatagcttttctatatcttattgtactctagagctattctcgttttctaactttggctagcaagaaatcctgaataggagatggctatatttggataatcatttaaagaagctgttggaggatattttttttaccaaaatctctattcctagcaattaggaaggatatagactctcttggagttgcttgaaggtatgcctcaccaaacattctgggtctcttgaaaacagtggctgatgaatgtagtctttggtgcatgggtgcctctaatcttcaggagcttctcattaggtcgccctacccagacctgtaggctgtggttggtaggttgctacccccttggtcatgctttcatctagttccaggagagcttatttcttgtttctagctggtgtgtgtgttgtgtttctggctggggctgttttaccctcaccccttgacctctttttctctcttaatgaaaggacacacagctctcctgtattgtttgaggaaaaaaaggttgatgctactagattcatcatggcgatgcacagtagctcaagccatggttttgggtgtctgatataaaaggagcactgactgttcctgtcctaggagagtatctatttatttgggaattgattgatgatcgaaccctgcaactaggagtaatggaccagcactgttggatgcttacatattcaggaacatacggcagtaaatctgcatataatgtcatcctcatccggctgcctgccccgtttgcccccttcgcgatcaagctggagaatccatccaacaactccttgtgtcctgtgtctgtgcttggcaggttttgagtgaggtccttcagaagctggggctgatcctccttgtgcctctgaccatcaccaagtgtttctcacattggtggtatcggaacttgcctggggaaatcaggaaagggctaaactcagtcatcattctagtggcatgggaaatatggaaacaccaaaatgactgtttaatggggcaaggacaaatgtcaggacaaccttagaggcagttcctgatgagtgtgtcttctggtgctcagtcggtgtgaaagatcttcaagaaatttggtcaggacgcttaatgtggccatgtgatttttagtcctgggtcactggttgccttttgtgttttttggtgcagtttcttcctttgttcttgtgtgtgtttggatgtgtttatgtgtagtatgtgtttgggtgtgcctttttggtgggagagtttcttactttctttaccacccttgttctgttttcccctcatctcgtattaatgaaatgatacacatatctcctgcgtgttcgagaattcatgacaagtaatttcataatatacaagtatctctatcaggttataaacctatgcattttttatagcaaccttcttttatctcctagtggaagtaagtgggttgccttgtacaggattttgtttgccccctcctttgtctatttaatataaggatgctcagctctcttccatgttcgagggaaaaaagaattcgcaagtgaaagtttagtcttgtagaccgtgtcaaactgtcaatgtcctaactcttgaatgacttacattaagaattagaggagtgctattttgttttgttgtttttagtggtactaacatattttaaaaaacatcctttgaaatcaatataaaatcactaatcgtcggtccagtacaattaagcatactcatgttagaattgaattgacatttgttttttcttttttaatttgattagagatgctcaaagtattgatactgcctcgatgaagtgtgatatggactaacagttcattcgggtctttttaatcatcagatctcttatgcataaaccatgttattagggtatctgctgtatctttagatgctctatgatatttgtgaagaacatttacttgcgaattaagtataactttcacttatcaaagctgtaagtgtttccatgagctactcctttgttctagctcatctttactttattcttctgatcagggtggagacacaag

SEQ ID NO: 480 - DNA, 11833 bp, Zea mays
  Intron number 5 from transcript GRMZM2G121905_T03 (locus G RMZM2G121905) derived from phytozome v7.0 (chr-ID 4; pos 1 84354573 to 184366405)
acaaggagaacattgatcaagccactgttgaagatgtaaggaactgaggatttatgtcactcttcaattttatatagctatgcatgcttcaattttctactccctccattcaacaatatattgttttgtctatggtaaattggtaataaaattggactaagtttaaagaacatgcaccaacatctacatcaccaaaataatattattagatccacataaaatatttttttgacaatgaatcaatttgataattggtatacgtaagctgttaggaaatagaatatgccgcagctccttaccatatgctgcggcatatcatagccataatcagcagattagttgctatagttagcagatgcaaatcagggattagttgccataatcagcagatgtaaatcagggattagttgctatagttagcagatgtaaatcaaggaaattatccttgccttgtaaaacaaggccagtcggccctatataatagaaggcgcccccctccaattgaggtgtggccaattgccccaaattctaatcttctacatggtaccacgagttcaggtcccgatcccgatttaatctcgcgatctctcccctcagcccccctcccctccccatggcaaccaaatcagcccctgcccccgtggtatgccccttcgccaccatcaacatcaagctccacgtccccatgacccttgagttgaagccctctaacttcaccaagtggtcgacggcgttccaggctacctgtaggaaatttgggctgctacatcatctcgccaccgcctccacctcaaacttcgacgaatcctggcggctgttgacagtagacgatctactcgaggtggccgtgaagaaaggcgttcttcacgttgagaacacctagagggggggggggggggtgaataggtgatcctgtaaaacttaaacttatatccacaaaaacttgttaagtgttagcacaataaatgccaagtggctagaaaggagtctcaacaaaacacaataccacaagagatcaatcacagagacgacacagtggtttatcccgtggttcggccaagaccaacgcttgcctactccacgttgtggcgtcccaacggacgagggttgcaatcaacccctctcaagcggtccaaagacccacttgaataccacggtgttttgcttgctttttctcaatcccgtttgcgaggaatctccacaacttggagcctctcgcccttacaattgaagttcacaaagaacacagagcaaaggggaatgagcaacgcacacaagacttcaaaagatcagagcaacaacacgcacacaagtcgcaacaagagctcgcaacacaactcaaagagttcgcaactcaacaagagctctagatgctatcacaatgaaacgaatgcgtgagatcgatgtcttggtgcttaggaatgttgtaggaatgcttggtgttctcctccatgcgcctaggggtcccttttatagccccaaggcagctaggagccgttgagaacaaatctggaaggtcatccttgccttctgtcgtcgggcgcaccggacagtccggtgcacaccggacactgtccggtgcccgatttccttcctaaaatggcgcagccgcccgttgcccgccagagagccgttggcgcaccggacatgtccggtgcacaccggacagtccggtgcccccttctagccgttggctcggccacgtgtcacgcgcagatcgcgcggccgaccgttggcccggccgaccgttggcccggccgaccgttggctcaccggacagtccggtgcacaccggacagtccggtgaattatagccgtacgccgtcagcgaattcccgagagcggctacttcggccgaggcagcctggcgcaccggacactgtccggtgcaccaccggacagtccggtgccccagaccgaaacagcctcttggctgtatacagccaactcttttcttttctttttcttcctgtttccaatacttagacaagtatattagtacacaaaaccaaatgtactaagacttagaaaacataccttttgctctttgattttcactttatttcatccataaacatgaattcacatttttagcacttgtgttggcactcaatcaccaaaaatacttagaaatggctcaagggcacatttccctttcaatctcccccttttttggtgatttatgccaacactacataaagcaactagaacaagtgcaatattacttcaaataaaaactcaaatttattttgattcaatttggcatatatggatcatcctttgccaccacttggtttgtttttgcaaatcaaactcaaatctctatctctaagtcaaacacacatgttgaagcataaagagagtcattccaaaggaaagatttcaaaaactccccctttttcccataatcaacacttctccccacaagaggccaacttttgacaaaagagacaacaaaagagatttgacaaaccaaaagctctattctactgttttcaaaatttctcaagtggtagctgatccatttattgctttggcccttattttctccccctttggcatcaagcaccaaaacgggatcaatcttggcccaagaaccccattgcctcaccaaaatcttcaataagaatacaaaggcaataagagtacatgagatgaacttggaataagttaccctctcatcggagtgcagtggaagtctttcatggtccaagtccaccttttcccttttaattctcctttgagactaaaacaagcaaactcaagcatacggttagtctcaaagggtcaagttgtaacacatctccccctcaaactgtgcatcactttgcaacggacttgtgagatccagggagtgtttgtacaacttgagcaccacaataagcaacaaaatgcagaatgaacatgatcaaaggcataaacacatgtatgctacaattcaatccaagttccgcgaatctaagacatttagctcactacgcagcctgcaaaaggtcttctcatctagaggcttggtaaagatatcggctagctggttctcggtgctaacatgaaacacttcgatatctcccttttgctggtggtctctcaaaaagtgatgccggatgtctatgtgctttgtgcggctgtgttcaacaggattttccgccatgcggatagcactctcattgtcacataggagtgggactttgctcagattgtagccaaagtcccggagggtttgcctcatccaaagtagttgcgcgcaacactgtcctgcggcaacatactcggcctcagcggtggatagggcaacggaggtttgtttcttagagttccacgacaccagggaccttcctaagaattggcacgtccccgatgtactcttcctatcgaccttacatccagcatagtcggaatctgagtatccaaccaggtcaaaggtagacccctttggataccagagcccgaagcaaggcgtagcaaccaaatatctaagaattcgcttcaccgccactaagtgacactccttaggatcggattgaaatctagcacacatgcatacgctaagcataatatccggtctactagcacataagtaaagtaaagaacctatcattgaccggtatgctttttgatcaacggacttaccttctttgttgaggtcggtgtgtccgtcggtccccatcggagtctttgcgggcttggcgtccttcatcccaaaccgctttagcagatcttgcgtgtacttcgtttgggagatgaaggtgccatccttgagttgcttcacttggaacccaaggaagtagttcaactcgcccatcattgacatctcgaatttctgcgtcattaccctgctaaactcttcacaagacttttggttagtagaaccaaatattatgtcgtcgacataaatttggcacacaaacaaatcaccatcacatgtcttagtgaacagagttggatcggctttcccaaccttgaaagcattagcaagtaaaaagtctctaaggcattcataccatgctcttggggcttgcttaagtccatagagcgccttagagagcttacacacgtggtcggggtaccgttcatcctcgaagccagggggttgctctacgtacaccttctccttgatcggcccgttgaggaacgcgctcttcacatccatttggtacaacctgaaagaatggtgagcggcatatgctagcaagatacgaattgattctagcctagccacaggagaaaaagtctcctcaaagtccaaacctgcgacttgggcataaccttttgccacaagtcgagccttgttcctcgtcaccacctcgtgctcgtcctgtttgttgcggaacacccacttggttcccacaacattttgcttgggacgaggcaccagtgtccaaacttcattgcgcttaaagttgttgagttcctcctgcatggccaatacccaatccggatctagcaaggcctcctctaccctgaaaggctcaatagaagagacaaaggagtaatgctcacaaaaattaactaatcgagatcgagtagttactccctttctaatatcacccagaatttgatcgacgggatgattcctttgaatcatcgctcgaacttgggttggaggtgccggttgcgcttcttcctccatcacatgatcatcttgtgctcccccttgatcacatgcctcctgttgatgaacctgttcatcgtcttgagttgggggatgcaccgttgttgaggaagaaggttgatctcgttcatcttgttcctgtggccgcacttctccaatcgccatggttcgtatagcagccgttggaacatcttcttcatctacatcatcacaatcaacaacttgctctcttggagagccattagtctcatcaaatacaacgtcgctagagacttcaaccaaacccgatgatttgttgaagactctatacgcctttgtatttgagtcataacctaacaaaaacccttctacagctttgggagcaaaacttagaatttctacccttcttcactcgaatgtagcatttgctcccaaatacacgaaagtaagatacattgggtttgttaccggttagaagctcatacgacgtcttcttgaggaggcggtgaaggtagaccctgttgatggcgtggcaagccgtgttcacggcttccgaccagaaacactcgggggtcttgaattctccaagcatcgttctcgccatatcgattagcgtcctgttcttcctctctaccacaccattttgctgtggtgtgtagggagcggagaactcgtgcttgatcccttcctcctcaaggaactcctccacttgaaggttcttgaactcggacccgttgtcgctccttatcttcttcaccttgagctcaaactcattttgagctctcctgaggaagcgcttgagggtcccttgggtttcagatttatcctgcaaaaagaacacccaagtgaagcgggaaaagtcatcaacgataactagaccatacttacttcctcctatgctcagataggcgacgggtccgaagaggtccatatgtagcagctccaggggtcttgatgttgtcatcacatttttggtgtgatgagcgcttcccacctgtttccctgcttgacaagctgcacaaggtctatctttttcgaattgcacattagtcaaacctatcacgtgttctccctttagaagcttgtgaaggttcttcatccccacatgtgctaagcggcgatgccacagccagcccatgctagtcttagctattaagcatgcatctagaccgacctcttcttttgcaaaattaactaaataaagtttgccgtctaatacacccttaaaagctagtgaaccatcactttttctaaagacagacacatctacattggtaaatagacagttataccccatgttgcataattgactaacagatagcaaattatatccgagagactctactaaaaacacattagatatggagtgctcattagaaattgcaattttacctaacccttttaccttgccttgattcccatcaccgaatataattgaatcttgggaatccttattcttgacataggaggtgaacatcttcttctcccccgtcatatggtttatgcatccaaatttgccttgcaggtttatgcttgggacttaggtacccaactcttgttgggtcctacaaggttagtcacaatttccttagggatccaaatgcaagttttatcacccttgcattttgcccctaacttcctagcaatcacctttctatcctttctacaaattgcaaaaagaagcattcaaagcatgatatattgtagaaggttcattgactttcctaggaacattaacaacatttctcctaggcatattgtgaataacatttcttctaccaaactttctatcatgcacaacatgagaactagaagcagtcatagcataagaatcataagcatgtgaatcaaaagcatcataacttctagaagcatttctagaatttttcctatcatgatacaaaaaggcatggttctttttagcactagtagccataggggccttccctttctccttagcgggaatgggagccttatggcttgttaagttcttggcttcccttttgaagccaagtccatccttaattgaggggtgtctaccaatcgtgtaggcatcccttgcaaattttagcttatcaaattcgcttttgctagccttaagttgagcattaagactagccacttcatcattcaatttagaaattgaaactagatgtttattacaagcatcaacattaagatctttacacctagtgcacgtttcaacaatttctacacaagatgttgatttactagctacttctagtttagcatttaagtcatcattaacactctttaaagtagcaatgttttcatgacaagaagataattcactagaaagcacttcatttcttttaacttctaaagcataggatttttgtgcctctataaacttatcatgttcatcatataacaaatcctcttgcttttctaaaagcctatccttttcattcaaggcatcaatcaattcattgattttatcaattttatttctatccaatcccttaaacaaactagagtaatttatttcatcatcactagactcatcgtcactagaagaatcataagtgatatcattacgagtgattaccttcttctctcttgccatgaggcaagtgtgacgctcgttggggaagagggatgacttgttgaatgcagtggcggcgagtccctcattgtcggagtcagacgaggagcagtccgaatcccactccttgccaagatgagcctcgccctttgtcttcttataattcttcttcttctccctcttgttcccttggtcctgatcactatcattgtcgggacagttagcaataaaatgaccaagcttaccgcatttgaagcacgaacgcttccccttggctttggttttgcttggctgtcccttgcgacctttaagcgccgtcttgaatcttttgatgatgagggccatctcttcatcattaagtccggccgcctcaatttgtgccaccctgctaggtagcgcctccttgcttcttgttgccttgagagcaaggggttgaggctcgttgatcggtccattcaaggcgtcgtccacgtatcttgcctccttgatcatcatccgcccgcttacgaattttccgagtacctcctcgggcgtcatcttcgtgtacctgggattctcacgaatattgttcacgagatgaggatcaagaacggtaaatgaccttagcattaggcggacgacgtcgtggtccgtccattgcgtgcttccatagctccttattttgttgataaggatcttgagccggttgtatgtttgcgtcggctcctcgccccttatcatcgcgaatcgtccgagctcgccctccaccaactccatcttggtgagtaaggtgacatcattcccctcatgagagatcttgagggtgtcccaaatttgcttggcattgtccaagccgctcaccttgtgatactcgtccctgcacaaagaggctagcaacacagtagtagcttgtgcatttttatggatctgttcattaataaacgaaggactatccgagctatcaaatttcattccactttctacaatctcccaaatgcttggatggagagaaaataggtgtgtacgcattttgtgactccaaaatccgtagtcctctccatcaaagtgaggaggcttgccaagtggaatggggagtaaatgagcatttgagctgtgcggaatgcgcgaataatcaaaagaaaagtttgagttaaccgtcttttgtttgtcgtagtcgtcgtccttgtgggaagaagtagactcgtcgctgtcgtagtagatgatctccttgatacgtcttgtcttcttcttcccatctttatgtctgtggcccgagccagagtcgttggatttgtcatcttttggctcgttgacgaaggactccttttccttgtcgttgatcacgattcccttccctttaggatccatctcttcgggcggttagtccctttcttgaagagaacggctctgataccaattgagaacacctagagggggggggggtgaataggtgatcctgtaaaacttaaacttatatccacaaaaacttgttaagtgttagcacaataaatgccaagtggctagaaaggagtctcaacaaaacacaataccacaagagatcaatcacagagacgacacagtggtttatcccgtggttcggccaagaccaacgcttgcctactccacgttgtggcgtcccaacggacgagggttgcaatcaacccctctcaagcggtccaaagacccacttgaataccacggtgttttgcttgctttttctcaatcccgtttgcgaggaatctccacaacttggagcctctcgcccttacaattgaagttcacaaagaacacagagcaaaagggggaatgagcaaacgcacacaagacttcaaaaagatcagagcaacaacacgcacacaagtcgcaacaagagctcgcaacacaactcaaagagttcgcaactcaacaagagctctagatgctatcacaatgaaacgaatgcgtgagatcgatgtcttggtgcttaggaatgttgtaggaatgcttggtgttctcctccatgcgcctaggggtcccttttatagccccaaggcagctaggagccgttgagaacaaatctggaaggtcatccttgccttctgtcgtcgggcgcaccggacagtccggtgcacaccggacactgtccggtgcccgatttccttcctaaaatggcgcagccgcccgttgcccgccagagagccgttggcgcaccggacatgtccggtgcacaccggacagtccggtgcccccttctagccgttggctcggccacgtgtcacgcgcagatcgcgcggccgaccgttggcccggccgaccgttggctcaccggacagtccggtgcacaccggacagtccggtgaattatagccgtacgccgtcagcgaattcccgagagcggctacttcggccgaggcagcctggcgcaccggacactgtccggtgcaccaccggacagtccggtgccccagaccgaaacagcctcttggctgtacacagccaactcttttcttttctttttcttcctgtttccaatacttagacaagtatattagtacacaaaaccaatgtactaagacttagaaacatacctttgctcttgattttcactttattcatccataaacatgaattcacattttagcacttgtgttggcactcaatcaccaaaatacttagaaatggcccaagggcacatttccctttcacacgtccagctggtgaatcggccaggtgcgggacgcggcgatgctgagtacagaccggcgcggccagcgcgctgcggtagttcgtcggaatcggcgatggtgagaacgatgtcgtcgacgtacaacagtaggtaggcgaggctcgtccccgctcggaaaatgaaaagggacgtgtcggaggtggaagcgacgaagccgagctgccggatgaaggtggcgaagcgctggtaccaggcccgcggagcttgtttcagtccatacaaggacttatgcagacgatagacgtggtctgggcaccagggtcgacgaatcctggcggctgctgacagtagacggtctcctcgaggtggccgtgaagaaaggcgttcttcacgtccagctggtgaatcggccaggtgcgggacgcggcgatgctgagtacagaccgtatggtggccggtttgacgaccgggctgaaggtctcgtcgtagtcaacgccctcgcgatgggagaagcctcagacaacccagcgagccttgtggcgagcgagggacccatcggcatggaacttgtgccgaaagatccacttccccgtcacgatattgggccgagggactcctgacggcctgctacctccataataggcgcccatcctcctccattcagcatgacattccatacactcgtctgcataatcagccgccaacctataaccatttgcgtgtttttgggtgcctctgttaccccaacatgcaagcaacctccaaacataagctcgcccctcgctccacggcatgcgtcttcctcggatatcccccctcgcacaaaggttaccgctgcctcgacctatcgacacgtcgcatcatcatctctcgccatgtcatattcggtgagaccgctttcccctttgtagccacctcagacgcctcctcccacgcctcccatgactttctcctcgacgacgatatggtttcggtgccttgctctactgttgttgcaggtgggacttcctcctcgccacccgtggtcactccatcccactcgggtgatgaccagccaccccccgacgttgcgacatcacatggatcgcctccttcgacaccagacgggcatggtcacgtgcccccgcctggacccagcgtggtccatttaccacgggtctacgtccgccgcccttgccccgagccgtccggagcggcggcagcccctcctgacgccccaacaccaccgacggcgccctcaccggcaccggcggcgtcgcctgctccgccaccaccaccactgctgcgacgtaccacccgcaccatgacgggtgccatccctcgtgttcgctatgaagggctggcggccactacatcatcctcaccatcgccgattccgacgaactaccgcagcgctggccgacgccaactggcgtaccgcgatgatggatgagtaccaggccctcgtcgacaacaacacctggcagctcgttccgcgccccccccgcatcctccggtcgccccaaaggcctcaccgccaactcccgaggcccccctcgccctggcctcgatgcagaccacatcgccgccctccacgcacaggctgctggactccacaacatccgctccctcgtgtccatcgtgctggacccggcgtccctcccactaccctcgttggcgggggcaggtcctcctcacccacctcattcctcccaccccgcctcgatcgtcgttggaaacgacttcactctgccggtcacctcagtaggtgtctcggttctccctggaccgttctatcatgaaaaagtgcaatctaacatgattctatattttatttcttgtattttttcaacagtaaaagtgcaatctaacatgattctatatttgtctagaaactagagtctacttatgagctgggcacctcagtttttggatgacttttgctgttagtttcatgctaagatatatgctataaaaatgtttctgacttttttcatataattaaataaggttgcattttggtaggtatttgctagctgcatcaaaattttca

SEQ ID NO: 481 - DNA, 1882 bp, Zea mays
  Intron number 10 from transcript GRMZM2G064503_T01 (locus GRMZM2G064503) derived from phytozome v7.0 (chr-ID 1; pos 291309427 to 291311308 reverse strand)
gctggaaggaacaccattgcttcaaaggttagtgattattgctaagctgtcagtggctatacttactacaaactattgtttcgtagttgaacttttctaacatgccatgatcttttccatcataaagttaataggcattgaattcagtaactgatagagattgtatcatgtctaacgtcaattctttgggcaaattgacaagaattaacaataatggtagaatgatagaagctggtgtgacatttaacaaaatagaacacatatcattttttttgtttagtcccagaataaagttatcaaatctaccttggcatatccagtgtggtgttccagattttattgaatgtttttttatcaaacacatggtgttccagattaaaatgtaagtccttgacatgaccaaattaactcaacagatatgttcatttttagctataaataaattgctgaagcttgctagacaagaagtgaagcgatgaatgaatgaaatgcattattactgcactaacaaagagaaaacaaccatagcccagtctgtaagtatgagccaagttgggtaaactggtatgcatgtcaccggagatactatgctgaagagttagcccacaagttcttgggtgcagaaaatgctgggttatatatattagtcattctaaaaaatgtcaaagtaaaggcagtgctttttgtgaaacacaatcattttgtataaactaaatgacattgctaagggatagttgacagccagcacagctcagaagtaaaggaaacacaatgtcatgctattcctgcaactatactctcatgcctataaaaaactattgactaagacatccctgctctgcacttgttctgtttactcatcgtaatgagacacatttgagctgtcaagtgcatcttttgttttgttttgtttgtttctcaatgactcaaacactaaaagtctgcaatgaaccagtcccaatcacactttcaagtatcatataatatgatatatgactactctctctgatagttcactagattgttccaatttaaccctgtggccctgtattagactgcgaaaacattctcttatacctgataaaccacagacacataaaagggactatccatgttatctccttgcaactgcagaactagtgtagtagtgttggcatgtaagctgtagtttagttcagaaccaccatatgtctttatgtgatctctaagcatcatattcatagggtgcagaccaattgcagcattgttaatcgctcatactaccaatacatggtgctgaataaactaatttacagaatacaaccactttcccatatttaatccaaactttccctaatataactgtctgttcaccattaaaaccatcagaggacactgatggaagcacctccatgctcatcaagtctacagaagcatggattaatataagcgttttcatgatctcaaagttgtaccataccattcatacttgtgcactcacttttgcattgttgtatgtgttataaacaacacatgaaccaaccatctgatgttgggtttggatcattatcgtgaaacattacagttcactcaagctaattcctagagtgactttgaaatcttacaaccagaaactggaggatggatgtgtaccaccttatgataagcacacctcttggttcttggtgattgcaacttttggttctctattaattatataccgtacttctgcccacaatgcttccatactattccactgctgatagttttatgaccttcatgcattgcatctattattatcagagattctggatagtttcactttggtatgtttgaccataagatgacatcatttgtgttccttgtagtcatcgtttcttggacgaacagccagtggttcact

SEQ ID NO: 482 - DNA, 6143 bp, Zea mays
  Intron number 1 from transcript GRMZM2G141222_T04 (locus G RMZM2G141222) derived from phytozome v7.0 (chr-ID 4; pos 1 82632872 to 182639014 reverse strand)
cctcctcccctcaccatccaccgcccctatccaaggtaaaagcacaatctgcgccttcatgattttgagtgcttgatctatttccccattaaaattaaagggcttggtcagttatttctttgttgatacgatgtttttagcccttgcatgtttgtgactttggttctgcttaaagcttttgtcattattttacatcatgtgtgattacaatatgtcaatactcaataccatattagatataaatgcgggcattgcgttcttggactgtacatgtgtagaggttcattaaaatccaaggatatgagatgaagtgaggcatgcttgcctgcttgaccctcttcttcgctgtccatctctcgcgtgccactgccacccacttcagttaattatgttgtaagcacatggccatgagcatggatagaggagtactctacaacaatactgggagactaattatagtatttaatgttcactttattttcagctcttcttgctcagattgagctatgtagtcagttaactagcttccaattcagctttcatttagagctcctgctgaataaaatttactaccagtactttatccatattttaggagttttcaacattaataggacattttttctaggtcacgaattttttctttattcatactatgtaagaagtcattagctgatttgcagaacagaaagaacatgtgtttgaacatcacttgtgaaaaaaatatgtaacaagtgttagcaccattagttagtagagacatctgacatcctggaaactagggatgggtgttctcctctcctggtgcccaattgataggtacagtagtattagtattctatggtggtaaaatatggtagtttagatttgagaatgtatggtcctttttatttttctctttgttgacaaggagatcacagcttctttagctatctttaacactgaattctgcagagaaaaacacaaatgcagatccagaaaatacatagttcataacattctaattggttatatgaacgtaacattgaagttcttcaatcaattagcatgagcatgactacttaattatatgtgcatgctctggtggtgagcaatgaataactaaggtctgattttcatgtgcatgctattagtgttctgttcacttatttagtgttagcctggtcaactgtgctccaacatgctgcatgcctgcatcttttttttctctcattttttttgagatgttgcatgcctgtatctgtctgattgcttcattttttatcaaccacacggtatgtgggagttgttcatctggttgttgttcagtgttcactatgtttgatgctctgtttgcaaggcaaacagaacacttgtttgtttgcatctttgtttggagacagagtctgtactagtatgtttctagcatattcaggttagtaaatgcagctaggtggagcaaaccactgatctatgctgtgcaggttctttttttgcagcaatgtattattcagtaaaccaaacttgagaacctaatttcatcttgttcagatagctcctcagtggcacaatgtttacttcaaatatttaacttaattccgccatatgataactggcggtaactttgtggttggttgtaaccaatattttagctgatcttaacaagctgcaaaccaaagagatgtaacaatatgtgctcgtatatgttttaacaaattaaataaagccacatgcccacatctatgttatcgagtggagtgtattggtatgatcacaattcaccatttgtcaaaggtggattcttttactctggagttcattactagcagtggctgcttatttatgcaaaaattaagactatgcatgccaatgtgtaagtattttgcaatcatgccttgtttgaacaagccaatatttaacattaggagtgaaacataggagtgattgaatggtgccattttgtaatgatatataagtactataacatgtagggctacaggttgtgagaacaagttttgtgtagaggaacaatattattttacatttaatattctgaattagcagcatccattaagtatcttttttaaagtgtatcataccatctctactcctataatgtaggacattctccgtgcaccgcccttctatccccgtgcggaggttaggcctccacgccgaagcttgtttcaggcttgtcctagtacataatattgctcgcctctcctgtctcctctcctcgtcgagcggttgtgggtggtcgatccataaggccggaatggcaaaccaccaggagaagcccaccacgtccccaccgccccagccggcggagggcagcgtcgctcgcccccgcttgcccggcgtcggcaacgcacacccgggcagtgccggatacccaaacccgccagatgccgcgatccccgatgcggcgactcttcgggaccagtggcggtttgccgtgcggcagtacagccgctggtactcccacgcctggggcaccgccatccttgccggcgccgccttcttcgcgcttgggtggcttgtcaaggggtcaaacccgctcccgtcccgggccgagccacaacacggcgccattggcaaatccgtcgctaaggaggacaattgaccggtaagtgctgaacgccttctcttccctgttactgtttgacctgttggttcttagataccagggacatttggagaatgtttgtgttttttctgtaaactagctttctttcttttattaagaattccatttgtcaagaagaaatttggttggagctaggggtcttagggtctgtttggttcatctgtagattcctgaaaatctgattctagctatgagctgtgctgcgagctgataattataaaaactatatttggtttgattgaaactactgttaagtatagattctataagagcatgacaacttataacatggatgtcaggaatctgaaaaatctgactatctgaggtagaaggtgattctgaattaaaccagaggaatctataggttttcaggaattttttctgttgttgtacctgtttggttgaaattccagatgtttggttgaattaaaccagaatgttctgtgtttgcttcgatgcatgactaaatttctgttggtatagtgttgaactttcagtacaagaaagttgattgctgcaagtgtttatatttgccaaacttgggtagattccaaagcatggattgcagttttataattatgtgaactatgcgagcatgtggagtacaaaagggattcatggtccagatagccatgggccggtatcatcaatggagatgcatcttgatcggttcaaccatactactgggctgattactctagagtaatgtttgggaggggatcttacattgggaagggaatattacatttgtataataaatggatatgatatttaagtaattgtttacagtgaagtaattactaagtaatgttcccaacagtgttatactgtaacattggagtatgccttgatcaatgtgtgatttcttttgaaggtcgtgatcatttcattggatgatcaaaacatgatatggtttttggtcaacgaggattttgattttatccatttggactattgtcgtccaataaatatttttacaatattttttcggtgaacatattatttctttgaaaattccagcgaaagttttggaagttctctcgtctttgagtagcctgttgatttcagaataaatctttacaagaagattgattgcaatagattctacttttgtatcaaacttagcaggtgtcaatactatactattatttcctatgagttatgtttactttcttccctgtttgtttctggacttcagtttgaatgaaagggagtaattttaccacacacatttcatcatatggtattctatatattcaatgtagtaaactagtaatttgtcgatttttattaggctttctagccttgtaaatgctgcctgctttttttttgtaacagatgaaacacttggcttttactccgtttatttctaattagcttaatcaactattttattgctgcatatattgtttgtcattcttgtggtcttttggttcttaatcttataatctgtaagtgttaatactactgctacagtttggcttaatatttgagtgtaatgttggtgaatgacgtggttaatgtatgattgcttttggttttttgtgaacctaccgatgtatgtggactcttggacaaacacttagaagccatgcccgatgacttccaacaaacccatagggattcacatgagattgaatggatggtgttgatggatattagaaatatgctatagtcgatgagtaagggtataacattgttctctctttctgagattcacgtttcagatgataacatggttggtgtgatataatttctcacctttgaaacagtgataatgtaaaatttgttagtaatttttacatacgaacaatagcgagttctttaccttttacattttcagtagtatttaaatgattgcaactaaaaatatgtcgatttatttttatggttagtattattttaaagatttgaaacgtatttgaacaactatcctattcaaacaaggtctaccgaaccgtagcaacaagtttgccactcatgctcagaagtttagtttattttttcctcaaaaggttctttcttgttgaggctgtgaggcttgttccaacatttcttattccaaattctgagtagtactatatgtggtcgctccttgtaaattactggaaccaaacaattattttataaattctcaagtatagcattatgcaagctaaattggttgctttctcatcttgtctatgttgtttgcgtcacaggcttaggtgaaccaccttgagttacgagctacagttttagtacaggatttcaagccgttcggttgctggtcatggtgttggctgttggtacagtatttggtgagagcttgatgtcacagcagcagtagaagcggtgctgtaaaacctggcagccgaacagcgtgaaaggaaggtttgtatttcaaaggatctataacaatcaaattctgcggttttgattatgtccgttctatcgttgagctgatattgtagttcagttctttcttgtgcttggagtattattacatacatgtatgacaatatgagttaataaacttggagcgctttgaattatgctatccgatgtagcatcataagagtcattataccttgaattagggtctgtttggatcaatagtgctaaactttagcaatacacttaaactttatcacttggagatccaaaatatgagtgctaaaaggtgctaaaaactgaagtgctaaactttagcactcaatagcagttgagctcttcaagatgtgctaaactttagtactctgttaaaattaagcacatgagatccaaacagtctcttagtagatggctgtagctttaatggatgcatatatgtatttactagataagaaattgcacatatcacttgttttgtacgagggcaacaccgattctagatttttccccgatttttttattttttagctgtcccagattttaatcagtgtagcttccaattagccatccagcttccgtcacccggtgggaaaagaggatgacatgtgcaggttacagacttccttcgcttaggtcttctccaccccgccctgctgcttgccgctgcggtccagacggccccgcgcgcgggggatcgcctcctgtgatgacttttgctccgcgaataaaatatctatacggtgggttcttctttcgtcagtgcttataaggccattctcatttctcaatgggacttttatattcattaaatgcgataacacataatcacacctggttatattgcagtgtgatattgcactgcaattaataggggacacacacacacattagggttttataaaaactgagttggttctaaacatactagtttatgctccaatttatataaactagagtctcaatttcttaaaatcaagaaactattctcacttagttaaaggcactttatgaaaattaatgttgttccaaacaccattaaccagtttgtttttttataaatcagtttctagaaattggagatagaaactagattattaaaaactaggttgcttccaaacaagtttatagaaggtggtagagttcc

SEQ ID NO: 483 - DNA, 9014 bp, Zea mays
  Intron number 1 from transcript GRMZM2G058681_T02 (locus G RMZM2G058681) derived from phytozome v7.0 (chr-ID 8; pos 6 243738 to 6252751)
aagtccgctgccgtaacgttgaaagggaaatgtgcccttgggccatttctaagtattttggtgattaagtgcaaacacaggtgccaatatgtgaaaatatgcccatggatgaacaagttgcaaatcacaagtaaaggtatgtttctaagccttagtacattggttttgtgtactaatatcttgtctaagtgtttagaaacagaaagaagaagaagaagagaagacttggctgtgtacagccaaggggctgcttcggtctggggcaccggactgtccggtggtgcaccggacagtgtccggtgcgccaggctgcctcggccgaagaggccgctctcgggtttttctccggcgacttcggctaaaattcaccggactgtccggtgtgcaccggactgtccggtgagccaacggtcggccgggccaacggtcggccgcgcgatcggcgcgcgacacgtggccgagccaacggtcggaaggaagcaccggactgtccggtgtgcaccggactgtccggtgcgccagatctgcaacggtcggcaacggtcggcttcgctttttatggaaacaaatcgggcaccggacagtgtccggtgtgcaccggactgtccggtgcgccacgagacagaaggcaaagatggccttccagatttgttcccaacggctcctagctgccttggggctataaaagggacccctaggcgcatggaggagtacatcaagcattccaacaacctttctaagcaccaagacattgatctagcgcattcgattcattgtgatagcatatagagctcttgtggagttgtgtactctctgagttgtgttgcgagctcttattgctgcttgtgtgcgtgttgctgtgatcttttgaagtcttgtgtgcgttgctcattcccccccttgctccgtgattctctgtgaacatcttttgtaagggcgagaggctccaagttgtggagattcctcgcaaacgggattgagaaaagaaaagaaaaacaccgtggtattcaagttgatcattggatcacttgagaggagttgagtgcaactctcgtccgttgggacgccacaacgtggagtaggcaagttttgtacttggccgaaccacgggataaccaccgtgtcaactctgtgattgctttcttgtggttattgtgttttgactcctctctagccacttggccatacctgtgctaactcttaacaagtttttgtggcttaagtttttgaagttttacaggatcacctattcaccccccccctctaggtgctctcaattggtatcagagccgttctcttcacaaagggacttaccgcccgaagagatggatcctaaggggaaaggaattgtgatcaacgacaaggagaaggagtccttcgtcaacgagccaagggatgacaagtccaacaactcgggctcgggacacaagcgaaaagatgggaagaagaagaagacaagacgcatcaaggagatcgtctactacgacagcgatgagtcctcttcttcccaaaaggacgacgacaacgactacaggaagacggttaattcgaacttctcatttgattattctcgtattccacatagttcgaattcgcatttactttccattcctcttggtaaacctccacattttgatggggaggactacggattttggagtcacaaaatgcgtagtcatttattctctctccatccaagcatatgggagattgtagagaatggaatgaaatttgatagctcggatagccctatgtttatcaatgaacaaattcataaaaatgcacaagctactactgttctcttagcatctttgtgcagggaagagtacaataaggtgagcggcttggacaatgccaagcagatatgggacaccctcaagatctctcacgaggggaacgacatcaccatgctcaccaagatggagttggtggagggcgagctgggacgattcgccatgataaggggagaagagccaactcaaacttacaaccggctcaagacccttgtcaacaagataaggagctatggaagcacgcggtggacggaccacgacgtcgtccgcctaatgctaaggtccttcactgttcttgatcctcatttggtgaataatattcgtgagaatcccaggtacaccaaaatgtcgcccgaagaaattcttggaaaatttgtaagcgggcggatgatgatcaaggaggcaaggtacgtcgatgacgcgttgaacggtccaatccacgagcctcaacccattgctctcaaggcatcaaggagcaaggaggcactaccaagcaaggtggcgcaaattgaggcagccgggcttaatgatgaagaaatggctctcatcattaagcgcttcaagacggtgctaaagggtcgcaatggacagccgagcaagactaagaccaaggggaagcgatcatgcttcaaatgcggtaagctaggtcattttattgctaactgtcctgataatgaaagtgaccaggaaaaggggaacaaaagggagaagaagaagcactacaagaaggcaaagggcgaggcgcatctaggcaaggagtgggactcggattgctcctcttccgactccgacaatgaaggactcgccgccaccgccttcaacaaatcaaccctcttccccaacgagcgccacacatgccttatggcaagggagaagaaggtatgtactcgcaattctacctatgcttcttcaagtgaggacgaatctagtgatgaggatgaagtagattattcatgtttgttcaagggcttagatagatctaagatagacaaaattaatgaattaattgatgccttgaatgaaaagaatatacttttagaaaagcaagaggatttgttgtatgaagaacatgataagtttgtagaggctcaaaaatctcttgcattagaaattaagaggaatgaaatgcttgcttgtgaagtgtcaacatgccatgattctatttctaacttaaagagcataaacgatgatttaaatgctaaactagtagaagcaaataaatccaactcttgttttgaacatgttgaaatttgcactaggtgtaaggatgttgatattaatgcctgtagtgaacacttagtttccatttcaaaattgagtgatgaagtggctagtcttaatgctcaacttaagactagcaaaagtgattttgaaaagctaaaatttgctagggatgcctacacggttggtagacacccctcaattaaggatggactcggcttcaagagggaagccaagaacttaacaagccataaggctcccattcccgccaaggagaaagggaaggcacctatggctactagtgctaaaaggaaccatgcatttttgtatcatgatagaagacaaactagaaatgtaagtcatgatacttttgattcatatgtttatgattctcatgccatgtttgctcctagttcctcttatgtgtatgatagaaatgttactaggagaaatgttgttcctaaaagaaatgctattcatcatgtgcctagaaggaatgttattcatgctcctaggaaagtagtgaatgaaccttctacaatttattgtgctttaaatacttcatttgcaatttgtagaaaggatagaaaagtaattgctaggaagttaggggcaaaatgcaaaggtgataaaacttgcatttgggtccctaaggaaattgtgactaaccttgtaggacccaacaagagttgggtacctaagacccaagcctaaatttgccttgcaggtttatgcatccgggggttcaagctggattatcgacagcggatgcacaaaccatatgacgggggagaagaagatgttcacctcctacgtcaagaataaagattcccaagattcaattgtatttggtgatgggaatcaaggcaaggtaaaaggtttaggtaaaattgcaatttctaatgagcactccatatctaatgtgtttttagtagagtctcttggatataatttgctatctgttagtcaattatgtcatatgggatataactgtctatttacaaatgtagatgtgtctgtctttagaagaagtgatggttcactagcttttaagggtgtattagacggcaaactttatttagtagattttgcaaaagaagaggtcggtctagatgcatgcttaatagctaagactagcatgggctggctgtggcatcgccgcttagcacatgtggggatgaagaaccttcacaaacttctaaagggagaacatgtgataggtctaaccaatgttcatttcgaaaaagatagactttgtgcagcttgtcaagcagggaaacaggtgggaggagcgcatcacagcaagaatgtgatgaccacttcaagacccctggagctgctgcatatggacctcttcggacccgtcgcctatctgagcataggaggaagtaagtatggtttagttattgttgatgacttttcccgcttcacttgggtgttctttttgcaggaaaaatccgaaacccaagggactctcaaacgcttcctcaggagagctcaaaatgagtttgagctcaaagtgaaaaagataaggagcgacaacgggtccgagttcaagaaccttcaagtggaggagttccttgaagaggaagggatcaagcacgaattctccgctccctacacaccacagcaaaatggggtggtagagaggaagaacaggacgctcatcgacatggcgaggacgatgctaggagagttcaagacccccgagtgcttttggacggaagccgttaacactgcttgccacgccatcaacagggtctaccttcatcgcctcctcaagaagacgtcgtatgagctactaaccggtaacaaacccaatgtatcgtactttcgtgtatttgggagtaaatgctacattctagtgaagaagggtagaaattctaagtttgctcccaaagctgtagaagggtttttattaggttatgactcaaatacaaaggcgtatagagtcttcaacaaatcatcgggtttggttgaagtctctagcgacgttgtatttgatgagactaatggctctccaagagagcaagtggttgattgtgatgatgtagatgaagaagatgttccgacggccgctatacggaccatggcgattggagaagtacggccacaggaacaagatgaacgagatcaaccttcttcctcaactatggtgcatcccccaaccaaagatgacgaacaggtacctcaagtagaggcgcttgatcaagggggagcacaaaatgatcaagtgatggaggaagaagcgcaaccggcacctccaacccaagttcgagcgatgattcaaagggatcatcccgtcgaccaaattctgggtgacattagcaagggagtaactactcggtctcgattagttaatttttgtgaacattactcttttgtctcttctattgagcctttcagggtagaagaggccttgctagatccggactgggtgttggtcatgcaagaggagctcaacaacttcaagcgcaatgaagtttggacactggtgcctcgtccgaagcaaaatgttgtgggaaccaagtgggtgttccgcaacaaacaggacgagcacggggtggtgacaaggaacaaggctcgacttgtggcaaaaggttatgcccaagtcgcaggtttggactttgaggagacttttgctcctgtggctaggctagagtcaattcgaatcttgctagcatatgccgctcaccattctttcaggttgttccaaatggatgtgaagagcgctttcctaaacgggccaatcaaggaggaggtgtacgtggagcaaccccctggcttcgaggatgaacggtaccccgaccatgtgtgtaagctctctaaggcgctctatggacttaagcaagccccaagagcatggtatgaatgccttagagactttttacttgctaatgctttcaaggttgggaaggccgatccaactctttttacaaagacatgtgatggtgatttgtttgtgtgccaaatttatgtcgatgacataatatttggttctactaaccaaaagtcttgtgaagagtttagcagggtgatgacgcagaaattcgagatgtcgatgatgggcgagttgaactacttccttgggttccaagtgaagcaactcaaggacggcaccttcatctcccaaacgaagtacacgcaagatctgctaaagcggtttgggatgaaggacgccaagcccgcaaagactccgatggggaccgacggacacaccgacctcaacaaaggaggtaagtccgttgatcaaaaagcataccggtcaatgataggttctttgctttacttatgtgctagtagaccggatattatgcttagcgtatgcatgtgtgctagatttcaatccgatcctaaggaatgtcacttagtggcggtgaagcgaattcttagatatttagttgctacgccttgcttcgggctctggtatccaaaggggtctacctttgacttagttggatactcagactccgactatgctggatgtaaggtcgataggaagagtacatcggggacgtgcatattcttaggaaggtccctggtgtcatggaactctaagaaacaaacctccgttgccctatccaccgctgaggccgagtatgttgccgcaggacagtgttgcgcgcaactactttggatgaggcaaaccctcagggactttggctacaatctgagcaaagtcccaatcctatgtgacaatgagagtgctatccgcatggcggaaaatcctgttgaacacagccgcacaaagcacatagacatccggcatcactttttgagagaccaccagcaaaagggagatatcgaagtgtttcatgttagcaccgagaaccagctagccgatatctttaccaagcctctagatgagaagaccttttgcaggctgcgtagtgagctaaatgtcttagattcgcggaacctggattgaatggtagcatacatgtacttatgcttttgatcatgttccttttttgcattttgttgcttattatggtgctcaagttgtacaaacactccctggacctcacaagtccgttgcaaagtgatgcacatgtttagggggagatgtgttacaacttgaccctttgagactaaccatttgcttgagtttgcttgatttagtctcggaggtgaattgaaagggaaaggtgaacttggaccatgcaagacttccactgcactccgatgagagggtaacttattccaagttcatctctatgatcttattgcctttgtactcttcattgacgattttggtgaggcaatgaggttaaaggggccaagattgatcccgttttggtgcttgatgccaaagggggagaaaataaaggccaaagtgataaatggatcagctaccacttgagagattttgaaaatagtagaatagagtttttgttttgtcaaaagcttttattgtctcttattgtctcttttgtcaaaagttgacttcttgtggggagaagtattgattatgggaaatagggggagtttttgaaatctttgatcaatctcttttggaatgactctctttatgcttcaacatgtgtgtttgacttagagatagagatttgagtttgatttgcaaaaacaaaccaagtggtggcaaaggatgatccatatatgccaaaattgaatcaaaaccaatttgagtttttatttgaagtgattttgcacttgttctagttgctttatgttgtgttggcataaatcaccaaaaagggggagattgaaagggaaatgtgcccttgggccatttctaagtattttggtgattaagtgcaaacacaggtgccaatatgtgaaaatatgcccatggatgaacaagttgcaaatcacaagtaaaggtatgtttctaagccttagtacattggttttgtgtactaatatcttgtctaagtgtttagaaacagaaagaagaagaagaagagaagacttggctgtgtacagccaaggggctgcttcggtctggggcaccggactgtccggtggtgcaccggacagtgtccggtgcgccaggctgcctcggccgaagaggccgctctcgggtttttctccggcgacttcggctaaaattcaccggactgtccggtgtgcacaggactgtccggtgagccaacggtcggccgggccaacggtcggccgcgcgatcggcgcgcgacacgtggccgagccaacggtcggaaggaagcaccggactgtccggtgcgccagatctgcaacggtcggcaacggtcggcttcgctttttatggaaacaaatcgggcaccggacagtgtccggtgtgcaccggactgtccggtgcgccacgagacagaaggcaaagatggccttccagatttgttcccaacggctcctagctgccttggggctataaaagggacccctaggcgcatggaggagtacatcaagcattccaacaacctttctaagcaccaagacattgatctagcgcattcgattcattgtgatagcatatagagctcttgtggagttgtgtactctctgagttgtgttgcgagctcttattgctgcttgtgtgcgtgttgctgtgatcttttgaagtcttgtgtgcgttgctcattcccccccttgctccgtgattctctgtgaacatcttttgtaagggcgagaggctccaagttgtggagattcctcgcaaacgggattgagaaaagaaaagaaaaacaccgtggtattcaagttgatcattggatcacttgagaggagttgagtgcaactctcgtccgttgggacgccacaacgtggagtaggcaagttttgtacttggccgaaccacgggataaccaccgtgtcaactctgtgattgctttcttgtggttattgtgttttgactcctctctagccacttggccatacctgtgctaactcttaacaagtttttgtggcttaagtttttgaagttttacaggatcacctattcacccccccctctaggtgctctcaagcgtcctcggatccacgtccaccgcgtcgccgtag

SEQ ID NO: 484 - DNA, 7563 bp, Zea mays
  Intron number 1 from transcript GRMZM2G066373_T01 (locus G RMZM2G066373) derived from phytozome v7.0 (chr-ID 9; pos 8 459944 to 8467506 reverse strand)
ccatcaaaggcctagggccttaacttgggtacagattttaccattctctgtgatctgtgagagagatcaatttagttctgttgtttcaattgcttggactaattagactgtttttctttgcgtttatcatcagtttacatttcggttaaggtgcaaatgatgttaaacttacatcggaaaactggcatgctctattcactattaattagtgggatttagtcatctaaaattaccatgtttgtttgatttactcaagtcatgagggttgattgtgttgacaatttagtctcttttccttcctctagcctcaatggtatagtagccaatttttgtctcaaagcgcagaaaataatgaaatttggcatactattaagaagttaggctatgccatccgtttctttttacatttaccatgcaatgtttgtagcatgatatttctttgaaggaaaattaacagttttcttcagggattttctttcttttgtttacaaagtggaactgtttggttgtcttcattccagaatccagagctctagctttcatagtaaaataggacatgacacattcatacatatggcaggtgtttgttttgggaactattgagctcaagtttttgtatcacaatattagtgtgtagaataggtgtcaatcttctagagttaagcttgccatggatatttgagttgcattttttttattcatcatgagtttatcatggaataagtcacgaagttatgcttcattttagttggttggcatgctccctcgtatcttctttatccatttgaaaagcaaaccgattgcatgcctgtctgctttatttttcttgtcgagtagaattgtgtttgtagcttggtttctttgacatctcagttctaccatctactgcaaactagctgttttatttctgagtgcccggcaggattagcgcattttcacagcttttatgcgatagcttagatgtttgaattagctgctacatttaatgtgtttcattgcatattagcatattgtactattgtataatttcttgtgttttttttgaaaggatagcatgttgttgtgattattcgacctggcatttagaattatctttgcagtttgctttatttcccttcccagttttaccctcgatgtcaaaaccaccattcttatcccaaaaagtttactaattactattttggcatggtcttggtagttggtacttggtaagacaggttaggtattggattgatgaccctaaaaccaatgtttttcacatgatacattccctgttcttaaggcgtcgcctaggcctaggcgtccaagcggagctccaacgcctaggcgccttgcccgcctacctcgcctaggggccgcctaggcgtccaggcggtggtccaacgccttggctcgccttaccgctttaaaaaccatggatacattattcttggttttacgaataaaggtgatacttctagcataatctgttctaaaacttttctaggcgctaattaggcgattgggtggtgtctaggaggtgtatgcttaggtagtctatgtagataagcactaagcagaatatttaattgattttcaacaagtcagcatccatttagcatgaataacaaattattccatgcgctaaattggcataagtgacataattaatttcaagccaagattgtgaaactcatttgtgtattttttcccaatcaagcatccacgtttcaagccagcaatctatttgatgctagatgctaaaagtttattgttctctttgtgcctcttgtggtttaggtcaaggtcattggtaccatggttgtttcagtacccttgtaagggtcggctcacacatatttttgtttaaaatatgccttgtggtttacaatttggctaaaggaacctgctttaaatatatatacctggagagagtaccactgttggatctggttgcagtgtttgaaagaactagtcaagtatgcaaatctaatatgttgtatacatgttacatgtgcacaactatagttcaagttgtgtagttatttgagattttggcatatggggtatcactaatgcatcaatcatgtttttgcatccgagggttctacttgtgtgggggaattcttaagacatcaaacctttgttattttcgaaagccccctagccgagttggttaggtggtatgagtagcactccttaggtcttgattcgaatcctagtgggagcgaattttaggttgaggttaaaaaaggtcactcgctggttcccctggttgtgtgcacacgagatggactgacctatgggggcggatcctcgtgtaggggctgggagagctcaaagcacgagtaaagatctgtcctatagggggcggaccctctgttgcacgggggaccagctttcgtgacctttctcggtcggggctccgattgagcttcttcttaatataataccgtgggggcggtctttcccctaccgaccgagttttttcaataaaaatactttgtggttgtatgttgccttgggttctccttgatggataatgacaatcttggcttaggcatttgattttggaatgttggaacttggttggactttgcaacattgagaagacaaggcaaactatattatgattggcatgtcttctattccattgacaattgtgtgccctttctacggcagtcaaccatctagtttgttttcttgacatgtcttctattccatggacaattatggcgtgccctccatcgtacgacagccaaccatttagtttgttttcctaaatgggttcacaatagatctgcttcctccacatttggcaggtcaccttttggtgtcgaccacttattatttgaattgccaacttgccatgcaaggagttccatcctccataatgttgggatatgccacatggctgtgatttctccgtctttgttgtgtgtgttgtctttgttgttatctctttttgttctctttgtttgatgtggggttgaatgtggtggataatgagattagtgcccatttattccctactatatttatcggttaagtgttccagttatatagtttagtatcagtgatgaatcaagcattaccaatcaaatagaatttctataccagtataacaaaaaaatccacctgaatacagtcttcaaaatcctatgtggtacaaaatccatgccctctattagctggatttactattacttttctttgtcccctaaattgacgttctaccacaatgtcaacataagtttagagccccatatgggaacacaccagaaagggcttctactttgggtcatgttggaagtttaaactctaccaaatggtctcttgcaaaagtgatttgcgtgcgaagcagggtgaagacggagccgtttttttgtgaaggactaatggagcccgaaattgtggcttcaatccgctctgttgagggtcgcataagaaaatgactcctgtgacctcctctggctctagaagtagaacctctcctctctctggtggaggactcgctcatgcatgcaccccgagtagagccttgtagaggccaatagctgggcaaaggttggctagaccaggaggtgattgatggacctagtgctgccacattggaagctaggatgtgatggtttttgcaaatctcgatcgcaattgacacaagcgtggtccttgctgtctgaccttgattggctcttgcgcgtagtgtcccacatcggtggatgcagtgtgcggtgtgaggatcaggtgatgtcatggccactccttttcccttagaaaaataaaagaagaaatacggagcaatacatgtatacatggacttcggaccacaatccaagtcgagaatttacagtaatgtaataatgccttttccttatcaattgcattaaaaagcaaatgaaaaaagattagagaaaatcaagttcctaaaaatagtaatagctaggcgctacatgggcattagatatattctattcatttatgaaaaaacaagagatgttttgccaaacatttttcaaagtgcttcaactccaccaaagaagccacttctacattgagacagagctggagccctgccaaacctaagaggcacctagaatcatacggggttccacattccgtggaacgtggttctagatcgagggatgggaaccatgcggaacgacgacgattccatggccggaacgtgatctgtgctctagcggaacatgatcaggaacgacgacgattccatggccggaacatgatctgtgctcgagtggaacatatttatgcataaacacactgaggaagctagctatgtcattataattgatcttagactcactcacataagataaaactatggaagtcaacaatgccgataaactagctaagtcattataatcgattttaagacttaaatcttatataagatgaacaatgctgggaacctcgttccacattatcgtttcgaaattacatggttcacgttccggttatcgaataaaccatacaaggaggtatacctcattcgttccatgcctccaaaaattggcgatcctcaacctgtgttcctgttcctcgatcccttcgtcccgggaacctggctttttagtgccaaacaggccctcattgcaaggcattaagatagaaaacacctagctaacttgttctttgtccgctcccctccccatgagggcccaacactcacccaccaacccaacccattgaagttctaaattctaatacaaagcgtgctaaagtttaaatcttatcccccccctaccagtttcacaaggagttaatatggaaaggatgcaacaatttatgatacccaaagcaatttgttaatcataatattggattgcatcccatgaggggcattttgacctacctgccaaatccgtatttctttggttttggtgtagctaagccatttggttgtactcttctttcatttgtcatgtgctctctctttatctatgatgtatcgtttttgccgcttacataatgtgggcagcaatggtttcaagtcgcccgactagctagtcgagacacctgggcgaccaggcgactaatcgcgattagtcgacgattaggtcgactaatcgggtcctggtcgacctggtcgtccctactggccctcctgcatatttacaggtacaggacctatatatataattatatatatgtgtaataatgtaatattgatatatatatgcatagcatatagcaataatgcaatatagcatataggaggcaatatcaaagtaaccaaattaccaaacaaaacaaatatgaatactagaacagtagaactggacagtggacaattcagatttcagaacatcatagaaattcagatttcagaattcagacttactagtatataaatgccaagtaggcaagtacataacagaactacagacttactattgacctaaagcagtagagcctcatccaattgaaaagcagcatcactagcagcccctccacctgacttagagtcttcttcctcatccacttctccttgagtttgtactggcgccgagcagggtgcaggcaggttgctgggccgctgcgccgaggatggtgagcagttgagcactgactcactgagccgccgagcaggggagagaggtgagcagccgccagagaaggggagagaggcgagcagggtgcaaggagagaccagccgccaaaacagataatttggagcaaggcagcaagcagccgacagctctatttacctaaaaccctaagggttacactaaatgggccttaactagacgtccagcccaaagtaaaaaaaggccagccgccagccagagaatagctagtcgtccacagcttaattggacgattaatcgtccctggtcgacgactaatcggacgactggacgattagtcgacctaatcgggtcggatgccctggtcggtccactaaaaccgactagaccgactaatcacgattaatcgcgattagtcggacgacttgaaatcattggtgggcagtactttctctcgagaacattgggattttcatgccactctagtttagaattcgtttggagttgtgctttgtccatctttctctgatccaaaaccaagcatgaccatggacccaattgccctcaggctgagacaatcaaaggcacagaatcagaggaatgcatcgaatggaggacagaccataaatcaaccgaccgccaagggattacaaatcatggctgaaggaatctgtgacagactggttattgccacatcaaaaagtagttgccacccccacatcgaggaagacgagcctctgatactacctgacatacccatgattgctgttaagatcaatctgaggatgccagtagaaaaaaaagaaggaaaatcagaggctagatgatctagataacacgaggaagaaccttcctttcctgtctgttctgtttctttaatttctctattttatttcttgctctcactgtccaggctcttggaacttatacgcacgtcttccgcctgggtcccatgggtggttagcccattgtcagttaaatctaggcgttggatttcggacgcctagggctggattcactgtctgttccaggttgcctggccaggacagaatcaagtactgataggacatcagtcattgcaggaaacaatgtttttattataaaaaaacaatgatagcacaattgtttttaaggaatctttcggtgtaatgttctggcagcttccagttacactcatggaatttgcctaaatcttctgaaagtatttggagataattttagcaccatgagtatcttttccctttttgaatgggggtaaccatgggagttctaaaagcacctgaatttgtgctatatacacgtctgtgggggatatctcatgtctaaagcaaaatgtggttgcatggcgctcgtattggtggtgcattttgttgtgctttttgctgataattctttcatttgttctaacataacattgaattttttgcatcatttgttgcttgattttggttatcgcattggttagtaaccattttccagctggaaatttactagactaacacttctttcagttagatttgttctgctgtgacttctatttgacaaaagctgccattttggactactttgtttctatggatttgtacataccataggaatttttgtgtttgaggaaaaatatctgtagtaattgtcatgtgcttcggtaaaattgctagccaaaaaaagaagtcttttattagaaccttgtagtaatttacttgtatagattccccaaaaggcaaaaacccacataatgaaaacaaaatttgcttcttgcacatgctacaccatttgaatattgcaagttgtgacaagcacagtgcatgttgtgctcttagttatgttatgcttttttaagagcctaattaagatctttcagctcattttagtactctctactgacatttttattttctgctaccgaatgtagtgaaagcaactctttcaaaacctgtattcagatagtcctagttatacctttggaatatttgcatagttttgattgtaaggaaactgtttatctgctactaaagctgaatttcttttgcag

SEQ ID NO: 485 - DNA, 4790 bp, Zea mays
  Intron number 1 from transcript GRMZM2G386466_T01 (locus G RMZM2G386466) derived from phytozome v7.0 (chr-ID 2; pos 4 666958 to 4671747 reverse strand)
cgtgaagtactccggcgccaggcacctgtcatcacgtacgtacagtacagaggtggcacgccacagtgtcagcgtcttcaattcttcgccggccagttcgcattcgcatggcattgcattgcattgcattgttgtcgcatgaatagaacacgccgggcgcgtcgctcacccgaaggtgccctcgatgggcgcgatggcgtggtgcgtccactccgacggcagccaccgagcgaggccgaagtccgatatctgaggctcgtagtcggcggtgaggaggatgttggacgccttgatgtcgcggtggatgatccggcgcgcgcagcccttgtggaggtagcgcagcccccgcgcggtgccgacggcgatcccgtgccgctgcttccacgacatggccggcagcttcaggtctgcgcacggttgttcatccacgacaccatcggtgagcggcggcacagtgccgcagagcgagagagcacgcgcgtggacatgcatgggtcgctaggtaggtaggtggtggatggatggatggatggatggaaggacaaggacatgaggacatggacaggatgcacttgccgtggaggttggcggagacggagccgcgggtggagaagtggaagacgaggtgaaggccgcggtcgacgcagcatcccaggagcgcggacacgttggggtggcggacgtggcccaccgtgcccagctccgtaaggaagtccttctccttcttctcgtccgccgcggccgtcggcgccaggcgcttcacggcgacggcgcggccgtcgtccagcaccccgcggtagacctctccgtacccgcccttgcccaccatgttgtctgcggtagcgcggcaatgccggtggccaaagcaaaattaagcgggcgtgaacagcagaagataagacagacagaagcagggcgatggttttaccttggtggaagccattggtggcctggttgagctcctcgtacgagaagcacctccaggtgggcttgttcggcggcgggtcgacgtcgacgcactcctcggcgcactcatcggcgttgctccggcggccgagggacaggagccgcttcaggctccggctccggaggtaattcatctcccactgcgatccaccgagcaatggcaatacccacctagaggtagaagacgggaaggacggccggaggagctagctcagcggagcaaccccatcaatcaattcaatcccctccctcttctcctctccacgccttgctgcctgcgtgacgagacgacgcacgcagaggccagcggacgtattgaaaccggcgtgcgcgagcacgtacgagtaagagtgatgacacggggcggttaaagaagagaggaggaggcgtttcttcaagagcggacaggcattgaattgagtggcggagctcaacccaatggtggagaaggaaggaggtcgctgctctgccccgttgcgcaggagcgcattgaattggacgccgagcagcgaggagagagagagagagagagagagagagagagagagagagagtaactggcgctgccgtgtccgcgcacgctgcgctgccgagccgctctcaactgcacgcgcgagcgagaggcagaagaaagggaggaccgaggacggcgcgagcggggatgtcactgtcgatgccagtgcccgtagccgtagcgagccgagcaggagcaggaaggagggcggcaggcaacagtgcaaacggaggcgggcgctgtggtgtcaaagacagacagacgaacaaggggaacaggcgaacgagcgaccgacgaggccgtcgcggcgggcggccccctttatccggtcctggcgcgggagggagagggacacgggtcgggtttggccggggcccagacgccaacgcaggaggaggagggggcgtgccgcgttctgggtccggggcaccggacgggacgggagcgggctgtggttgtccgggctggtctctcgtgtcgtctcgtctcgcccgtgtttccttcgctggcgcctggcggcctgcgcgtcgctgatgattgccgagcgatcgccccgatccggccgcgcgccagcgccaatgaatgcggccggctgcgttcgtgcgtgtcgcgtgcgtcgcgctgtgactgtgagccctgtgactcgttgggctgagcgtgacatgtcaaccgtctgtcgctcgcgtcccgggcgcgcggctgccgtgaacacgtgacccgccggggtaggggaaggggtgtacaagcagaacggcgcacgcacagtgtccgtgtcaaccagcccgccggatctacgtgacccgattttcacttccaccggagagagagagaaggggatggtaggggtagagttgagaaggttggcttcaagttcaccaaaccgtttgataaatttggctagccggccggctaattggatatcgggaccagccggttagctgttagctgtaacaccgcttccgaattttgtatttgggatattttgtaattttcgaaggattttaatgaaaattttcttagaaatactatgaactattctaagactttccactagaacaaaatttcaaaatacgcagtcggattcaaataaaaaatcgaaccagttttaaaaaattagaaaggggggaaacccttcttagtggaccggctaatcgccctgcaatggcggccagccgagccgagtgagccgattaatcgaccagtgaagttgataagccggcctgtcgagtagtgtttgttcgtactcataatgcacatgcgagctactagaatcggatacttaatgtgtttaacgctagtactccctccgtttcgttttagatgtcgctggatagtgtaaaattgaactattcagcgacaactaaaaagaaacggagggagtagtcattttgcatatccacaatcacaagctactagactcagtctaatggatagttttttgctttctctttaaataaaacgaatggccaggcaagttccaaaagttagtgtcaaggggattttgtgtccatgttttgaatgccttagtgccctccagcccactcgcgatgaatagtgtccatgctatataatgaccattcctagtgcaatgcattgagtgatttggcactaggtagagtgttgtaaaccggtggtgcttgttactcttagaagtttccacatcctagttgtctcggtggctttggcttccgccgtgaagcccatatggaggttgtgcgtggctctggagaaggatttgtaaggggtgttatgcttgacggagagttagtgctagttggatccataacaacgatgggatagagctgtgatggtgatatattgagtagcggtatggtcgcagatcccatatcataacctccaaccttttctaacacccatggagacattagtaagatgtaaaagatttgtttcgtgttacctgcctgtagacctgctcaaacgtcggatcgggtcaagattgggtcgtggacggtttgacgtgtcgggtcgtttcttttgggttgagtcggataaaaaattattgcgggttaaaaattataactcatacccgtctgttacattgatcaggttgagttcaacccaatttttttttgggacgggtcgagttggttgcaaggtttgttaacaaaacatattggaaaataaagaatcgtgtggccatggacttcgccggtggctagcccacgttagtagctggaacaaggggaaacacaggagaggacgatgcgtttagttgggcccaatgggtcttctggggccaatgtccttgcaacgtcaggccacggacaattggattacatcctctctttgagccttgcctttagatccaaactgtgcggtccgagttgggcaaccgatgggccggcccaatgcgacgcagtggcgctcgtgttcgggtacacatagggcatgtttggttcagcttttttctgatcagcttttctaaaaatttggctgtgaggagaatctggctgtggagagatctgagtatcattacgattacgtgtggagaaagataaagttgttcataaggctcaggatcgagaaagtgacggattcctactattacaacgactcaactgattatgtgtttatgttgattttggatggtttttgccccaacgaattttgtagaagctggctgaaaagctgagcgtttggcagtccgcaacagcttttggtggccagaaactgccagaagccgaaacaaacaggcccatacaagcgagagccacgtgctgctgcatgcaggtcgacaccgctgccacggtgccacctgcccgcccgcctaggcgcctaccaacacgtaacgtagcagagtcagccaaccaagcgctacgcgacaccatcgttgcttcttcagctaaacaacatgcgaattttgaccgttggatttggctcacgcttcggtatctgctattcaatcttttcgtattattattattattattattattattattattattattattattattattattattattattattattattattattattattattattattattattattattatcattattattattatcatcatcatcatcatcatcatcattatcatcatcatcatcatcatcatcatcatcattcgtctatttgtttttatgcaatttattaaattatttttctgtacatttttttatagttgcaagtccacgcccaaaatttttgttttcgtctcatccgtttaatactaatcgtttgatatgaaactgattaattaaaaattcacatgacaacaaccttcaaaacacttgaataatagatacacactcttcaaaggccc

SEQ ID NO: 486 - DNA, 1999 bp, Zea mays
  Intron number 1 from transcript GRMZM5G863766_T01 (locus G RMZM5G863766) derived from phytozome v7.0 (chr-ID 8; pos 9 9594155 to 99596153)
gtcaagcactgtcttccattgggatcaaactgcataagtcaaacataatgtaattattgttggtcttacaggagtcatagagtctaagaattttgtttctttctaaaaaaatgtttgcgattatcaccaccaaccaacaggattttgatggacagtaaacaaagacgagaaaaatgtgagattaggtgtcctcaagcagagcatcacatgaccaaagaaattcattgtcaactactaaaatctaaatgtaatgtttggattcactaggatgtatatcaaaactaaaatgtgggttatgtagaaatatttaacatggattcgcttgggtcagtttaataatcacataaagatttaaacagagaatcttactaactttttatcagagtaaataaccctaaaagaatctttatataataactcaggttggcagcctgttcagctctctccttgtgatcaaacaattgtgcactcagtatcagtatcagcaatgcgtggaagcatgatacttgaagttaatgatgacgatgcatacaggttgctcccactcccagacattgactcaagaaatttacaaaatatggatctgccaatccaggcgttggtctcagctgagtgaattaagcttgcactaatttcctttctttcatgttggtctcagggaaaagaagaaaacagaataagggcattatgaataactccaacaaaatttgccagagtgaatgaggcagcaatgttccctattatataaacagaacctagccaaatttgagccttcaaatagagactgcagttgtttatcacttttagactgcagtttggggcgctctgagtagcagcgatctcctgctacttgggcgccagttttagcgtaccctgcagttggcacagcagcaccatgtctccaaagataacacctgcactaccttggtatagaaggggtgaataattttctgggacacgcgcaaatgtgctttgcctctctgtcctgcttcactgcaaggactatgtaagtgtgttgcactcacctacatgtcattatatgtgcaatatctaatgctaatttcctgtttagcacgttattcctcgaacaagcagttattattgatcaaaggctgaattgtaactgcaggtttgaatgtgattctcgatgatgaatgggttcagtgacattcatgtatggcagcataggctgatttactagtgaataaatctgttcaatgatcatttatcactgttgagcactttctcattgcaaagtgatctgtatacttcatgatgtgtgtaattgatcaactgtgaactagttgagctaaattctaggataaaatggatgataccatacttggtcaaggattctaaaagccttttaagccttggatggccattggtttagcaacccgtactgagaatcattagaggataattctgtagcattttttctagttatatttacctgcttattgtgtcaattgccatgatgcttgcttatgacattgtgagtagcataaatctatcctaatgtgctgattaaatgttcatcttgtttactgcaaccttatcgtggttcttgtatgtcttttatttgctaaatctgggaatcaactttagttgctaaaaatgtgccttatcgcacaacaggttgcacttgacaaatcaaaatcaccaaaagcacttctggtagcaaggtaacacccagaaatatgacctattggctacttggtccacgaattttaagcaccacaatgggagcaagttaaacggagccaactgttcttctttctcatataccttcctcctattatttttcaaggacaatcatatccactaactagaatgtaatctttagttagcaaaatgggctattagagtaatgaactgaccggacaaatacacagaattctaaatagattaatgcacacaacatgtaatgtagcaaggaaaacaagtgtgtgaactaaacttaccgcactggaatcttggccgaccacaagaaacaaca

SEQ ID NO: 487 - DNA, 4187 bp, Zea mays
  Intron number 6 from transcript GRMZM2G134329_T04 (locus G RMZM2G134329) derived from phytozome v7.0 (chr-ID 9; pos 1 56201539 to 156205725)
cataatcctgtatgtaagttcttcatttaggttatatccggtatttctggtttcttctattttcacttgtctttacatatatttaagggaatatgacttatgtttaaacaatattattatcctttgaattgccagtttggagtttgccacatgacttcccactttcttgtcttctatgttttctctgttctatattatagttatctatgaaatctctactacttattaacaacctaagagtagtctgcctcctctggttctgccttcccaccgttctgcctcccatcaatctggaccgttcgttctgttgcccacacttcccctcgaacctcctccgtccgtcggttttctctccatcccgcctcgacatcaccctcgatttactttcgatctcgacttggtatcgcaaccgccaccgccaccgcccgtgatgcgctccatccccggctgagtccaacaccgccaccgtggtctccgcagagccgcctcccttgcaccgcagtccggagaccgggacagcttcggcgtcacagtcagcggtcgaccgaagggtgacgagacccgacgaggctctgtaggtggcaggccccgttttcctctacgaccaagaaaattaagaatgaaagacatttccttgagatccgcgtccgaggtttacgggctacaatccgtagtttctgtgtgctgtgaaataatctggcaagatgatgctactcaggtcaggtgtgtggtgcggtgttgtgaagttgaactgaccaggttgagcagagaggccagcccccagctgcaggtgccatagtcgcacttctccggcggccaccagtccaatgtggcgcagacgaagtcgtcgtcggtgacggcgacgacggaccgcgagtccacgaccaccgcctcgccgccggcgaaggcggtggtgctcgtgctcacggtggcggagccggcgagccagaagagcgcccagacgacgcagaagccgaccatcttgagcggcagccctgccgccattccgcgaaattaaaccgacgagaccaagaatcaaggaggaggacaacccgagtggcaggcaacaaggcaggagaaggcttgccgccggagggaaaatgcaagggaaaggaggcagtcccctcttgaggaaattaaaagcgagcccctttgcgcccgggagggaacatggaaggttcttgtcttcttgccagctacaccgtgtaaagcatctcgaggcgggagggagcctcaggtgtggtgtggtgtagtgtggtgcggtcagtgggtgtggccaagagatggatgcagataaacagttcctggtggttggagggctgctgctgctaccgccaccacctttaatggacgcaggctcgacgggccgggcaaggtagtatatggcaacgagagggaggaaggaagcatgcaacgcaaaatgagcactctgattgagcagagcaggagctgtgagcagtcgtatcacgtctcgaggacacggttagttagagcatagctgtcaaatcttcaaccttttgtcatattattatagtatctctatgcaactgctataattttctaatattcagtattgatataatagtatttaaaaaatgatggtacattttgtacagatttaggataccccttcaccaatgtacagagcacaacacttttgtaaccgcacaaggagtgtactgctgttcaaaagaacattttcagcagttctccgttcctacaccaaatatatataaaaaactatatccatgaggatggtgaggctatggaaggtggtagactggctactaccctaggcaggctgcaataatgcgatagtttgtttggttgtctaaaatctaaactatagccaagctccagtagtataaaaagaagtgtggtgtttgatttttagggactaatttttaagtactataatttattagtttttctatttagcaatttatggactaaaatataataagatgtagggactaaaaattactccctaaaaattaaacatgtatgccatatttaagtgtttctagcagactagctacgactatgcagattcttacttatgtgcatagacgtcgaaatactttttcaactgtctctttttttggctaaatctcttaattaaaatatcttttcactaagctaattttatacagtttcaagaaccagactagaccggtcaataccatataaatatggaaatctctatctctactaactattaagacgatagtgtagaccgtcgggatgcccccgcctcccctccacgctcgcacccgccctgttcccctcgcccgcacaaaccgccccatccgtgagccgcgcacgggccatctgcatgccgcatccacccaatcctctcgccgtctatcccctccacgtgaccgccgccccaacccatcccctccccgtccagtgtccgctccctccgcattcccccctttgttatggtctcttgttctccattccttgttttcgtattggcctagggatctgcgtttcaccatatgcagttatcggggatcctgcgtcaggtgcaggacaggcacaagagaatagcggcatcgaaatacattgtgatgatgaagaggagggatctgagaatgcagaacataacaacaacttggaaagcccaaaggaagttgatgcaagtgctgaatcacgagaagcaaatggtaaatcagaaaatctgaaagatgtaactaacttggacaaactgcaagagaagactggtagcagcagctctacagaagcaatcaaagccttagagggattgatggaaacaaacagggactttgaagaactaaaagatttgaatggaagctcagaagaattggaagaagagaataatggcaacatggaaaagctggtagaactcttcttggataaggggttgttggatgaactgaagcccataaaagttgagtcccagcggcgggtacgtgcaacacttagcatcattgacaaaatgatgatctctcgggtagtgaagggtggtaatggtgcaaatgatattcatggaaacgatggagcacaacttacttctattgaagaggaaggaaggactgcagaagtgagtgatgacggagatccagctgaggttgagtcttgtgttgcagagaaggtggaacttggacatgagacaactcatgattctacatgtactgctttggatggaggcaatgatgggtcctattttccttggagggaggagcttgagagcttggttcgcggaggtgtgccaatggctcttagaggagaggtcagaggtgcaactgcaaaaccaattttacaaatcgctgctgtctgctttgtgtgtgagatttgatacttcatgctcacatattgttgacttccctgcagatatggcaagcatttgtgggtgttggtgctcgaaggattcctaggtactacaacaaattgcttgatgacaggactgagacattggatgaaaaggatcttgtggacccagtggtcaatgaacagggaagtgcacccagaaaagttacccagcctgagaaatggaaaggacagacagagaaggttgttttatgcaacagttcgaatttagaggaagcatgccatggttgacaatggggtttgcacagttgtcaatatcgtgtttcatcaacttgagttcgctcaattttttcttgaatatattttttgtagaacaaaattgaattttacaaggtggaatactgattgggaaaaggtagactactgattgggaaagcgctactcccttgtatgaactagctggtcgatgattttgttttccatcctttttgttttcttgacatcagtttgttcattgggaagcatatatgtggaatgatgattaatgtttctgtatattaatttattttatcataacatgttggcgccgtaacaacgtacgggcatacacctagtatgacagaaaaactaatttttgtgtcacatattttagtctacactacttttactatgaaaacaaattgacttgataacataaaatgattgataagtttctcatttttgtgctattttctattcatatttatactgtatcattaaattgtccatgatctattatagtgtttcaacatttactattatttgtttctaccattcctcttatgacataccaatgtaaaaaatgcgtcattgcagcttggaatattcgttctcgtatctgtcatcttagc

SEQ ID NO: 488 - DNA, 3744 bp, Zea mays
  Intron number 4 from transcript GRMZM2G429442_T01 (locus G RMZM2G429442) derived from phytozome v7.0 (chr-ID 9; pos 4 1114004 to 41117747 reverse strand)
ctagatctgtgaaatccactatctctcactttcaggtgagtgcactgacactagcacatgtgcatattgcctttgattacaataaaggtaattttctgtaaaataattactggaggaataattagaatgaaacattttaaatcagatgcctgaaactgttttcctagtatcaagcacatataggataaactaaaatattgcattaattttgattaaagtgatactctgaaaatgtttccgtagaaaatatttgttcttcaaaagcataaccagcaaaatttaaataaattagagaatccctctctatattattgactagcacttggatttaccttcattctgtgtgtataatacaaaattacaaataatctgtaaagttgtaatggatgcattttgggctgcacttctcagagaggagtagtaactccagcagcctgaatgttcagttagttgaggtgcctgcatgttcagttagttgagcatctactgcagcctaaagattatgttgccagcatcttcatttagttaatatatctagttaggaggattagttatgattttgcttgtcagcctgttaggtgctagatttataccaaaggcttcagcaaagagttggttcaagcagaagttgaaacataaatccatcctattcaatgcttctattgaggtcaaaaaaacctccacgtttctgacctactccaagtatccaatctactagttcaaatcacaagtactctccatatgttacggtgtggggtaatgggataactggagctggacgtcgactatggaggccatagtcatgatcggttgagggtgttagagtagaatgtgcttgtatatcaggctacgaacatatcggatcaggggtccacacggttattctataatagaggaagaccttaaccaactctaattagagataggatagaatcatagaatcatgtttgatctgccctagagatagcaaagttataataggagtcagttaaggtagttgtacctgagttggactcccttcatgttataatcctgatggccgggggtatttatagggtgaccaaggggtagtctcctaaggtacaggcttgccctgggttacctgctacatcctaggaatatcctgtacatagtgtctttagggcgattacataccttatattacaggcacccaattacatacccgtaccagcactagtgcgagcctactcctaactagttgggcctccttgcagctatggtggacccaccccttgcggtggcctcaacacattggcctcaagtggggcaggcctccgaagcctttgtcagggattgcgtgcaccgtctgagtgacgtggccgaagtcctcagcatcttctaggccgttcctagatcaatgaggtccttggtagcacgccttcggtcttcgatcggacctcgtgtgctcgacaaggatggcggagtccgcctattaagacttcccctcgccttgttgtctgggcgaagtcctcgccgtgttcttcggagtctttaatggaccaggtggttgtagtcctgatcggtcgtatcgacaggtctattatctgtagggagaagtcttcattgtagtcttcgtggccttcgacgaaccctacattcataggagtgaagtccggtgattgattagatggtttcaactaaaccgatgatcgggttcttgattggccttctcctcaatagccaatatggtgggatactgtatccaaacggccctacaagactatcggggtcatttaaacattattagatactattaaaagccacaatatcgtgttctatggttaaagaggttatgttgttatgactggcatctcctacaccaggcgcagggacattagtggctaggagggctaaggcccacggccaggccacaggccacatgcggctaggagagattagttaaggattagctaataaaaaggagagattatctctagttagttggataagattagataaggattagctaataaaaaagagagatatctctagttagttgaataaggattagaagagatctcatagctcttatccttagatcagataagcatcagctgggatataaatacttgtaagaggtcatctatggaattaagcagaatcagattattctggcttccctgagggagtcaggagttggaatcaatctctcttgcccgcgcagcctaggtcagccacggcgccccagcgccgccgcccccatctccctcgcgcagctgttcatccttataggctaagggagatccctggtaggatccgcaatcctaccatatgtagtcagccgttgatgccttaagggttatggagacttcaatagtgaaaacaatcttcaaaaccacttcagggggttaattagatgagtttcaatagtttgatgggtagaataactggtatgatagttgaaggggtgaagttgataaccaccaatagttaagggggttaagtagactttttctagaaaaaaagacaaaggaaaagtctacataaccccttgacttttagagagtggtctacttcaccctttcaccttcaaaaccggttctttaacccctctcagctttacaaaaccagacaaataaccccctagacagttttaggttgcggttttgatgacattacaccgatttaagtggcaccagttttatctttttttttaattctgccttctagtgtctaaaatttatataattttacacaaaaatcgataattatatattatatttgccctaatttttcctataattttaggagtaacaaattaattactaaaaataaaaaactacttaaagcttaatgtttttgttcctgattcattttttatcttctgaggataaaagttttactgcaactaaataatactattagtaaacttttgaaattttattgattttattaagcaagttaagtggtttttcatctaattactaacaaaattaattttacatttgtttttagaaacagttagcaaacattaataaaatgatctccagtttttacgcagaccttctcttagctaaattaacatatataaatattttcagaattttatgagaactttaaatctagaagtatataaagttctgagaaatatttatgtaaattatggttcagattcaaagttctcaaaatattatgaaaatatttgtgtatattaatttagctaagagaaggtttgtgtaaaaattgaagatcattttattaatgtttggtaagtgtttgtaaaaaatataaaactaatttagttagtaattagaaggaataccaattaacttgtttaataaaattaacgtaaaatttaatagttttgtaataatattatttagctgtagtaaaaaaattagcctcagaaattaataaatgaatcagagtcaaaagtattaatcttttttatgtagttttttgtaattaagccgtactcctaaaatttaagaaaaattagggcaaatataatatttatatactgattttttgtgtaaagttatataattttttggataatattatatgacaaaactggaaaaagacaaaattagtgccacttaaatcagtgccacgtgtcttgattgatgctactttaatctgtttcagtccacctgttattgcattactctctacttcactggtcagccttgattgatgctgctttaatcttttttcagtgcataaatgttatttattcaacaaaaaatgactttttttatacctacagctgagaaatttagt

SEQ ID NO: 489 - DNA, 498 bp, Zea mays
  Intron number 1 from transcript GRMZM2G162800_T03 (locus G RMZM2G162800) derived from phytozome v7.0 (chr-ID 1; pos 1 4926894 to 14927391 reverse strand)
gcatcgtcgaggacgacctttctgagctcctgcaggtcatcgtcctgccttttttccctgatcgcacgtacgttgtatgttatgccgtgtgctgtgctagtaggtggaggtctgggagcactgaaaaacttgtccaaattagtagagaactttcggtattctatgaatttctatttgtagttaatgtgactatctctgcttctggagctacaactacaagtataccaagatgcaaattttcatgtctccttgagccttgcatgcattgtccagaatacaagtatctctaaaaacagcatctctaaaaaccatgtatcagttgaaatgacgccatttcaatatcaattgctacttgtattgatgactaaactagcatttatcagatttgtgctttgggctaatagtttttggcgttttatactaatagatcgattgataataggtattaatctttcttttgcagattctcccgagagatttgcgagataatctacagaa

SEQ ID NO: 490 - DNA, 3573 bp, Zea mays
  Intron number 1 from transcript GRMZM2G310569_T01 (locus G RMZM2G310569) derived from phytozome v7.0 (chr-ID 9; pos 3 14868 to 318440 reverse strand)
ttcctccacgacctcgtcatccaccccgacaacaggtacgtgatcgacgctgttccctgctgtccacgcgatatcgttaatttgctttcgaagcttccagtttcgcgcgctggctgtcggttgttctggaagctggcggcggcgaagcgacgcggcgcgctagatttctcggtttcctccgatcgtatggctccgccgaatcgccccacaattgatcgactgcgagtctaccaccccaaaccaatattgttttcggttttctaaattcatacccttagttctattgtttttatataaaaacgttcatcctctgcttataatatttgaagctccagcggtgaatgtgaatctccaataattttcttttactttttaaagcctttgggttggtcgatttgacgcgtcggctgaggctgtggatcagccaaaaatcctatgcatccgggatacactcatcaatttagaggatgtttggtttatagccactaaattttaacccctccattttatttaattttagtctctaaattgttaaatatataaaatgaaactatattttagttttcgtattttacaatttagtaactatagtaactaaaatagagaaactaaaaattagtctctaaaaactaaacacctccttatattccctcacatctgtcacacacgaacatataaaaaaagagcaaacagtcaaaggttttgatgtctgttcgtgagtctgcaggtagtgaatgtaaagggcttcaaatagatggatttgcatcccacatgcataatgtttttttcccgtagatcactatgcgacattcagctgacggtgaacagactgtgcgtcagcatcccagccgcaaatttctcgctacttgatgatgagcccgccagatacgcaagctactaggttgtagctggacagtcacccaggtcacggggtagactttaacggccacacaaatatgagccttgatccattaaaaaaattgctttaattcaatcacgctgctagctatttctgcacgaaattattttcttttttccctttgtgtttgtgaatgcggattttttttgttgagaaaaccgaatgcagagttttgtgacagagtcgctagatatagccaaataaagcccctgtattgtttcatttgggcaatcgattgtttcagtaaatatgctttctaggatccacacagcacaagaataatgcttgctagattctgcatattagatttgattaatgctaccatgaaacttgtgcctcacaaaatcggccaccacacagggaaaaaaaaaagtgctcggcagcacagagagaacgcatgcaaatcgacgagaagacgaaaaaactgagcgctgaaagtgaattattagaggacatatctagtgcacatgaatttttttatatggtttacatattaaatcaccaatatccatcttagatttaacgttactggttaatcattgaaatttacaaataacaccttacaccactacagtccattacatcggagggtgtccttagcaaatataccaaacaactacagacgttaaatctaaaatgagtggtaatgatttaatatgtgcatcatgtgcactaaaattccatgtgcattagatacgttctcgaattattaatctctcaagaaacgatctaaaaaaaaatcacttccagtatggaaacaaaacctcagttaaagaggcatctgtatgaagcattcgaattttctcagagattgctatactacatttcatccttttgtatgctgggatccttttgtcatcaggcaacatcaaaactatatttaaagcctctcccaacgtgacattccttttttttatttagcatggcgtacagccgtaaagttcccagtgaggaacacgggatcttcttgattcctgactacaatatagataacataggggctatcaacatcggtttacatgtgtgcttagatgttaccatggaatatcaaccattgtaactcaatcacaacaacatctacagtcattttcgacggccactactattttcgagcagttagatgacatccgccgaaagtagcagttataatggttgatatttggtaggtctagccgccaaaaataatatcttattttcgggttttttcggccagaaaccaacgaaaataatatttatgtcacatgcttattttcggtggtttctggccaccgaaaatgactttcgttactgcagtgaatatataacatattcagtcttcaccttatcacaataggacaaataagctatagcttataaaagcacccttcccatgaaggccaaccaggtgtacggcaactgaagaggttaagcactccgagtttgatttggttaattggctgatttggacggatgggtttgaacgggcttgtagaattcatcaggatgctgtcttggactcttaccgagaagctggtagtttatccattgctgaagcatctggggtagctatcatgatgcataggttgctgctgtaaggtcatgtggtgatctccttgacagctatactattattgttgattgggacgtccttagtttcgattagcggtgatctcacatgatcaaatctgagttagtgattttttttttgtttatattcaagtttgaccaccagcagtattacatttcgcttcttgtaccttacaaataattttaattccacgcctaatagtaacagctggttgcgcagaaaattacatttttgatgttaatggagtgttgtacaagtcatttgactggcaggaggacattggtgacatactaaatattaacaggaattttaacaactattgatctaataagtaagtagcctgagtaaagaaaaaaaatcgaattcaacaaatccacagacaattggcctcatattcataacatgtaactagtaagtagctagcctgagtatgttaccttgtttcaccgttttctagtgattgtgacagaagatgaggtggtgtgcaccattcctttagcgtcactcatatttgtctcatttgaaatggtcgtgctagtttattgccagaaggattattagattggtgcataacaagaggatcccactcacggccactaagatcacctcagacatgtggatacgctcataagaatgggatgtgtgtatgaactcacctggaaccaatttggtctacctacttcttttgacctaactagcaagcgtcgtgtgtcgtgataggtgctgtctctcagcaccataccttactaagctacaaaatcatatggctgttttactagtgaattgaacattttcttttgctttcaataaaatatattcttgtcaacttggagcctgctttacctaaataatctgacaaatggtgaagcactatatagccagttacttaaatcgattgatcaattggtgattttcactttgagcttcatggagagcacctaggcttcccttgtataatgtaactaatactaattcttaccattctggccaactcctacaacgaatttttattactgtctaaacgtgtatatggtcacaaggatgatagtttactgaatttgtgaattacttttcgatttttcttcag

SEQ ID NO: 491 - DNA, 1669 bp, Zea mays
  Intron number 1 from transcript AC199624.4_FGT007 (locus A C199624.4_FG007) derived from phytozome v7.0 (chr-ID 7; po s 2555417 to 2557085 reverse strand)
cgcagaccagggcggctctactttctcgccgacgcgtaaggccgccatgctgaaccagttccagcagcagtagagcttgttgtctcctcgggccacggttgtccctgagctagtgtctccgatgagctccaggttgctctcggcccttgcgcagcgggagaagatgcagcagcaaacgctgagaagtatgagctctcgtgacctgggctccggcgcctccgtcctggttggctctcaagcgatcctagtccttggttacagcagggacaaaattgacttttaccatacctaatggaaggtaacagagcgcgaggcattaactgttccaatatggcgcgactgtgagctccagaataccaaaatggcgatgcgcagctgcggagtaataaagtggcgaagccgcacgacgagaatgttacaatctcaaataactcagcactcttagggtgcatatggttacgtgacagtcaggacagggacatcccctgacatcctctctcgtccctccaattttgagggacaactggggacaacactgagatagtcctgtcccaacctttgactctgaaccaaacaacattatttgagggatcgtctcatcctgtcccgtcctgtcattgcaacttgaaagtcgcctaaataggggtgaataggcaaatctgaaatagtgcagaattgaactagtttgcataatgtaagtgcaaaggttgcttggaattgaaaccaatatacttatttcaattgatgtgcatggatggttttcttcttatttaaaattttggaccacgcttgcaccacttgttttgtttttgcaaatctttgtaaaattcattttcaaaaacttttgcaaatagtcaaagatacatgaataaaattgagagaagcatttacaagatttgaaattttctcccccagtttcaaatgcttttcctttgacttaaacaaaactccccctaaataaaattctcctcttagtgttcaagagggttttgcaagttttgaagatactactttctcccctttttgaacataataagatatcaattaaaaaacttcatttttaaaattcggtggtggtgcggtccttttgctttgggctcatactttcttcccctttggcatgaatcgccaaaaatggatacttgagtgaaatataagcccttgttccttctctcccttaggcaaataatatatgagtgaagattataccaaagtggagaactgtgcggagcgacggcgaaggatgagtgattcgatggagtgaagtggaagcctttgtcttcgccgatgactccatttccctttcaatctatgacttagcatgagatacacttgaagaacatattagtcatagcacatgaaagagatatgatcaaaggtacatatctctttcatgtaccttagatgagaaaacacttagatgagctaaataaaactcccagcagtgatctaaaatcaagaactaaacttgttttgtaggtttatgcatccgggggctcaagttggatcatcgatagcgggtgcacaaaccacatgactggggagaaaagaatgttctcctcctacgagaaaaaccaagatcccaaagagctatctcgtacttttgggcagacattctgctcttgaacgtctaggcccaaggtctgaagttcagcctaggaaggaaggc

SEQ ID NO: 492 - DNA, 2492 bp, Zea mays
  Intron number 4 from transcript GRMZM2G099580_T01 (locus G RMZM2G099580) derived from phytozome v7.0 (chr-ID 2; pos 9 4562980 to 94565471)
atctcgaagctctaagcctgccagcgttgggtcaggtactgtcttctcaactctacaaactggattacctaattttcataacttctcaaatggtgtcatagttttaatcaacagttcacttgatttgacgatttccccccaaagataacacacaagacttgcttataactcattttttaacaatatatattacgtattactgctgaagcaacaaatgtaggtttcaattttgaacaacacacactttgtactacttgagttgcaaatttgctttaaaagcctaagaaacctatcatcaacattctatcaacactttatcatatctgttacgttagtcctattacctctgcttttgttagccactaaatttgatattaggcatttcacttttattctgaacattggtattcttctttcttagggggttgacatgcaactgttgtcgccacttgcaccgcctcctctctagcagcaactgttgttgccgccgcctcaccgcgtgggaacgggagcaaaacctcgcgctgacgatgtacctggcgcggtggtgcaaccgtacccgcacggccaccgccgcgcgtcatcgaggcacgcggccccgtccctgtcgtgccagtccatggaccccaccgtcgtcgtgcgtagcaagtaccaataccatcctcgtaaggttgagttcagctgcaagagcacactggcgccatctgcacctacatcagagctccgagtggcggtatgagcctcgcactacctctctgccatcaggcattgccgtgcaaggttcctttcttacttccgctatttctgtcaacagtacttctcacaaggcctcatttcaaccacaacacattctctaggtgttcctaatgaagggaagaatacaaagtaggtagcaattacctttatctaacaaatttttgcaagtgatatatcggtcgtttgtgcacaacagaagagcaatatttattacaactaatatattgcattcagtcaagcagacaactgaagatgctagaaaatgttaccttgaaaaaaatgatcataccattacaagcaagtatataggggtttcctctctgaaccttaagctgtaactctaatatttcttgatctcaactcctatcctcaagtcataataactgagacgtgagtcgttaattggtttattaccagaccatgcattgtttggatgcaagtatggattgtagatgtgtaaccaaaaacaggaatttttttaaaaaaatccaaaaccaagattctgtctatcagtggatattaccaaacaaacggcatcgaactgctacagcatacaacctgcctaaagttctcccaagcatacttagcgctccatctgtgcactcctaagtaaagggtgaacatttcacttctggaactcagttgcatgctccggtaaacctcattcttcagtacaaagatttccatgtctattatgtgatgttctaattatcaattgtttgctatttgaaaatactagaatttgttgtgcaatcatgtctacaaataatttgaaattatcctgtgcttttttcaattaacagaattttgattttttagacttcttttctagatgctaagttgaacatatagagtagtttttagtgcttgcctatgtggttaatcatacaatataggtttttcaagctcgtattttggatgcatgctattgttactttgttagtgtgttcacagattttgtgttccgctatgcaaataaccacctcatagccttatgccatgccacacctattttagagaatctgaagatagcttgcctcacttcatagacatgtaattttttcaagtttcatgttttaccccattaagtcattgtttgtctaaaccattgctcagatgttgtatgtatgtctgttggatatctcagttgttatcacaaccatatgtactctctcaaaacattctgcaattgtttaactaggtgctagtgtcttgcaaaagttgtggtatgtgtacatagaagtcactgatgattcctattttcaggttgctgtggagaagtttgtgagtttatctattctgataatggaactgtaaccatggtatatcatgtgaatatttaaaggaactgatagagaggtaaactttctctctttttctctacagaagtacccatttgtttaatcaatcttcatagtggttttgttgtatcgatacatatttaaagtggcacttctaagttatattattcacactaactacaccactttttttttgaaatcaacaagaatagaaactcatgttatggtcttgtcatttgataataaattgggatagtagatgaagccttggacaattgaaccatccaaaagaaagtcacatttgagttgaaccttgggcagttcaactgttcatctactgaatcataatctgttttgaggtactaaatcaatctcctactctacctagaattctcgttgatacaattttaaatttgtagatacaatcagtctcaa

SEQ ID NO: 493 - DNA, 2066 bp, Zea mays
  Intron number 3 from transcript GRMZM2G356355_T01 (locus G RMZM2G356355) derived from phytozome v7.0 (chr-ID 4; pos 2 06501822 to 206503887)
aacaggttctattagtgtgtcattcaataatttccttctgagaatgagatttacatattttggtaatttatctgctttttccttttggaactgcatgattcatgactgatgagataggattatatcaaactatattgtcacttatggttgaggactgctctatagttgaagtctgtgattctcattgaaacatccttttttgatattattatattaattatgctatcgtagtagcttctgctttgttgtattttccttcaacatgaactaatacatacacaattgttttgtgacaaatggtcatcaatgctaaaccagacttgtccaatttttaaatttgtaaactcaacttaaccaaatgatacttggtacataatgttagttgtatttttgtagctgccgtggggaaggatatagctgatgaaattgacagagaaaccgaccattcaaagcaaatatcacatgtccctatccatttaagcatattttctccccatggtaagatgaaaactcttgcagagttcattgttactgtcgcaggatatagctgatcaaactaacagagaaactgacaattcaaagcaaatatcacatgtccctatccatttaagcatattttctccccatggtaagatgcaaactcttgcagagttcattgttactatcgcattatcacatctcaattgttcgcttcaatgagattgttgtttgttgcaaaggatttatgggtttcctttagcttgtcgactctattgtagttgtaggttgggcagctataccgtgtttgaatcaagttgtgtggtttatttgatatagttccatgtcccttatttttaattgtgtttgacaattttacattcttgtagttcagcagttctgaatcttactcttattgctcttcctgggcttacttaagtagcagttggtaagtgatcatcagttactttcaaacccatatcagataggttaacaagaagctattggtgctccactaagaaaaatagttgttatttgttgatagtggcttcatagtttggcatataacttatcaagtgcaatgttattatgctataaacatttgtggtgcaaacatttgaggcacctactgacgtcaaagttttgaaacaacaagttcatgttccatcttttaacaaaatcctaatggattatgtagggttatataagctcaacttgagcaaatgtaacttccaactactttcagatgagtaaggtctttacaaattcattggtcgtataactgttcccaccattttttgtcaattcaagaccaacatatcaaacttcataggatttattatgtaaataagtaatccaggtttgtgtatgtatgatgacagaaaaacaatatccacaacatgttgatttgtgccaaccgtcccatatatgagtgttagattggatttgactgatatgcttaatgggaatgagatggtgaggactaaagagcatggaagcacatctatttgattattgttgggcattaaacaaaagcaataacattcacttagtatagtctttgaaatgttgcacttgttagagaagcaaatcagcaaacaattgacatacacgaacaaacttttgcagcttccctatgtagctttactgctaagtgcaactggatactgcaatgatgatctatgcgagcatgtcccctagcggctttcgacatgcctgcacctcatcgtagccactgataccaaccattcctttgcccgcctcaaagcgcaggcattcaaaccaaaacaaaggcacaagaggagaaaagaaactaatctcaagaaattcttgtggtcttttgttaccaaatgtggtcttttgttctgaattctttataaactaatctaaagaaatatttttatgaaatggtttctggtccatttctctccaccagcatttgaccaaatccatgaaatgagatgttccgatatcacttcaacttgaaacttctaatcttgaatttttgatagccagtgttgctgctttcttaattgccttcctttttgattgtagggtctcaataactggggtcttggactacaggtaca

SEQ ID NO: 494 - DNA, 1071 bp, Zea mays
  Intron number 3 from transcript GRMZM2G113640_T02 (locus G RMZM2G113640) derived from phytozome v7.0 (chr-ID 6; pos 7 8202447 to 78203517 reverse strand)
ctgctgatctggaggtatgacaatgtttttgtttttcagttttccactttaactattcctttactctgaattggagaacccttcactttatttccccgcttgtgttttaacctgttaatggttctgacttgtatcaataccaaactctgtataatattttagatttatagacaatattctcacatatatgtggtgcaaaatgctaacctgcaccttcctgtcaaggcttgctgaaagttgtggataactgcaatactaaatcacctattagtgtgtttttcaagcaaagctaccagcttagttgttatttcttggtagtagtatgttggataaatttttacctaccaactggtgataggtaaaattagatattcttcaatttggaagttctgttgtcatgtaaaacatagatgtatggattctatgttgtcatcctgtgaggggccgattgcacatatttacatgtttgcagcctgtccacctttgttcaaaatcagcatgtagtcttgtaagctgagttcagaggccatgtttgagttattctatatattgaagtcttccttccagataacaacatcatataatctgaagccagtggtagttgataattgcaactaataaagttaaaatcagatgaaagctggatcattgggtacacccagttgcgccatatagccatgggcattagtgaatgcagtttgtcgatggttgacaaaacttatgtttgcgcttgtagaaattagttgtccgatggtggaggcatggggccacctaaatcttgtcataacagaacagtgcttctttgttgttaaattgggtgcacctaagcaattataatttcgcttttattggcttctctgatgttcttgcatgaaacataaaaatcccatggtcatgttaaaacacatgttcataaagcagagctgaaagtaatatttggtgactcttgctaaaatttaaatgaccatttgtacctaactttattttctcaaacttgtgaatgacatgtattttttattattttttgattttgcagctggacatcgatttagtttggtctgacataaagaa

SEQ ID NO: 495 - DNA, 1906 bp, Zea mays
  Intron number 1 from transcript GRMZM2G063522_T01 (locus G RMZM2G063522) derived from phytozome v7.0 (chr-ID 5; pos 4 3419479 to 43421384 reverse strand)
cgatctcaacaagtgcgagccctgggaccttcccggtatgtaagacgacggcgcctacacatgctaatataacttgcttgttcctgtccttgatttctggccaagattgatatgatcgagcttttccccttgccaagtccttaattgcgcagcgaattcttcttccttccttcccttcccttcccttcctcttgggtttttgaattaatcccccctgctgtgtgagagcgctattaattattctctttgggttctgatctgttattatgttatgtgttcctgatgactaatgattgaattggtccctcaaataatcctttatgttatgccaatcaaagatttttttttaatgagaaagtagctgtacgatctgtgattatccgttccgacatactgatacacaagcaagtctactacacggcggcttgcatgtatcatccaggatacgcttggcgtgatcacgtctgtttgcaataaggatgccaatcatggcacgcccatgtcctgctgtcgttggctcaccgatctacaagaataatacatatactaatatacatctatacttgtactagccaataagatctcaaaaaaaaaaaaacagctgccatatgccttcttctctccattattagccagactactactactctactagtagccatgtattccaagaaaattctctttgttccttttccctacatccctgcgtgttcctcctccaaatggcacaaaagcatactcctacacacatgcatgcatacagccatgtacttttgattcgattaattgcatgggcgcatcgaaatccaagatgcatgaataaccacgagtgtactgtgcatgctagttgaaactgtgtgtcccactccgagccataagtgaacgaagagaccatgacatcctctcctgcaactttcaccgatcaacttgccaagaatccctttcttttctttccttcaattcaatcgtcgcgcttatccctttctttttcgccctcttttcggagtgtgcccatgccatatcggttttcttttttccggagcatttaataagcagctgctgtatttatgggatagcttattccttcttttgagaagtctttgatgatctaaagcgtaaacaaaatcagagtcagacctaagctacatacatatgtactatatatatatttatatgtgcaacaatagctgaggcgagacagtctgcaagcaaatccttgcacgtacgtattttgtttttttaaaaagaaaagttcagctggatcagtacactaagctagctgtttaacctatatatatgctcgctgcatccagaaaatctaccgagaactataatttcacacgtcttgtctgctgcctgctgcctcccttgtcgccttcctttcctcatataacagaagggtattcgcactgccaagactttgtttggccccatcttggcattctatccctcatctgtccctgttgctgccatgctatcaaatattctctcactttgcctcatccttgaagggaattaacagccaaatggatggggacaaacaccaaaagaaggcctctcactttgctattagtagaatactgcgccacaaattcttgtcaaaataaaataagatatttattcaattcatgaataacatatattttttttcttaattctgccttgattccctctccccattacactaaattaatgaatacgtgttggctcagctgggtttacaaatttcttttatctataagcagattaatgattgtgtttattgttgattgtacgtattccgcctgtttacatctaatataagtaattattattaaccttcttgtctgttagtttaataagtaacaggttattattttcctcaaattcagacatcgcgtgcattggtggaaaagagtggtatttc

SEQ ID NO: 496 - DNA, 1644 bp, Zea mays
  Intron number 1 from transcript GRMZM2G062452_T01 (locus G RMZM2G062452) derived from phytozome v7.0 (chr-ID 6; pos 1 47688264 to 147689907 reverse strand)
cgctgcgtccgggatctgcgcccagttcaccgcaggttagcgctctcgatctgcttgttaaccgtttgattcggggcgttgcgggagagggtcacagcgagatctagttgaagtcggggcggggattggggaatcgctaccaatattgtctgccttgaacatattcccaattccctcctgtattttgactctaattgaattgtagacggcactttcgttgacaattattgggtggctagggaggatgaatgccgtctccggtgggagtttgtgaagttatgtatgacgagcaggttatatgcttaagttcgggagattggaggcttggtcgtaccctgagcccaatggatccgatttcagcttacaggcattatgatctagagtgctaaagccacatagttggtccttgtgtgagataaagttatgaaagttaaatgtagagacccccttagcacaagataaaccattttggcctagaaaaaaaaggatggttaaatgttagtgatgtatcttaaatattataagtttttggattgacatcttaacaacacaaatctccaattatattacttcctagttcctacaaccttgaatctggaaaaaaaagacacacaactattgctacaatttcgattcttcgaacttcaagtgatgaaatttgggtttgccccgttattaaaaaaaataaccaggaagttgtacactcctatctactaccccctgaattgaatgtggaacttggccacgttcctcgttccggaaatgttcgtttcgttccagaaacacgggaacaatctcattcacgtagtgctaaaacctagttctagtagtgtaccgcataccacattcctgttcctcgatcacatcgatacaggaacctggttaccagttcagtcaattgaaataccaaagtcttcatttggttcgattaaacttcagaaggttaagataaaactaactggggttaaatggccaggcctgtggttatttatactacaaaagcccaatagacaatttacaattgatgaatgtggcgcgagtgtgaaaaatgcttgctgttttgcatgatactttataaacaatgaatctgttatttgaagtaacaaaatattcgcagtattccttttaagaacatgataaatgtttttaagctgaccatggctggcctggttatactgtctaggacttctacctagccagctagtgttttatgtgcatagtaccatctaaaattggttttgctgccagcactctgtgtaagttctgcacatgactgggtaatgagacgtggttggtgcagttggaaactctaatgctaggtccactgatcaggaaacgatgactcatcattaagatttgataacaatacacttaccttttaactactgagtactgaaaaatgtttatgtttcttatatgctataccatttttggattcttgaagacagtaagttatataattgtgatgtgatgtccctttcttgttgttgttatgttgcttcattttccttctgttaaaatctgtgcaagtgcagactaacaaaatataggtgtctattcaagtattaaacagactttcacttttagacaactaactgcctacaatatttgcagtgctagctggtgatccccaaacatccaacg

SEQ ID NO: 497 - DNA, 6411 bp, Zea mays
  Intron number 2 from transcript GRMZM2G350265_T01 (locus G RMZM2G350265) derived from phytozome v7.0 (chr-ID 8; pos 1 13292065 to 113298475)
gtaacttaaaaacagctgcacaggctcttggtctggtaagtagtttctgttaggaatgcaacttagatctattgttatgtgaagggctggatataaagatgtacaaagtgcagatactgccctatgctagtgactaaaagggtctgtttgcttcctaccctggaaagcacatttggctaggcagcaactcaaggcgtttgattgggtcggatctgcttgcctagctgcgactactaggcaagggtgcaaaccaaacatgccctgagagcatctctagtcattccccaatacaaatccccaataaagtggtaatgactactgtaatagtctcctatatgtacaaagtgtaggaggtcaagcacggacaacatatctggtccgctctggtttgctgagttggaacccaagtaggaggtcgagcatgaacaacgatatctggttcttgagcatgatcatgccgatgtgcacaatgtgcatggccccgcatatggtgaagatggggttgtgccatgattacccctagtcgtcgatgaagcccttccccaccatctagggtgccacagaatagctctggcatgaaggtaccatccaacacaagatactcgtacgagatactctgcttggtcattgctccccactatggtagcttgacccccgcagcatgagcgcaactgatcatccagcacacacacgacgctgaagtaggtggtgacatcatggtacctgtgcttgagcacttggtgtagtgcatgccacttgttgtggccgatctctcacaggcggcgcctgccatggtggagtggaccgatgagcacttgcagcatgtaggcgcactcatcaccatcgcagaagcacttgggcacttggtacacgaacatgcatgcctaggggctagccgtcaccttagcatgctcttgcgctagcttcttgcagatggcgatcacccatgccgagtcctgcacattggggctatggcgctgtgtctaggattgccttgacctagcaggtgatattgttctgactggcgctagagagcaggaccaatgctagtgacaatgttcattgttacttgttagtgagccgcacgacaggtcccgtggtcactatggcaacgaggacttttgtagcttggcgctgacgagcttgaccgtggtgaggtccagctgaggactttcttattgaaggcggtgaccatcgatggtggctatcaagattggtcctgggcattgggggtgacgccgaagaataatagaagtgttattttgccatgggaagggtggcacttccgctgaagccgtatagcggttctcggcttgctgcaattgttgtggttgatcccgtgtgatcaaaggcatgcagaaagatgatatctgcctggctactgctgttggctaggactttgtgcatatgccatcttgctatgttgcatttgatgaccatgacgtctacatgtggggcacttcaaagattcgtgtcccttgtatcgaaggttaggaggacatgcgacatcttgtttgtatcactggtccggtgactacaacatgattgacccttttgtaagtcttttcgttgccttttattttcgaagtctatgctagacccgccagatatcatgtttattatgccgtgaactgtcgattgttggaagtgaccttcatctttgggaggtgggggtgtatgatttgagggggagggtggagttggatcctttcttggtgggatagctggggtggtagtttgggggaaatgagggtaaggttgtgtgttttggtagtgagggggattgctgttggtatgaagtgtgggcgatggtctttgtcggctagtctggaattgatctggccattctttccttggcctctttggtgacggggcaatccctagttgaatgcccgacgtcctctccatggaagacacaatatgaccttcgctcttgtttggatcctctgtcgctgcctttgtcggccctcgccccccttgttgagtgcttggtatgctcttggttgcaaggcgtcccttagctaggttgctggtgatgagtgatgctattgatttggggttgttggcggtattgcggctgctggtttcttgtccaggatcgctgttggcttgcggagtgtcctttggcttccgctgtgtttctagctttctgtagtgcaactcctcagagcatgcaattcttttgaagagctggtacaactcttggagtgacgggtgggtccttggtgcagtgactgtataagtgtcgtgctcgaaggtcgctgatggcgtaatagactgcgatgtggtcttcgatcgatggcagttgtgacttgagcaggaggaatttattgtagtaatctcaaagactttctttctcttgctgcttgcagaggcaattatgcgagggcattggtgtctggctggtagccttggaagttaaggaggaatttattttgaagggcccgccacgagtcaatggataggggtggcaatcttgagtaccatgtcaatgctaggccttctagtgctatgatgaaagacttcattgttgcattatcgttccctcctggtgaagccacttatgttggttatctgttaagattccaaaagggaaacaaaacagggcaacacaattaaaataacataatcccttccccctttgattctctcgtgggaaaaagacaagtcagagggagaaggtaataaacaaacataagtagatgataaatcaaaacatagattcaatttcttctcattccttttattgtacttttttaccaacttccttcggaatgtccgaaggtgaacaaagaatgaacatacttcacagcttcagatgttgagcaagtcgagaagaaatgtgtgcctcgagctatccaaaaagacccccctttcatgggcattgtactcctatttgtaagggaaacatggcgtatagcttcgtatgaaattacacttatgacctaaagtcctatatataagagttcactaagggtgtcactgttttttcctcttaggtgacgcatagcacacattgcttgattctttcttcgtctccttgctatctacttcagatgctcttaggtgcttcagctaatcaccgatgtcaaagcttctactcgctcctttagcctgcgggacaatactgtgatgaaggccactatcctaaaacaaacatgaagataactgaggtttgttaatttgaggacctttggcaaaggcacatctccaacaactgccatctggtaactcatgatgtacttggacttgagtgcggtgtctttttttctttaattaggcgttgtagttctgcttggacttgagtgcggtgtcttttggctgctagggcctctttatgcttttgtaggtgttcatttctcatacgaaggctctggagcagttgtttttcattattgacgtcgagatcctcttcatctgggtaacttgtgtggtccttcttgacgttgggatgggaaggcattggcctcttgtgtcgatcctagactgagatcgtgggcctaaggaaagaagacatggattggtcctcgtctggctgaggattggatggttggcctcttgataggttgggctagattttggctgtgtaagggtggctttaggggttgaaaagggtgtgacgagccccccctgagctgtttatgtggacacttcctttggggattggattgtttgatggctcattgcggtctagggaggggggctcactcctgctggttggacaatgaaggctgccttcgcctttattgtttgactttgatcggcgaaggtaacctttgcttttggggtgttgtcaaagacgactgccttcgtcgtcgcgaacttcgaagcatgctgtgattgggtgttcatcttcttgggaggcacaaatgttgaattctaacaggtgggaaccaaacaagaggaacaaatagggcaaaacaacgagacaaattgggaaacagtggttcacaaatgtcttgtcaaccgtcccctcaccccattcggacaggggtagtagggtaacgaaggggtagcccccctaaagtacttgtttgccctttagtacaacactttaatttgaggttgttacagtccaagtattacatgcacccatttctgtaccttgtttagtgtaatagagtgcacgatgccgactgatgcccccacaacaggtggcccatcgcttacatctcttcgacgctatttctaagtgtggacactctttgcttgagatccaagcctaaggcctcccgcaatccgtatccaggccttgcctgcctgtccagtgagcggtgaactttctcatgatgcgatcttcgtcatggccttcacaactcacgttggagaagtggcggtcatagacgtcgacaaccatcaaagggttttgctgtgttgggcgaagtctgatggaataagccttgtggcctcttgtggaggactgcaatatcagtcttttgcatgtctttgctgcagccttgggtagaggacaacatctcagtcaggacatcatctcagtcttcagtctttgttgccttggtggaggactgcaatctttgggacgtggaggcgatcgcgctaagcccaggcgaggagcagtagacacaggaggcccatgtgccccagatgtggccttggttgcacgtggttgtgtacaagagtcgctggggagtcatgtcgaaggaaaaacatgatgccactagaggagccatcatagggtcaatgaaggagagtaagaactcaaaattccatggtgagctcttcaaggtggaggttgttgtgcgcctgcaaaaaagaaaggaaggggcatcgacgataaagatgaagcacgataacttcaaaacaactgttgagactatagaggacattgaggacgaggctgtggttggagactggctcgccgaggtcacaaagggcgtcaaccatgcctttgagcttatggcagtagttggtgattgtgaggtccccttgggtgaaggtgcgatgggcgacattgaggaagacgacacgagttttgcgattggccaattgctgaataattgactcgaggtcaagcgaggcggcgtgagtggaggtgccacgcccaatgacaacattgacaagatcattggagatggtgttgacgatccacgttcacacgacgcaatccatgtggacctaggggagtcgggtagaaacggtctagaggacatggccctcaagggactatcgaccaatggcgaggtggaacgcctcttgccagcaggcatagaacgtcgaggacgagaggcatgaacacatgaatgtgctgcatgacaataacctatatgtactatggagattgagtgcgacgacctaagattgaggggcgacgacttttcacgaagaagggcgttgtggatgtctggtgcatcggcggtggatgcgtcgttcttgaggttgtcctcatcaaggttggtgtcgttcggaggtggctcagatgcgatcgagggcggcgtggatgctatcatcgcgctttgcctaggctaggcggcctaggccatgcactcgcgctccttggcaaggcgagcaacatcaccctgttggagagcagcaacgacgattgtgtacatgttggcggctacgctagaagcagcgacagtggtagcgcaggagggttgctagccatagcagccgtcaagaagcgaaaggctaaacctaggcaaatgataccatgtatatatgtgtctatatatatactgaacttgtcagtggatgctcttaggttgatcaactttgaaaatgcatttctaggtcattgaactttttaagtgatgtacacacccctaaacttatacaaatggtgcatcacaattctatttttgggactatgccaaccactgcattgtgccacttaacaagttcagggacctaaaaatgaatttttaaagttcgtggacctaaatagtattgcttgacaagtttagggctgctcatacatttaactcatgtcacatgcacgcacacatatttggcagcaggcctcgcgcgtacgcgtgcatgcatgcggcatacaacccttgctcatgcaggacacgaaaaccaataatcgtttttagtttgtttttttgttatatcttctaattaaaagatttaatcatcgaaccgattttatatttgtgtttctgagatttttatgaacaaaactagaccactcatactatatatatttaaatttatgaaattgtctctagttgagttggttggttaggtgatgagtagccctgaatccctgatgtcttgagtgactcttcgtgggagcgaattttaggttgtggttagaagacctcttcgtctgtcccacgccaatgcacgtctctattaaaaacttagacaccaattgcacaagttctattaaaaactctagacaccattttatcttattattgtcctgacttatgcagagtttgccaa

SEQ ID NO: 498 - DNA, 4403 bp, Zea mays
  Intron number 2 from transcript GRMZM2G148693_T01 (locus G RMZM2G148693) derived from phytozome v7.0 (chr-ID 2; pos 2 35848236 to 235852638)
aaaaggctcttatttcagctgaatctgaaagtgaggtaagatcacatgttgtcaaatttgagatgcatcttacatttgtttcatgcggcaagacgccgccaatgcttcattgttatctccgcttgtatacgagtacgatcactcgcatatatatgtcaatatcatatatatggaatttttcttgtgtgttttatcataagcttgatccgaacagcttaacctaattaaaggctgtaggatactaggatgcccttgtattttatgttaaatactatcaactggacctttgaacgttcacattgcatatactgtaaaagagggtatgtgtagttacctggactcatcatatgatcaaaatagcatatggaaatatgagcaactcgatgtggttctgttatacctgttttttcaagcttacaaaaccaggtgatgggtggatcccaagtttgggaaagtgtacataataccacaacatcattacattctgtccatttgaagtcttgactcttgactctcttgactgaacctggtaattcatttgaatgttaacattcaaataatattaaatgtgttttctgtgtatttttacgggttactatacaatgtaattccttgagtactgcatgtagctgcattatattctaaacttgttgtatctatgaacttactacaaagtgataacaatgtcttagtcatagcacaaaacaaggtactattatttgggagttggggctttcttttttatggcctttgaactcaaatgtgtctctgtatatgtgggtgtaacgagtttttctaatttttagtcatcaatcttgtatatttggttaccgagcatcatcatctgagagaaataacaagaacctctatgaactaatttagttttgtttccagaaatttaatcatggaagtccttttcttaataagacgtgaggcgaaaggacttctaactaagttggttaggtggtataagtagcactcttcaggtcctgagtttgactccccataagagcgaattttcaggctgtagtttaaaaacattctctcacctgtgcaaaagcaccaaagcacaggtctaaggcccggcctcgatcttggtcgtttatcacatgggctacgatgttgctgtgtattggtgacataggggttttctcaacctgtatgcgaaggtctcattcttaatataatacctggggctgtcttaccccttccccgcccgcccgcaggtcgagtttttttaataagacatgtgatggagcagtatatggagtagaagaaagacctacatatggtgctcattaatatggataagtcttataataaaataccaaggaacgttatatgttaggctttaaacaaatataaagttctaacgaatcatgttggactcattaattatatgtacaacgataatgtgactagtgttcgcttaagttatgggaacatagatgactttttgattagaaaaactacatcgaaggtcaacttttgagctcttacttttttttccttggtgatggataaaaccataagagatataagaggatatcgatgaaagacgagcaggagtaaatagaaaactagagttatgtcagaagattttagagtccaaagattttagactaaatataactaaaatcaaatacactagacgtgacttcgacactaagactgaacccaacttggttatgcatcgtgcgaggcacagtgtttttgcctcttcgcttggcactgtccacagtgaatcacggttccaatacaggaggcatacaagagaggcattttgcattgcccgtgaaaatggataccctctctctcctcaatgctcgcctgtgcgcgcccatgggagcaacagaccgtacttagaatcatttaatacacactagcagacagagaggggcagcgccaacggtgccatttggttgcccaaatgaatgtccgattgaaagctctatccttttgcgtggccatccaacattgtagcacgaagcaacggtaccatttgtctgtcgatttttttttcgaaaggaccatttgtctgtcgatttgtgtgtgaccttctggggtcagtctaaggaagtagatgttattttagaaagtcaaggcccaaaaaataccttttgatatttaggatcaatgataaagggagatagggatattgataaagatattagtcataaaatcaaaacgggataaagtgacgccaaagcatatggcgttttatgtgacaagaggtaccacaaaagctgaaaagcaagttttataggatgccaattagacttgctatgttatatggtgcagaatgttggcttgtaaaaagacgtaatatttggtagataattgttgtgaaaatatatatgttatgttagatttgtgtccataaagatgggattgaatctaaaacgatgatatatgtgataggctaaggatatcatcaattgaaaaaaagcttgtccaataccgattgtgatggttttgacatgtataatagagacctccagatacaccacaacgtagtgggatcttaaggagcaatagagacctccagatacaccacaacgtagtagtgggatcttaaggagcaatagtaataggaagagaggtaggagaaggccaaagttaatatagaaagaggcagtaaatagagacttgaaagaatagaatgtatccaaatatttagtgttctatccacgtgtctgaaccttgatatatggcttctgtcgggtttcgactctagtctatcctaatttgcttgggactaaaaagctttgttgttattgtggttgttgtaatattgtatatttggataaatattattagtcctgtaattttaaatgtacagtcatcaaaatttgaagttaaatgtcttccactttctgtgataactataactctttatgagactgctaatataagtcgtcctcaaaataattggctatgtccactggctccatgtatggtgtatattttatataatttgatgagaaaatatggaaaaataataaaattgtcatgtttaagcatgctgaagaagtcaaaacattgcaaggaatgctagtactatgtttcaacggagttcaacattgtgtcactaatcttcctggcccatccaaatgaccaaatgggtacaatgttgcaaacattataaccttaccttgatgatgctatcttttctgaattgctattgctctgtatattaattttttggctctgggtctctttccctgtatagcaaaataaaggaaatatcatgttacagaattgtagtctatctttttaaactgtatatctcatattaacttgctatatattccccatttttagaagaacatatatatggtcatcaaatatgaactaattacaaagacacattcatcagagtttctttttccttttttccattcccaatgttgattcataggtcttgctgcatatataggtcgaaatattaacttgaactgtcttgcagcataggattatgttaattttgtccaatgtaaatttacataggagcagaggagcctaatgatatgcacttcatttcattgcaaactgatatttgcttatgcttaactaagaagaaattagcattctgatcatcatcaggctgtcctgctgcctaagcctgacataatgaacgatctgaattttatgtctagatgcttgtgatgtaactatcagaaatccggctcctcgtttcccttctcatttacgatgtcaatatgatgtcccttcataaaaaaatcattgtgaattctttaaactagtcatcatgtgattttctttacttgtagtccacatcaacaaatcctggaataattattgcttttggcaatactgtgatgacattttttgtgtataaaaagataggatgattctgtttgtagatgataattattctgattgtgaccctttatttgcactgaaatgttcgtcctgttcttatttctcattttgtctcatgtgcttatgcggtggaaacattatttttatgagccaaaaatacaattattacttgtgctcatactgttaataattaatatgtgttcttcttcgtactaaatatgatcttatgaaaattcctatttcgtctgctgatcagaatgcaagtggtaatgtgtttcaatgtactgcatcaatattatgataaacatattgtaaagctgaattcccgaaagcattgtctacctgtcaggtcttaccttttatttttcaaaactgatgttaattaggtggctgcagtggccaaatttatgttcagttaaaaagaccttaactagtacatatgtttgtttctcactgtccccagatcatccattatctggtaattcctaaagcagttctgacagaatttattttcctattcagggaaattggtgccacgaatacaggaaactgaaggc

SEQ ID NO: 499 - DNA, 14256 bp, Zea mays
  Intron number 10 from transcript GRMZM2G341171_T01 (locus GRMZM2G341171) derived from phytozome v7.0 (chr-ID 5; pos 156951806 to 156966061 reverse strand)
cataaatcagtaatgtgttatgtgtacatgatgtttgacacggcactttttctttcccaagaaatgtcaccaatttaggaatgttgctatacacattggtttaaataatcatgaaacatcatgtttagaagttcctgagttcctctttattccagaagactagttattgttcaatagttcatcgattagcatatttttttttgaaaaggcaggaggtctgccaagatatattgataagaagaataacaagaggtttaagtcaatacagtgaccgaagtactaggcaaagatccaacctgaagagaagtaaacaaaaataaaaaacagaccccactaaatagttgttaaggggtaactaggtgcttggcccctgccaaaatccaggctgctgtctcactcttgattttggcaatgatttgttggcagctcgagaatctgcgatcaaatattctcgcatttcgttctcgccaaatctcccagtttacaaggatcaaaagtgatctgatgccttttctattgcatcccggcaaaaaagccagcttttcccaccaatgccccagctcggggggtcgcccccagttagacggcttcaggccctgaacagctacccagacagcaacttcctcccaaattcttttgatgaaacgacattccacaaaaagatgaagccccgattcctgggcagcacgacacaagacgcaagttggttcatgggaccaattcctggcggctaatcgatctgctgtccaaatgcgattttgaattgctaaccaactgaaaaacttgcattttggaggcgcccagttcttccagatgatgaggtcataatttgtgtgaacagagcccaaaaattgtgcctgatatgccgatttgactgtgtagcggtgatccacagtgaaattccaggtgatggcatcatcacgctctgggtgaaactggatcttttggacttcagaccaaagaatgcagaactcatgaatgtggtggggagtaatcggtctgtcgaacagcgcaagatccatgatccaggcattgtttgtgaccgcctccgctaaagatttcctcttatttcttgatatagaaaagagacgaggcgccaagtcctttggcctttgccccctcacccaagcgttgccccagaaggagattttagaaccatcaccaatatcaatggtcgtcgatgccgcaaaaagcagtctatcaacatcagagcaaggaatctctaagttgtcccaaatattctgtgatgaggtgcaattatgccagagccatcgcgcgcgcaaggcacgcgcaaaagcgcccaagtcaagaactcccaagcccccaagggattttggcctcgccacccgtttccagttgactttgcactttccgcccgtcagtcgttcagaaccggcccaaaggaattgtcttcttttggagtctagaaggctaatcgttgccttgggagcattaagggcggttaatagataaattggttgtgaggtaagcactgttttcaccagatttaagcgccctgccactgagaaatttctcccattccagctgctcagtttgttcaatactttgtccaccaaaaactggaagtgctccttcctgagtctagttgtggagagagggaggcccaggtaccggatcgggaaggttgctcttctggctgggaagcaactaaggatgtcatcaaggggtagcccctggcaacggattgggacgatcatggacttctgaaaattggtcatcagaccagaggcctcgccaaatgaggtgagcaacttgacaattgtctcaatatcctcttttttcggcttaacaaacaaagctgcatcatcagcatatagcgagatcctaatgctgggcgagctgtttcccaacttgctcaatgctccactgtccgcggcgatctttagaattttttgcaaagggtctatcgccaagacgaacagaagaggggagagaggatcgccttgcctgagacctctctcatgatgaataggagggttagggaccccgttaacgagcactcttgatgttgaggtggagaggatagaagcgatccagtcagtccacctcacagggaatcccaaattgcggagtaaggcaatcaagtaatcccagcggacggagtcaaaagctttttcaatgtctagcttgaggaatagcgtgggcgaattaatacgctggaagcgcctaacagcgcttctaactgcaaggaagttttcatgaatgctccttttttgaatgaaggcactttggcaaggtgaaactaactcattcattctcggcgccagacgaagagccagggttttggtgataatcttaatgaaagaatggatgaggcttataggtctgaagtccccagctacctccgcgccttcctttttggggattagaatgatgtttgctgaattgattaattggaggttgaggcatcgattattatagaaagcattcactgcagccatgagatcatgtcttataatggtccaacaagatttaaggaaaacaccagtgaagccgtccggccctggagccttatctcctggtaaaagatcaatacttctcttaatttcctcctcggagaacggcgcgtcgaggcttgatagatcaaactgctggtcagagataatgtcccagttaaggtcgatagatctaggggttggccgctttaaagcattatggaagaaattttgtagctcttgcgctttttcattgtgcgagaagacccacccattaccgctccgcaaccgttgaatgaaattttttcgcctcctggagcgagctttccggtggaaaaatttagtgttggcatctccgaatttaagccaaagcatgcgtgagttttgcctgtttcgtgccctttcaattaccgcatagccaaggatgcgcatcttcaatctatttcggaggttcacttccatgtcggacagtcccctattttcttgtgccatgtccagtcttagactaacttctagggccatatacataaagagtctagcatcaggtattaacttggagctccattccttaagcgccttggccgtgaactgcagtttgtagtacagcctatgaaaaggctcacgatgttgggtcggtgccagccaggcttgctcaactgtatgctggtaacctggtaatttggtccagaaattctcaaatctaaaggaacgtggacgcctcggcatagtagtattggataggagcaacgggcagtggtcagagaccgaggatgatagtgcatgcagaccaaatattccgaacatctcctcccattcagagttgcagaagaatctgtctagtcttacgagagtgggatgtcgtctctcattgctccaagtgaacttcctattttgcaaaggaatttctttcaagtcgcaaatgtcaagagcttgcctgaacagaagcattaggcgagggttgactctagaattgtttttgtcgcttgctttgtatgtgcagttgaaatccccaaggaccaaccagggggaaggtgaaggaggcctctgtgcactcatctctcttagaaaatcaggcttgcggcctctacaagatggtccatagacgactgtcaggtagaaggaagcacaacgatccttaagagagacatttgcagatatgtggaattctccgatagtaaaattggacaattcgagtaggtcgctatcccaaagcaaaagaataccaccccgtgttccactaattccttccgcaggtttaaaactgaatttattaagctttggtcctccaagcgccatcacaatggacctgtcgaccgttgataatttagtctcttgcaaacaggcaagatggcaagtggtggtggagatcatcgcgcgcactgcatctcggcgcgcttgcaaatttaaacccctaacattccagcacaggatgctaaagtcagacatggaggagaaaagcaccccgattaattgccgacagctggatgaaattgcagcactgcacaataatgacagtgaaacataaaggggccaccagggccaacacaagcatggctgttataggtctgaagcaaaacagcaacccaatacagtccagggtgctcacaaaagtagtagaaactgagctgagactcattgacataacaaaagcagaccctcatcatctaacatggagctagaacagccatcaatcaagccgcagtaactgctctggcctctgcatgcatggcgtccacctcctcttggatctcagctatagcatctccagcaattcccagcaaggccttgtcgaggcgaactgtgtctggcgtatccagattgaacagagcatctagggccgtccccatctccacagtcagtggcttcttgaaccaatcctgaaattcctgcaaagcagtattaaaatcagcagcgtcatcttttgccaagagaccaagcttgcggcagaggacgcgctgggcccgttgcatgacattcgttcgagggccgttggcaagtctggcgctacgacgtaccgtcgaaaggttgaagccgtgtcgctgcttgattcttctagcaggtgctgcaggaatagtagacagagtggtcgctggtgttgttaccccctccgaaggatgtagcactggtcgctcgagtatggcaggcgagggcttggtgaatatggtgttgagtagatggctttgcgcggtggttgacaccgcagcaacatctgttgaaggttcatgcaccgcagctatcatccgagaggaagcgtcgacattggagtcctttacagcttcggcgttgtagcccgcagcaaccgtgctgcagggagagcctaacagcacatggtcctcctcagactgcaccaaaggcagtagctgcatagcagggcatgttggaagggaatcaagaatagttgtgaatgctcgctgcactgggatgagacttacgttgtctgcgaacttcatcctgctgccatcccagacagcaaggttgctgtcgccagcagcagccccagggaccggatcgacttggcccttaggcaccaagcgcggtcgccttcggtacacgcagccaacgcggtaacgacctttaggaagagctgcagccttcacagcagggcgcggagaaccgtcgttgccaccaccgcgtgagctgtggatgccgggactgcaggcgcttggtggaaatctggggcgagcaggatgccgtgggggggtcgctgaacggccacgccggacagcaacacgggtggaacggcgcacacggctgcgtccacgtatcgccgggtcacgaccaatcgccgggtcacggccaacatgtggcgtaaccaacgacgtgcctccggcatgacgaggctgctgatcgccatgaaggtggtgacgaagttgctgatcgccgtcgaggtggtgacgccgcctgggtgagtcatggcgctggccatggcgcgaccccgagcgctcccgctcgcggtccctgggagcccgcgagatgctacgaaagagccgggagctccaactgtcgtcgcgtcctgggcggcgaccacgacggtcactatcaccatcctcatccctgcgacggttgctgcgaggtggtggagggtcgtgacggtcacgtggttcgcactcgccgtcaacaacaccaagcctccaatcatacgcacgtgaatgcccatggccatccctggtaggggggtcttccaccatatcaaggtggacgatgaccctgaaggttaagccgctacgccccgccggtgtcgcgtcgtgggcagtgctgctcctgtcaacaatggtcagccacgttaccttaggtatgtcagacgggtttcgcgcccacgcccacagattgagcgtcgtagcatcctccattcgcagcgactgggcttcaacgtagtccagcacacaggacttagccaccgcacgcttggcgatgccatcgttccatgcgtgcagagggatgccttccagacacaggcgcacgtgggagccgaagacgctgtggtcgccgtggacggggagctgccacggcctgacgcggatgtcgatgttgttgtaggtgaagtcgcgctgcgccacagccgtgtcccggtgatgctggtgttcaaaggtgacgaggaagtcctctggatagtgtctcaccaccttgatgtcttcttcgcgcatcctgaacctagagcagaaagcccttgttactgtgttggtgcttgtcgccggtcgaacgccgccgagccaggcccatgccgcgtgggtgctcaaccgcgccagctcgctgtccatgtcccgagaggacgcggcaacagcgaaagtctcctgcgggcgctccatggggttgccaggcttcaccatgttgacttggcgcagaggagggaagttgacgttgtcgaagcagggaggtggtgggaaggcagagggggtagaagcagcagcactaatcttcttgggacattgccaggctctgtgtccagggccgccgcagttgaagcatttcaacggatccctgcaatcaatggcgtagtgccctctggccagacatcggaagcatttacctctcaggcttaccttaagatttttgttgtccagatggcggaaccttgaatgctcggttgttggcttcaatgaagtcgcaggcgaattgaatctcttgcggagtcgccgatggaccgttgtctagccaggcaaatcttcagcgccggattccgcggatttgctgcgttgaggagtgatgggacgcaggcctgggtattgaagtcggtgggtagcagtcccatcccggccgtgcggagtgattttcgttggagcagcagacgcgtcaaagcaggaacgatgagattggtcggcggacagagctgattcggcgaacctaactctcctggtgcaggcggccttagctgtcgacgaaccggcggcaggcttgaggcaggaccgcgtcgaagaagaagtcccggagtcagatctgggaatgcgggcgtccgcgtcgaatgctggaatctccaccgaggcagggtggctctggaggatggaggcctgatcaatggggtgatggaggggttggggttggttttccggcgagcaggcggggggagcggcagcggcggcaggtgcggtgctagccgccgcgaggacggggagagcgtccattctccgagagctttccagaaacttgttacgttagttttatcgattagcatatataatctatttctcatttctagatcgcactatccaatttgattaacccttaacctgtcaacagctgacaggatttactaagcctacatctggcacagcttatattgatggaatggacatacgattggacatgaacaaaatctatacaggaattggtgtttgcccgcaatttgagtaatgttaacttcctgcctctcactaagcctctgtttcagaaaaaaacgactcgtataattgttaacttgagattgctactccctttatgttgatcatctccatgcagcttgctatgggaaacactgacgggtagggagcatttgatgttttatgggagacttaagaatttgagaggtggagcattagatgtggtaatctctggccataggttaaactatgaggacatatctggtgtacatgaaagcttagtgcacatggtgcacatattaaattatcactatccatctcagatgtaacgtctctggttgatcattgcaatttacaaataacaccttctaccactacacccaccacgtcggagggtgtcgttagcaaaatataacaaacaactagagacgttagatctaagatgagtgatgttgatttaatatgtgcaccatgtgcactaaacttccatgtgcaccagatatgttctcttaaattgcagacaactatctatttttgtcatcgactaaacatacatgtctatttttgtcattcaaagcatgaatttttttatgcagttagtttttcaaatttctaaatcattcattccatgaaattgttcgtcgaccctatttccgttaaattttcaaatgttctaaatcattcattccatgaaattgttcattgaccctattcctgaatcctgattctgttgatcctgttaaagaagagtgaaacggtaacattgtattctatagggcccaaagggcaaaaatacatgtgttcattcttacagagagaaccctagattacaagaaaatacactttaagaaaagactatacatatacactaacaccccctcaaactcatgattgatcaacaacattgaatttagaaagaaaactatattgagctctagtatgggtcttggtaagcaaatccgcaagatgcaattctgaaggcacataatgaagggaaaccacatgatcctaaattgcagactaaacataaaaaatagtcgatgccaatatatttggtgagttgatgtttcaatcgatcctgagcattactattggcaccggtagtatcacagcacacatgcataggtagggatggcaatggggaattcccctcagggaatacctccccatccctatccccgcgacgaaacaatttccccacggggatccccacgaacacttgcaagagacgtttctttcccatccccgtcctaccgcggggataaatccccgatggggatccttgtccccgcttaaattataattaggacgtacatcctttattattaatataaaacattgttacttatacacattggcagatgtaagaaatcattatgtgtacatcaaaatgaacacatttgtactatgagttatctcttgacaatataattatttatttttatcattaactattacacgaaaacaacatcacgtgcaaatttaacggttctccgcagggaacggggatggggaatgcttccctgtcccattcccgtttacccgtcgggtgtcaattttcctcgtttacatctctgtgggggaagaaacttcctcgtccccatcccctaatggatgaattccccgcgggggaatcgaggattgggtccccattgccatccctgggcgtaggagtagtaagagaaaccccaaagtcagccaacaaccaccgaagccatgtcacctcagccttcacacaagccaaggcacgcaactcagccttagcactggaacgagcaacatcagtctgcttcttggtcttccatgaaaccaaggaggagccaaggaagacacaataggcagagatggacttgaaatccgaaagataggtaccccaagtcacatcagaataagcagagaactgaagagagcttgtgctataaaagaacaaacaatagtaaatggtgccgcgaaggtaccaaaggacacgaaggtgaccatagtggatggtagtggttgcagaaatgaactgactcggaatgtaaacaacataggagatatcaggacgagttatgtcaaggtagacaagactaccaacaagatggcgatagcgagcgggatcctcaacaggaacaccatcggtgacatgaagacgaaggtgaagatcaatgggagtgtccgtagaacgatgattagtaaggccagcacattcaaggatgtcttgaatgcatttgcgttgtgagaagtaatagccatcaggtgtggaggtgacctcaatcccaagaaagaagctaagaggacccaagtaagacatgtggaactgcgcattgagtcatgccttgactaaggcaatgtagtcgagatcatcactagtgatcaacatatcataaacatagagaagaataagggtgcgaactcgagataaagtgtgaacaaagagagtgggattatgtttctggccacgaagccagcaatagtgacaatagaggtgaagcgctcaaaccaggcacgaggagcctgcttaaggccatagagagaacgacgaagccgacatacatgaccatcaggaacaaggtatataggcagaggatacatgtagacttcctcatgcaattcaccatgaaggaaagcattcttcatgtcaagttgtgagatagcccactggagaatagaggcaacaacaagggtatgaacagtggtccgatgagcaacatgagcaaaggtctcctcatggtcatgtccagactcttgttgaaaatcacatgcaacaagtcacactttgtagcgctcaatggagacatcagagaaactcttaatcttgtagacccacttgcacgtgatagtagaagcagaggaaggaagcaggacaagataccaagtgctagtgcacttaagagcagcaatctcctcatccatagctgattgcactcaagatgggaaagcgcaacacaataagagataggctcagagagaagggaaatagaagaaacaaaaccaagacgagttggatgacaaagtctacgtctatcgtgaaggacgataaaatgtacgtctaccgcgaatgtcatatcacagaggaggcacaccaagcacagatggagacaggctagatgatgctagaggggatggtggaggattcatacgtcgagtgtagtggaaaagaattagaggacgtggcagaggggatggtggaggtggtggaggtagaggaggcgatgtggaggtggagaagatgatagtggtggaggtgatggaggaggaggtgatgggtatgaaataggaataggggagggtcgcagagacaaggtggtaggaagaggtggaaccaagtgaaggaaatcaacagactcagagggagaggaagaagaggacaaatcatgaggaaagaaagaacatgaatcatcaaaggtcacatctcgagatactcaaatgcggcgagtgacagggtaccaacaacgatatcccttacacttagagtcatacccaagaagacacactaaacagattgtgcagtgagcttggtcctctcacgaggttgaagaaggtcaaaggcaacacaaccaaaagcatgaaggtgagtatgtgactatattgcggtggtcatctggtcgaccaaagagacactcaagaggattgacaccatgtagagcaactgaaggttgaatgttcacaaggtaaacgactgtagccgcaacttcgacccagaactgaggaggaacagaggatgtcaggagtaatgcacgagcagtctcaagaagatgatggtgcttacgctcagcaacaccattctgagcgtgagcacgattacaataatactgaggaagggtgccctgctcaggagaaagaaatggagagcacgagataagtactcaccgacagagttgacccgaaaaacacgaatgggagaatcaaattaggtgcaaaccataggagcaaaattctgataagcagtgagcacttgagctcgtggatccaagaaatacactaatgtgaaacgagaaaaatcatcaacgaaagtcacataataatgatgtccccatttctaaatgaagggagtagggccccatacatcagagtgaacaagatcaaaatctctagtagacactgtcttactactagaataggggaactgtagctgcttgccaagcttacaggccatacaagggagggaggtatcactagaaaccttcccaaggacaccactacaaacaagtgatgacagatgagacccacacatgtcatcaagatgatggcaccattgagcgaagctgactaaagtggtggcggcaaaagttgtggcattatcaatggagtaggactagcagcgagtggaagctgaaggaagacgtagccaatcaagctcccaaagacgaagaggatcacgatgctggtggacagtaccaactagggtccccgtacaacgatcctgaacaaggcaagtgtcagactcaagaatgatgcgataatcatgatcagtgatctgaccagcagacaataactacaaattaagatcaggaacgtgggaaatagaggaaccctaaaacacaaagtgtgaaggtgggtgtcatgactaagaacagggtgggaagtgccactagcagtggtaacaagcaagaaagcaggtgatgaactcatggaacaatgaggagtagaatcatggatcatgtgaaaagaagctcctgagtcaagaatccagggcacaacaatacctgacaatgaggtacctggcgatggccctggtggggacacacgagtgaaaactgaggagaccacagaggaagcagatgaactagcacaaaggcgctccatgcatcgagttatgtcgagggcccagtcaggaggtgactgacgaggcagtggcagcaggagtgggagcacctccacgacagcgtggaggacgacacctacacttctcgatggtatggtagtcgccttgcagtagcacaagaagacgattacaacagtgctccctggagcaagggggatcgctgcaggagcctaagtagaagtaggagttggggtaggcgacgcagtcggagcaacaagaattgtcaaggaagacgacatcacaccacgaagacagatcttcttagcctgggctaaggtgactgcctcaaccagggatgggagaggagaatgggcgaggagttgagcccgatgccgctgaaactccaaacggagatgctagaggaactcatggaggcgacgaacactagtgtgcccctgccggaggacacaacatggacaagtccgatattgtggtggctctagcgactcgagctggcgccacatatcaatcagcttacggaagaaggcatggacggaagaatcctgttgatgaatagagctagtgagctccagggtggagatgtagagagcgacgcttctcagctggtagagagcctacacccgctcccacatcgcttgagtggagggcaaagaagaaagatccataccaaattccaccttcatactgccaagaagaatctaagtcgcccgagcctgatcagcaagccaagcatcataatcggctaagtcagtcatgtagtgctcaacagcctgagcataagcatccatgacctcaacagtagggggaacgccatcgacacctgcagtgggctcctcaggacgtgtcgggacatgaggagaagaagacaaaccgatatggtgtccccatatacggtggctattgagacacacacgaagcatagtagaccactcccaaaagttggtgccatcaaaggtgacagatggaagttacacaagtgggttggaacgaggagcaaccatgtggagtgggatgtgaagtggaatgagaagtgggttggaacgaggagcagctagtctcaatgtgatagctctgctcctaaagagatggagcaaggcagagctccaatgccggtggcacaactactggtgctcgacgtgtgcgcaagggcaagcaacaagcagggagggagcgtgcacaggcggtggcgcgcgactgcacagggtaaggcacacgctggggcgagctacgggcgcacgcggagcaggaaccacgggcagagcggcgagccgtggtggcgagaggcggcgtagggccgacggcggtgagcgggactggcggcggcgcggcggcacaaggtaagctgtgggcgcacgtggagcaggtcacttttagtccctaaattgtcttcgtcaaggcacgactcagtgcgcggttctacatgtctgacttaggttctacatgtctgacttaggtgtgtttggttgtgggacagctaggacgggatcgtcccctgacgtcctctctcgtccctccaattttgagggacaacaggggacaacactagataatactgtcccaacccttgacccagaaccaaacaacctaatttgagggatcgtcccatcccatcccgtcctgtcattgcaaccaaacgcacacctgatggctattacctctctcaacgcaaatacatttatgacatccttgactgtgctggtcatttttagttcctaaattgtcaaactatatgattaaagatgaccttttaaatactagaaattctagagactaatgtttagttactaaagtttagtacgaacacccctaagaggcattcgattcgagacattctcaacgctagcaagtgagtaattaataaacaatatctattttaaaagtcccacgtcgcagaaattcatcccggacattttgaagattttctccaaaattgagagtcacaccacctatcctattttctattcatgttgcaacaacatcgatatcgatcgcacatttacaactatgtgtttcgtatcaatcagaccaaagcactgtttctttcctccaggccgtggaacattctctgagaagtgtaaggctatttgacggcggcattgctgataagcgtgtggcaaaatacagcggtggcatgaagcgccgtctcagtgttgccatatctctaatcggtgatcctaaggtatacttgcttgtattcacatacctgaccataattcag

SEQ ID NO: 500 - DNA, 926 bp, Zea mays
  Intron number 2 from transcript GRMZM2G395121_T01 (locus G RMZM2G395121) derived from phytozome v7.0 (chr-ID 1; pos 2 5877150 to 25878075)
cccgctgtcactgcaagcaagacgcaaggtatacttcccacttactgcacttccacagggcatatttatagagctactcctaaataacaaacatatatcagttttggccaaagtaaactcggaactacatttaaatgttcaagggtcaatacggttgtatatgatgagatacaaaattgatatatgcttgaagatattgctttgttatgctgagattatgagaaaattgaacttcccagattagttgcactaaaaaaatcgacatgtggggggataagacaacccccgagcattgtattaagaagaaggccttctcacacatgtcgagaaaatctcgaacccctgccccacccatatacacagcggcaccgtaaacaatgtgagaacgactgcaacggggtccgggccttagacatgtgttttggcgtgggacaaacgaggggtttttttaaccaccacagggaatcgaatcgaatctaggacctgagaagtgctactcaggccacctaaccaactcggctagaggccctttcgcagattagttgcactatactcacatgtttctatttttcactttttcttaagtgttctctaaaactctagctgcagctgaatctttattttaggagatgtattgacatatggtttactaagttgttctatctttatgtttccgattttctctaaaagtgaaggtatttgttacacaataatacattaactgaatcagggaaccattgcatcatttaattatgtatatattttgtctgtgtagactgttggcagattttacttgtattctgtgaaattaatgcatttctgtgccaaatctcagtttcttatattgattctggccatatttgatttgtcgattgataacagtttttttttatttagatccagacataaccaaacacaccacggta

SEQ ID NO: 501 - DNA, 1108 bp, Zea mays
  Intron number 2 from transcript GRMZM2G165613_T02 (locus G RMZM2G165613) derived from phytozome v7.0 (chr-ID 2; pos 1 14848936 to 114850043)
gctacaaaccaccaaagaagccactcactgaaaaggtcagatgttcttatcgtttgtaactactagaaccagataattcttgatagtggaaggtatcgttcttgtcgtctcttcatgaagcatgttactgaatgccaacattttgtctttgcaggagattgatgagctatgtgatgagtgggagccagagccgctatgccctccaatcaaggagggggccaaaatagatgctccaacattggaaaggtttgcactacagcttggtttatgatggagttgtaccagatttttttgttcaaactagcagttgacgcattgttggaactttagcagtctataaaggattttttcttaaagtaagttcacagttacctagggtacattgtggttgttgttgcatgagtaatcctacatatcatttcatatatggattaaccggatggtctcactcttgaaactgtgggagtgttggtgcaattcttatactagtttcacttaacttaatagtgccatgtgtggaaacctattaatcttgaacatttactcgctagattatatgacatttaaaccatgtactcgtgaataagcagcaagggacaccttgaaccacatagaatatcatttacccttgctacccaaatgcttacatggctacatgcttcttggattgtattctctcttccctgatatcagtatgatcatcaaagctgtatgtatatagccagtgtaatgttgtttcttaggatgcattgcactaataaaacagcaatttcatcaatgatatgctctcctagtctgtagttataggaatagctcttgaacttcccttgtgataacagtgctctatttgaagacactgctatatatggaatattctttttgttgaatatcccctaaaatctgcttcagttatatgtgtatattatttaattcaccagtatttttcttcacgcatttctggttgtgttacaaatattcatgcagtatggattacaattgtttaccatgttaagtagttatgattgcatcatatatgatcttctgaggatcagaattaacccttctatttttcttttatacagtgccgctggaccacttacgattgttg

SEQ ID NO: 502 - DNA, 589 bp, Zea mays
  Intron number 2 from transcript GRMZM2G044740_T01 (locus G RMZM2G044740) derived from phytozome v7.0 (chr-ID 1; pos 2 44009936 to 244010524 reverse strand)
gaaggtatgcttgaaagttccattattaatttgaatgacacatctgatacatatagtcttttcaatttatcgacgttgttcacaaatatttagattacatgtttgtttatattactgctatgtggtttagatatcatatttatacatgatcaaggtagcataagtacatgtaatatggatacatgaacccattattattatgtggatttaagttcagaacttcagaatacagatatgaggcgaagtttagtagctagagaagttatctgcatccaccatgattctaagccttttttagctttctactctagagttctgacgtaaatgtgtacttcagcaatgctatgaatctcttcccatggtccatatattctcatcttagtgttggtattttcatatcttgggctaatatgagaaatctgtataggattatttttttgcagatttgagtattttaaacctttgtgctgtttttactatcttgtcagcttcatgatgcgcgagagtaaatatgatgagagatttatttatcttttttttacagatttgggttctgatctttattttttgtatacatgaacctacaggt

SEQ ID NO: 503 - DNA, 4506 bp, Zea mays
  Intron number 5 from transcript GRMZM5G883511_T01 (locus G RMZM5G883511) derived from phytozome v7.0 (chr-ID 2; pos 1 89159450 to 189163955 reverse strand)
gtactcaagaagaatctactgccacttatgtttctgacccgtacgacaaggtgtacagcaacatccctgaagaaacacatatgctcaagcttgttcccaactgcggttattgcaccgcgaagaagtttgagtatgagccacctgggttttgttgtcgtggtgggaaggttgagctagctccagtggagacccctccccaactcaagaggttgtgggatagtgcagactctgatgctaggcacttttgtgataacattaggtttttcaatggccatttctctttcacttccctatactgttgtctcgatagtatgacaactaatgtaaggggttctggtatatacacgtttcgagcacagggcatgatgtaccataatatcaagtcatttggtagggaaggtgggggcagagcataaacaccttgagctttacttttacgatgacgatcccagcctcgagcatcggtatcgtaagtgccgtgaagagcatcaacagaaagacaaggaggttatcaaacagatagtcgacatactacgtggaaacctgtactccgagcaccttaggaccatgggccacgttgacaactttgatgactatcgtatcacgttgaaccttgaccagacgttgaactagaagacatataacacacctctcacttcggaggtggccgctgtctggatcgaagggagcgaagggcgaggccaattcagcaagagtgttatgctccatgggaaggatagttcaagccactgcatccgctcataccattgatgctacgatgcactatcatatccattgttcttccctagaggcgaacttggatggcatgcaaatatcccaaaggttggagtatccatggacgaagtggatgcataccgtgcgacacatagggcaagtaatgcaaatgatgaagatgcgggttagttgttaatttgatatttgagatatttgcacattattaactatgctttcgacatcactcacttttcaatccttgcatatgcagaatctcctagccatttatgtgtgtctgtacgtgactactactgctacaaattctagattcgtcctggggtattcaatccaatacttcatggaaagcggcttttccagcagttcacggtcgacacgtacataaagattgagagctctcgtttagatttcatatgtaagaaccaagatcggttaagggcagacctataccagggcttggtggatagcatgctagatggagatattagagcagagaagattggcaagcgaactgtgctgtcgacatcgtttattggcggtcctcgtgacatgagacgtcggtatatggatgctatggctctggtgcgcaagtttggtaaaccagacatctttcttaccatgacatgtaaccctaactgggatgagataaggagggagcttctccttgggcagacaccgcaagatcgtccggatcttgtagtgcgtgtctttcatgcaaagctacaggagttaaagcataggctgactaaacaggatattcttggtaaggtccgagcctacgtctatgtcgtggagtttcagaagcggggtttgccgcatgcccattttctactcataatgcagaggaagtacaagctcacatgtcctgagcagtatgaccttttgatctcagctgagatcccaagcaacaagtaccctgaactacgaaagatggttatcaagcatatgatgcatggcccgtgtgggtcgctaaaccctaactgcccatgcactaagggtcgtaaatcatgcaagaatcattaccctcggaatttcagtgacacaaccttgcaagggaaggatttgtaccctgtttatagacgtcgtgacgatggtcgtaccgaaaaggttcgagggtgcgaattggacaatatatgggttgtcccttacaacccatacctccttcgtctcttcaactgtcacatcaatgttgaggcatgtgggagcatcaaggctgttaaatacctgttcaagtacatatacaaaggccatgattgtgcttctgttgttatgagagatgcgagcaaggcagatgatgatgtagatgagatcaagcagtacagagatgcaaggtgggtgactcctccagaagccttatggaggatatacagctttgagcttagtcagatatctccacctgtgatgcagttgcaactccatcttccaaacatgcacatggtgtcgttccacgagcggcaaatggtcgagcgagtcgtcaaccgtccaggtgttgataggtcaatgctcacagcatattttgaggtgaatagtctacacaaggaggctcgtggcatcctgtatcgtgacttccctgaatggtaagggaaaagtatggcaacagaggaaatgagatacgggtggacaggtcggtagaatagtctctgctcatccgaccgagggggagcgctactatcttcgtgttctcctaaaccatgtgactggcgccacttcctatgtggatctaaggacagtagatggtgtcacgctaccgacttttcgtgaggcagcagagagaaggggactggttgagtcggacaacacactggatgagtgtctcactgaacgtgctcttttccagatgccatcaacgctgcgacggctttttgccacaatacttgtgtactgtgagccaagcgatgtggttgtactctagcagaaacacctagattctatgtccgaggactatcaacacaggaatccgtgcaaaactcatgttgagcagatggtattgattgacattaggaacatgctgcagtcaatgggaaaggacataaagacattccctcttcctcctatcatggatgcatatgacgatgctattggtacagctagggaggtttacaaggaggaaattatcgaaccggcagcaggagatgtggctctcaaagactgtcttaacaaggaacacagggccacctatgataagattctgtctgccgttgacactgatcagggcggattattctttgtggatggacctggtggcaccggaaagacttacctatatagagtgatgctcgcgacgctacgcagccagggcaagattgcagtggcaacagctacatctggcgttgctgcttccataatgcctggaggaagaaccgcccattcacgcttcaagatacctctcactattgacgatggcactgtatgtagcttcacgaagcagagtggaacccgcagagttgctacggaaagcatctctcattatctgggacgaggcttctatgactaagagacaagccgtggaggcactggacaatagcatgcatgatataatgggtcgacccggactgccattcagtggtaaaaccattgtcttcggtggggatttcagacaggtcttgcctgttgttcgtaaaggttcaagggctcaagtggtcgcttcttcgctacggatgtcttacctatgggagttcatgtcccacttaaagcttgttaccaatatgagggcaaaaaacgacccttggtttgcggagtatttgctgtgcgtaggcggtggaactgaggacacaaatactgacggcgacatccgttttcctaacgaggtatgtgtgccttacagtgggagtgacaacgatcttgacaacctaatagacttagttttcccaaatctcaacaaaaatatgtctgattcgacctacatcacttcaagggcgatactgtcaacacggaacgaatgggtggatatgataaatgttaagatgattgatcgttttcaaggggagcatatggtgtaccatagtttcgatagcgccatggatgatccccataactactacccacccgagttcctaaacacactgacgcctaatgggctgccaccacatgttttgaagctcaagattggatgccctgttatattgcttcggaatatagaccctgcgaatggactttgcaatggcaccaggctggtcgttcgtggtttccaaagaaatagcattgacgcagaaattgtactgggtcaacacgctggaaaacacatttttctgccgcgtatacctctgtgtccctccgatgaagagatgttccctttccagttcaaaagaaagcagtttcctgtacggcttagctttgcaatgacggttaacaaagcacagggtcagactattcccaatgttggtgtatacttgcccgaaccagtgttctctcatggccaactatatgttgctctatctagagcgacagcccgatcaaacataaagattcttgcaatcccacccgtcgatgggaaaaacgtcgaggaagggtgtaagaaagaaccccacagtagattgtgggacatatactaagaacatcgtctataaggaggtcctaacaaactagacctacggtaagtctgtcaaaactcaattgtttgtttcaataaaaagacactgacacaagactaacactcaaatgtaattgtgacgttttgatgaggagatgttaaggagctttataaaataatattgatttgtttgtaactgttctgtttgataggttggggtattc

SEQ ID NO: 504 - DNA, 3482 bp, Zea mays
  Intron number 1 from transcript GRMZM2G023769_T02 (locus G RMZM2G023769) derived from phytozome v7.0 (chr-ID 6; pos 1 42814135 to 142817616)
tctcctcgttcacccataccccgtgctactggtaaccaacccctttgcccattttatcgatccatagtttctcgcagtagattcaagccacatggttgaccactaggaattagtatttcccttcttctgaaaccttgtttcccgttccacctcttctgatcatggaagaacttcgaactggaggtgaatatttgctgtataaagagttgtgtattgggtagaccggtagaggtcagtctagttgaaagttgagtctttagtgtgtgtccatcagtccatggtatgtttaacgggagtgggaattagtataatgcaacccttatcatttgcctagttgctgttggtagtcttgtcctacggaaattagcacagtcatcctatgtgaactttagttctgtgataagactttatagggatataatcatattatcttatccagaataccatatctagtgcacctcgatgagttgttcttttctgtaacattctacagataattgaggcttggatacggatgcagttacatgcatggggatggggagacagaatcattgcagcctaataatcatcattctttgcattgtagctaacccaactcaaagcattacgctaaccgcatactctgaataagccttttccagggggacgggaataactataggcgcgaggaaataggaacgcgagcgatttatagcaggattagttttgcctctggtgagataatcgtaatctaggggacgggaataaccatacgcgcttcgcttgtgacgcacgacggtcgaaactcgtgctttaaaggagtagatatgtggcatgatagaagtaagcaaaaccaatacatgtatagttataattgctcatagactctgttgtttaaacaaaccttggctattaataaaggaagatactttttttccatagtaggcatggttttaaaggcggctaggcggaactaggcgcccagccaccgcctgaacgcctaggcgacttaggcaggcgcctaggcgacgccttactagcctcatttttgggtgttgacacctgagagaaagcaggggaggaggacctaccagtctaccactctaccagtgaggggcgcccagggagggggagcagccggccagccgcgtgcccagcgagcagcagccgcgtgcagggaggaggagccacgtgcagggcgcgcgcagggaggaagagccgcgcgcgcaaggtgagagaatcagagaacagccgccagccgtgcgcgcaaggggaggagcagtcgcgcgcaaggggaacgcgcgccaatttacaggggaaacgcccgccaagctagcgcatcgggcaccaaaatccagcgccaacaaaccctaggttaggcgtcgcccagggggagaaaggcgtcgcccagacgcctaccgcgcctaggcggacgccatactcaattttacctgggtggcgcggacgcctagcaaaaaatgtcgcctggacgcctaggcgacaccttttaaacaatgatagtaggtgagcccaaatttcattactacatcacaacctaattacaagaacccaacagtttgaaagtcaaccgatcatatcatcagcacaatttgttagaggaatggcaggctcatggcctcatgcaacctttttcttgctactgcctatatcactctacattagccatgaccatagaagttttttagaggaaaataacacatggctgcccacagctgacagcactcctgcattttgagaaaaaaatattgatttatacaaattcctaccaactaactctaaaccatgatgctttagttttgttatgattctagtagcacatcaaatgactctgcgatgtatggccagactcttctatcatgtgtagcacatgaatggtagaaacagatctgacttctagccttctgtcttggtttaacgagagtaattcatttcaaaacaaggaaaaaatgttagtagaatcagtgcaattctcagagcttagatggcccacacctgagattgaaaactataactgcataattgttagtgatgccacttcagtggattaccatcaacctagaagtgtttgtatatacaataactttattttataaatctgtccaaaaagttatgtagacagtatggtttggttggtagttaagcttttatctccagatatgcttttaagaaggctgtactgtggcagattcctcccgtcaaagctatcgtttttgtaatatataaaaaaactatacgaagaaatcatatataaggtgcaatgcatatacttgtgttttctttatgtttatttcattcatttacatttggttctcgaaggacaggtctggcgctttgttgagattccttcacactgagccaaaggtcctgggttcgacgcagcccctctgcaaaatgcagggggtaaggcttgccttagttatttcttcccaagaccccactcatgtgggctccaccagcactgcgtctgtcctttttctttacatttggttattgatgttcctttgtctatttatatagtttacgttatttttttctcatgtgatcttcaataacccatacagaatattagagtatatctggtagttagggatattgtaatcccatattgccatgtatatcagtgagctgtcttggccccaccccaccacaaacctttaggcttttgatgcagagccaaggccagtgactgtgtactcgtatgcctctgttagagcatctccaacagaagtcctaaacatagttgtattttgaaatataagactctaacgtcaaaaacctgttccaacaggggtcctattttacaaaaaatcaatcaaataattataggactcggcctctcaaatcctaaatgtctaaatattggaccccatatgttggagccctatcctcattttgtacagtattcctaacattttatttcatagataatatgatctatttcctaataacatgatataggacacaactgttggagttgcaaatgattttgtggccctaaacacttcaaatcaggtcttattttattttttagtactcaaatataggacttcttgttggagatgctcttaatgctttggacttgcctccctccatggcttcaaccacgtccacctaaacatcggctactttgatgacaaaagagctacttgttgttttatacttcagtctcagcatgtacattgcggcggcgctatgaccgcagggcatgtttgtcttcgctgcttctctggtctggctgtctgtgatgttagagtatatctggtagctaaggagtaaggatacattgtaatcctatattgccatgtgtatcatggagacaacttgccaccaagtattgtctctatttatatcgcccgagggctcagtgcaattatccacaaattatatgcaaaaccttcctgctttcaaagaatacaaaatatcattgctgtttatatttgctattaacagatggatttcatttcctacatgcagcgaagaaa

SEQ ID NO: 505 - DNA, 4215 bp, Zea mays
  Intron number 5 from transcript GRMZM2G084942_T02 (locus G RMZM2G084942) derived from phytozome v7.0 (chr-ID 5; pos 5 9291799 to 59296013 reverse strand)
ggactctgatcagcacaaaaaacatcgccaccatcataggagaaaatgaactggcagtgtataaggtaaaatgccctatctgaagtagtgatatttatatatctggggaccgctctggatgtgacgcattaagggtaccttgtccctttcttgagatcaccagaatccgcctggagtcttgtgctcggtggctgatctcagggctttgtgatgttattacagtaatgtacacggtgtaacagagtttcttcatactgggagaatggttgtttgggtcttcaaacggttgtgttgttgtagaacgtggtggggggcgtaacgtcacgggctgtttagttctgtgcctgagctagccttctgatctactgtggactcactaataagcttcatgtgaaatgtgtagcacttgtacgcaagagtgcttcccaaatgccaggacttcattgtttatggctccaacattgaacgttttatcttttcttagctgttttagaagttgtaacgtccttactaaggctgtatgcatggaagtgcaaaagactggaacttgtttccattatagaaaaaaaatgacaggacttcagaaacacttttgagaacctggaatggtttacctactcccggtggcaatacctaccaaacactttggcctctaaatgctaggtaaaaccacttttttcttcctcttgtgatgtgctgagcatgcatctagttatgggagtgaggcaagtatagcatgggtacagcaattagcacgttttggtaacgtcttcgtcaaaataagcacgtttggtaacgtggatactggaaaatgtgtagctttgagagttaaactgatgggcaacccattggggtagacatgaatgcgagctttctatccattataggactatcaaacattcattgtgatgggtccatctccacttggttgatttacctcctacaacaactacaataatggttagaaaaatgatggtattgaaatacacctactaaatattgagtaaggtcattgtaggacacccctcaatgtgtcaggtataccagatgggctatgggctattgtcgtgtcaggtataccaaatggcctatggctattgtcaagtatgtctgatgggctatgtgggctggaggagagatataagtaaatgttgaatactctatacgagcgacaacttccgttcggtctttcttcttccccacgttgtagttcttctaccctttcttcattctctctgttgagtccattcgttcctcccgtcaagcatttcttacgtcggagccacggagaggggtgctaacacaatgttaatatcaatatacaccattcaacggtatctttgctgtcagtatcctaaatatggagtacccactcctgctgggtctaggcggggccatggatgacgagcagtctactccaacctagagttggactcggcagggccactggcctctgggtcaccggcgtcatcacataccccgatagtgagattactcaacatctacagtctagggtcggaccccagtaggacggtcccggacccctgcgtgtgccatccggacctccaactaggggaggttcggtgctgccaagtgtccaggccatcgcggatgggacacgaacctccataagtgccttccagaccccggccaggggcgcggcgcttccgcatggcccaagacatatcgcggaagccaccatgcttcgtttgacgtaagcctctgacaccaggaccgcctgcattaaatatgggcaggatttgcacctgtccacatcaggggcaggtagcatgtacctcgtattaaatgcatgcaacgtgtgcagtccataaggcttggggcgcgctaataactcgcatgttaccgagacgaagaccattgacccactgcgctgtgcgtgggtaactcccatcatgacttccacaattcccgttgtcgagccatgcatgagacaggcggaggagacaggacaacaccatccacctactcccctacgcaagacgacgaggcaaccgacaccgcttgaaagtcacctagaggggagtgaataggcgaaacctgaaaaattataaactttaaagacaaaattcacccgagtttagcatttagaactagtaataatgaaatcagagtgcggaagatagttcttcttgccacgagttgctcaatcaatgcggataaccttgggagctaacttaaaacgatctcatgcaagagaacttagagagatgggagaggaagaatcaaatcgcaaagcaagattaacacatagacaagagtgatttgtttccgggggttcggttccgaagaatctactccctattgaggaggccacgtagaccaggtctttcaaccctttccctctatcaaagggttgcttagaccagttgagtgcttcttcttaatctcgagggtcacttagaccccgcaagaatcaccacacaattaggtgtctcttactagctttacaaatcactaagagtctagaaggagatgaagaaagcacgatcaagaaaccaagccaaaagagcaacaacaaaatcacaatgtcacactctcttgagtctctccaaagcactaatcactaatgatcttgaaacacagttatggcacttataaaggactttgaagttgagtgcggataaagtgaagaacttgctctaagcaatgtatgaaagttgtagaggcttgggtgaattgaatggagttgattgggaatgtatttatagcccctcaatcaccacatagttgttgctaactttcctgctacacgcggacggtccgcccctgcatatcaatggttgaaatcgcaacggtcgtcagtaacgattataagtgcattaaatgtgtcgtcagatgtcagataaagcagtcgcagacgatctgggcgtgcccctggacgctacacaaggacgctaaaaatgatttttaccgaacccgacaccttcgagttttcaactagacaaactagttagtccataaggttgtgatgtcatcaagcaccaaaagcaattagagaaaatggtaaagaccatttccctttcaccggtgcctacacagttgtcttcaccctcatgccgacgagacaggacgaaggtgcggctgggcatggaatccgcacggtgaccaaatgaagatcttgaaccgcaggattaatagctccaagttccgttttttatacagctaaggcccacctgtcggggctcctcattgcccatgtacatgcctccctttggctgtaaaagggagggcatgcacgctacttagaaatagacacacacacgacacacgggaccagactcgagcctatacagggactcggggacgggaaattcactcttgaactccctcggaggcatctccaaccagtctcatacattgtcaagctctcagcaatataactcacaagtagagtaggattacgctctagcggtctgaaccactctaaaccatcgtgtgttcttgtgttcgtccatctctccagacaaaccctagattgtcccctgttcttaggattagtaagggacattccgtcacccagctggagtttttatcttcgacatttgctataagacattttccaattatgataatttactcctagacgttttccaatagcaaaaaatagttaccggaggagatacaaaaattgttttggattttgttctttccaacaatcccctttatttgaagggaacgaggctatgatttgaggaactggtgatttttttcattcgagttgggtctggagagccctgtaacttttttggttattcctatctcatgtaaattggatgtgattgaaaaaaattataatttttttaacttgttttgtattgaaacccactaaatctcatccaatttacatagactgagaataataaaacgaaccaccttaacgtggctgtcgtattttcagctggagctgcggttgcaactttagctgcagcgaaaggatgcgttgttgtaaatacaagtccaagactccccaacaaatgatcctagcaggtgtctgtcacctactacttaggttgggtcgttcggtgtgatgtgatgttgacacgcacacgcactcccatctaattctccagcgaccaaccacacccaaaggcccaagtaaacgccagagaggagaggagaggagaggagtggagagcagaggagagcagcagccagccagcagcagcagccgagagcccaaccccaactccacaa

SEQ ID NO: 506 - DNA, 9676 bp, Zea mays
  Intron number 4 from transcript GRMZM2G702725_T01 (locus G RMZM2G702725) derived from phytozome v7.0 (chr-ID 4; pos 1 81792834 to 181802509)
tgctcgggcaaggtggctttgggaaggtttacaaggtcagtaataaaaaatacacacatcttctaaataaattgtagaaccgtgagaattatgacgttgcttgttcagtacaacaatggcgaaacaaaatgaaagtcgcctagagggggggtggataggcgaaacctgaaaattaaaactttatcccccaactagatcctttgattagtggttagaacaagatgaacaattatcggagtataaaaactaagttcttgctagtaaaaagtatagctttcaaataatgcggaagtgataaatcaatacaactaataattctatgataacaaagcaagaaagcttagatgaaaaagagcactaactcaagttcttttcttgcggagtgttgcttcacttaaatgatattttaacttgaagcaacaccaaatgatatgagcaaagaatagtgcaagagaacttagagtaagagaaagcaatcaaatcacaagcaaaagcacaatgaacacaggtgatttgttttaccgaggttcggccctcgaaggcctagtccccgttgaggagtccacttaaggacgggtctttttcaaccctttccctctctcccgatcacacaaggatcggcgagctcttcttcttctcaaggatcactctcgatcccacaaggaccaccacaatctttggtgtctcttgctagcttttacaagcctccaacactttgggggaagttcgaatgggagtcaaaaactccacgcgcaaatgaacacaaagatgtagcgcacactatctctcaatgaatctcacaaggcgctagggctaaactcaattgagtagctctcaattgcttgctctctcttttgtggcacttgtattgggtgtagtggactaaatcttgtgtatatgatggatcaatgaatataggtggttgggagggcttgagtatgtcaactagatgacttggaatgttgcttggactcccacacattgaagtggccggttggggtgatatttatagccaccatccaattttgtagccgttggagaagctgctggcgatgggcgcaccggacagtccggtgcacaccggacatgtccggtgcccctgccacgtcatccaatccgttggagttggagctggtcgaccgttggaggcttttgtcctcatgtggcaccggacagtccggtgcacaccggacagtccggtgcctctctgatcctctgctctgacttctgccgcgtgtactgttctgcactgtttactgtcagagtcgaccgttgggcgcagatgaccgttgctccgctggcacaccggacagtccggtgaattttagcggagcagtcttcgtgaaatcccgaggctgccgagttcctgaggccgcgttccgttggagcaccggacactgtccggtgtacaccggacagtccggtgaattatagcgcgccggcccaggactttcccgaaggtggcgagtttgagtctgtgtttcctggtgcaccggacaggtactgttcactgtccggtggcacaccggacagtccggtgcgccagaccaggggtgccttcggttgcctctttgctcctttatcttgactcttgtcttgttctttttattggttttatgttgaatcttaggcacctgtagaacatataatctagagcaaactaattagtccaattgtttgtgttggacattcaatcaccaaaatcatttaggaaaaggtttaaagcctatttccctttcaatctccccctttttggtgattgatgccaacacaaaccaaagcaaatatataagagaataattgaactagtttgcataaaataggtgcaaagattacttggaattaaaccaatattcatttcataaaatatgcatggatgctttcttactttattttatttagtattttggaccacgcttgcaccacatgttttgtttttgcaaaatctttttgtaaatccatttcaaagatcttatgcaaatagtcaaaggtaaatgaataagagtttgtaaagcattttcaagatttgaaattttctccccctgtttcaaatgcttttcctttgactaaacaaaactccccctaaaagagatccacctcttagtgttcaagagggttttgatatatcaatttttgaaatactactttctcccccttttgaacacaataggataccaaatgataaatacttttggaaagcactaagtttttgaatttggtggtggtggtgcggtccttttgctttgggctcatttctccccctttttggcatgaatcgccaaaaacggaattattagagccctcgaagtgctatcttcccttttgggcataaataaatgagttaagattataccaaaggcgaagtccggtcttttagctttgggctcttactctcttccagagacgaagtccttttctttgatgctcatttctcccccaaggaatagagagttgcttggagtgatggcgaagtatgatatacggagtggaagcctttgttttcgccgaagactccatttccctttcaatctacgactttagcatggtaatatacttggaaacatattagtcgtagttacggtacgggaataataggatatatgcatttgtaccaaaatgaaagagatatgatcaagagatatgtcaattaagcatgatcatagttctataaaatatagatttctccccctaaatatgtgccttgagaggaatacatattttggccttaaatgccaagtgcacataattaggttaatgagaacaagtctatatcatagagaaagtgaagtgcattgtgtcatagtatatgagtgatgctcaagacagtttatgcacttatgaaagcatgttgcaaacaatttaagcattttcctttaaggatttcaaagagacttaaggaccatccacctttggaacaaaggtagcttatcctcgttacaaggttaaactttaagctctttgacaatagaatcacttcatctagttttagcaaagatgcaataacgcatgagtgaaattttaagaggttaagctaggtatgaagcagggataaatgcaaaggacatgctttctcttccttatatataagatatgcaaagaatgcttataagaggaagatttaggtacaagttcaaatgaaaggaagtggttttacccttttgtaccttctcatagagacgctctcttcatcgtgctttgtccttagttttagttgcttaagacctatactcaatgacaatatatggaaatactttgcacaagagagagttctacaactagtgatctttttcaagtcattgttagcatatatcaaatggatcacaagttgcataaatgaatcatgaattctcctttttccttagtgcatatcaggatagatgttaattaaaattaccaatagaaatcaaattgaaattacatgaggcactaagaagcataagtgataattgaagatgttcaatgatcaatcaatatgcgatcaagagaacaatatagacattagatttacaatcaagctcaaaaataggagaatccaataagcatgctactttagaaatgaaagcaacaatccttgatacaagcgacattattttaacaagttggattgatgtgaagtagcatactataagagaaacattatttttcatgcaagagactatatgaaattactaagataaagcaatagtctcaacataatcaaactataataatggactccccctaaagatatgcatcaagtaattgaaagaattgatttcgatgcattcacttttaaggacataaagggagaagcattatacattttgatcaaggctcataaatttagcaataaacaacttaagcctggtaacctcataatgaaaaaggatttagaatgcttacaaccacaccattgattgttgttgtccttgatgttctttctttttcatttgagtgtcctcccttaatatttgtctctttttccttccaaacttattgaaaatactcaagagacatgttaatagcgtaagggagtatatggtgaaggatgattactttagataattagcatacaaaattcatcatccacaagtcacacagacatgaagtaaaatccttaacatttgagcttattactaaaaaggaatatgcactatttgactatttgatcaaacataggattttgcttcttcatattgaattttattaattattacttaaaagcaagttaatatgagaacatttatagcaaaggtatgaaatagattctaattgacatgagcattaagaaaatgatatttgaatgcacacttagttaattttggtccaatagcgaatctattcctcacaagggtagaatatgataatttagattaaatacccattgagatgggaactaaacttaattaagaagatgagttcccatacctttgcttttacctttcttcttttgggtgaagatcaacccatgaggcttgtgtactttctcttctatgcatatttataagtaagctcaagagatacgttagcaacacaagcactagtttccatttagtaatcattttgataaagaatgaaaaagtgaattactattggcatggaacctttataatatgaactagattattccaataagtatgctaagttttaactcataaaacaagcatggttaaattcttgatattatgggaataaatctaatccataacatggagagcgataaatgtaggagaatcatatccaattaagcaataagagatacaacatgaattattggatagaatttcctagacatgatgagatacgcatttccatagagaaacttattctcttagattacttagataaaaacattagtctcacttctctagctatagagagaattttccttttataagtgtcctaagtatttgaattccttacatgacaccttattcttttaagaacatgaagtatctctctatatctagaacatggcaataattgaataattaatgtaaaacatgccatgagaacttgcaataattaaagcatgtagattgtcataatattgaattgatagatacacaatctaccacatgagaggaatttcttcaaagaatgatgacataattttaaaacatgcttaagtgctttctatttctatgtgactacacaagacacacgacaatttaagataattgcacttaagaatataaatgttaccatcctttgactttcctccatgttgtaggttttgatattccgcacatgataattctacaacatcaatatcttccccgagatgatatgggttttgaataacatgttgaaataaccttgggtcaatcttgaatatgtagatcatttgaagattgatagcttgagttgataagaattgaattaactccttcaagcaccccaaaggttcataccatctccttctcctacaaatcttgtcaagcacattttggtacccatcgcttgatgggtccgttaaggttagtaaacaaagatctaggaacccaagtgtcctttgtgctagcgcttggtaaacttgttacctttctagcacaagttgcaaccttgggttgcctagttatatatgaatcaaatgacaagttaggagtgggatttttaccaatgggacaatctttgcattgatgtcccttctttcggcatgtgtagcataggcgttttccaagttttgaagatttcttctttccttgtttgttgcttgctacatggttagtaaaaattttcttttctaaccctatgcctctttgttttaaatggggacaagatctaagtaagtgtcctttcttggagtatttaaaacaaagtctatcatccttgttaataatcaagccattaatatagggacatgacctaatcaagtgccccacttcaaagcattcactacacctcttaatgtaaagtgtggcttgatcattaccttggatgttaccttttgtggaggcgtggttgaggcttttggaggaggtgttgaatttcttcttttgtttattcctcttggcaatcctcaaatccttgacattttcttcaagggatgtagtgcatgccacggttgttcccgtctcaagcttcttcaccatgtgatcacggttatcttgagaaggttgggcaatgcatttccctttaagttgtgtcaagctcttctttagcctctcattttcttctttgagcttttgatatgaatcatcatttgttcctgcagattctagctcaaaagaagatttgcttgtcgacgaacaacaagcattagcacatggtaatatagtatcaatttgaatacatgtgcatgagtgaggttgttgggattttaaattttctatcacaacctcatgagcaatgtttaatatgatatgatcatctataagattttcatgagaacatagaagcatatcatatttattttgaaaagctagatttccaacttttagcttttctacttggtctttgagcaaggtattcctatttactaattgagcgatacaatgtgaagcgttatcttgctcaattgaaatagtttcatacctttggaccaaatcaacatgagagcactttagctcctcatgttctttagtcaactcgtcaaagtgttgcatctttatggagagaatatcttctagcctttgacgagcttcgctttgctctctcgctctttctagaagtttgagcatgaccgccttatcttcttggcttaggcgagcgtagagatgcacaaagcttctttcttcctcctcatcctcatttgtgcttccgctatcattttcattagccacacaacacatgtgggaatcgaaatgggaagacaaaccttttggagaggtggattcatcgtttggtctccatcgttcattttctccttcttccttgcacgggttagtatcacaaaaactaaaggaagtagaggcatcaaatgaactattatgtttggactcatcaaacttgattttaattctagtccaaatatcatgcgcatcgggaatggattcgtcatagtttgatatgaaggcacgataatcttctttgctaagagaattgtttaagatgtcaaaagctaggtagtttaagcgataacatctttgatcctcctcggaattaatttttccattaaaactagagggaaaaatactcttgtcaataatttgttctaattgaggatgtatggttctaaaggcatttatcacactagtagaccatgaatcataattagaacaatcatcacataatatctcaagagttacctccttttgagttgcgttcgttggaggagtcttcttgttcttttgggatcttctacgagccatcacttcgagttgttagactcaagatgaagtgcctagttctgataccaattgaaagtcgcctagagggggggggggtggataggcgaaacctgaaaattaaaactttatcccccaactagatcctttgattagtggttagaacaagatgaacaattatcggagtataaaaactaagttcttgctagtaaaaagtatagctttcaaataatgcggaagtgataaatcaatacaactaataattctatgataacaaagcaagaaagcttagatgaaaaagagcactaactcaagttcttttcttgcggagtgttgcttcacttaaatgatattttaacttgaagcaacaccaaatgatatgagcaaagaatagtgcaagagaacttagagtaagagaaagcaatcaaatcacaagcaaaagcacaatgaacacaggtgatttgttttaccgaggttcggccctcgaaggcctagtccccgttgaggagtccacttaaggacgggtctttttcaaccctttccctctctcccgatcacacaaggatcggcgagctcttcttcttctcaaggatcactctcgatcccacaaggaccaccacaatctttggtgtctcttgctagcttttacaagcctccaacactttgggggaagttcgaatgggagtcaaaaactccacgcgcaaatgaacacaaagatgtagcgcacactatctctcaatgaatctcacaaggcgctagggctaaactcaattgagtagctctcaattgcttgctctctcttttgtggcacttgtattgggtgtagtggactaaatcttgtgtatatgatggatcaatgaatataggtggttgggagggcttgagtatgtcaactagatgacttggaatgttgcttggactcccacacattgaagtggccggttggggtgatatttatagccaccatccaattttgtagccgttggagaagctgctggcgatgggcgcaccggacagtccggtgcacaccggacatgtccggtgcccctgccacgtcatccaatccgttggagttggagctggtcgaccgttggaggcttttgtcctcatgtggcaccggacagtccggtgcacaccggacagtccggtgcctctctgatcctctgctctgacttctgccgcgtgtactgttctgcactgtttactgtcagagtcgaccgttgggcgcagatgaccgttgctccgctggcacaccggacagtccggtgcacaccggacagtccggtgaattttagcggagcagtcttcgtgaaatcccgaggctgccgagttcctgaggccgcgttccgttggagcaccggacactgtccggtgtacaccggacagtccggtgaattatagcgcgccggcccaggactttcccgaaggtggcgagtttgagtctgtgtttcctggtgcaccagacaggtactgttcactgtccggtggcacaccggacagtccggtgcgccagaccaggggtgccttcggttgcctctttgctcctttatcttgactcttgtcttgttctttttattggttttatgttgaatcttaggcacctgtagaacatataatctagagcaaactaattagtccaattgtttgtgttggacattcaatcaccaaaatcatttaggaaaaggtttaaagcctatttccctttcacaaaacaatgtagggtatgctgggacacaacatagaagtcgcaatcaaaaggctcggccaaggttcaggacaaggcgcgcaggaattcagaaaacgaagttgttctgaatgcaaagctatagcacagaaacctcgttcgacttattggacggtgcatcgacagagatgtgaagttgttggtttacgtatacttaccaaacagaagcttggattccgttatctttggtatgtctccaaattatatcttcatgattaattcccaggaaaaaacatcatccttttacgcaaatataaaagatgtgacatgtttacttatgaaattgcttattactttacatgctgcaaggcaacaacatctcctctgttggccaacacatttcaagataatcaaaggagtgtctagagggcttctatattttcaccatgattcaaggtcgactataattcatagagatcttaagacgagcaacatactattggacgcggatatgaacccaaagatatcagattttgcaatggcaggcatcttttgtgcaaaccggaatgaagcaattacgaatcgagtcgttgggacatagtgagtaatcatagccctgactctgatcttaaagctaattatatttcatttgtatacctaataacttactcagatcttaaagtgagtaatcgtagccttgaatgtgatcttaaaccagcgaggg

SEQ ID NO: 507 - DNA, 21085 bp, Zea mays
  Intron number 3 from transcript GRMZM2G002225_T01 (locus G RMZM2G002225) derived from phytozome v7.0 (chr-ID 5; pos 1 3946697 to 13967781)
gaggcccagatcgacgcgttctcgttattaggtgattatgtttaactaaactgagttgataatcgtcttgagttgttttttttccgtctctgctgggagtagccgtagccgtagtactataccgactgttgcagtacgtgcaggtatcctagtacacatgattgtttgccaatcacagaaaacatttatttggcgctgtgtagtattaagtccttgcgtgcattatattgtggtgtgttatctagctagctaggctatgcacactcatataacttagcacttagcagtaacaacatgaacatttcttgctgcgacgaagataaagagtagtatatattgggttttttagaagctaataagtgtgtgcatgcaagaaaaaagagtgcctagctataattttcccacaaaaaaaaacggggactaactgaaagttcttatgtgaactaactatgttcttaataaggcttaagaacatttcttgcagctatgcatgcatgcgctcgagctcctgcggcagctctggatccatttatgtcgtctgcacaacatagtttacacactttcattttcttgatctataaccatgcacctgcttaaattcttgctgaatttgttgttaggcagaacttaatagtaatcagaggagcaccaccatgtgtaagcttctaatgaattaactacttatcccctagctagctgttgcatgcatggaactaataaaatgccttattgattgattgctttaatttgcactcagatcgattagttagcaaccaccatctaccgccggtggtagggttctatgtatcccactgttcaccctgtcagaacccctgtggcctcgtcgtctccgagacggctgtaggtggcatgtggagactctggctagagggggcgcccaggagaacctggccctcgcggctgcaggacgcatgcatgctggatctctggcggctgctgcctgcaccccgcaggcagtagcattcagcatcagcaccacgccaggctacccctctctctctctgcaactctctaacagtgcaccttactgtgccaccgctgctcctgttcgtcacacacagtcggggttggaacccacggcgccaaagtaactgaccgagggcttcactacctcttgtcgatctgtcggctctacgtacgtctggccgcgagccgtccgatcggcgtggtcgtcagatggcgacgccgatctcgagaggcactctcgattttctgctgccgccgccgccgccgctgataactcgccgtgcgctgtggccgtgctttcagcttccgctgcgtgtttgcatgccggtacgtacagcacatatatacgctagatcactgtggacgtgacaatcgtcaggtcctggacatggcgtcgcgccatgccatgcatgccaccagcggccagcctgcagctaatctctgtgctcgcactgcatgggcatgtggaggcctctgattgagtggttaattattggctagcttttccatgagcgacaggagtacgtagggctagctccggagagatgacgagtttgttgttgacgatgctggtgctggtggtggggtgtgtgcatattccatgatgagtagggtgactacatcactgcggccttgtatgaatcctctcgcagcatacatgtgatgctactaaggttagtttgaggtttacatgggccgttcaatagcttggcttgcttttacattgggtaggtttacatgcggccttgtatagccttgtatgaatcctctcgcagcatacatgtgctgctactaaggttagttaatttgaggtttacatgggccgttcaatagcttggcttgcttttacattgggtaggtttacatgcggccttgtatgaatcctctcgtaacattctgcaaacgctttgacgagtatagcatttgacaaagatgtctcgataaacagtttatcgataatggtatctttgccgagtattttttatcggacactcgacaaataaaagtcatcgttgatggcagcaagcgactgtgacggagcctttgcctagtgccaggctagcaagcactcgacaaagcgagctccaatgggccccatgccagtttctttgccgagtgtttaaactgacactcgacaaagggagctctagtgggtccccacggcagactttgtgccgagtgtgctggctggcactcagcaaagaatgagcctttgtcatgtgcgaggaccataacactccgcaatgatactttaccggtttttaggtgtgcattctttatcgagtgctatggtcaatgtactcggcaaagtaaccatatacctacttttttatttgtttttgttatttcatgaaacaaataaaagatatatgtcattgaaaagaacatgttgtcataacatttcaaaacaaaggcacactttgtcggctaagtttgtaaacatagtacataacaactttcacgaaacaatgtcaaatttgtatcacaacctctacatatgatatcatgatatttcgacaagtttcatgattttctgagtttgattgtgttttatacaattttaaaacaactggatcgcaagttcgcgatcatgttttgtgaacatggtattcgaaatttctggtttgttcctgttttaggccgtaacttgtgctcaataacatcatttttgcattcgttgtttttttattttttgagtgacttgcagttcaaatttaaattatctgaagaaattcaattaaatgaactaaatccaatagatatagcaaacactttgagaaatgtgacaaaattaaacatgtaggttcagagactatagaaacaccacaaaaagtttgggggaaaagaaaaaacaaatgaactttgttgagtgtctacaaaagacactcgacaaaagatgtgtttgtcgagtgtcttacttggacactcggtaaagacaaacctttgttgagtgtccgactcgggcactcggcataggtaacagacatcagctatcgtcagttgctgacgacgctttgtcgagtgcctagttgtgccaagagttgggtgctcagaaaagatttctttaccgagagccttttatgacgaatgttcgactctcggcaaagacactcgtcgtcgagtgtttccttttgcggagtgtggcactcgataaagtgtattttgtcgagtgaccgatagattgccctcaacaaagcgttaagcactcggtaattaaagagccagattctggtagtgcaagtccaaatatctgaagtatttttctttgtgatgaagcgaacggtttgatgggtgtccaggaatccatacttgaaaataatcctatgtgtatggttaccactaaaactttgctctaagacgaacctaaaccatgtgttatctaaattgtgccatataaggtttatctatagtgttcttgagagcacctagagggggtgaataggtgatcctgcaataaataactctaaacaagacaaatgtggtttaaaacaagtgtcagtaaaagccaaaaccaagttgtgatgaatagaggtagagaggagaagagaactcttcacttgattgttcctttaagatatgtatttaaacttaggaacaataacacaagtgaaatatgagaactctttggaagataacaatcacaataaagaaatgcttaagacacacaacgattttatcccatggttcggtgcctactccacgttgtggtgacctccttcggtcaagggttgcactcaacccctctcaagtgatccaaagatcaaacttgagtaccactgttttattccttatatcaagttttccctttgtgaggaatctccataagttggagtctctcattccttatacaaataacctcgatcaaagcataagagtaagggggagtagcaacacacacaagaacttaaattccagcaacacacgcacatgagtcaagaaaagagcacgagaaacaacacaacggagttacaactcaaacacgtgctcaaatctctacgtagtgaagaagcaacgtggtcgcgaggtctcgccattgtaggatgttcaaagaatgcttgatccttggctccatgcgcttagggtagccccaagggccaagagtcatttaatcttcatttggaaggcactgattgccttttgtctgtgggcgcaccggattgtccggtgcacaccggatagtgaacagttcacaatttcttgccttctttgcgaagccgaccgttgacagccattggccccatggcacaccggacagtccgatggcgcatcggacagtccagtgcatccgagtgaccgttgactcggctgatgtgacagccgctgatcgcgcggccggctgttggtcaggcacgtggatggcacaccgaacagtctagtgaattatagctgcggcgcctcaacaaattcccgagagtggcatgttcatcgttttggccagcctgggcatcagacactttccagtgcacaccggacagtccggtgcaccccagtcttattcaagtttggccaaacttagccaaacttctccgttccaatttgtctcgacttgagaagtttcctagcacttagattagcatagttagtaacaaagacaattgactaagtgctagattcatacctttgattcgtcattccattgggattggcaatgtgctcagactcatagtaggcatgtttcaacaaagtgatgtgttgggcacttaatcaccaaaactctttagaaatggcccaagggcacatttcccttttagttctacccatcacaaaatgctttgcaacctataacacaatcctaactagactaccaaagtacactaggaatgtaagtgaatataatagaactcaagcaagtgtgaaaacaaaaatgttgtaagtaaatttgatgatctagcaaaagggtgcaaacaatcataaaaaaggtttaccaatgattttggtggacaaaacactactccaagtcgacgtttgatctccaccaaggatattttcctagttattgaggctctctcagtcaagaccttatactatatgtgatagtcgcctagagggggggtgaatagggcgaaacgaaatttacaaatataaacacaactacaagctgggttagcgttagaaatataaatgagtccgagagagagggcgcaaaacaaatcccaagcgaataagcaagtgagacacggagatttgttttaccgaggttcggttcttgcaaacctactccccgttgaggaggccacaaaggccgggtctctttcaacccttccctctctcaaacggtcccttggaccgagtgagcttttcttctcaaatcaaagccgggaacaaaacttccccgcaagggccaccacacaattggtgcctcttgccttgattacaatggagttgtgatctcaagaacaagtgagaaagaaaggaagcaatccaagcgcaagagctcaaatgaacacggcaaatcactctcactagtcactagggctttgtgtggaattggagaggatttgatctctttagtgtgtctagaattgaatgctagagctcttgtagtagttgagaagtggaaaacttggatgcaatgaatggtggggtggttggggtatttatagccccaaccaccaaaagtggccgttggaaggttgtctgttcgatggcgcaccggacagtccggtgcacaccggacagtccggtgccccctgccacgtcatcactgccgttggattctgaccgttggagcttctgacttgtgggcccgcctgggtgtccggtgcacaccggacaggtactgtttgctgtccggtgtgccagcatgggcgattctgactcctgcgcgcgctgtgcgcgcattaaatgccgcagcaggtagccgttggcgcgaagtagccgttgctccggagtcgcaccggacagtccggtgcacaccggacagtccggtgaattatagtggactagccgttggagtttcccgaagctggcgagttcctgaggccgacctccgttggcgcaccggacactgtccggtgtacaccggacagtccggtgaattatagccgagtcgcctcagggaattcccgaaggtggcgagtttgagtctgagtcccctggtgcaccggacaggtactgttcactgtccggtggcacaccggacagtccggtgcgccagaccaggggtgcctttggttgccccttttgctcctttgttgaatccaaaacttggtctttttattggctgagtgtgaacctttttacacctgtataatctatacacttgggcaaacaagttagtccaaagatttgtgttgggcaattcaaccaccaaaattatataggaactaggtgtaaccctaattccctttcaatctccccctttttggtgattgatgccaacacaaaccaaagcaaatatagagatgcataattgaactagtttgcataatgtaagtgagaaggttgcttggaattgagccaataaaactacttacgagatatgcatggaatgtttctttcttatataacattttggaccacgcttgcaccacgagttttgtttttgcaaactcttttgtaaatctttttcaaagttcttttgcaagtagtcaaaggtgaataaataagattttgcaaagcattttcaagatttgaaattttctccccctgtttcaaatgcttctcctttgactaaacaaaactccccctaaaagagatcctcctcttagtgttcaagagggttttgatatatcatttttgaaatattactttgtcccccttttgaacacaaataggataccaattgataaatactcttggaagaatactaagtttttgaaattggtggtggtgcggtcctattgctttgggctcatttctccccctttttggcatgaatcgccaaaaacggaatcattagagccctcaaagtgctttcttcacctttggtcataaatgaatgagttaagagtataccaaagacgaagtccttttccttgatgctcatttctccccaaggaatagagagttgcttggagtgatggcgaagtatgagttacggagtggaagcctttgtctttgccgaagactccaattccctttcaatatacctatgacttggtttgaaatagacttgaaaacacattagtcatagcatataaaagagacatgatcaagggtatataaaagagcaatgtgtgcaattttaacaaaagaagttcctagaatcaagaatattgagcttatgcctaagtttgttaaaagattgttcatcaagaggcttggtaaagatatcggctaattgatctttagtgttaatgtaagaaatctcgatatctcccttttgttggtgatccctaagaaaatgataccggatggctatgtgtttagtgcggctatgctcgacgggattgtcggccattttgattgcactctcattatcacatagcaaagggactttggttaatttgtaaccgtagtcccgcagggtttgcctcatccaaagcaattgcgcgcaacagtggcctgcggcaatatactcggcttcagcggtggaaagagcgaccgaattttgcttctttgaagcccaagacaccaaggatcttcccaagaactggcaagtccccgatgtgctcttcctattgattttgcaccccgcccaatcggcatccgaataaccaatcaaatcaaatgtggatcccctaggataccaaagcccaaacttaggagtgtaagccaaatatctcaagattcgttttacggccgtaaggtgagcttccttagggtcggcttggaatcttgcacacatgcatacggaaagcataatatccggtcgagatgcacataagtagagtaaagaacctatcatcgatcggtataccttttgatccacggacttacctcccgtgtcgaggtcgagatgcccattggttcccatgggtgtcttgatgggcttggcatccttcatcccaaacttgtttagaatgtcttgagtatacttcgtttggctaatgaaggtgccctcttggagttgcttcacttggaatcctaagaaatacttcaactcccccatcatagacatctcgaatttctgtgtcataatcctactaaactcttcacaagtagactcgttagtagacccaaatataatatcatcaacataaatttggcatacaaacaagtcattttcaagagttttagtaaagagtgtaggatcggcttttccgactttgaagccattagcaataaggaaatctctaaggcattcataccatgctcttggggcttgcttgagcccataaagcgccttagagagcctatagacatggttagggtactcactgtcttcaaagccgggaggttgctcaacatagacctcttccttgattggtccattgagaaagacacttttcacgtccatttgataaagcttcaagccatggtaagtagcataggccaataatatgcgaattgactcaagcctagctacgggtgcataggtttcaccgaaatccaaaccttcgacttgtgaataccctttggccacgagtcgagctttattccttgtcaccacaccatgctcatcttgcttgttgcggaagacccatttggttcctacaacattttggttaggacgtggaactaaatgccatacctcgttcctcgtgaaattgttgagctcctcttgcattgccaccacccaatccgaatcttgaagtgcttcctctatcctatgtggctcaatagaggaaacaaaagagtaatgttcacaaaaatgtgcaacacgagatcgagtggttacccccttatgaatgtcgccgaggatggtgtcgacggggtgatctcgttggattgcttggtggactcttgggtgtggcggccttggttcttgctcatcctccttttcttgattatttgcatctcccccttgatcattgccatcatcttgaggtggctcatttgattgatcttcttcttcatcgacttgagcctcttcctcatcttgagttggtggagatgcttgcatggaggaggatggttgatcttgtgcatttggaggctcttcggattccttaggacacacatccccaatggacatgttccttaatgcgatgcatggagcctcttcatcacctatctcatcaagatcaacttgctctacttgagagccgttagtttcattaaacacaacgtcacatgatacttcaactagtccagtggacttgttaaagaccctatatgcccttgtgtttgagtcataaccaagtaaaaagccttctacagttttaggagcaaatttagattttctacctcttttaacaagtataaagcatttgctaccaaagactctaaaatatgaaatattgggctttttaccggttaggagttcgtatgatgtcttcttgaggattcggtgtagatataaccggttgatggcgtagcaagcggtgttgaccgcctcggcccaaaaccgatccgaagtcttgtactcatcaagcatggtccttgccatgtccaatagagttctattcttcctctccactacaccattttgctgtggcgtgtagggagaagagaactcatgcttgatgccctcctcctcaaggaagccttcgatttgagagttcttgaactccgttccgttgtcgcttcttattttcttgatccttaagccgaactcattttgagcccgtctcaagaatccctttaaggtctcttgggtttgagatttttcctgtaaaaagaatacccaagtgaagcgagaataatcatccacaataactagacagtacttactcccgccgatgcttatgtaagcgatcgggccgaatagatccatgtgtaggagctccagtggcctgtcggtcgtcattatgtttttatgcggatgatgagtgccaatttgcttccctgcttggcatgcgctacaaatcctgtctttctcaaaatgaacatttgttaatcctaaaatgtgttctccctttagaagcttgtgaagattcttcatcccaacatgggctagtcggcggtgccagagccaacccatgttagtcttagcaattaagcaagtgtcgagttcagctctatcaaaatctaccaagtatagctgaccctctaacactcccttaaatgctattgaatcatcacttcttctaaagacagtgacaccaatatcagtgaatagacagttgtagcccatttgacataattgagatacagaaagcaagttgtaatctaaagaatctacaagaaaaacattagaaatggaatggtcaggagatatagctattttaccaagacctttgaccaacccttgatttccatccccgaatgtgatagctcgttggggatcttggtttttctcgtaggaggagaacatcttcttctcccctgtcatgtggtttgtgcacccgctgtcgagtatccaacttgagccccggatgcataaacctacaaaacaagtttagttcttgactttaggtacccaaatggttttgggtcctttggcattagacacaagaactttgggtacccaaacacaagtctttgaccccttgtgcttgcccccaacatatttggcaactaccttgccggatttgttagttaaaacataagatgcatcaaaagttttaaaggaaatgttttgatcatttgatgcactaggagttttctttctaggcaacttagcatgggttggttgcctagagctagatgtctcacccttatacatgaaagcatgattagggccagagtgagacttcctagaatgaattctcctaattttgctctcgggataaccggcagggtataaaatgtaaccctcgttatcctgaggcatgggagccttgcccttaacaaaattagacaatcttttaggaggggcactaagtttgacattgtctcccctttggaagccaatgccatccttgatgcccgggcgtctcccactatagagcatacttctagcaaatttaaatttttcattttctaagttatgctcggcaattttagcatctaattttgctatatgatcattttgttgtttaattaaagccacatgatcatgaatagcatcaatgttaacatctctacatctagtgcaaatagatacatgctcaacgatagatgtagagggtttgcaagattttaattctacaaccttagcatgtaacatgtcattcttggttctaaggtcggaaatagtagcattgcaaacatcaaaatctttagccttagcaagcaatttttcattctcaattctaaggctagcaagggaagcattcaactcatcaatcctagcaagtaaatcaacattatcatctctaggatttgaagttgaaatattgcaaacatgtgaatcaaccttagcatttaaactagcattttcattcctaaggttgtcaatcatctcacggcaagtgcttagctcactagataattgttcacatttttctacttctagagcataagcatttttaaccttaacatgtttcttattttctttaattagacagtcctcttgggaatccaaaaggtcatccttttcatgaatagcactaaataattcatttaatttttctttttgttccatgttaagattggcaaaagggtacgcaagttatcctcctcatcactagcattttcatcactagaggtttcatatttagtggaggatcttgattttaccttcttccttttgccgtcctttgccatgaggcacttgtggccaacgttggggaagagaagccctttggtgacggcgatgttggcggcgtcctcgtcgtcggaggagtcgcttgagctttcgtcggaatcccactcccgacaaacatgggcatcgccgcccttcttcttgtagtatctcttcttctcctttctcctccccttcttgtcgtcgcctcggtcactgtcacttgatataggacatttagcaataaaatgaccgggcttaccacatttgtagcaaaccttcttagagcgggacttgtagtctttccccctcctttgcttgaggatttggcggaagctcttgatgacgagcgccatttcctcattatcgagcttggaggcgtctattggttgtcgacttggtgtagcctcctccttcttttcttccgtcgccttgaatgcaacgggttgggcttcggatgggtcgccaagctcgttgattttcctcgagccttctatcatgcactcaaaacttacaaaatgcctgataacttcctcgggggtcattttagtatatctaggattaccacgaatcaattgaacttgagtgggattaagaaaaatgagagatcttaaaataacatttaccacttcgtggtcgtcccacttcttgctcccgaggttgcgcacttggttcaccaaagtcttgagccggttgtacatgttttgtggctcctcccctttgtgaagccggaaccgaccgagctccccctcgatcgtttcccgcttggtgatcttggtaagctcgtctccctcgtgcgcggttttgagtacatcccaaacctccttggcgttcttcaacccttgtactttgttatattcctctctacttagtgaggcgaggagtattgttgtggcttgtgagttgaagtgctcgatttgggccacctcatcctcatcatagtcttgatcccctactgacggtacctgcgcaccaaactcaacaacatcccatatacctttgtggagcgaggttagatgaaattgcattaaatcgctccacctagcataatcttcaccatcaaaagttggtggtttgcctaatgggacggaaagtaaaggtgtatgctttgaaatgcgagggtagcgtaggggaatcttactatacttcttgcgctcttggcgcttagaagtgacggatgccgcgtcggagccgaaggtggaaggtgatgaagtgtcggtctcgtagtagaccaccttcctcatcctcttgtgcttgtcaccgctccgatgcggcttgtgggaagaagatttttccttcttctctttgtgatgagaagaagatttcttctccttccctttgttggaggagatcttcttcttctccatcctcttggtgcgggactcttccgatgaagtgctcccttggcttgtagtgggcttttcgccggtctccatctccttcttggcgtgatctcccgacatcacttcgagcggttaggctctaatgaagcaccgggctccgataccaattgatagtcgcctagagggggggtgaatagggcgaaacgaaatttacaaatataaacacaactacaagttgggttagcgttagaaatataaacgagtccgagagagagggcgcaaaacaaatcccaagcgaataagcaagtgagacacggagatttgttttaccgaggttcggttcttgcaaacctactccccgttgaggaggccacaaaggccgggtctctttcaacccttccctctctcaaacggtcccttggaccgagtgagcttttcttctcaaatcaaagccgggaacaaaacttccccgcaagggccaccacacaattggtgcctcttgccttgattacaatggagttgtgatctcaagaacaagtgagaaagaaaggaagcaatccaagcgcaagagctcaaatgaacacggcaaatcactctcactagtcactagggctttgtgtggaattggagaggatttgatctctttagtgtgtctagaattgaatgctagagctcttgtagtagttgagaagtggaaaacttggatgcaatgaatggtggggtggttggggtatttatagccccaaccaccaaaagtggccgttggaaggctgtctgttcgatggcgcaccggacagttcggtgcacaccggacagtccggtgccccctgccacgtcatcactgccgttggattctgaccgttggagcttctgacttgtgggcccgcctgggtgtctggtgcacaccggacaggtactgtttgctgtccggtgtgccagcatgggcgattctgactcctgcgcgcgctgtgcgcgcattaaatgccacagcaggtagccgttggcgcgaagtagccgttgctccggagtcgcaccggacagtccggtgcacaccggacagtccggtgaattatagtggactagccgttggagtttcccgaagctggcgagttcctgaggccgacctccgttggcgcaccggacactgtccggtgtacaccggacagtccggtgaattatagccgagtcgcctcagggaattcccgaaggtggcgagtttgagtctgagtcccctggtgcaccggacaggtactgttcactgtccggtggcacaccggacagtccggtgcgccagaccaggggtgccttcggttgccccttttgctcctttgttgaatccaaaacttggtctttttattggctgagtgtgaacctttttacacctgtataatctatacacttgggcaaacaagttagtccaaagatttgtgttgggcaattcaaccaccaaaattatataggaactaggtgtaaccctaattccctttcaatatgccacaaatacactattaatatgtatcattgatagcctcaaaagtcactagtagcctcacattcggtcacttgacacctcttcactatggagcttgatccaacaaggaatgaaggggcctcatcatcctcgcacaaggtctttttactgctccatgataagacaaaagatcatcaaggatgtattgagccataaagcccccaaggctacgtatggtacaagtatgattcaccatagaaccaacaacttcttgagatcactctatcatacatgcttgtactaaataacactttgaaagtttggatctcttctcaagttcctatgcttgcatctgatcttaaataaccctagcacttcaaaaggttgcatggaaaggggtataaactgactagtcaactagaaattatcattgtcgaatgaccacatgtactcacaaaatgacatatctagtagacatcttatgtaggcactacatcatctgaggtgtagaacttctcatcaactaaccattgggcattgtcttaagttactatatgaaactcatgtaggtagttgtatgatgtttagatattccaatcaaatgaacatatggcgagtcctttaaaccttgccacaccagatatgcatcacttgaagttacattgcaaaaatcaagtgctccttcttttgctttgcatcagatcatttggtgtgtataaacatcaaggtattgaactcctaccttctttgtgataataagttgttgcttcgtgccatgctaccacgaaatcatgaatttgtgcattttgcacacttccctccttaagcactatgcaaaactctagactttgtatttttttgcttagtagattatcaagaattttttatacttttactttgagtagtacatcaaactttagtggttgcaattttcttgacatcaaacacctaatgtacacattctatataagtctttacttagttttcttatatctttgtcctagcttcgtggacttatcttgcattgctttgcatcctcatgacctactaatcacattcttggcaaatatgttattattaatgactatgttgttacttaatcatcaaaatataaaattatgactttgaaggtcataattgtgtataattgatagtttcgagtgcttaattttggattttggtgtggtttattccccctttggctcagatagatgcctatgttgtgatataaaaaagtattgtgcaatgttttgatgttgctaaactattataggtgcggaagaaatacactttggctcatgtgttgcatgcgtgtttatatagagttgaaaccacccttgtcgtggattacatcaaggtcgttacaagcttgggcggtactcatggatcataacaacctatcaaattgtctaaaagtgccgccatctaaagttactacatgcttatttatttgttatacaagtttatctatgatacaccccatcaatcatgaccaagctaacttaaggttgttcttaaagttttcaagttgttgaactgttagagatttgttgaatccctttactgacatgtctttagaaggaaaaatgagcatacacttaaatatgtttagtatgagcatgaaacattgaggtagctaccaaatataggccctagattgtcacaacataatttggcttcctatggtccatgtatactaatttcttgtatcaaagcttgaatctacaccacctcaacaatggcattagctatgactttctaatctgtcttaatgtttggtggtgagatagtagcttatttgcgactactccaagaaattagatttgatcctaagaatacaaaaaaaccactagtggaacatttatcatcaaggcatccttcttagtctacataaaaaaatacacttaccaaaagtgatttgcttcttccaattttaagcccaactttggtacacatttttagatacctcaagatcctcttacaactacctaatgttctagtgtgggagtatgcaagaactgacaaactttattaataggaaaaccaatgtcaaacctcatgagagtcaagtattaaaagtgcaccaactatgttgcgatataactttgcatcattaactcctaaaggagttccctcaaaagctaacaacatctcattaaccgacaattgcaaacttgcagtgcaacattccaacctttttcaatagatctgtagcatatttgtcttgtgacaacactatggcattagaaactttgttcacttccatacatagaagatagtgtaactcacctagatattttaaggcaaactcctcactaaattttttaagaggttagacacactaacttagattgaacttgcaactatgatgccataaacgtatattataacaaacatagtgatttcattactattgagataggacaaagatgtgtctactttggatgatctaaaaccaagttccaataattttgcactcaactgataataccaagcccttggagcttgtttcaaaccatatattgctttatctaacttgcaaacataatttagcatagttttatttttatatcctagaggttggaacatgtacacatcatattttaaatagccatgaacaaaagcattctatacatctatctagcaaagaaaccaccctctagaaattgttatagacaaggtaagtctcatagtagttgccctaacaactaactaaacatatcttcataatttataccataccattgcctgaaatcttttgcaatagttctagctttatatctatctataccaccgtctactctcctttaaattttaaagatccattacaatatatcacattactgcctttttgaagtcgagcaaggtcctagtttcatttttactagtgcaacatactcaatatctatgacatgttttcaatttttatctgctggagcttcttctagaacttgtggcatgccagttagaatttcatatcatgtgtctaaagatataaacatatccagataaaacatcaaggcacttaaaagcctttgtacatattgccatagcaaaaaagacactatttagagcaaaattagagctttcgatcgttgtagggatgaagattgggccaacaagcacaactgaagatacaaaggaacaaatagtctggtttagtgtaaaaaagttgctctaaaggtgtgtcaaattgaactactttgttgggtgtacgattgaagtggcagtaaggaaagcctcattccaaaacttcagtggcatagatgcttgtgctaagagataaaatctacttcttatatatgtatgtgttttctctcaacaaagctactttgttagtatgcatgagaacaggaaacatgatgagatattccaactgcggtaaagaagggatgaatttttcatattcacctctccaatctatttatgtggatataattttaatatcaaacatcctttctagtttctaccatagtttggaatccatggaatcgtttatacacataagatttaaatttcaataagtaaattcaagtagagttgctataaccatcaacgaaactaccataatatttatattgtctagaagagtctagagcaggacaccacatatcttagaatataagttgcaatagatagcttgacacattggatgacatacgatagggaagttgatagctctttactttctaacaagcatcacacatagacctattattagacaaaacttgacacatgatactatgacttctaatgtctttataagctatggggaacatcatatgaccaaagcgatggttccatatgtcaaaagatgtcttattgactccatggatatgtgttgtagcagatagggaagatggtacatggtacaatccattgcaccattggcctctaagaagagtgtcttcatgttccaatcctttatcgggaaaaattaggataaaaccccaataaaacattgctatgagacgcgagacgatgaactaaaataagatttttgtggttcgaggaacatgaagtatgttatttaatcaaagattgtgacttgggatatgggtagtagatttttccacatgactaatagccatacctaatccatttgtagcatggatgtcatcgcctccattgtacttgtcgtaaatggataagttctctaggtcccaagtgttgtgatccattgcctcggagaccatgtaccaattattatccatggtttgcaacatgtctttgttcaggtacatatgaatcatcatatttgtgtcagtaacgctctgctatgtgctcgatcttgaagcagatgtaataggctaggtgaccgatgaagctgttggtcctctagagttgttggttgttagtgtgctaacgtgaaggagatccattggtgccattgctgcctccacgtccattaccaccattatcgtggccaatgccactacaacctccatgattggcactcccacgtcatcatcaattggccatgttggttgaggacctaaaggacttgccttggtctagaagatccatccttgactcaaagacaagcatctgtgaatacaattcactcactaagattgaattcgttctaattagaactgaagacacaattgtgttgagaccatgatctagtccagtaataatgtatttaacaagttcatcatcatcctgagggcgctcaactatagtcattttatcatcgagtgatctcatctagtcgaagtactcaaccattatcatgattcccatctaattggcggccaaggtgagtcgtgtgttcatggcttgtgccctagttggggacaagaacatcttctcgactatgcccatgcctaagtagtagtctctttgatgctatatttgcaagaacatcctttgacagagctcataagatgaagcttaggatctgctagttcgacaccaaccattcttcgtaggtcaggttggcaactttgacgatattgtcattttgggaccgtgaattacaacgatgaccttggctctctaggttgcatggttggttttggctagcttttcggtgagcagagaggtaatcaaggaattcatggtgaagtcggaggaggaatatgaagcttcgggcatgtatgtggtagatatctaattgactttggtgaccatataaaactatagaggtgcggaagcaatacactttggctcatgtctgcatatgtgtttatatatggttggagcaatgatagtcatagattacatcaaggttgttacaagcttggacagtattcaaggatcccaacaacttatcaatttatatagaactatcaccatccaaaggtgttacatatttatctgtttgttacacaaccatacaagtttatttctaatagctactagacgagaatcacaatagtagtgttccatgtatcaagagggaagcacaaagtgtgctaggtaggtgagggaggcaaagcaatggccttaaaatgctagactagtgaggaggtgagttatcggagtgctctagaagataagagaggaagacaatgcagagataaggggcatggaaggaagatgactaatgatcattagaacccaattaccattcttattagcgattgagtgtaagttacaatattttcaaacgatcagtaaaatgaagtataacatcttgtatttaaagctaatgatagacaatcatgtctcatccaagcttcccctactcactccgaaaattggcagcataggtgggtgcttcagcttcagccttgggtgcctcctaacatggagcaactagtagtagctagtctagtacacctaggtgaatatttgatataatttggactaaaatacattggtggccatttaacttgtagcattgtatcatctcggaccctgaactcctaaaatggaaatctaagcccctaaacttgtaaaaatgtatcatttcggtctttaaactttcaatgtgcatatttcgatcattatacttgtatatttgtgtcatctgggtctctaaacttatttttgtgtcattaaagatctgctagaatgtgcatgttgagagtttaggtatcgggacgataaaacttcacaagtttagggaattagatgtgtactttgggagtttagggaccgaaataatgatacaacgctacaagtttagcgatcgccaatgtattttactctaattattgtacaaaattaaaggtgcttattgttagaaggtttgcacattatattttatatggttatagattcctaaggcatctatataatgtattctactattctagattggttcttaatttcttataaataacattctaagtaaaatccaacaaattaagactctaatatataaataaacagtaccaaagaaatagtctagctctcgtttccaaggccgggtggcctaataaacagttaggtcagacttcaaagctttgcatgcaggggcgaagaagtcatccatcttcaccacaagccagctctctacgtgcgcgatgtcttttgtaacatgcgtggactcacaattagagttgacaataagctctaaattttacgctataaaatataaagagcgcatttggatcgcaatccattaccaccccactcacaatactgctaaccttggagcag

SEQ ID NO: 508 - DNA, 19600 bp, Zea mays
  Intron number 10 from transcript GRMZM2G154716_T01 (locus GRMZM2G154716) derived from phytozome v7.0 (chr-ID 2; pos 222175842 to 222195441 reverse strand)
ggtttggcaagttgaacaagtgtttagctgaactggtaagcctactatgaatcatccttcatacaagcatttaatgttaaaatatttttatcagagctctttagtgatgcatgcacccataattgttggatttgtacatttcagtttatatcctttggatataaattcattggcaagttaagatatgctaagtattatagcttgagccaaatgttccttcaatgtggtacttgaaagtcacctagagggggggtgaataggcggaatctgaaaattataaacttaagcacaactacaagtcggggttagcgttagaaatataattgagtctgaaagagagggagaaaacaaatcacaagcaaatgaaaagtgagacgcgatgatttgttttaccgaggttcggttcttgcaaacctactccttgttgaggtggtcacaaagaccgggtctctttcaaccctttccctctctcaaacggtcacctagaccgagtgagctttcttccttgatttcccgggtcacttagaccccgcaagaaccaccacacaattggtgtctcttgcttcgcttacaaggttttgagagtaagaatgagagaaagaagaaagccaaccaagcaacaagagcaacaaaagaacacaagtcgatctcctcacaagtcctaagaactagaattgaattggggactttgatttgatcagaggctttgatttgtgtcttggagtgttgtgtatttctcttgtattgaatgaggtgtagtgaatgcttggatgccttgaagtgtggtggttggggggtatttatagcctcaaccaccaatatggccgttggtgaaggcttctgtcgtatggcgcaccggacagtccggtgcgccaccggacactgtctggtgcgccagccacgtcaccaggccattgggttccgaccgttggagcttctgacaactaggccaccggacagtccgatggtgcaccggacaggtcctgttcactgttcggtgcgccttctggcgcctgctctgacttctacgcgcgcaggcgcgcactgtttgctttcactgttcacttgcagacgaccgttggcgcgaagtagctgttgctccgctggcacaccggacagtccgatgttacaccggacagtccggtgaattatagcggagcggcctccccagatttccgaggctggcaagtttgatttgattctccctggtgcaccgaacactgtccggtggtgcaacggacactgtccggtggcacaccggacagtccggtgcgccagaccagggctgccttcggtatactttgctcctttgttttgaaccctttcttttatctttgtattggtttgttgtgaacctttggcacctgtagaacatatattctagagcaaactagttagtccaataatttgtgttgggcaatacaaccaccaaaattcaattggaaaaggtttggaccatatttccctttcaatctccccctttttggtgattgatgccaacacaatccaaaggcaaaatataaaaagtgcagaattgaactagtttgccataaggaagtgcaaaggttgcttggaattgaaaccaataattatttctactagatatgcgtggatgattttctcttagttaaaattttggactacgctcgcaccacaagttttgtttttgcaaatcctttgtaaaattcttttgaaaacattttgcaaatagtcaaaggaatatgaataaatttgagagaagcattttcaagatttgaaattttctccccctgtttcaaatgcttttcctttgacttaaacagaaactccccctaaataaaattctcctcttagtgttcaagagggtttttgcaatttttgaagatactactttctcccccttttgaacacaataagatatcaatttgaaaaacttcatttttaaaatttggtggtggtgcggtccttttgctttgggctcatactttctccccctttggcatgaatcgccaaaaactaatacttatgagtgaaatataagccctttaactttctccccaatggcaaataaatagagatgagtgaagattataccaaagtggagaataatacggaataccgacaaatatcaatggagttgagtggaagcgccttctttgccgaatactctatttccttttcaattctatgactaagcataacaatatacttgaaaaacatactagtcatagacatgaagagagatatgatcaaaggtataaatgagctacatgtgcaaagaatcaaccaatattcctagaattaagaatatttagctcattcctaagtttggtaaaggtttgcccatctaaaggcttggtaaagatatcggccaattgatctttggtgttaatataggctatctcgatatcccttttttgttggtgatctctcaaaaagtgataccgaatggctatgtgcttattgcagctgtgttcaacgggatttatccgccatgcggattgcactctcattgtcacataggagaggaactttgctaaatttgtagccatagtcccctaaagggtttgcctcatctaaagtaattgcgcgcaacaatggcctggcggcaatgtactcgacttcggcggtagaaagagctactgagttttgtttcttttgaagcccaagacaccagggatctccccagaaactgacaagtccctgatgtgctcttcctatcaatcttacaccctgcccaatcagcatcgaaatatcctaataaagcaaaagaggatcccttagggtaccaaagaccaaacttaggtgtttgaactaaatatcactataccacaacccaaatttagcaactcctttagagtcgttaaaagtggctatagcaaccgaggattagtcggtatagacttatgccgactgcaagtataggtcggtgatactggcgtcggcaaaagtttttgccgaccgacgaatctatgccgacggatagtcggacaccataatgagtaatatcgaccgacctggttgtgccgacacgcagtttgtgactagttgtaccgactgatagtgaaacggtatatgcatttttagcgacccacagtttgacgcgaacttttcagacataaaatatgtacaatatatttctaattattataatacccccaaattatcaatacaattcaccatttgcacacaattattggcacaatcattcattgattcaacatcagcatagaaacattttgatttctcaggacacacaagaaattgttcaacaatctttgaaacaaaggtaccaagcacaagcagcaaaagtgcattgtcgcttccaaacagcacacagtcagtactattacagttgtcaacacaacaacccaaaagctataaccattctccattacaccatatgcttgcaacccaaaagctacaactacagtcttaatgtaggaaacccaaaagctgcaaactaagaagacaacccttctccattacaccatatgcttgctgtttgaacaagttgctgtcagctggtccatcaaatgtgctacctagcatatcccagaattacctgaaatgcaatgagtagctatatgaacataaggcaccacaactcaacattgagtatgcaggaaactgcagaaataatatggagatcattccctctcatagcccaggaagtgcccatcaggacatacaacaaataattatttatacaaagagaaagggggctgccacacccagcataaacaactaatctttccccagcctaacaaggtccctcatttccccaacctctatttcctcactgcatatgcacaacagctcaattgatggtgctatgaactctgaaccaaccaaaacacaaatgtgaaatagcagcaatctagtgttctaattgatggcgctcactgcataagtagataatggagtccagggttctaattcagcaatctattaaatgtgaaacataaactaagtcacatagataacaaaaaatgaaatagcattttagagtgcaccatacatgatacatgataagaaatttagaataataggttctgcaaaacaaacacgaaacaactaacactaatcaagattgcagtatttatagatggatgtttccttttgctactagtggaaaggaagagctatgtggtcctatgcatgtgaataagaaaaaacaaaataccataccagtagcaacatgggatgatttggaagccttgctgaccttcatctatcaaacataacaacaattagaaactttgtttacactaagacatgaaaaatagaagcaaaggcaagtgcagttattactctcttgtatggccatgcaacaggcatcatataagcatcacccatggtctccatatggtcataagggcgaggcagatctgcatccctttttagcacaacattcacaactacttcacaaaattgtgttccaagattttcacctcctagcacagtgtttggattagttgaagtaattgttccctttgccacaggatcagatctcaacattgcatagagtatcacatcttccccaacctgaagcagataacatatttgtgagaacatagtcaatggatagaactgctattaaatcagaagcacaaacttgtagaatagatgagaatgttactagtgcatcatgtgaaaagtgagtggcagtatcatttcttagctgaacatcatgtgaaaagcgagtggcagcatcatttcttggtcgaacatcatgtgaaaagcgagtggcagcatcatttctaggccagactgatgtggttgctcttttaggttgaatcgggttgcattcattgggtggtacagatgtttgtgcaccatcttccccaacctgaaatacataacatatttgtgagaactgcattaagtcaatgaataaaactgaactatttttaagtgacaggtacaaacttgtagaatagttgagaatattacaagtgcatcatgtgaaaagcgagtcgcagaaacaattcttggcctagttgtggtcacgcttgtagggcgaatattaccacccctggggagaaacacgtactcatcctcttcacaatggttatctagagaagcatcatcttcttggaactgagcatcatgcgcctggtgaatatgctcctctcttgggctctacatgaaagattaaaatatataccataattatatatctacatgcctaatgaaacacatgcctaaggttctaagtagcttttcctgtactatagaaaaagaccataaaataaataaacatttatagaaagcacacctgcgaatggagtcttgaatttgaatcattgtgtgatcccatttcaacattttgcttttctcgttccatcatttcctcttgcatatccgctatacgtttttctaaggctgctttctcactttcaagctttttgcgagcaaaaacttccatttgaagtcttgttggtgtgtagcacttcaacccaggggtaccaacttcttgaggagttggacctagacccaaaacacgaacccgtcctcttggttccttttctccacaaacggcagcaaaggcatcaccttgttgaattgatctttccttcaactctggacgtgcttcaactattgctttaagtttgttctacaaaaaagaatgtggatgtttatagaccaaaagtagtgttaatattgaagttttttgagggacacacttacaattattggttctgctggacccaagggaactccattttttcttgtatgtgttttgatataaagttcatctcttcgaggaggacgccctagtttcttttcctaaagtgttttaatttagttgtgaaaatacaaaacaaaagtgtagtaaagtacaacagaatagataattcttcataccatttcatgaccagaacaagcaaagcttttactgccagatgtatgatgttgctccaactttgagcgattgaccttggcaatttccgtgcgagcctatgttagaaataaataaattcagcacactttttcactatataatgcagtttaatatattaatttttccttacatcaaagttaggagacatccaatattctgtgagaaaattccaagcatcatcatcaactctgtcaccaacttttgtcttcagctcctcatttgttagtttctcattaaagtattgctcctttagggttgccttgaattccttccattttctcccggcactagcaaggaaccaattgaaggcagcagcatcgatgtcatagatttcctaatgtaccatggaagagctgaacagtcatttaccacataggaatataatgttctctagtacacaagtcatagtgcacaacaaaaccagtagcaaggaaacaggggaatactactccaacagtgagtatataattctagaacatatgtctgaaatgaattctatacagcagacatcagatgaagtatccagcctgcagtttggacaaaatgtcgattctagtgttgatgaagtggtttctgtcgggctatttttcatttatataaagcttgagaataaacaggaccttggcataaaaaagcacaccagctatgaggtcccttggcataaaaaaagcttgagaataaacaggctctgtgaacaccagctatgcattcccatggtttacctgatgacttgatgacttacttaagaaaactaaagaaaagctgacaacacaaacaatacaagcaatgatagatataataccttaatgcttgtccaaacttcatacttcttttcagcaggaaccagcctccaatcagcacatgcaactgatagtttcttcctcactagacacccaatggcactagaaaacttcctacaatcttttccaacaggctgaccatgttcatttagtgttatttttattttaggcatgtcagatttccttgcgaatatgtcatctagcctagtaataccccttcctttccctgctcgtttttttggaatgtcttcaaaatctgctgcaagtaatttaaaacataagaaatctgaaataggtcaacatatatttatttatgatacaagagaatatgcatactacaaccttcattatcacatagaaagtctccatctgattgatttatcacaagatcttcagcgatctgtatattttcattcccattatagtttctttgtggccttgcacgtaaattatgaccttcggttgctacaacacttgtgtcatgagtcctctacaaaaaagccccatgatgttgtaaatattaccatgaaaaatgtgcaatggacctgtagtttagagaaaacctttgttcttttctcggatggacccgcggtcttcaaagtagggatattaagagatgctagcttccttttgttttctgcaatgattgctatccgttgctgctcgtacgcatttataggggcatcattaatgtttcttcttgcatttgtcatattttctcctgaaaagaaggacaccaaattagcgatctttgcaaggtagtaaaaatttccagcatgtaccattttttacattacttacttcgtagagctttttttagacttttttggaccaacaattataccatctatatctgctctaacagaagggacaacacctcttacaatatccactgtcacattgccattgagaatgggaaaaagcatagcttgtccactacaattatctgtgtgctcgttctccaaatcatccacatcatacaagtccctaggttttgactgaacaacagcagcccactcagtatcaatcggatcaggaacatagaatacttgaagtgcctgtgatgctagaatgaatggttcatctgatattttttcaccggtattgaacagatgcttgaaattgacatttgtgatcccaaattgatcagtttttacccatttgtgctccacacgattgtcaacccaatcgcacttgaacaacactacatttccgttgtggtgatagtttagttcaagaatttcctttataataccataataggccttgtttccaataataatgtcatcatttctgcccccttcaaagcatgttgactctgcaactacaacaaccccactattttgaatagacctaccctcatcataggactttgtgtggaaattgaacccattaatggtataactactatattgccgtgcaaccatcattggtgccttagctaaaatttttatctcatgtggtgcttcttcaccaatttcttccacctgtgatattgaaatactagtgtcaaagttaaaggtaatttcatatcaaatagtatatgcttagttttattcttacttacatgcaacctaaaccactcatgaaaggattcatgctgcatgcggttgaccgctcgtttattccgaaccccaattgaggagagatagtgagcatgcttgctgtaaaattcaatttatcatttctaatgcaacaggaaagggatcatctaatgacaagaataaagaaaacttactccaagtaaggacctatattgtcgtagttgaacaagacgtatctatgggcttgtagccatgttttgtggtctaaattcactgtgcacttcccagctaatcctcgaccaatgcaatggaagaaaggagttgtactatattgttcatcatctctaagttgatggttcaaatgagtctcaccatgtaaataccgagcacaaaatgtaaggcactcagtaaacaaagaccactccataattgatccctcacagtggctttttgtatgaacagaacccttcaatctcatcaaatacctatgcacataattagcaaattgttaatgttataatgtttgtgtgtgtaatatttttcactgtggtagaatatgtctacgaaaattacctctctactggccacatgctacggaaatggactggaccagctatccttgcttgggtaggaaggtgtaccatcaagtgtaccataatatcaaaaaaagaaggtgggaatacaatctcaagaaagctcaatgtttcagctatatcagcctcaagactttccatatcgctgattcgaatgacaggtgatgcaagtttcttgaaaaaattacttatacgaatcactccagcgctgaccacctcaggcaatatttttctcacagcaagcggcagcaggtgttgtagaattatgtggctctcatgactcttaaggccaaatacctttttctctttaacatgtacattatgtcgtatatcagatgcataaccctcaggaaacttcaccccttttagtacttgacagaatagctttctctcattagaactcattgagtaaggtgcaggtggtaaataatattggtcttcaacttcaatggggtgaagatcacctctaatgcctagagcttaaaggtccaaccgagaattcaagttatccttcgattttccatctgtgcccaaaaatgtattaattaagctttcactcacattcttccctatgtgcatgaagtcaaaattatgtcgcaacattaaatctttccaatatgggagtttaaaccaaatagatctctttttaaaaatgactaatggttccccttccttgcgtctcttgcgctttgcttgtttttttccggatggatccttgccaaaaattggattaagatctttagtgcactctaaaatttgttctccggaaagcggagtaggtgctggcctaaactcagttttgccaccaaatttatcagcatcaaacctaaatgggtggttttcatgcaagaatatacgatgatccataaagcaagtcttgctgccattactaagtctaagtgaacaagtatggtagtgacaatcaggacatgctgcttcaccagaggtgatagatccggacgtgtaccctagacctgggaaatcagtaatagtccacaatactgctgctcgcaaattgaagaactcaccctttgaagcatcataagttctaactccattgacaaacatatctagcagatcatcaacaaggggttgaaaatagacatccatcgcactaccaggtccatttcgaccaggaatcagcaaagaaaggataaaatttgattgcttcatgcacattgaaggtggaaagttgtagggaatacaaataccaggccatacactatagctaacattcttgctcctaaatggattaaagccatcagttgcaaatgctaggcggatattacggctatctgcagcaaagttaggatgtttttggtcaaagttctgccataaaggtgaatctgcaggatgccttagcaaaccatcttttttccggtcctcatcatgccatctcgttagacttgccattttagaggtcaaaaataacctttggagtcttttcttgattgggaaataacggagaacctttttagggactttgtagatatgtttcccatctagactctttcgtattgatttccaccgtgaaaccttacattttgggcatgaatccaaattttcattgtccttccaatagagaatgcaatcattttgacatgaatgaatactgttgtacccaattcctatagatttcaccaatttcttagcttcataaaagcttttagggagtgttgaaccctcaggaagggcatcattaagtagatctagtagcaggttcatagatctattggtccatcctccaaggagtttgatgtggagtaatctaattaggaaacgcaattgtgtatatttctggcaactgggatataactctttgctattttctgcgaccaatttttggatggaaactagctcttcacaaggctcaataacagaactattgtcctcaaaatcacctctatcatctaaaccggcaactaaatctctaagcaaatctgatatgtcatcatcttcgttagactcctccgtagcctcaatcccttgattaacagaagaggagctagcttctccatgtaagttccatattttgtacccttttataaacccatcacatatcaagtgttcacgtacttcacttgcctctctccaaaatgagttaaaacaccttttacaaggcataatattttgttgcctatagctgaattcctaaatgcaaaagctaagaaaccattcactccttgttgatataccttggtgtgcctacatgcaaatttatgttaaattctatgttacttgacaattaacaacacattcaatgtttgtgaagtaattaatttgtacctagcctcggcatcgatccaggttttatccatgctcctctgtgtaggacatcggcaaacttttgaaattagctcctctgtgtatccatgcttatctatattagtttttaattaagacctatatttgtctatattatttgtaaaattgcatgtgcttcctataaaaatcgaaaccggattcacttcatgtaaaaaggggggtttctttttacctatagcagagtgacctaattaacttctctgcctcaaaaatgagcttgtcacattacagtaaaatgaatcgatagaaatatattaattcgatagaaaattttgggggaaattgagatcgtcatcttctcacacacaggcttgtgctcacaaggctgacctcaatgaatcgatgtaaaatactcaaatcttagccattcaccttaatccccaatttctcacctcaatctctcggtcctcattgtagcactgcagcaacagcacctaataatgggtagcagagtagtagtggtttggtttttgatcaaacaacaagtgattcttagccgcacttgagtcgtagcaccagtaaagaacacttataaaaggatggcctgaaatcccagtccccaaccgtccgcaccaatggctagcacacaacacttcgagtctgtagcagctctgctgcatgccgaggcacagagcgaccgcgtccatagcagacaacggcaccgtccagctcgcatgctgcccttactcctggtggctggcatcgctcgcccctgccaccacctccgcaccccagtcccaaagctgcggcgctcgcaagtcgcacctccactgctacaaaaacgcctaagcaaagcaacagtgcttctcacctggaacttgtgcactgctatagcaatggcagagcagaatcttcggcccgacgacggtggcgcactcctcgacaacggcgagctccacggcccgatgacggtggcgcgctcctcgacgacggcgatgtccacggcccgacgacggtgacgcgctccccggccgacgcgcgacggtggccgtggatccctggttgcagcgtacgacggcgtcgattggaaagcaacgagtggcgactgagatagttgcgaaaagaaaagtgctagggtttaattaggcaggctttttagcgcgggatggcccaatctatatgccgacacatgggctgttgtgacatatatcttagccgacggatacttcgacactaatataccgactaatgatttgtcggaaaatctaattataccgacccatgatctgtggactatttttaccgactgaccatgtgtccacaattattgatttataccgactgatgtccgacgctattctagtgttgtggtatagtgtatctcaagattcgcttcacggccctaaggtgaacttccttagggtcggcttgaaatcttgcacacatgcatacggaaagcataatgttcggtcgagatgcacataaatataataaagattctatcatcgaccggtataccttttgatctacggatttacctcccgtgtcgaggtcaagatgcccattggttcccatgggtgtcttgatgggcttagcatccttcattccaaacttggtgagaatatcttgaatgtactttgtttggctgatgaaagtgccctcttggagttgcttcacttgaaatcctagaaaatacttcaactcccccatcatagacatctcgaattttttaatcatgatcctactaaactcttcataaataaatttgttagtagacccaaatatgatatcatcaacataaatttggcatacaaacaaatcattttcgatagtcttagtaaagagagtaggatcggccttgccgactttgaagcctttagtgataagaaaatctcgaaggcattcataccatgctcttggggcttgcttgagcccataaagtgcctttgagagtttatatacatggttaggatactcactatcttcaaagctaggaggttgctcaacatagacctcttccttgataggtccgttgaggaaggcactcttcacgtccatttgataaagcttaaagccatggtaagtagcataggcaagtaatatacgaattgactcaagcctagctacgggtgcatatgtttcaccaaaatccaaaccttcgacttgtgaataccctttggccacaagtcgtgccttgttccttgtcaccacaccatgctaatcttgtttgttgcggaagacccacttggttcctacaacattttggttaggacgtggaactaaatgccatacctcattcctcgtgaagttgttgagctcctcttgcatcgccaacacccaatccgaatcttgaagtgcttcctctaccctgtgtggttcaatagaggaaacaaaagagtaatgttcacaaaaatgagcaacacgagatcgagtggttacccccttattaatgtctcctaggatggtgttcacggggtgaccttgttgtattgcttggtggactcttgggtgtggcggccttgggtcttgctcatcctccctgtcttgatcattggcatctcccccttgatcattgccgtcctcttgaggtggctcatcttcttgatcttctccttcattgtcttgagcctcatcctcatcttgagttggtggagatgcttgcatggaggaagatggttgatcttgtgcttgtggaggctcttcgggttctttaggacacacatccccaatggacatgttccttagcgcgatgcacagagcctcttcatcatctattcatcaagatcaacttgctctacttgagagccgttagtctcatcaaacacaatgtcacaagatacttcaactagtccagtggacttgttaaagactctatatgcccttgtgtttgaatcataaccaagtaaaaagccttctacagccttaggagcaaatttagattttctacctcttttaacaagaataaagcatttgctaccaaagactctaaaatatgaaacattgggctttttaccgatgaggagttcataagatgtcttcctgaggattcgatgtagatacaaccggttgatggcgtagcaagcggtgttgaccgcctcggcccaaaaccgatccgaagtcttgtactcatcaagcatggttcttgccatgttcaatagagttctattcttcctctccactacaccattttgttgtggcgtgtagggagaagagaactcatgcttgattccctcctcctcaagaaagccttcaatttatgagttcttgaactccgtcccgttgtcgcttcttattttcttgatcctcaagtcgaactcattttgatcccgtctcaagaatcctttcaaagtctcttgggtttgagatttttcctgtaaaaagaatacccaagtaaagcgagaataatcatccacaataactagacagtacttactcccgccgatgcttatgtaagcaatcgggccgaataggtccatgtggaggagctcaagtggcctgtcagtcgtcatgatgttcttgtgtggatgatgaacaccaacttgcttccctacttgacatgcgctacagatcctgtctttctcaaaatgaacatttgttagtcccaaaatgtgctctccctttagaagcttgtgaagattcttcatcccaacgtgggctagtcggtgatgccagagccaacccatgttagtcttagcaattaagcaagtatcgagttcagctctactgaaatcaactaagtatagctgaccctctaatactcccttaaatgctactgaatcatcacttcttctaaagacagtaacacctatatccgtaaaaaagacagttgtaacccattttgcataattgagaaacggaaagcaagttgtaatctaatgaatctacaagaaaaacattggaaatagaatggtcaggtgatatagcaattttacccaatcctttgaccaaaccttggtttccatccccgaacgtgatcgctctttggggatcttagtttttctcataggaggagaacatccttttctccccggtcatatggtttgtgcacccgctatcgatgatccaacttgagcccccggatgcataaacctacaacacaaatttaggccttgttcttaggtacccaaacggtattgggtccttttacattagaaacaagcaccttgggtacccaaacacaagtcttggagcccttgtgtttgccccaacatatttggcaactatcttgcctgatttgttagttagcacataagaagcattaaaagttttgaatgaaacattatgatcatttgatgcagtaggagatttcttcttaggcattttaatatgtgtagaacacctagagctagaagcctcactcttataaataaaagcatggtgagatgagtcttcttggcatgaattctcctaattttatcttcagggtaaccagcagggtacaaaatgtaaccctcattatcctgacgcatgggagccttgcccttaacgaaattagacaatcttttaggaggggcattaagcttgacattgtttccctgttggaagccaatgccatccttaatgccagggcgtctcccattttaaagcatactacgagcaaatttaaatttctcattttctagttcatgctcgacaattttagcatctaattttgctatatgatcattttgttgtttaatcatagcaaggtgatcatagatagcatctacattaacatctctacatctagtgcaaatagaaacatgctcgacggtagatgtagagggtttgcaatcatttaattcaacaatcttagcatgtaaaaatggcattctcatctctaagattggaaatggaagcattgcaaacatccaagtctttagccttagtaattaatttttcattctcattcctaaggctagcaagagaggcattcaattgatcaatcttagcaattaaactagcattatcatttctaagattgacaattgaatcatcacaaatatttgacttctcaaccttagcaattaaattagcattctcaattctaaggttggaaatagtgtcatggcaactacttagctcactaattaattttttatttttctctacctcctgagcataagcatttttagtcttaacatgatttttgttttctttgattaggaagtcctcttggctatccaagagttcatccttctcatgaatggcactaatcaattcatttaatttctccttttgttgcatgttaagatttgcaaaaagagtaagcaagttatcctcctcatcactagaattatcctcatcactagaggttgcatatttagtggaggatcttgattttaccttcttcttcttgtcgtcctttgccatgaggaatttgtggccgacgttggggaagagaagtcctttgttgacggcgatgttggcggcatcctcgtcgtcggaggagtcgctggagctctcgtcggagtcccactcccggcaaacatgtgcgtcgccacccttcttcttgtaatacttcttcttttccttcctctttcccctttttgtcgttttccctgtcactatcactagacaatggacatttagcgataaaatgactgggcttaccacatttgtagcaaaccttcttggaacggggcttgtaatctttccccttcctttgcttgaggatttggcggaagctcttgatgatgagtgccatctcctcattgtcgagcttggaggcgtcaatggggaccctactcggtgtagagtcttctttcttctcctccgttgccttgaatgcaatgagttgtgcttcgggtacggaggaggaggcaccttgctcgatgatcttcttggagcctttgataatcaactcaaagctcacaaattttcctattacttcctcgggagacattagtttatatcttggatcaccatgaattaattgaacttgagtggggttaagaaatacgagtgatccaagaataaccttgaccatctcatggtcatcccacttggtgctcccgaggttgcgcacttggttcaccaaggttttaagccggttgtacatggcttgcgggtcttctccttggttgagcatgaagcgaccgagatccccctcgatcgttttcctcttggtgatcttggtcacctcatcaccttcgtgcgcggtcttgagcacgtcccaaatctctttggcactcttcaatccttgcaccttattatactcctctcgacttagagaggtgaggagtatagtggttgcttgggaattgaggtgttggatttgggcgacttcgtccgcatcatagtcttcatcccctacggatggtacctgtactccaaattcaacaacgtcccatatacttgtgtggagtgaggttaggtgaaatttcatcatttcactccacttagaataatcttcaccatcaaaaagccggtggtttacctaatgggacggaaagtaagggagtatttttaggagtgcgatggtagcgtaggggaatgttactaaacttcttgcgctcatggcgctttgaagtgacggacggcgcgtcggagccggaggtggatggcaacgaagaatcggtctcgtagtagaccaccttcttcatcttctttttcttctcaccactccgatgcgatttgtgaggaggtgattcctccttcttattgttgcgggactctcctgatggagccttcccatggcttgtggcgggcttctcgccggtcaccatctccttcttggcgtgttctcccgacatcacttcgagcgttaggctctaatgaagcaccgtgcttttgataccaattgaaagtcgcctagagggggtgaataggcagaatctgaaaattataaacttaagcacaactacaagccggggttagctttagaaatataattgagtccgaaatagagggagaaaacaaatcacaagcaaatgaagagtgagacgaggtgatttgttttaccgaggttcggttcttgcaaacctactccccgttgaggtgatcacaaagaccgggtctctttcaaccctttccctctctcaaacggtcacctagaccgagtgagctttcttccttgatttcccgggtcacttagaccctgcaaggaccaccacacaattggtgtctcttgcttcgcttacaagattttgagagtaagaatgagagaaagaagaaagccaaccaagcaacaagagcaacaaaagaacacaagtcgatctcctcacaagtcctaagaactagagttgaattggggactttgatttgatcgaaggctttgatttgtgtattggagtgttgtgtattactcttgtattgaatgaggtgtagtgaatgcttggatgccttgaagtgtggtggttggggggtatttacagcctcaaccaccaatatggccgttggtgaaggcttctgtcatgtggtgcaccgaacatgtcctgttcactgtccggtgcgccttctggcgcctgctctgacttctgcgcactgtttgctttcactgttcacttacagacgaccgttggcgcgaagtaaccgttgctccgctgacacaccgggcagtccggtgttacaccggacagtccagtgaattatagcggagcggcctccctagattcccgaggctagcaagtttgatttgattctccctggtgcaccgaacagtccggtgcgccagaccacggctgccttcggtatagtttgctcctttgttttaaaccctttcttttatctttgtattggtttgttgtgaacctttggcacctgtagaacatatattctagagcaaactagttagtccaataatttgtgttgggcaattcaaccaccaaaattcaattggaaaagatttgaccctatttccctttcagtactaccatggaacagatcgtcttccttggtgcttatgtcttataagccagatacagttacaacagctttagtgtgtttcaaatttaatggtgcatgtgtcatgttcgttgtcgtccaatggaccatgggcaattcacctttgttttatttatttatggatgggaagtggaatctatcaccgattcttggccgtggaaagctcgattcaaatactgccaaatctgtggatgtcttaggaaattcagattgtggatgtcttaggaaatttagattgtcagagattctcacatggatttctggtagctttattttttaatctagtaaatagtaatataattgaatactttacgtccatatgtgttccattggaagccgcataagtcattattgtctgaaccaattgaagtagttagtttctttgtgcttgaccacaagctcggaaacattgatataaagttgtacaagcaagaagatgtatttatttgcatgcttgtttaattattttttctaggatagcgtgctatattcttctctcctttgttcgtgaaccaattccaatattctaattgtatcacttccttcagcgtgtcatttaatatttttagcatcttattttggtgctaccaacttgcaatattaatctaaattccattgtgtaggttg

SEQ ID NO: 509 - DNA, 6096 bp, Zea mays
  Intron number 1 from transcript GRMZM2G138097_T03 (locus G RMZM2G138097) derived from phytozome v7.0 (chr-ID 3; pos 3 9741383 to 39747478)
cagcgccgggccgaggcctactccacgctacgaaggtaccgccgtcgttttccggtgcggcccagccgtcccagttctgaactatgaaccctaatggtcatacaaaagatttctggtgacgtgttaaagactctgtagtgctgtaggccagattgtgctggactctagttctgatatgattctgtagcattttattttattagccttgaacgcggtagtcgatacagtataggcctgtttcaaaggttcatcggaaacagttctgttcctgccaaaattggggaatttccagcaaaaacattagatatccatcctgtgagcagcccatccccgtcatgatgtctctgtctgctctcctgtcatctcatctagttatttttggtgcttcagtttattggttttttgcatcctgaagtgatgtgtttctatgttatgttcgtagttttaggttgtgttgctggtgtgcagtgtggatttgagttatacttgttgggtggttagagtaattattttcgtcttacaccataactttggattgtgattggaacatagctttgaactgtggatccttgcaccatatattaggctgtgtttggttcagcttctggaaagtgtttctaatgagaagctgaagctcaaccaaatgtttagaacctgaaactgcttttccagaagcagttcctttcgtgtaacttaattttcaccgcttcttggacccttattttggctttcgactttcccaaataggtggaaatagtgagacttttaatattttatagctgtttcgagggaaatgaagagacggtgtaagttttatagttgtttcaaccaaaaaacaaaaaacttacaatcttttgccaacacatagctcacaacaactttttttatagctcacaaacagacctttagaatctgtaatgttttagttaagcttccttttcccttaaaattccctatagcggattgataaaactgaattccatgttataggggagggcttctatagcaattgagaaaatccatcccctttacgttcatgagacccacatgtcattgcaactctcttcttttatcttcctgttctctctttcctctccctcccatctctttcagtgcttgcccaaggtgacaatgtggcgacccaagtgctcgtctgcctagcgcggtctgggcccgcgtgcccagtgtggcagtggtgtggcggtgtggccaacccacacacttgactgcccgaagtggtgtcggcggcatggggcctgcgtgcttcgtgcttggtgcactggtgttgcggtggtgctccagtcctatcctatggacccacaaggccacaatcttagtgacatgaggaggaagaaaggagattttgagaggttgagaaaaaaattaggaaaggggatgtgttggagcttgttttttttgcttcaatccttttcattgctggttacagggagaggggattgttttggtaaagattctcttaggatttaggaagtttctagcattgaaccctccaaagttgttcattgtgtataatagtaggcctaaaattcttcggacataaaaatagatgttttgtgcaattttaaatgagaacttcgcctacgtaggaaggtcagatgccatgttagcttggaataaattttgagatggaagggacagatgacaagaaaggttcaattgttttcagtttgcagtagtctcctctacctttgggatactagataaggtccatttacattttgatgcactaccagttatatacaaaggactaaaggagtaacaaggtagaattcaatagtatgtgcagaatgctcatttggtagtttcttttcccatcaggaggactgttgaatttcttgctatggttccaatgtgtatgtatgtttcccaacagaatttttataatgttcagacctattatacaaacgggtccggtgttatgtacctacataagtttttcttggtcttgcgggttgttgatctagctctatgtttttttttgcttataacccactagaaatttaggtatctgtcatgtaatatattcagaaaaggagaacatacctcagaatattagcaaaaggaatttgcatcgtcactatatttgtataattccatgctagaatggttcaagcggtaaaatttaaaatgtcattgtcacaaccatgcgggggggggggggggtgcttgctgctgttatgtggggtgggagaggaggggatgggagggagcaatggctctatgcttgcttaggctaactccaacagagtacctatcgtgacacctaaatctattatagatatctaaatgacactatagcatctcgaacaggtaatttaaactcgatacccattttagatgtgatgtgggagagtacctatatattgatggccattttctcaaacgtgtatttgggcacaaaaatatttgggtctcgtctttcggctgactgcataacacgaacgtgtatttggattcccatttttgcatattattgttagagttagccttagattgaaaccgttacattacctatatatttatagcccctattggacttgtattaaaaacaaactagagcagtagtctttatagatttggacactcctttcctaacaaaccaatattctttcctaaataaactttattttatttactccaaacttatcaaaggctttctttagatttcatctattccatattctcctcaactggatggacttctggggcggcaggggttgcaacccctcactcacgcgcctcctttacgacacccaaggtgagattgcggttcacaaggggccggtgttgggcctccgttgcccgctaggcccaatgctgcagcccacatttaggcctatgacatctcccccttctccactcagcgtgtcctcgcgctctattatagtctagttgttgatgcagtttgagggaagaggttctccaaatgggattgcctagatcctgacaatgagacgatcgtggatgatgttagccaagatctagttgtcttggatcctgatgatgatgagctcaaagtagtaacgatagttgctagaggtgaggatcgatcggtgtatggctacgtcaagagtgaatatctgcatagcttaaggagatctctcaaagctatgtaccttgttgctgcgaaggatgaaggctgccatacgacgacaaattgtcaacatgatgcacatagattgtgttgttgttaggtctagcaagtcaccaaacatgaacttgccccgttgaagttgtttggcgagaggctcgagtgtctcaagtcatggatggtgttgatgtgttcttggtagcgaggaagtggcaattggcgatgtcgaagaagatgaaattgacgaaggaatgataccttgcggccactcacggatcataaggatgctgatagggaagctgcaggtgatggctgcagtcgttggtggcgtgtagaaccccaacactagtagtcgtagattcctcatttcgccaatgacgacgtgtctcgaagaggtcgagcaatagtggtaatgtcgtggggaggtagaattgtccgttgaagaagaggagatcttggtccatggactaagttgatgcagctctcccgcctatgatggtggtggtgatggcgcgtagctcgagtaccattgcctatgatggcgtcgtacaatgctgattttgtcgagggcattaggttgacacggttgaattgccttgctcatgttacatcatggctgcgatggagaccatgatcgtgggagaagtgatgggtgtcgaggcaccggtaggattggcataagacaggaagaacaagcaaattctatggtgctcaacggtcagggacattgacgaagatgatggtatgttcgtcccattagaattgcttctctagggtcacaaagttctagatgatgttgccatggtcgaccaaccatggcatgtcgaagatgacgtcgatctggaacgtcttggtgttgatgtgaagccaagtgttgaggcaggcttcctggcgagcaatctcattgccactgttgacaagctttatggtttggatgcgctgttccgcaaggttggccggcttggcaaagttgatgtcgatgatgttgtgggtggtgcctgttttgacgaggatgagcaccaagttggcaccttccaggaacatggtgtgtcgaccacacgcacactagagtcttggggctgatcatcatcatgaggccagggtcgacaccgtcgttggcatgacgagcgtgatgtctaacaagtgcttgcacttgtggccacaggcaaagggttcgtcacagttgaagcatagcccaatgcaatgacgctccatcatctcctctgttgtaaggggcttgaaggggtgaggtggtgtagccggcgtaggtgtcggatgaccccggtgttatcgaggcggatagggttgttgatggcacctttgaatcttggggaagccgatgtgtggaatgttgtagatttggtgttgtcagcgatgacaaccgcctgtcgcttgtatgctcatggtagggacatggccatctctatgtcttggggttctagagctcgacatgtcttcagtggctcgagcaggtcagcagtgtagacgttcacctgctgctgttcgtcaagtgtctcggtgcgcaccacgtgtgtcaagatgtgctccatgtagtcgtcgatggtgctagtcttctgcaaggatgcaagctctcgtagtgtttgcgtcgtcttggcggcccaaaatactcgttgacgcaactgcaaagcatgcccagttggtgacaactttatcccgcgttaggtgcatcagtgcatgtaccattgtttagtgccacctagagatgaaaagatgcataccatactcgctcgatgtcagtagtcttttgccctgtgaagaactgctcacagcggttaagttatggcagtggattttccttgctgtcatatgttgggagcgacaattgtggtagcgtggttggaggatggggaaggagctgattgctgtagactggtgagggtatggcagtgttaagggccccttggtggcgcctccctctcctagttggcgacgaacagtttgccacttcttccacaagctcgaggacggtcaatgaccttgctgtctcctccttgaggaaggcacgtcgagcttgatctatggcgtgcttggtctccacttcgagctgcttggtgacagcctcacattccagcttttccttggctgcggtggcgatctcgtttttggaccctccttgcttcatgttgcccaggcagacgtcgaccttggcaaggtgctcttgcaccttgtccatgtgcttggtgagatcagcagcgagggtctcgagccactccatttctgtggacatggtggaattgttacccatgggatcgagacggttgggggggggggttgttgaattccaagcaaactagagtgagagataaagggaggagcaatagctctagtcttgcttagattgaaacggatacattgccgagtatgtatagtccttattagaattgtataccaagcaaactagatgattccttatagatttagacttgtattccaagcaaactagaagagtccttacagatttggattcactattcctaacaaaccaatctccttttctaaacgaactcgatttatttattccaatttatcgaaggctacctccagatttttgatctattcctgttctctccggcgcgatgaactctaggagcggcaggggctgcgccccctgtctcgtgcacttcttttgcggtgccagggtgaggccacggctcaccagggcctgacgttgggcctccatgaggccacagctcgccagcgctaggcctgatgctgtggcccatatttaggactgtggcagtcattgatgtgttttctttattgtaagtatagtaactcagaaatataattgttaggcacttcggttatggattttgtcaagtttttttagtcatctataattttggtgactgcatttgcatctgtgtgaaaagtaattaatgttagtagttttttatgtaagcctgtcattttgtttgcttattggctcattaataatatatatcaggggtttttctgagtat

SEQ ID NO: 510 - DNA, 1402 bp, Zea mays
  Intron number 3 from transcript GRMZM2G016655_T01 (locus G RMZM2G016655) derived from phytozome v7.0 (chr-ID 8; pos 1 11046995 to 111048396 reverse strand)
ccccttggatcagcttggtctatcacttggaaaatgtgagtcgaatctttgtttcctgttggagatgcccttgagaaaattgctctattaatgctgtctgtttatttcattctattatgtttcttccactcctgatgggattccttcttagcttggcatccagtcttgctagctttaacctccaaataacttgtttttcttcatttgaaactatatttttttgtacccatttcttacctgtaagtaaggccaatgattcgactatttgagaaccaggtccctgccttgattttttcttactatgtttgtgccagcctttgactctttgagtctggactggtcactggtgaaggggggctttatcaacccttgcctttagtggtccaactcatgagaagttgtatttgagtacacatgttttcaggattatttctttcagattaatgagatatagtttttttatcttgtgagctcttttactctcatattgtttagtcatctccctttgttacttcaacctgttgggattaatctcacatctgttaggactggtctacttaaactgctaaacatttcaagttttcaacattattaaataactagcattgtagaacattcaaagtttttctgggtaacatcctgaaaatccatttcatgtttagccacatgttagcgtgctttcaagactcaattaaaaaaaactggttttcagctatagaaaaatgcatttcttaaggtaaaaggattagtctttgggtgcatatgaaatatattttgattagactttggtaagcatttcagtgttggatcctggactatgatatcacagagctgactgattactgccagtttgtcctgaaattaatttgaaactttcatactacagaatgaaatgagatatcactagtatatgcatgcaacaatgttagttgcatattgatagggaacatgaagtggcaaatttgtggtcttgctatcaattacccaaatgagatatgtgagagacacttgcaagtttgatctgtacaggatatcactctagtatgcatggttattagtagcttacgaagcaatatctacaatttggaccttagtggttcaagattattctattcctttcttttttggtatatgagaataaaatttatttatggtaaatatatattataaacatgattgatgaaaactaaaactctattcttccactattggatactggctgattacgtaactgttggtatgaacaaccaatatgtcatcatatacacgtgattctgttataactaacaacactgattatgaaaggggttatgatttttaagatttgcttatttcggtgacacctttttgttgattttttctgcatatgttaatgacaatctattttttggcatgtcctcag

SEQ ID NO: 511 - DNA, 25456 bp, Zea mays
  Intron number 1 from transcript GRMZM2G026822_T01 (locus G RMZM2G026822) derived from phytozome v7.0 (chr-ID 9; pos 1 15677849 to 115703304 reverse strand)
ggatttatcatcagcggccgccgtgtcctcaccaattgaaagggaaatgtgcccttgggccatttctataagattttggtgattaagtgctccacacaaatgctttgagtaatatttgtgccaaagactcaagaagtgcaaatcaagattaaaggtatgtttctagacttagtacattgttttgaagactaatgtattgtgtctaagtgctagaaacaggagaaatcactttagagataagttggctgtgttcagccaaaaggctgctcggtctgggtgcatcggactgtccggtggtgcaccggacagtgtccggtgtgccaggaccagtccagatgaacagcctgctctcgagactcgacggcggcgtatgactataaatcaccggactgttcggtgagtcatctgcggcgaagtcgccgctctcgggaagcagtcaacagcgtacggctaaaaatcaccggactgtccggtggtgcaccggactgtccggtgagctaacggtcggccgggccaacagtcggccgcgcaatccgcgcgtgacgcgtgaccgagccaacagtcatatgggggcaccggacagtgtccggtgcgccaacggctccaaatcttcaacggtcggttgcgcaagtttaggaaagcaatctgcaccggacagtgaacagtggatgtccggtgcgccacccgatagaaggcaagaattgccttcctggattgcttccaacggctcctagctgccttggggctataaaagggacccctaggcgtatggaggagcacaccaagcactctttgatcaactctaagcaccaagactccatttccgcgtatttgattctttgtgatagcaactagagctccatttgagtagagaattcttcgagttgtgttgcaagctcaagttgtgacttgtgtgcgtatttgtgctctgattttgtgtcttgtgtgcgttgctcttccccccttactttcgtgtttctttgtgatcatcatttgtaagggcgagaggctccaagttgtggagattcctcgcaaacgggagatagtaaacgaaagcgaaacactgtggtattcaagttgatcattggatcacttgaaaggggttgagtgcaaccctcgtccattgggacgccacaacgtggagtaggcaagtgttggacttgaccgaaccagaggataaaccactgtgcctctctgtgttgatctctttgtggttattgtgtatcgcaagaactcctctctagctacttggctttattgctctaacacttaatcaagtttgtggctttaagttttaagtttttacaggatcacctattcacccccctctaggtgctctcaattggtatcagagccgttctcttcacgaaagggactaatcacccgaagagatggatcctaagggaaaggggatggtggtcaacgataaggagaaggagtccaccttcaacgagccaagagacgataagcccaccgactctggctcgagtcacaaaaggaaagacgggaagaagaagaggcgcatcaagaagatagtctactaggacagcgatgagtcttcctcttcccaaaaagacgacgacgactacgagaaaaagaaaacagtcaactcaaacttttcttttgattattctcgtattccgcataattcaaatgcacatttgctttccattccgcttggtaaacctccacactttgatggagaggactacggattttggagtcacaaaatgcgtagccacttgttctctcttcatccaagtatatgggagatagtagagaatggaatgcaatttgatagtacggataatcccttgtttatcaatgaacaaattcacaaaaatgcacaagctactactgttcttttagcatccttgtgcagggaagaataccataaggtgagcggcttggataacgccaagcagatttgggacaccctcaagatctcgcatgaggggaatgatgtcaccatgctcaccaagatggagttggtggagggcgaactaggaaggttcgcaatgatcaggggggaggagccaacccaaacatacaacaggctcaagaccctggtcaacaaaataaggagctatggaagcacgatatggacggaccacgacgtaaggtctttcactgtccttgatccacatcttgtaaactctattcgtgaaaatccttggtacaccaagatgtcgcccgaggaaatacttggaaagttcgtaagcgggcgaatgatgatcaaggaggtaaggtatgttgttgaggcgttgaatggcccaatgccaatccacgagcctcaaaccgttgctctcaaagcaacaagtagcagggaggcgctacctagcaaggtggcgcaagttgaggcgactgggctaaatgaggatgaaatggccctcatcatcaagcgcttcaagacggcgctcaaaggtcgcaaggagcatcccaacaagagcaagatgaagggaaagcgctcctgcttcaagtgtggtaagattggtcactttattgctaactgtcccgataatgatagtgaccaggaaaaaggaaagaatgggaaaagagagaacaagaaggtttacaagaaggctaagggtgaggcacaccttggaaaagagtgggattcggattgttcttcgtctgactccgacgatgaaggactcgccgccacggccttcaacaaatcgtctctcttccccaacgagcatcacacctgcctcatggcaaaggagaagaaggtaagctctcgaaatactattacatatgcttcttcaagtgatgatgaatctagtgatgatgaagtagactacgcaagtttattcaaaggtttagacaaaactaaaattgataagataaatgaattaatcgatgctttgaatgagaagaatagattgttagaaaagcaagaggatcttttatatgaagagcatgataaatttgtaagtgtgcaaaagtctcttgctttagaagttaaaagaaatgaaatgctttcatgtgaaatttctgcttgtcatgagactatttctagtttaaagagcattaatgataatttaaatgctaaattagtagaaacaaataagactagtcctcatgtggaacatgtagtaatttgcaataggtgtaaggattttaatgttgatgcttgcaatgaacatttaatttccatttctaaattaaatgatgaagtagctagtcttaatgcccaacttaagactagcaaaaatgagtttgataaactaaaatttgcaagggatgcctacactattggtagacatccctcaattaaggatgggcttggctttcgaagggaagccaagaacttaacaagtcaaaaggctcccattcccaacaaagagaaagggaagacccctatgactagtaggagtcaaaagaatcatgctttcatgtatcatgatacaaaatatgctaggaattttcattatagtaggaattataatgcttatgactcacatgccatgattgcttcaagttcaaactttaatggtagatctaggaagaattttgtgtctcatgctcctaaggaagtgtataatggatctaccactgtatttcatgcttgcaatgctaaatttgttctttcatataaaaatgaaaaagtgattgctaaaaaggtgggggccaaatgcaagggagacaagacttgcttttgggtccctaaggctattgttactaaccttgtaggacccaacaagagttgggtacctaaaacccaagcctaatttgccttgcaggtttatgcatccgggggctcaagctggattatcaacagcggatgcacaaaccacatgacgggggagaagaagatgttcacatcctacgtcaagaacaaagattcccaagactcaatcatattcagtgacgggaatcaaggcaaggttaaaggactaggaaaaatagctatttcttccgagcattccatttctaatgtgtttttagtagaatcgcttggatataacttgttgtccgttagtcaattatgtaatatgggttacaactgcttatttacaaatgtagatgtgtctgtctttagaagaaatgatggttcattagcttttaagggtgtactagacggcaaactctatttagttgatttttcgaaggaggaggccgatctagatgcatgcttaatcgctaagactagcatgggctggctgtggcatcgccgtctagcacatgtggggatgaagaaccgtcacaaacttctaaagggagaacatgtgttaggtctaacaaatgtaactttcgaaaaagatagaccttgtgcagcttgtcaagcaggtaaacaagtgggaagtgctcatcacaacaagaatgtgatgactacatcaagacctctggagctattgcatatggacctctttggacccgtcacctatcttagcatgggggggaagtaagtatggtcttgttattgttgatgtttttcccgcttcacttgggtattctttttgcaggataaatcagaaacccaagggaccctcaagcgctttctaaggtgagctcaaaacgaatttgagctcaaggtgaaaaaggttagaagtgacaacgggtccgagttcaagaaccttcaagtggaggagtttcttgaggaggaaggaatcaagcacgagttctctgctccctacacaccacagcaaaacggtgtggtagagaggaagaacaggatgcttatagacatggcgaggacgatgcttggagaattcaagacgcccgagcggttttggtcggaagctgtgaacacagcttgccacgccataaaccgggtctaccttcatcgcctcctcaagaagacgtcgtacgaacttctaaccggtaacaaacccaacgtttcatattttcgagtttttgggagtaaatgctacattctagtgaagaaaggtaggaattcaacatttgctcccaaagctgtagaagggtttttgttaggttatgactcaaatacaaaggcgtatagagtcttcaacaaatcatcgggtttggttgaagtctctagcgacgttgtatttgatgaaactaatggctctccgagagagcaagttgatcttgatgatgtagatgaggatgatgttccaatggacgcaatacgcaccatggctattggagatgtgcgaccacaggaacaccaggagcaaggtcaaccttcttcctcaacaatggtgcaccccccaactcaagatgacgaacaggtccctcaagaagaggcgtgtgatcaaggaggagcacaggatgtccaagttgaggaggaagaagtaccacgggcccctccgactcaagttcgagcgatgattcaaagggatcatcccgtcgaccagatattttgtgatattagcaagggagtaaccactcgctctatattagctaatttttgtgagcattactttttgtctcttctattgagccttttagggtagaagaggccttgctagatccggactgggtgttggccatgcaggaagagctcaacaacttcaagcgaaatgaagtttggacactggtgccgcgtcccaagcaaaacgttgtgggaaccaagtgggtgttccgcaacaaataggacgagcacggtgtggtgacaaggaacaaggctcgacttgtggcaaaaggttatgcccaagtcgcaggtttggactttgaggagacttttgctcctatggctaggctagggtcgattcgcattttgttagcctatgtcgctcaccattctttcaggttgttccaaatggacgtgaagagcgctttcctcaatgggccaatcaaggaggaggtgtacgtggagcaaccccctggctttgaggatgaacggtaccccgaccacgtgtgtaagctccctaaggcgctctatggacttaagcaagccccaagagcatggtatgaatgcctaagagactttctaattgctaatgctttcaaggttgggaaagccgatccaactctttttactaaggcttgtgatggtgacttatttgtgtgccaaatttatgtcgatgacataatattttgttctactaaccaaaagtcttgtgaagagtttagcagggtaatgacgtagaaattcgagatgtcgatgatgggtgagttgaactacttccttgggttccaagtgaagcaactcaaggacgacaccttcatctctcaaacgaagtatacacaagacttgctcaagcggtttgggatgaaggatgccaagcccgcaaagactccaatgggaaccgacggacatgtcgacctcaacaaaggaggtaagtccgttgatcaaaaggcataccggtctatgatagggtctttactttatttatgtgctagtagaccggatattatgcttagtgtatgcatgtgtgctagatttcaatccgatccaagggagtgtcaccttgtgaccgttaagcgaattcttagatatttagtcgctacgccttgcttcgggatctggtatccaaaggggtctacctttgacttaattggatatttagactccgattatgctggatgtaaggtcgataggaagagtacatcagggacgtgccaattcctaggaaggtccctcgtgtcgtggagttctaagaaacaaacttccgttgccctatccaccgctgaggccgagtacgttgctgcaggacagtgttgcgtgcaactactttagatgaggcaaaccctctgggactttggctacaatctgagcaaagtcccactcctatgtgacaaagagagtgttatccgcatggcggacaatcctgttgaacacaaccacacaaagcacatagacatccggcatcactttttgagagaccaccagcaaaagggagatatcgaagtgttttatgttagcaccgagaaccagctagctgatatctttaccaagcctttagatgagaagaccttttgcaggctacgtagtgagctaaatgtcttagattcgcgtaacttggattgatatagagcatacatgtgctttatgcctttgatcatgttcttttatgcatattattgtttatttgtggtgctcaagttgtactcatgatccctggacctcacaagtccatttgcaagtgatgcacttatttagggggaggcatgctacaacttgaccctttaagactaacactactagagatatgcttatttaagtcgcacattttaagacgtatatcaatgcattttatagaaccgtcttttatcatatggtgatgagtaagttaagacggtttgttggagatccgtctttaataaacaagtgttttgagacagttacatagtaagaaatgtcttatattgatttaagacgaattgttattgaaaaccgtctcaaatcaatataccttttgagtcattaagattgcaagaattgtcttagattttggttagtatattagacacttttgtatatgaaaccatctcaaataaagatattatttgagtcgtttagacaataagaattgtcttagatgttagtgggtgtactagacacttctaaatatgaaactgtcttcatatgatatttctaattagacatattgtgaaaaaatgtagtaaataatgaattcaacttagtttgatgatatatctcttcaggttttttaaaacctgaaccctcctccctccatgttaacgtttggcacgtacgacgataccacatcgtgctgacgtgtgaaaaattatttctcattttctttttgtgtctttaatttctctcctgaccacgagccctcacttggcagctcccaaaccctaacccatgggtccctcctcccctatgctcccgcattgttgtcggtcctactggtcgcggctcacccatactctcgcgcgcctgaaccctaagcatcctcctcaccgctggtgattgctgccatgagcctctacaaagggcatgctacgaacatagcctcctaccatgaccacatagggatgacaattttacccatgagtttgaatatccgtcagatatccgatccattagattcagattcaggtatataatttgacccacgggtctcgttcgtatctgaccaatgtttaaaatagctggatatagcggccgctatatccagatatagccgctggagacgactggggttaagataatcatattttcgcgctaaaggatcagagaagctaatatccgctattatccagctaaaacagctaaaacctatcacatttagtgcgctaaaagttctcaccactcactttagtttcggctatgggtgtggccatgtgggccgatttgccgaatgaaatttggggcccaaaatactgaaccctagccgacttgcagttgcagtcttgctcctctcctctagtcctctctatgatgcagcgacggcgtgatcacagctggtggggcgagctcaaggcagcggctgcaagggcggcttcggccctatctacaggggtgccgccacggagagcgccaagcctggactcaagccataggaggtcgtgaggtcgccgaggctcagggctgcacaacagatctcttgtttctcccttctttgatcctcccttgtttctaaggtttcgattcttccttctcttgttctccccgagcagtctggctatggcggcatccatccattctctaatagaagccaagcaaactgttgcgtgctccggcaactctggtggcgagtgacgacttcaataggctgctggtggtgacagtcatgtcccatccttatccatagcaataggcaggcaaagtcattttgaagtatgtttatttgatctacgcttgctacttgtgctactgaagttctaaacattaagcattgaatgtctaaacattgtcttcgatcggtatttgatgaattgaactatgttatatgtttgctatctttgcttgggatttcagctgaatgtatattgtagagccatcggttctccgttacacaggtccttgtaaatatgcctctgcgctttttgagtcttgtcctttctcttgtgtgttgataggtaggtaatcaggtattttcagttttatgaaaaaccgctaaatcatttagctgcagttatatctagatatatctttttgtagttgctgaaaaaactatggataaatactttagcccgctattttaaacattgtatctgacacgtcttaaattcagatcaggtacagattgtatctctgcattgtacatccgaaattaacgatttcaggttttcaacgcacgggttgcagccggccgcctagtggagtagtgtgtctaaccctagtccactactccactcgagttactcccctcccctgaatccctcgtcccctcgacggcttgactcctcttggttgggcggctggcaagcgacgaccatgacctagacaaccacgccccacacggtcgtgctagcccgccgtcggcatccaccggccaccatgccctatgtcagcgagagggccagtaacgaccttggcacggcggcaccctgcgggcatcaccagcgtcgcctaccaccacggcatcaccggcactctgatcaggcatatgcgtgtgagtctccagccccttgttgatactctctcgtcccaacagtcctgtcccaagcaaaatttatctcctcttcttccgcccagatgagtctccacccccatgcgatgtgctaacgatcgggtattgagcatgccaagcggcgatgcgcgtgtctagggctcacactcgttttcatgggttggtaaggtcgtctaattaggaggtggtcgagggattggttggcgtcatcctggatttcagtcacatttagccggaagctctatcctctctgtttctcttcctatctagtctatgattgattcgacctatttttgggacaagttagagtagtcttcagtgcaggttactgcatttttcaatatattgttctatgctgcaatttgagtggagtttttggtgcttctaggtcaatcggtgtgtttgttcaaaggcgatgctgcttgtatctatagtgaaaagatctgtttcaatcatgataagtttatcacattcactaacaaaggtaccatgtaaaaaaagaccaccgcaaaaaatattgaaatgttaagattaagattgaatcagaacgatacctgcactatttcctcttccttatggacttcacctttagagaaagaaacatactcttcagcttcaagatcatattctgtaggaaaagaattatatctaccaactcttttcacatggatttttaaaacttgtagtgtttaaagaacgagaaatggatttgcttgtttctaattcattttacttgttgtatatcgatatgcacatgcactttcaggtaaattcactcctactttacatccttttttccttgcaaccattgtctcagatagataaccttctgcagtcagcttataatcagggggacaaatgaggatgatgccaactctcctccatgtatgttgacgtcacatgtctgtccaataatcttgatttcattttgcttcacttatctatggatccttggttctgtactacaattctaaaacctattttggagttggatcatttagttgtattccccaagagctttttacttaagtatctgggatgtgagagaacttagttttgttcacaataaagctgccattatatccttatttatcaaagaaacttggagacataatggaaatgatgtttggtgggcgttatgtaattatggtgatggcggttttttcaatctacagaggattaatatacaatgaattttctttattctatttggccttttcggtaaattgacatgatggcgtggagagtggcagggaatcctcatcgttgtactgacggtacgatatacaacaggtatgtactgtctttgattgtgctttcgtttaaaaggtagttttgtcagttcacattaccctgcaccactctgatgaaaattgttctaattaatttgtgttactcttctttaagtgatgacaattgctttgctcaagatagtcacatagcagcagttgaccattcaagtgctcaggtgtctttctctttgtggcttacgggctatcatcagcacaacaccttattcatctcctatcttctgttttaaactacattatgtaaacagtgcaaaatagtgttttgcacggccatatgcattgtctgctggtcatagccttaggcatgttagtgaccatcatcatgtctcaaagtgtacaaaaatcgagcttaccactcatcaagttgaagtgtcccacagctgccttttgcttgctataacttattcccactacaacacttatggcctgctataacttaccactcatcaagttgaagtatcttcacagttgaaattgataatataactagtgattgacagattgaacaattaaaattttgtggtaaaaaaactgtgccgtcacgcaattacatgtggttgcatgtcctctagtcaagaacagctgagagcatgtgagtttgatttcttagttgtgcattctgttggactagcccgctggtgtcttcaaaagaaagtgcagaaaatatatccgtgttagtgcacaaaatatgcatagtaaacataattcatatagttgtttggccctgtcaacatcgcacacattgtaaggaattatgataatattcccttgcagtgcctggatagttcattgtttttttactacggaatgaagttagccaaactaaatttgtgatcaccgcctcgatgtagttcatcctgtttgattttgttacctatactttatctgtgactggccatgtgaacatgtactggcttggtttctaatgtccaccttcccatccctgtttttctctcctaatgtagttcatcctgtttgattttgttacctgtactttatctgtgactggccatgtgaacatgtactggcttggtttctaatgtccactttcccatccctgttttcccctccttcaggacttcttcagtgatcttttggtacatcgttgctgatacaaacagcctacccagactgcttttgtgaaggtatgtgcatacctatattgcttcttgaggctgactcatgtgattggtggtgtttggaagatacattaaagtttaattcgacaaatgtcttttgcttagggctcctagcttggtgtttcttgttatgtgatacttgtgcatgcgaagtaggtgaactgctacttaaatggtacatatttagcttaattacttactggtggcattgcagattatatgtttctgtcttaaagatacattagtaggctgtagtactcacactgcttctgttctcatatgttcacacactgcatctgttcacagcctgattcagaggcatgcatgatgttgtagtaggcgagaccacccaaaagcactcccaacgcctgaccacaagagctagcagatagcagccctactgttggcaatccaataatcacatactaagttttccttgaaattttgagtcttgaattgacttcttccttaatttatagtttcaactcaaaacgaatacactattttttgttgaaccacatttttcctctgctcagtttggcatcattattgtatcataatattatcataattaatccattttggtaaactgactctagaaaattttcttgaatggtttcctatcttttacagttaagctacattatgtgcatggaattttgcaatataccttctgtttcttgctcacatgattgatgtgattttgaattcatttagcacattgctttctgagaagccatttgtagtgcaaggatgaaacttggtcagagtgtttaccatatggattggcaggtatctttcagcttcttacatattaaaggttatattgtacttttccgagctaatctgcctctattggcatcgataatttacttctgtagccccaaacaaagctctggattgtcctattcccatgacaaggttgtgctcttctcctgcagtgaaaccaaaaaagaaggcgcgcttctgttcttccgtattcatgtcaatgcaacaacaggtacaagtagtcttcttgggagctacccagtagttgagtgagaaattgataagctattctaaattaaatgtaaatatgcatttctgaccatagtatgaagttgaaaggtgtttatgttcctttcctgtgtataagataaacatttttttctaacccttcttccttaggtcgcttaaattgaaattgatgtctacaaagtgcttcccatttcattattagattactgatatagctatgcctggtgagtggagataagtggaggtggcactaccaattccttgatgtaccaggaatgtttggattgttgtattctgacattgtttggttcaacatattcaaggtatgttccaaggctatcttagaaaaaaattcctgcaaatattgcattttgattcatcttgttgccctttttgttttcggtttggaccatactgtgatttcttcaagtttgatgtcgacaacgtggtcatggtgaccggcaggaggaacatcgggcgtgtaggagtgatcaagaactgggagaagcacaagggcagcttcaaggtcatcgacgtgctgattggagctttttgcatgctatgtctagttttctcctatttgttgtacaggaaaacgtagaatggaattcaaatttggtggtcgcaaaagtgtggagacttgaattcatataaagttaggcttaacattagtgcaaacagttgtattttagtttagatttagagtacacttatgtatgccttgtttgacaatgcttatttatgatatattgaattgtacttatttatattatattaatgaaagggaaatgtgcccttgggccatttctaagtattttggtgattgagtgccaacacaagtgtttaagtgtaaatctatgccaattgatggacaaagtgcaaatcaagtctaaaggtatgtttctagacttagtacattgttttgagaactaatgtattgtgtctaagtgctggaaacaggaaaaatcaaatttaaaaagagatgactttgttcagccaaagtcagctcggtctgggtgcaccggactgtccggtggtgcaccggacagtgtccggtggttcaccagacagtgtccggtgcgccaggttggctctggcaaacttgctgctctcggggctttgacggcggtgtacggctataaatcaccggactgtccggtgagccattcacaggcgaactcatcgctctcgggagatgattaacggcgtacggctataattcaccggactgtccggtggtgcaccggactgtccggtgagccaacggtcagccgggccaacggtcggccgaggattccgcgcgtgacacatggccgagccaacggtcacaatggggcaccggactgtccggtgtgcaccggacagtgtccggtgcgccaacgtctctacatctgcaacggtcggcttcgccaaataaggaaagaaatccgcaccggacagtgtccggtggtgcaccggactgtccggtgcgccaggcgacagaaggcaagaattgccttcctggaatgctctcaacggctcctagctgccttggggctataaaaggggcccctaggcgcatggagaaggcatccaagtattctctaagcattcctaagcaccaagacttcgattccgcgcatttgattctttgtgatagcatctagagctctatttgagttgtgaactcgtcgggttgtgttgtgagctcttgttgcgatttgtgtgcgtgttgtcactctgattttgtgtcttgtgtgcgttgctcatccctcccttactctgtgcttctttgtgaacatcaaagtgtaagggcgagaggctccaagttgtggagattcctcgcgagcgggatatagtgaacaaagcaaaacaccgtggtattcaagtgggtctttggaccgcttgagaggggttgattgcaaccctcgtccgttgggacgccacaacgtggagtaggcaagcgttggacttggccgaaccacgggataaaccattgtgccatctctgtgttgatctctttgtggttattgtgttttgctaagactcctctctagccacttggcattattgtgctaacgcctaaccaagttttgtggcattaagtttcaagttttacaggatcacctattcaccccccctctaggtgctctcaattggtatcggagccgttctcttcaagaaagggactaaccgcccgaagagatggatcctaagggcaaggggattgtgatcaatgataaggagaaggagtccttcgtcaacgagccgaaggatgacaagcctaccgactcaggctcgggtcacaaacgtaaagatgggaagaagaagaagacaaggcgcataaaggaaatcgtctactatgacgacagcgacgagtcctcttcttcccaaaaggacgacgacaacgactacgagaaaaagaagacggttaactcaaacttctctttcgattattttcgtattccacatagttcaaatgcacatttgctttccatccctcttggcaaacctccacactttgatggggaggactatggattttggagtcacaaaatgcgtagtcatttgttctctctccatccaagcatatgggagattgttgagagtggaatgaaatttgatagtactgatagtcctatgtttataaatgaacaaatccataaaaatgcacaagctactactatccttttagcatctttgtgcagggaagagtacaataaggtgagcggcttggataatgccaagcagatctgggacacccttaggatctcacatgaggggaacgacgtcaccatgctcaccaagatggagttggtggagggagagcttgggagatttgcaatgataaggggagaggagccaacccaaacatacaaacggctcaagaccctcatcaacaaaataaggagctatggaagcacgcgatggacggaccacgacgttgttcgcctaatgctaaggtcttttattgtccttgatccacatcttgtgaacaatattcgtgaaaatcctaggtacaccaagatgtcacccgaagaagtacttgggaagtttgtgagcgagagaatgatgatcaaggaggcgagatacgtggacgacgcgttgaacggtccaatccatgagcctcaacccatcgctctcaaggcaacgaggagcaaggaggctctacctagcaaggtggcacaagttgaggcggccgggctcaatgatgaagagatggccctcatcatcaagcgcttcaagacggcgctaaagggacgcaaggggcagcctaacaagaacaagacgaaggggaagtgctcatgcttcaaatgtggtaaggttggtcattttatcgctaactgtcccgataatgatagtgaccaggaacaagggaacaagagggaaaagaagaaagcttacaagaaggctaagggcgaggcacaccttggcaaggagtgggactcagattgttcgttgtccgactccgacaacgaaggactcgccgccactgccttcaacaaatcggccctcttccccaacgagcgtcacacatgcctcatggcgatggagaagaaggtatgtactcggaatactacttatgcttcttcaagtgagaatgagtctagtgatgatgatgaaatagattattcatgtttattcaagggcctagatagaaccaaggttgataaaattaatgaattaattgatgccttgaatgataagaataggttattagaaaagcaagaggatcttttgtatgaagaacatgataagtttgtagaggcacaaaaatcccttgctttagaaattaaaaggaatgaaatgctttctagtgaattgtctacatgtcatgactctatttctagcttaaagagcataaatgatgatttgaatgctaagttagaaatagcaaataaatcaacatcttgtgtagaacatgttacaatttgtaataggtgtaaagattttgatgttgatgcttatagtgaacacctagtttcaatttctaaattaaatgattaattggctagtcttaatgcccaacttaagactagcaagagtgaaattgataaaataaaatttgcaagggatgcctacacgattggtagacatccctcaattaaggatggtcttggcttcaagagggaagtcaagaacttaacaagccataaggcttccatctccaccaaggagaaagggaaggcccctatggctaatagtgctcaaaagaaccatgctttcatgtatcatgataagagacaatctaggaatattaatagaagttatgatgcttttaattctcatgctatgattgcttctagttcttcctatatgcatggtagaaatatgtctaggagaaatgtcattcatcatatgcctaggagaaatgttgctcatgttcctaggaatattaatgaaccttctacaatttatcatgcttgcaatgctttctttgcaatttgttgaaaggatagaaaggtgattgccaggaaattaggggcaaaatgcaagggagataaaacttgcatttgggtccctaaggatattgtcactaaccttgtaggacccaacaagtgttgggtacctaagacccaagcctaaatttgccttgcaggtttatgcatccgggggtacaagctggattatcgacagcggatgcacaaaccacatgacgggggaaaagaggatgttctcttcctacgtcaagaacaaggatccccaagattcaataatattcggtgatgggaaccaaggcaaggtgacagggttaggaaaaattgctatttcatccaagcacactatttctaatgtgtttttagttgagtcgcttggatataacttgttgtctgtaagtcaactctgtaatatgggatataactgtttattcacaaatgtagatgtgtctgtctttaggagaagtgatggttcattagcttttaaggatgtactagatggcaaactttatttagttgattttgcaaaagaggaggccagtctagatgcatgcttaattgctaagactagcatgggctggctgtggcatcgccgcttagcacatgtggggatgaagaaccttcacatgcttctaaagggagaacacgtgataggtctaactaatgttacttttgaaaagatagaccttgtgcagcttgtcaagcaggaaaacaggtgggaagctctcatcataccaaaaatgtgatgaccacatcaagaccgttggagatgcttcacatggacctcttcggacccgtcgcctatctaagcataggaggaagtaagtatgggcttgttatagttgatgatttttcccgcttcacttgggtattctttttgcgggataaatctgaaacccaagggaccctcaagcgcttcctaaggagagctcaaaatgagtttgagctcaaggtgaagaagataaggagcgacaacgggtccgaattcaagaaccttcaagtggaggagtaccttgaggaggaagggatcaagcacgagttctccgctccctacacaccacagcaaaatggtgtggtagagaggaagaacaggacgctcatagacatagcgaggacgatgcttggagagttcaagacccccgagcgattttggtcggaagccatgaacacggcttgccacgccatcaaccgggtctaccttcaccgcctcctcaagaagacttcgtatgagcttctaaccggtaacaaacccaatgtgtcttactttcgtgtatttgggagcaaatgctatattctagtgaagaaaggtagaaattctaagtttgctcccaaagttgtagaagggtttttgttaggttatgactcaaatacaaaggcgtatagggtcttcaacaaatcatcgggtttggttgaagtctctagctacgttgtatttgatgagactaatggctctccaagagagcaagttgttgatcttgatgatgtagatgaagaagacgttccaacggccgcaatacgcaccatggcgattggcgatgtgcgaccacaggaacaattggagcaagatcaaccttcttcctcaacaatggtgcatcccccaactcaagacgatgaacaggttcatcaaggagaggcgtgtgatcaagggggagcacaagatgatcatgtgatggaggaagaagcacaaccggcacctccaacccaagttcgagcgacgatttaaaggaatcatcccgtcgaccaaattttgggtgacattagcaagggagtaactactcgttctagattagttaatttttgtgagcattactcctttgtctcttctattgagcctttcagggtagaagaggccttgctagatccggactgggtgttggccatgcaggaagagttcaacaacttcaagcgtaatgaagtttggacactggtgccgcgtcccaagcaaaatgttgcgggaaccaagtgggtgttccgcaataaacaggacgagcacggggtggtgacgaggaacaaggctcgacttgtggcaaaaggttatgcccaagtcgcaggtttggactttgaggagacttttgctcctgtggctaggctagagtctattcgtattttgctagcatatgccgctcaccattctttcaggttgttccaaatggatgtgaagagcgctttcctcaacgggccaatcaaggaggaggtgtacgtggagcaaccccctggcttcgaggatgaacggtacctcgaccacgtatgtaagcactctaaggcgctctatggacttaagcaagccctaagagcatggtatgaatgccttagagactttttaattgctaatgctttcaaggttgggaaagccgatccaactttattcactaagacttgtgatggtgacttatttgtgtgccaaatttatgtcgatgacataatatttggttctactaaccaaaagtcttgtgaagagtttagcagggtgatgactcaaaagtttgagatgtcgatgatgggcgagttgaactacttccttgggttccaagtgaagcaactcaaggacggcactttcatctcccaaacgaagtacacacaagacttactaaagcggtttgggatgaaggacgccaagcccgcaaagactccgatgggaactgacggacacaccgacctcaacaaaggaggtaagtccgttgatcaaaaaaacataccggtccatgataggttctttgctttatttgtgtgctagtagaccggatattatgcttagcgtatgcatgtgtgctagatttcaatccgatccaagggagtgtcacttagtggccgtgaagcgaattcttagatatttagttgctacgccttgcttcgggatctggtatccaaaggggtctacccttgacttgattggatattcagactccgattatgctggatgtaaggtcgataggaagagtacatcggggacatgccaattcttaggaaggtccctggtgtcatggagttctaagaaacaaacctccgttgccctatccaccgctgaggccgagtacgttgccgcaggacagtgttgcgtgcaactactttggatgaggcaaacccttagggactttggctacaatctgagcaaagtcccactcctatgtgataatgagagtgctatccgcatagcggacaaccccgttttgcacagccgcacaaagcacattgacatccggcatcactttttgagagaccaccagcaaaagggagatatcgaagtgttctatattagcaccgagaaccagctagccgatatctttaccaagcctttagatgagaagaccttttgcaggctgcgtagtgagctaaatgtcttagattcgcggaacttggattgatttatagcatacatgtgtttatgcctttgatcccgttccttatgcattttgttgtgtatttatggtgctcaagttgtactcatgatccccggacctcacaagtccatttgcaagtgatgcatatgtttagggggagacgtgctacaacttgaccctttgagactaaccatgtgcttgagttttcttaatttagtctcaaaggaggtttgaaagggaaaaggtggacttggaccatgaaagacttcaactgcactccgatgagagggtaacttattccaagttcatctcatgtactcttattgcctttgtattcttatttgaagattttggtgaggcaagggggttcgagggccaaaaattgatcccgttttggtgcttgatgccaaagggggagaaaataaggccaaagcaataaatggatcagctaccacttgagaaattttgaaaatagtataatagagcttttggtttgtcaaaactctcttattgtctctcttgtcaaaagttggcctcttgtggggagaatggttgtttatgggaaaaagggggagtttttgaaatctttgatcaatttctcttggaacaactctctttatgtctctacaattgtgtttgaattagagatagaagattgaggttgattcgcaaaaacaaaaccaagtggtggcaatggatgatccatatatgccaattatgaatcaaaacaattttgagttctcatttgtattgatgttgcacttcttttagttgccttttgttgtgttggcataaatcaccaaaaagggggagattgaaagggaaatatgcccttgggccatttctaagtattttggtgattgagtgccaacacaagtgtttaagtgtaaatctatgccaattgatggacaaagtgcaaatcaagtctaaaggtatgtttctagacttagtacattgttttgagaactaatgtattgtgtctaagtgctggaaacaggaaaaatcaaattgaaaaagagatgactttgttcagccaaagtcagctcggtctgggtgcaccggactgtccggtggtgcaccggacagtgtccggtggttcaccagacagtgtccggtgcgccaggttggctctggcgaacttgctgctctcgggactttgacggtggtgtacggctataaatcaccggactgtccggtgagccattcacaggcgaactcatcgctctcgggagatgattaacggcgtacgactataattcaccagactgtccggtggtgcaccggactgtccggtgagccaacggtcagccgggccaacggtcggccgaggattccgcgcgtgacacgtggccgagccaacggtcacaatggggcaccggactgtccggtgtgcaccggacagtgtccggtgcgccaacgtctctacatctgcaacggtcggcttcgccaaataaggaaagaaatccgcaccggacagtgtccggtggtgcaccggacagtccggtgcgccaggcgacagaaggcaagaattgccttcctggaatgctctcaacggctcctagctgccttggggctataaaagggcccctaggcgcatggagaagacatccaagtattctctaagcattcctaagcaccaagactttgatttcgcgcatttgattctttgtgatagcatctagagctctatttgagttgtgaactcgtcgggttgtgttgtgagctcttgttgcgatttgtgtgcgtgttgtcactctgattttgtgtcttgtgtgcgtttctcatccctcccttactccgtgcttctttgtgaacatcaaagtgtaagggcgagaggctccaagttgtggagattccttgcgagcgggatatagtgaacaaagcaaaacaccgttctattcaagtgggtctttggaccgcttgagaggggttgattgcaaccctcgtccgttgggacgccacaacgtggagtaggcaagcgttggacttggccgaaccacgggataaaccactgtgccatctctgtgttgatctctttgtggttattgtgttttgctaagactcctctctagccacttggcattattgtgctaacgtctaaccaagttttttggcattaagtttcaagttttacaggatcacctattcaccccccctctaggtgctctcaattaattataatgttgttcaatatatgtgtatatatatttctctttcaaattattataacgtgatgtctaaaaaatgattataaattaaagaatgtactcccgtgtaagtcatttcgtttaaatattaataagacggtcaccaaaatgtctaatattagtctcctaaataagacggtttctaaaacgtccattattagtcacctaaataagatggttttctattgtaatcgtctattattataggatattcgagacagtttgataaatactttatgatttataatgtttgtattctctatggttctttagaagcagtgtcttaaataaaaacctaattcaagacggtttatcggacaaaatgacttaagcaaatacctttttcagacggttataaattaaaaaattgtcttatataatatcttttaagacggtttttaaacatcttcaatgtgggatatcttttatgactccatcaaatttggacacttcataagcgtcttaagaactgaaaattaaccgtctcatataacatgttttgtagtagtgtaatcgtgtgcttgagtttgcttgatttagtctcaaaggtagattgaaagggaaagatggacttggacaatgtaagacttccactgcactccgatgagagggtaatttactccaagttcatcttcgtgctcttattgccttttttactcttaattgaagattttggtgaggcaatggggttcaagggccaaaaatgatcccgttttggtgcttgatgccaaagggggagaaattaaggccaaagcaataaatggatcagctaccacttgagaattttgaaaatagtagagtagagcttttgttttgtcaaaatacttttattgtctcttattgtcaaaagttggtctcttgtggggagaatgtttgattatgggaaaaagagggagtttttgaatctttgatcaatttctcttggaatacctctctctatgcctcaacaagtgaattcaacttagagataggaaattgagtttgatttgcaaaaacaaaccaagtggtggcaaagaatgatccaaatatgccaaatttgaatcaaaaacaatttttgttctcatttgcattgatgtcgcacttcttttagttgctttttgttgtgttggcataaatcaccaaaaaggggagattgaaagggaaatgtgtccttgggccatttctataagattttggtgattaagtgctccacacaaatgctttgagtaatatttgtgccaaagactcaagaagtgcaaatcaagattaaaggtatgtttctagacttagtacattgttttgaagactaatgtattgtgtctaagtgctagaaacaggagaaatcactttggagataagttggctgtgttcagccaaaaggctgctcggtctaggtgcaccggacagtgtccggtgtgccaggaccagtccaaatgaacagcctgctctcgggtctcgacggcggcgtacggctataaatcaccggactgtccggtggtgcaccggactgtccgaagagtcgtctgcggcgaaatcgccgctctcgggaagcagtcaacagcgtacggctaaaaatcaccggactgtccggtggtgcaccggaccggtgagccaacggtcggccgggccaacggtcggccgcgcaatccgcgcgtgacgcgtggctgagccaacggtcagatgggggcaccggactgtccggtgtgcaccggacagtgtccggtgcgccaacggctccaaatcttcaacggtcggctgcgccagtttaggaaagcaatctgcaccggacagtgaacagtggatgtccggtggtgcaccggactgtccggtgcgccacccgacagaaggcaagaattgccttcctggattgcttccaacagcttctagctgccttagggctataaaagggacccctaggcgcatggaggagcacaccaagcactctttgatcaactctaagcaccaagactctatttccgcgcatttgattctttgtgatagcaactagagctccatttgagtagagaattcttcgagttgtgttgcgagctcaagttgtgacttgtgtgcgtatttgtgctctgattttgtgtcttgtgtgcgttgctcttccccccttacttctgtgtttctttgtgatcatcatttgtaagggcgagaggctccaagttgtggagattccttacaaacgtgagatagtaaaagaaagcgaaacaccgtggtattcaagttgatcattggatcacttgagaggggttgagtgcaaccctcgtctgttgggacgccacaacgtggagtaggcaagtgttggacttgaccgaaccacgggataaaccactgtgtctctctgtgttgatctctttgtggttattgtgtttcgcaagaactctctagctacttggctttattgctctaacacttaatcaagtttgtggctttaagttttaagtttttacaggatcacctattcacccccctctaggtgctctcaccaatgctcactccgtggagcactatacccaggttaagc

SEQ ID NO: 512 - DNA, 5370 bp, Zea mays
  Intron number 1 from transcript GRMZM2G473111_T01 (locus G RMZM2G473111) derived from phytozome v7.0 (chr-ID 8; pos 1 20964552 to 120969921 reverse strand)
aggcagcaggacttgccgctggattccaggtgccgccaatgccatcttctcttctctcctctctctccctccccttcttctcttcccttctctcctctttccctccccttctctcaattgacgagctgcagggatgctgcgtgttcttgcaagaggtataggactataggcgtgagatttcccatccacacgcttagctccccttcctgtgcacggctccttattttcctctgcacgcatagctctgtgaacttttccctacatgcgctctgcctttttgctcatgtagcatcgatgtcatgccttggcaacgactttcctcgtgaggcgatgccatacacaggatatttggaattttagtggcgtgcttgtttggagttcatattattagctcatgctcatctaaacgaggacatatcctgtgcaatcactcatttggtgcaagcgtgcaaccaaaccatccagagcatccaatctagatccaacggtttcatatgaaagaggttaaaagtaaaataggtactatgtttcaggtggaatgggttaaatgtaaaataacagtcatcattagatctagattagatgcaccaaatcgtttgattgcacgcttgcaccaatataagtgattgcataagatatttctcccatctaaaccaccacaatggagtggagcgtaagagtatgtttggtagagctccccgtggtataggttatctgtggaaattgattctttgtgttagaatacaagtgaattgcccatctttctccatcatcataatttttggggttgaactggttggtgcatgcaacttaatatggtatcaaagtcagagttcttgagttcgaatcatgattagcgcagttaaataaaacaattgttgttcgctattctacatccgaggcctaagatagtcttgacatgagggggtgttagaatacaattgaattgcccacccctctgcatcagcttaagttttagggttgaactgattgtatcatataatttaatactctgattgaacatgtttatctatgattctctatgataaactctatgcatacagtaacgacacgtggagtgaattaggagaagctattttttcagcttcatcacttcacataatcaacatagaatcatttttcagtaaaaaaaaatgtttgatagagctctttgctctgggagctttgacagacatgctctaaataatctttctaattcacattattagctcttgctcatctaaatcactacaatggagtgcttgtatggagtttccaatgtcaataagttttgccctcttgtttttcgtttgcaatgagtagttgggtaatctccttaggtcttgagttaaattccccatgggagcgaattttaggttggggataaaaaatccacttgtctgtcacacgtcaaagcacaggtgtaaggttagtccccggtcatagttgttctcatataggctatggtgccgctgtgtatgggtggtgcagggttcagggttttttctcgatctgcgctagaagatcttcttaatatataatatctggggctatcttaccctcccgcaggtcgatttttttttatcctttaatatcacatggtgaaaaaactaaatccactattctgttcagttcaaaatgttgcaaaatggctatacaatatggaatagaactgtactgggaatggatgtgtgtttatgataactaagaagcatataaaatagaatcttgtgctatgatttcatgggcaagaaaaagcatacatattgggcttttaaggaaacaatagcttaattcacacttcctgaaagttccacatcttctttgtcagagtagattttgcatgtgtcctatgggccccactataccctttaattttcttaatggtttcctatttagttttgaatgattagaattccttgttctggggccatttaatgaactttgtttttttctgctccaaaaaggaaataacgccagtgatattacagatcagccattagaacatgcctttttcacatttcggttacttccctagcaacgctgattgtgccatggcattcataagtcaacagcttgtgtcataattttgaatatatgtgaaaatttctacttataagagccgtgaagctctgcaggatcccagcatttccccacgttagcaaaaagaactttcaccatcagatactagatttatggtgcctcccattccacactatcaccctactgtctatgtagtgtggttcatgtggcaacaaaacgctttgggtgttcgctgacgaaccgtgcatccctatgtcatatatggagaaaacaacaattgaacaaacttaatttctggattggagtatcatcttttgcatgttatcaattcatcgtttcctgaactgattaatttttttattaatgtattcaggaagcagttcatacgaacatagtatgtttatgactgcttgggggaagtagtcagcgaagttccagacatcggtgcatctgatgttattgctgatgataagcttggcaaagggtatatatctatcctgtagttgataaggttcttacttcttacatgtccaaatcatcttctacaaagtgttaataaatgtcgaaatgtcatcaggaaagctgaagaatggaagtgaggaggaattaaagaggaagataataaacttaagtcactattatccataactccgtgtggatgttgcatatttcacaattctcatgcatctttcataataatttggcaaaatatccaatttcaccccaaagtttcactactgaactttcagatcgtccgtttcaatcccataaggccataaccttctcttcttctgactcaaaactgtcttggccctcatatggcatgctacgttgtcacccctggacatccattgctgtttcatcacacatgaaatgtctcttctgccctcgttctgctcagtttcaaagggaatggctacaataatatctcaatccaatcaactatgagcatcagtttttactttttaccttgacgtttttgtttcttcctttatctttactttctcctccaatgctcttgttttccttagttaattctactctcacttgtcacataatctatccataggcaaccttttatagctgccaagggagtggattaatcgccggttggagattgcatcatacattccttataatggctagtttggaaactttatcccctagggatcctagacttttcctgggatagttaatccatggaccatgggtatgctattttacttagccacttagttctccaccgggggctttccatcctgttacacctgaagtatctgaagaagacacctgaagtatctgacgaaagggaatggcgaaggtcttctctgaagctttgtgtcgggtgcataacagtgaatgtaataaggaagaatgtattcagtattcatatcctggtagtgtatgtacatagtaccggtagtggtgtacgtatacatacagttggtcgtataaccgacctaacaggagtccatatatgctgtaatgtctggagaagaaaattatgaaataaacaaaaacacaaattacatgtctgtcgagttggtgttccatctcccagcagacgctcatgtctcggtctctcgccggggccaagggccttaacactagtgctgggaattgggccgtgccgggccggcccggcccaagcccatcgtgcttcgtgccaaacgggttcgggccaagaaagcccaaacaatttttgggccgtgccgtgccagcccgaagtgtaaaaacagtggcccagcccggccctaaaccacgtcgtgccttcgttgggccgtgccggcccaagcccggtccgtatatttgaccacataaaatcaaaatattatagccatataaagttcatatcttactaaattaaagatattaaacaattatagcatcatttaaccacataaactctaaatataacaacaatataaactcaatatcttactaaattaaagagattaaacagtttgggcttaattgggccgtgccggcccaagcccggcccatctatgcgtgccgtgctgggggcccgacgggtcggaatttgaggcccggcccaggcccgccttcgggccgtgctagcccggcccatattatttcgtgccgggccgtgctttgggctcttattttcgggccgtgctcgtgctggcccgaaaagcccgacccagattcccagcactacttaacacatccctaggtttgcctcccctccccttgtttccaaattttagtattggagcaaaacaagggtaaaaggaacttctcttccataatgactagtgaggagttatacctgtagataggggtggaaacgagccgaggctcggctcgctgtggctcgctcgtgcaacgagccgggctctgctcggctcgcccatctggcgagctcgagaaatcggctcggctcgcgagacggctcgccgagccaacgagcctatcaataaacataaatatgctctcgaaattataatataaaatcttaaaaatattttaaataacatattttaaattagtaaatagatatatcactaatatattatagaaaatagattatttttatagtaatctcaaataacataaattaattgtctactcgatactaatattatatgttaattaagattttatgtaacaaattgttgttgggacgagccagctcgcgagctgcaccgagccgaactggctcactcttttcacgagccacaaaaacaggctcggctcgggctcgttctgtgcgtcgagccgggccgagctgttgcgagcccgagccagctcgtcgagctcgagctttttttccagccctacctgtagagattggctggggctaagggcctagcaccagaagtggtttcactctaggttgcggcgtggtcgtgttgatttcttgtcaggcgtgtgtgtttgtagctcattagactggtggttaagtgctcgtttgtaagggttcttaccattttttcttcttaatataatacatagctctcccccacgttcgagaaaaaaaaatgactccacaaaggatgaccagcgctaagtcgatgactaggcatgccatgttgtaccaaggatagattggagccaaaaaaaagaaggaaaactaaatgactagattggtcattttgaaagttccatggatggacaaagtggtctattttgtctaataataatttaaagtatctgtcagaacttaatttccctctgatatgcatcttccacaattcactccatattatcaaatatgataaccccattttctatcgagccttagacttttgagcaattcatgctgaataagtttgttgcatgcaggaagcagaaaccatataagca

SEQ ID NO: 513 - DNA, 50093 bp, Zea mays
  Intron number 2 from transcript AC214451.3_FGT005 (locus A C214451.3_FG005) derived from phytozome v7.0 (chr-ID 6; po s 148252327 to 148302419)
aaggggatcacacagctcaagtaagctcacgtagtttgtttgatcgcttttttgtcatatagtagataatgtatgacacgggattaggttatactacaggtggctaataaatttttgcatatttcaatcgctcctaaagttggaatggcttttgaatctggggacaatgcttatgagatgtgtaacaactatgctagcaaaattgggttcagcattagaaagagctcctcaaagctacgaccagatggtactatatatcataaatatatagtttgcagtgccgaaggacatgaaaaaacttagtcatcaaaaggcacgacggacgggatgtggtgcttcgcattcagcttgttgtcaacagagagggaatttagacagtcaataaggttgtacttgagcataatcattatcttgctagtccaaataagaagaaaaatctaagatcccaacgacatgtctcagaagcagatataaagctaataggccagatacaggaagctagaatgaggcctgcccaagtgtatgagttcatgaaagagttctatggaggagccgacaaagtgccatactcaaagatggattgcaataatgagattggtcatgaacgcaagaagtacttagaatccaatgacgcacaaacactatgtaactacttgaagaataagcagcgtgaggatccaacatttttctatgcagttgatatagatcaggaagatggacccgataaaggtcaaatagctaatttcttttgggtagatggccaatctattatggattatgcatgtcttggtgatggtgtgtcattcgacaccacatttcaaactaataagtttgaaatgccttttgctccaatccttggtaccaatcatcacaagcaaaccatactttttggagttgtgttgctatttgatgaaacaattccatcatttgtatggctatttgaaagttttttaacagtaatgtctggtaagcacccaagcacaattttcactgatcaagacgcagccatggcaggtgctattgcttatgcatttccaacacaagccattgtctttgtatatggcatatttatattaatgatgctaaacatctcatacatgtaattagtaagcataaggagcttctgcctgcttttaagagttatgtctatgaggatagatcagaatattacttcaataaaagtggcatgatttgtgcgggagtacgacctcgaggacaatgactagatggcgaacctttataacttgagggggaaatgggctattatctaccgtgactcttttatagccgacataacctctactcaaaggagcgaaggcatgaataatgtcttcaagaaaaggtttcgtaggaaactaggtctttcggaactccttgtagattgtgagaaggtgtgcggcaatcttcgtgaaaacgaggtgaatgaagatttccattcacgtcgtaagatcctagttacttacaacccaaatttacctatgttgaagactgcagctgaattatatacaaggagaatgtacttggagtttgagacagaatttaaagatcaatttgtattaactggtcaattgttaaagattgagggattgatcttgacatatatggttacacatatacaattagactaaggggcaacagttctgttcaacattgaaatatgaccatcacatgttcttgcagaaagtatgattttataggtatgtacaaaaattctaaactatgatatatttttatgatatagtttgatgaataatgtctcacatatatgtcaggtatattatgcaagcacgccctcaaagtcttcaacaaaaaggatattttttatttgccatcgaaatatatactcaacagatggactaaatatgcgaaaagcagattttttgttgagaaacatggcctcgagaaggagaatttgacaactcaagttgcacgtatctcacgaaaggcgacatctattgcattgaagtgttctttatctaaagagcttcttgatgatttggagaacgccatagataagctagacttggatgcaaataactctatattgaaggtgcaagaaaaagataatgaagtgcctccagtttcagcttattgttcttcagatacattaacaggtaaaatatttgtcggtgtttcagacacgcgaggtccgtcaaccgaccaatgaatttgttgctgcgtgcccctgcccagatgggttgatgcaagatggaacacaagcggggaaatgaggcttatattatcttgcaccggggtgctcgtagtaggggttacaagcatcgcgagggagcgagggtgagagcgagagagggagagagtccctatgtgcgttcgtctctgcctatctcgtctaccccgcgtccctgcattccccctatgtcaacgtcctgcgtcaacgtgccttaggaaggccctgaacatccccctttatagatacaaggagatgcctagctgtacaatggggtgtagctatgtgctaacgtggctggcggagaagtgccttgagccctgtgtgctaacgtggctgtcggaggagcaccttgagccctgtacaggtacaagcgtggccaccggagaggcgccttgagccctgtagaagcatagctggcggtgcgacatggatcctgctgacgttcccttgtgaaaggatcacgatgcccaagagggggggtgaattgggcttttctaaaaatcaacactaattaaaacctaagcaagagctaagcaagagcccaacttcacccccaacaactagcactaagaaaataatactagaaatgcaacaatgctaagacaatacttcaaatacttgctaaacaaatacacaatgtaaagtgcttgaattaagtgcggaatgtaaagcaaggtttagaagactcctccaatttttcccgaggtatcgaagagtcggcactctccactagtcctcgttggagcacccgcgcaagggtatcgctcccccttggtcctcgcaagaaccaagtgctcactacgagatgatcctttgccactccggcgcggtggatccctcgaaaccgcttacaaacttgagtcgggtcaccaacaagatcttcacggtgatcaccgagctcccaacgccaccaagtcgtctaggtgatgccgatcaccaagagtaacaagccgtagactttcgcttgaccaagagaagcctaatgcaagtggtgtgtgctctaggtggctctcgctagcgctaatgaggaacaaacgcggattaagattctctaatctcctcactaggcttttggtgcttgcaatgctctagcaatgtgctggaataaatgtggagtgcaagacattgaatatggtgggtggaaggggtataaatagccctcacccaccaactagccgttacagacaactcactgcgcaatggcgcaccggacagtccggtgcgccactggtgcgccaacagtcatttccaacggctagttctgatagatagccgttggactcatggcacactggacagtgaacagtcactggccggtgcacaccggacaatccggtgcactgtccggtgcgccactaaaattcctttctgaaacaggcgctctcgggttttctgtgaagggaagcttcttccccggaccagcctggccccacctggcagagggtgcaccggacagtccggtgcacaccggacagtccggtgccccagggccagaaaccctaactcttgtttttcagctgattttcaaatcggttttcgttctaacttgtgagtgagttctagagtgacacctagcactgtatgtgagtgttattgtgcaccaacactacactagaactctcttggtcaaactactcatcgacaacccctctttatagtacgactaaaagagaataaaagacctaactaaatcgcgagtgtccacatctccttcacactcggactccgtagaccttcaccttttgtttcgtcgttttagccgtcgcttcgagttcttatctctgggattgttttcaccgttgtagtacttctacctgtcatgcgacctaacttaccatttgtctctgcaaaacatacgttagtcacatataatattatgttgtcattaatcactaaaaccaaccaggggcctagatgctttcaccttgctttcgtaggaggttgggagcaatccgacgtcatgggcgcacgcggggaaccatcattacctgttaccggagtaaccttagatgggacaccggtcttgttccttcgtagcctgaggcagctagccaggagtagggtaatgatgtatcccctgtagcgtagtcggcccgaggccgaggtcgggcgaggtggagacttctcccgaggccgaggctaaggccgaggcctgggtcgggcgaggcggagaccttctcccgaggccgaggctgaggccgaggcctgaggtcgggtgaggcggagctccctgttgcgcccgaggccgaactcgggagaggtcacgacttgctattgctagtcttatcctggtgactggcacggtagccggagcggggcgaacaacgctgttttcctgtcagaacggtcagtgaaaggggcgaagtgactgcggtcacttctaccttgtcgactgaggcacgcgtgtcaggataaggtgtcaggcgatccccgcattaaatgcgcatgcgatacggtcggttggtagggcgatccagccgaggtcgctgtacgacaaagcctgcccgagctgggcttcgggtgagccgagggtgcgtctgctgcctgaggggaccctcgggcgaggcgtgaatccgtccgggactactgttgccgcccgaggctgggcttggatgaggtcgcgtcccttggtagatgtggccttgacttggaccgcgctctatcagccatgtatggttcgttctgaagatgtgttccagccggattaaggagcattgggggtacccctaattacggtccccgacagtagcccccgagcctcgaagggagtgttggtactcgcttggaggttctgtcggattctttgcaaggggaccagccctttttggttatattttgttccggtgggtgcgcgcgagcgcacccgccgggtgtagcccccgaggcctcggaggagtgttttgactcctctgaggtcttaattctttttgcgatgcctcggtcggccttgttgttccctcatgcggcctggccgtagcccgggtgcacggtcaggctccgagtttttacgctggtttgttgacgtggtcaacagtttggccgtagcctagtgcgagagcagcccccgagcctctgcacggagcgagaggacgatcaaggaccgtctcgacttttattggacgccccttcgtcgcctttccgcaaggaggaaggggggagagccatgttaccctcggggggcaccgaacatggtgtttccggtgagttgctagcgggtgatccgagtggacgcccgagccccgttcgataagggtcggctagtggcccagaggcgtgctccaaaagtacatgcgggtgatttgccggacccggacccattcgatagggtccgagggctcgatgcctccctccggtgggattccgttacaaaatcgttcctgctggtctcagaaatgtcctagggtacctcgggagcatagctcgagcctcggccatgtaactgacgtacccaaggtcatccctgactccgtgtgctttggggcggctgccgaacccttccgaggggctagccttcgaacccctgatcagtaaagggctcggagcccgagtgccctcgggtggttgtcgaaccccggagggcgcaaccttcgaacccctgatcagtaggagggctcggggcccgtttctttcgctgggaaggttcttttttcgaaatatcccctttcccggtccctatgacaagagagagagagaggaaaagaaaaaggatatgaatttaaataatgtggcgcaccttttttgacgcgaccatcatgacggaggtgaaacggcgcccgcttctcctgccggaggtgtcgcttgccctgccaaggagttaatgcgacgggacggacgattcacggggcgtctgttgcgcgtgcgcgagtcgttcgaggaacagaaagaccgtttcaccttcgagtttgaatttcgcgacgggttcgggcgaagccttgggtggattttgcccgggcctttatatacccggacgaggggccggtggtggttctttaccctgccatttgcgcttgccttctgctttggtttccgcaacctaagagagtagccagagaaaccacacacctcatcccttccgcctccaccacctccgttcggctatggctgacaaggtgaccatcatcccgccgcgtgacccgtggcctttctccaccgtcgctgtggaggatctggaggccctcgttgccgatggtctgctccgtcccctctccgatgggccgcagccggagtggatggcccccgcgagcgaggctgatctgactccgccaccggggtatgtggtcagtttcatccccttccatgagcgggggtttggagtgccagcgagccgcttcatgcgggcgctcctgcaccactacggggtggagctgcacaacctcaaccccaactctatcgcgcaagcggccatcttcgcggcggtttgcgagggttttttggggattgatcctcactgggacctgtggacccatctcttctccgcggagttcttcgtcgcgacgacagaggcgaagaaggtcggtatggcggtgcgggccggtggctgcaccctccagctgaggccggggcgcgcgcagctgtacattcctgcctcccttgtgtcttcgaacaaggggtggcagaaccgttggttttatctctggaacaacggcgggatgcttccgccgttttctcaacgagtggtgaccgccgccggcaataactggcgctggggggccacgcgcgagaaccaggagaagctccagcctattctgcaggccttgcagaagttacgagatgggggccttaccgctgcgggggtcgtcgccgctatccatcgtcggagggtgctccctctggcggagcggcggttgcggcttgcggagatgaagtcgggggtcgatttggagggcacgcagatgtcctcgacccccctctccgtcgacgacctcctcaagcgggtagtaggtacggttgggaggctggatgctggcgcccttagccagcccgcgatgcgtcccgagcgtgggtatgtgtccctggtaagcacccggtccttcttctgtttcgcactgagttctctacgcctttgattctcactgttgggatttttgttcgtcaccaggggttgagaatctataaacacgtccggccaccggtcccagaggacgcggcggaccgagccgcgcggaggcttgccgcgaagaaggagaaggagaagaaggacgcggaaaaggcccgagctcacgagaggatgctagctcgggaagccttggagaagcgtcgtcggaggcaggcgagggatgggctcccgagggagccgtcgccggagacgcctgacgacgacgacgacgacgatgatgatgatgatgatgatgatgacgacgatgaagacgacgacatggcggcccgacttggcctcagcccggacccgaggctgggccaggggtcaccgagccagcctccaagtgggctggcaccaccagtgcttggggtcgggacaccaaggtcctaatccgaggagcggaggcaggccgaggggggtgcttgaccccttggccgagataattgttgtgactccggggggtcaggccgatccacctgttccccaagagcaggtccccgcgctggctgcacaggaggcccggtcctcggccgtcgtgacgacgcctgggcaggccgctccctcggcgcctcgggcgtccgaggcggaaacggtgccgaagccggcgggggggcagccctcggcagcgcctaaggggataggggcctgaggggcctccccacatacacgattggccttgccccggagcgggtaagtatttgaggatacctctgttttggtcttttgttgtgtgccttgaacttgctctctctttctttcaacaagcggaggcagggcttggctggtctggcccccacaaaggctcttaagacgaaggcagcttcggcggccggtgctacggcgtgccatgcaagttggttggcctccgcgtaaggcgccctccagtggggcgggcaggtggcacgagttgccatggggcaagcttccttggctgacccccctattggagcggccatcacgccggtgaggctgctgatgcggccacggcctcgagcccggctgacttgttgccggcgccgacatcgactcctgccggagtcatcgctgatccgcccgcgaagccgcccgtcgccgccgacgtcgggggcggttgaggcaccgttgcccgcggttatccccgacctccccgttcccggccaagaggagagggcggccgtcgtcgccgaggttggcgatcggaggcctgtcaccttagccggggagaggcccagctcgtcgtcttcggcggcacctgatgcatcggctgtagggggacccgacgcctcggttgaggggcgcgcagagccgtggcccatctcaaggagcagcggccttatccccacgcagctcaatcccaacgagtggcgtgggcagccgctccagttctagggccatggcacctcggtggccctcctcttcctcaacgacgagttggaggagaaggctcgggatagtttccgtgagtataccgaggcggcgatgaggtcgcttcggtcgatcatggaaaccctttccagggacgttcccagggttttccaggtaaggattagacgtacaccttgcgtgactagggcattcttcgcgacatcttgttttccttcctcaggagctcgcagacgcaagcaccgccaagtcgctgttcctccgccgcgaaagtgacgtttgggagttgctgcgatcctagcgggtcgtgcttgccgaagccaatgagcgccttgcccaacggagcgtcgaggcggtggaccttcggttgctttgtgacgggctgaagtcggaggcagcagcggcatggacagaggcggcgttggcacgagcggaggctttgtcggtccgggaggaggtggcttcccaggtcgaggagatgcggcagcggtagttggagctcggccaggctatcggtgagcgggaccaacctcggagccaggctgtcgaggccgtgagccgggctgaggcccttaggggtcagctggcggaggctatggagcggttatgtcacacccggattttaggggtccaagatccgggcgcgaacataatcaccaggtgtgctgggaccaagtctcacacatatgatgaatcatggcacaggatcgaatgtcacatctttactatataacaggagttctatacaaaataattaaataattacatcataaggagacaacggtccagcaacccaaagttgactgggagacgacgacctagacctctcacgaacacatcgcagcatcctccaagcgcctcatcctgcggtacctgttcttgacctgtgggggtgtgagacagcaagagtgagctcacatacgttcatcgctcaacaagttgtggggaataatgtgtatgaactcgccaaaggtgggagctcatgtgaagtgtaaggcttaccaaagaggatggctgaagctgagcattgcttttaaagttggtcaaaattttattagcagttactaagtataagtaaataccaaacccaattaagcagtagaacaaaagtaacaacatcacctgcgatgcaatgcatatgacaaattgaatttagttccataaattaatcatgtgagggtccgagctgctcatgaccgtgagcacggctagtataccagttttacactctacagaggtggcgcatctttacccacaagtcatgttacccatctgccaagggatcgcgacttcccatacacctctaccgaggaggcgaggcagggtaacactacgaggcctttacaagttccactagcttcagaaaacccgctacagtttataggaagctccaatgcaggaatcccttgcaggaccgccatcgcagcaaaatcctcccgagggcctccctacactgaccactcccctactgcccttgcccctttcaggtaaggtagtcttccactagctttcctaattaatcggccaagggcgtcccattaaacccttgtggtagcactgttttcccgggtggtcgctccatgttccaattaacataatgatcttatcatgaacagtaataataaacagataataaaagtgtaatcgtgaacaatgtatcttcatacccaaaaccacataaagcactagcaagtactacccaaaaagttcagtggtaaacaaggtataaagataatcaaactagggtaacctattgggtcccatcaaaattaacctatgcaaatcattatgattaatcagaacatgagtaggtaaaaagaggtgatcaagggcacaacttgcctggcacttgagaatccaggtaccaacttgcttttcagatgacacgtgtcctcgctctagtcgtagcaatacaaacaaacattgtataggcaaaattaacattacaccaagcatgtaaataaaatacacagtaataatctagacattaaaataagatcacaggaactggaatcattaaatttggggttatagattttaagttatggattttctaagatttaatgtgcttgaaataggattaaatgataaataaattttctaacagagttcatatcaaaacagtgactctaagtgttagagaataatattacaaaattttagaaattgaaatggttcaatttggagttcatatgtattttctatgaattatcaaagttctagcaattattttgtattaaaaagtaatttctataattaaataactgaatttaaagagctatggactgggcctcaaatcctagaaagcgcagggggctcggggtaagtcgtcctagacacagagaacagtggaagtaggacggcgggttcattataaaataccctagggtttctttagcaaaatgtacccgcgaagggggtatgggatggatctggccgttggatgaggaaggaatggctccgattagatctaggttttccatactggaactgaatctcagccgtctggtaaaaatcccacggctgaagattccccaaattatcgttgtactgctcgtcgttcgatccagatggacggctacgatcaaatcaaacgaaaggggacgcgcactttctaatctcgtacgttgaactaggatccaacggcccacacgaaatctccagcccaatccgcagagcgcggcggcgccgcccacaagacacggcggcggacagccggaatcagtcgatccggcgccctgatggaacaacccgagcgcggatgggtccaattcgtgcgcaatgatgagccgaactggttcaagtgcttaccaagggtgtatgaggcgaagggttggtcggccacggcgcggtgcggatcaacggtggcgatgaactacgacgagcaattggaagctccccagtggtacgccaggtcccgcgacacaacaaccagcatcaagagatgcccacgactccaatcatcccctccccaagggccaatcgtcgatctacctcgctccagacggtggcggcaattagctcgtgcagcgcggcttggagaggaagggtgagtactgggcgagataaggcgaatccagtgaggcgtactaaggcagcgaggaggatgaaagagcggggaaggaacaggagctggactcgcgaggggagaatttatgccgccgacgagatgtggccgccacggaactcgcgcaaccgttaccgaactgccgcccggattttccccgagcttttcggtggagccaacgtggggaggggtacccccgacgacgcggtcccgcgtaccagcgtcaaacttgcgcgggatttgctccaggttcggcgccgcggagttcgctgttcgttgggatgaagacgacggcactgacgtcgtggggtccataggacagtggcagcagagcggagcgaccgcagaagaacccaccctgtcaaggcggggccacgcgccagagaaagctaaccagcgcgcgcggactggctagggtagttgcttaggtgggccgagggagggaaaattcggcccaagagacgcttcaggcttttctttttcaattctatttttcttttctctttctctttccttttcaaattcaaattcaaactttgagtttatatttgtggagttcatacttaggttaaatttaaataaccaaatctagttattttatatatctatttcatctcatttgtatattatttcttctcttttctcaaatctcaaattctaaatttcctttaaaacttaaattccacttttgggctttttaatatatttcttgtcacattttttttatatcgtcacaaaatgcacaatcaataaaaaaaactcagcatgatgcacagattaattatgtgttcattgttctattcatccacttttaactagtgttgagcacatgcaataaatagtagaggccacaaaccattgagattatctctattctctttattacacttttgagtattacaggttagccgaggcgtccgctcgggctgggacccttgcggagagcctggccgaggccgtcgggtctgcccagtccgcccaagccgaggcctcgcagcagcgtgctcgtgccgaaggtatgttttgcctgctttgcgactttgtttttgtctccatccttctccttgcgtctgaagaatgttgtcctgttgtctgcagggttcgagacggctcttaacgagtccgtcaagaactgccaggcgcttgcccaggcggctgagcagaaggaggccgaccgtgtggccatgtctgaggccatctcggctttctgccaggcctttggcctcgacgacgtcccctcgggtagctccccctagagtcatctgtgggccttgggcggccatgtgcgcaacagactccgtggggcgctgcaccacgacgttaggcgggccttcaccgtgctcgcttcccactacaacgtggatctggagcgggtcagcgaggggtattgcttacccgacgaagaggaggctgccttagccgaggtccagaggcttgacgtagctatcgagggcccaagcgcggcactggcttcctccttcgaggtggagatccttccgcccgtatcgccgtctgaggccgggtcggattctgccgtgggtggaaacgacgccgagggtgtcgctcctccccctgtagatgtctgagcctgcaagaacagtttgcttgaagtatgcgtatgttttttgtggccgctgaggcctaaacattttaattgttggattataaagctgcgtttttttctcttgtttcgtgcgttcggacttgttcggtagcagaatcgcttatccgagcgtgagtcacttttcgcggaaggtggtgagtgaggtatccgtatcccggaggcgtaggagtccctcggctcggtcggccttgacgcttacatgttctctcgtcgtttttaggattccgttatcgatatagttgaaaagcacaaaagtcattttggtagaagagtttttcgaggaaaaaatttgacgcagagggggttcccccttctagcccccgagggagggtcgggctttgccgaggcaaggctgatccttccttgatggttagactttatttatgcatgtaaagagagcgagatacatgaacgacttgaaacattttaagggtaaaagcgacgtagttgttcaatgttccaagcgttgttgtagacctcgccttgatcgttggccagcttgtatgtcctgggcttcaaaatcttggtgatgatgaagggcccttcccagggaggagtaagtttgtggcgccctcgggcgtcttgtcgcagccaaagtaccaagtctcccacttggaagcctcggggctgaacccttcgggcgtggtagcatcgcagagactgctgataccgtgccgagtgtagtagggctacgtcccgagcctcttccagctggtccaacaaatcctctcggctggtcttgttgctttggccgtcgtaagcctttgtcctcggggaaccgtattccaagtctgtgggtaagatggcctcggccccataaactaggaaaaacggctcggcatcgtcctcagactccaaaccaccgagggtagttcttttatccaccgcttgtgaaacttgttgaggtcgttgtagatcctcggttttagtccctgcaaaatcataccgttggcacgctccacctgcccatttgtcattgggtgagctacggtggcccagtccacacggatgtggtggttttcacagaagtctaggaacttttccctgtgaactgcgtgccattgtcgatgatgatggagtttgggaccccaaagcgatggatgatattcatgaagaacgccactgcctgctcggacccgatgctggttaagggtcggacctcgatccacttggagaatttgtcgatggcgaccagcaggtgcttgaagcccccaaatgccttctgcaagggaccgacgaggtccagaccccatacggcaaacgaccaagtgattggtattatctatagggcttaagcgggcaggtgtgtctgtcttgcgtagaattgacacccttggcaggagcgtacaatcctagtggtgtcggccaccgcggtcggccagtagaaaccttgtcggaaagcgtttccgacgagggtccgaggtactgcatggtgaccgcaagcccccgagtgtatttcttgtaacagctcttgtccttgggcaatggatatgcatcgttgaagaatgcctgaggggctgtggtggtacaactctttttcatcacccagcaaaacgaacgacttagtgcgccgagccagtcgccgagcttcggccttgtcgagggacagctctcctcagaggagatattccaggtacggggtctgccagttttggtttggcgtaaccccgttctgttctccctcaacgcgcagggcctcaccctcggcggccgagggtacctcgggctgggccaaggtctcctctggtttgggcgcgtcgtcgattttgacggatggttgatgtatgtccctggagaagtccaggggaaccgtcattcgccccgaggctattttcgccagctcatccgcagtctcgttgtaccgtcgagcaacatggttgagctccagcccatagaacttgtcttccaagcgccgaacttcgtcgtagtaggcctccatttttcgatcgcgacagtgggagtttttcatgacttggtcaatgacaagctgcgagtcacctcgagcatggaggcgccgaacccctagctcgacggtgatgcacaacccattaaccagagcctcgtactcggccacgttgtttgacgccggaaaatggaggcgcagcacgtagcgcacatgtttcccaaggggtgagatgaagagcaagccagcacctgctcctgttttcatcagcgacccatcaaagtacatggtccaaagttcgggctatattggagctgtcggcaattgggtgtcgacccattcagccaggaagtctgccaagacttgaaattttatggcctttcgaggagcgaatgaaagtgtttcgcccatgagttccactgcccattttgctatcctacccgaggcctctcggcactggatgatctcccccagggggaaggatgacaccacagtcaccggatgagactctgtcggtgttttagatccgaccgcacacccagggttgcccctcaaggtgttttaggggtaggacggtgtcaccgactgtagctaaatggttcgtgcctggtgcacgaggaacaatggacaatgtttacaggttcgggccgcttggaaatgcgtaataccctacgtcctggtgagtatgctttgcgtatgggttacaaggtagctctctaaagcgtagagagttgaggtggatggttgaatagtaatggggtcgatcgatctgaaggggtgccccctaggccttatatattcgaccgtgaggcaatacatgtggatatgcacctaaaagatagtgaaccatttttgtctatcttcctatgattctgccgacttatcctcgcctggttacgtcgtacggggctccagcgcgggaaagtcggatcttctgttgcggtcgtttgctcaacgctgtggggccatccgggcttgcaccaacccggccttatgtcgatctgcttcactagttgctcctccccaggcccatgaaggagtgaccttatgatttattgggcccttgggcctttcgtgaggtcttttatccttctagtggacccgggggatatctgtcccccacaagcccctgatcttcggactgattttgagataatcagcccaaagatcctaggtccagcttacagtctttgtttatgacgagaaacgctttccaagcagtttgtcaaaaacgattttttactatctcctcctgctttgatcactcgtgaactggagccttgtttcatgcttgtgccttagaagtcggcatttcatattgtaggagcctgaacttcattgggtgcaccggaggtgcacccaatgggtgtagcccccgagcttcgagtggatttttggaaaataatccactcgaaggtcttcatcagaaatcttgccttcagttttgtcttatgccttggaaactggcgttgctttatctcgaaatggtgatttattgggtgcaccggaggtgcacccaatgggtgtagcccccgagcttcgagtgggtttttgaagataatccactcgaaggtcttcatttcgtgtctttttgctgagagtaaccctttctttttccgaatgccttagaggtcagcattatgtcatcaatattatgctttagaggtcagcatacattttgtcttttgcagccgagttcgcgatccgctcatatcttgctaggtggtgtaatttacttgctctacgactgattggacatttgatggacgttctctggctagtcttcacgtcgcttctgtcggtcagattttgtacttcactggctatatttggctttcctctgatccttactgatatctcatttttgtcttgaggtattcattgcatgccctgcacggatgtgacagtttttgaaaaatatactgataattcctgggcgtcccccccaatgggtgtgggcaagggacggcttggtacgctgagtgttttagccggctgtttctgagtagtaatgtgatgtgacggtgggtgtaatcatatcatccgcgttgttgactggagccccaatgggtgttgtgttgcgtgaaacggcgtcagccgcctgacgtgtcttcaaacgggttgaagtgtgtattgaatgcttcgcgactgttcagtgactgtggttggaggtgagcggttgccttcttcttctataaatagtgccttttgcctctctggttttatcacacccttgctgctctccgctgcttgctttcttcctctccttgcatttccaccatgggcaagaacaacaaatgcaagcgcgagccgactcctccatcagaggactttagcgactcggaatactcagaggaggagttctcctctgagtccgaggggtctccggctcccgtctctcccccagcgtcgtccgatgactcggacgactcttagattattgccgcggaggtctggacttacatccgggccgtcgagcgctccgggctcgagggctcagatgagtcggagtactcctcggacgaggaggactcgcccgaggaggacggcgaaggtgacgacgacgacgacaacgacaacgacggaggcgacgacatcgacgacggtgacggcggcagcaggggcggcaacgacggcagcaggggcggcgacggcggcagcagcaggggcagcggcggaggcggcagcagcaagggcagcaataaggccagtggctaaatgccactggtttttagatattagtatagattagaagtagtatagtgaaataatgtagtagtattagtagtaggggagtatcaactcataatgagttgatttgtaagtactattacttcccttaatgaagaacgactttgtctcctcctgtgccaattgctttgcttcatagtaaattgatctcttatttgtgaagttgattcattcggaatagtatctgaataactcgggcatcatatcgccgcttcaggggtgatggccgagctatttttgtcaatatttatgcatttgaaatagagtccgagtgatgacgaagccatgtcagtgtcggaatggctgttgaccacgtcggcgatcttagaggtgacaacaaagtgacttgggacgtcgtcggcgctttagagataaatgccgagcgactggagacatcgtcggcgctttagagataaatgccgagcgactggggatgtcgtcggcgctttagagatagccgccgagcgactggagacatcgtcggcgctttagagatagccgccgagcgactaaagacatcgtcggcgctttagagatagcagccaagcgactgaagataacgtcggcgctttagagataggtgccgagcgactggagataacgtcggtgctttagagatagccgccgagcgactgaagacatcgtcggcgctttagagatagccgccgagcgactgaagatatcgtcggcgctttagagatagctgccgagcgactggggataacgtcggtgttttagagataacagccgagttagaacgagccgcgtcggtcactttgaggataatagccgagtgacaatgtggcacaccagggttttagaagtagccaccgggtgacgacgtggcacaccggtgttttagaagtaactgccgggtgctgactgggcgcttttggaaacggtatctgactcgggaatatcccatatgtgctgcgctttcagccgcctctgctttccgtgccctagttcttgctttcctgcctccaaatcctttctgcaattcggctcccgctctgttcgtcagtagagttgagatggcgcccaagcgaaaggcctcgagttcatccgctgtggtgattccccccatcgatcccaacagccagttgcctttcgcaggtaatcatatgtctgttgtctccgagcctgaccttctccacctcgtatccatcggggtccttcccccgagggagctttgttcttggcggatttgccatggggtcactgtcccgacagaggatacccacgaatccgtaatttatgttcattttcttctccgcggtctcggtcttcccatttctccctttttccgcggcctccttgatttctatcgtcttaacttgacccatctaaaccccaattccattctgcaaatttccatttatgttcatctgtgcgaagctttttttggcgtcctgccacattttggattatggaagcatctgtatcactgtcgccctggaatggccggggggcagcatcagctggttgggggtgctagtttggagatgcgtcgtggaaggaagactggatatcttgagatccctctcaaagacagtatcaagggatggcgcttggagtggtttattgttgagaaccacgggaattctctccccccacggtcgggaagacagccggatgttcgcactccgagttggaccgagtccccgctaatcaggaggtagctgaggcaggggctttgctagctgaagttggactgctgaaagagaggggtctgactattgaggttgtgattgctgattttgtttttaagaacattcagccgttgaaggacatggctcacccggcttatctgtaccgaggcctagctgactcaactcgggttaccaacagaaaaattccctccgtagacttggtgaaccgacttgaaatgattcttagaggcaaggtatcaaacgttggtgctccagtggcatattcggcctggaacctgcctccttccaaagccttcactcattttgtttcgaatccacctgtcgctgatggcagtttgggccttagagtgcgaccctctgctgaagaagttaacgccttggttgcctcgctcggggaaattcctgatgaagagcggcaagtccattttgaggtacctttggatcccagtgacgcagaaataagtgctatgcttgatttgctggctgaggactcttctgatgctgctcctattgggacattggtggtggcacctcccccagaaactgatacaaccttggatattcagaagcctgtcagtgctcgcccgagacgcccttcccgagccaatcaacttgatcctcctgttgacgagcagaaaaagaaaaagagacgtctctggcgagtatctagtttggatcgggatgttggtccttcggttcctgctgctgaagaagtgcctgttcctgaatttactgatgctgacctcaatgggggtgctccacctgctgctgaccccaatgggggtgctccatctgctgctgaccccaatgggtgtgttgtctgtgttgctgatgaaaacgacggggaggaagaagatgaggtccctttgactcggaagaacagtcggcggtatgtcgtcagcggggaaagtagtggagttccttctcctgctatgtctgccctcattggtctacaagggttgtccatggcaaactttgatcagactcttgaagatatggttccagaagacctgctatcagagccggcagatgatggtgtgatggaggtttgtgctgacgtgctcgacgtcgggttgggatcatcccgggcagcgtcccgcgcctcgtcgaccttagagcgcggtctcgagggttaggaaactgacttggatcgtcttgctcccatggaagtaattgagggaccctcagccttagaggtggctactgcggagaaattggtcctcaaggatggtgttgacacttgcccagcccccgaggatgttgccggggatgactcggctcgggtgggaaacgcaagccactgcccagcccccgagggtactgccggagatgatctggctcaagtgggtagcgcaaactatagcccagcccccgagggtgtccgagcggggtctccctcttgtacttccatggatgttcacgtaggatcttctccgcgctctggttgcatggtggtagcccaagctttgggccagggagtcgctttagaggctagcgctcccgctgaccaagttttgggctctgttgatggtaccgagttggtcccttctggttcattgcaagctgcttcgggtggcgaccttacaccaggtcgtcaattgatttctcacgatttgggagtcccttcgttcttctccaatctccaggtactgtggtatattctggcctgacttttacgtcatacgaactgctgccaacacgctcatatgttctgcatatcaggcattggtggacggaatgactagtcagctgaggttgcaaggtgcttctgttccagaaggagcttcatctctggcacgttggaatccagtgttgctccaacatcgtgtctctgacttggaggcgacgaatgctggttaatactcttttgcttctctttgtctaccttattgaactgctttacattttgactctttttgcttggttgtctcttgctagatatggttcggcagatttccattcttgaagaaaaacattctcaaggtcaggctgaattggtccagcggtgttctgattttgaggaaaagtattctcaaagccagactgaactggcccaggtctctgctgctctaaatgacgctaaaacgctgaactcggctcttcgcgctcagcttgattctaaaaaggtgacttatgaaactgtgccttgtattactgtgttcttattgtccgcttgatgtttgaaggagttgattcttgtttgcaggaagaaaaaagtacccttgtcgcttctcgcgacaatcttgacagactgtatcgtgattctagcaactcgttgaccatcttggagagaagtcatcgctttaccatggaggagttagacaatcatcgttgcaagctgcaggaatccacggatgatatgatccgtctcaggcagttgatatcggctaaggatgctgctatcaaagaactccgtgcttccaagaaatccatcgcccaggagctagagaccgctcaattggctgccaaagttgctaaagaaacttccattactctgagagctcagcgcgacagagccatggataaagccattcgcgcggggcgaattttgatgaggagacccgacgtggttgttcatgaagacgtaagggctgacgtgaatgctgctcctgattcctcaagtcacccttcttcgtcggtcgctcctgagaaagatattgcaaaatagagaaacattttgcgtgctttgagcgtgtggttagcatgatcgaatatttgttagaagacaccagttcagcatttgaatgatattgttactcccctattgtttcggaattcgacagtacgtaaatttgcagtagtaaagtgatatgtgatggttttggagcttgtttatgggatatagaagtcacccctatatgagtattcgtaagcatgcgaaatcgtcttaagtcgttgctgacttgaatcgatcgcttttgttagttgggcatagtggtcaccccgagttaagtaagcgcgagcatgttacaccgccttaagtcgttgccgacttaagccgattgctccgtaaggagggcatagtggtcaccccgagtttagtaagcgcgagcatgttgcaccgccttaagccattgtcgacttaagctgattgctccgttagcagggcatagtggtcaccccgagttaagtaagcgcgagcatgttgcaccgccttaagtcgttgccgacttaagccgattgctccgttagcagggcatagtggtcaccccgagtttagtaagtgcgagcatgttgcaccgccttaagccattgccgacttaagccgattgctccgttagcagggcatagtggtcactccgagttaagtaagcgcgagcatgttgcaccgccttaagtcattgccgacttaagccgattgctccgttagcagggcatagtggtcaccccgagtttagtaagcgcgagcatgttgcactgccttaagtcattgctgacttaagccgattgctccgttaggtagggcatagtggtcaccccgagttaagtaagaatgcaagtcaatcgtgaacaaactgagtatctttgaagccttttttattgatgacatatttcccattttacagagtacatcatcgtcccgatagcttttgaaatacaactagggataaaacttcctgaggtgttctatattccaagagttcccaatttctgtgccgtccatttgagtgagacgatatgatcccggccgagtgacttctgctactatgaatggtccttcccataagggtgataacttgtgccgtccctcccccgttcgaattcggcggaggacgagatctcctactgaaaaggatcgttgtcgcacgaccttgtcgtgatagcgtctcagggtctgctagtaccgtgccgattgaattactgcgtttagccgctcttcttcgagtacaataacatcttccagcctagttgcttcggcctctgttatgctttcaaagatcagcctcggcgccccaaacttgagatcagcaggtagtactgcctctgacccgtagaccatgaagaaaggagtgtttccatgcagagcctggctaggttgggttcttaggctccaaacgacgtaaggcaattcccttatccactttcctgcgaacttctcatttttgtcgaagacctttttcctgagtgcctccaatatcatcccgttagctcgttcaacctgcccgttggctctcgggtgtgctaccgaagcatacttgatctgaatgcttttttgctcgcagaaatcgaagaactctgaacttgtgaagttagaccccaagtcggttatgatattgttcggtattccaaacctgaatattatgtcttgtatgaattccacggctttagctgaggttaaagaagcaatgggtttgaactctatccatttagtgaatttgtcgattgctaccaacacgtgagtgtatcctccttgagctttcttgaaaggtccaatcatatctagcccccagcatgcaaagggccaagtcaccgatatggtctgcagttgctgtgctggtagatgttgttgtttcgacaagtacttgcaagcttcgcacctctgaactaactcggcggcatcactttttgccgttggccaatagaatcccgacctgaagaccttcccgactagtgtcttggacgctgcgtgtattctacattgtccagcatgaacctcctccagaagttgcttcccagtggacgatagaatgcatttcatgaagatgcctgatgcatcccttctgtatagtgtctccccaatgagtgtgcagtgagccgactgtctggcgatacgctcggctgcatttttatcgtttggctcctcttcgttctttatatatctgatgatcggccttctccagtcatcagagcttgactctggttgtttcacgatattacactcttctgcctggtccattaagatgcttggttgtggtatttcttgtacaaagactccgggtgggacctgagttcgactggatcctagcttggacaatacattggctgccgtgtttcgatctctttctacatgatgaaattccaggccttcaaatttatcttctagttttcggacggtagtgcaatattttcccattgaatcattcgaacagtcccattctttgtttatctggcttatgactaccaaagaatctccgtataccattagtctcttgatgcctaatgatatggcgatgtttagtccatggatcagagcttcatactcggctgcattgttggaggctggaaataacaactggagggcatacttgaggtgctcgcctccaggtgtgatgaagagaattcccgcgcctgctccctgcagcttcagcgagccatcaaaatacatccaccatacttctgcagtttctgggttttctggtacttgttgttcagtccattctgatatgaagtcaaccaatgcttaggttttaatggcagtgcgaggtcgaaattcgatgtcatgagatcccagttcgcaggcccacttggctattcggccaatggcttccttgttgtgaaggatgtcccctatcggaaaccagtgactactatgactttgtggtcgtcaaagtagtgacgtagcttgcgggtagttagaagtactgcgtataatagcttctgaacttgaggatactttttcttcgagggacccataacttcactgatgaaataaataggatgctgcactgggtaggcatgtccttcttctgctcgctcgactaccaacacggtgcttaccacgtgagtcgtgcaagagatatacagcagcaggtcttcagctggttgagttgatgtggctcgccgcggtggtttcagtactggtggggttgtcaagaatttcttcagcgcatctagggcttcttgtgcttctgaagtccactgaaacttgtccaccttcttgagtagcttgtaaaatggtaaacctttttctcccagcctggatataaatctgctcagtgctgccatacatccggtaagtcgctgaaccttcttttgtgatcatggagctaccattttcatgatagcttcaatcttatctggattagcttcaattccccggtggctgacaataaatccgagtagcttccctgtcggtaccccaaagacacatttttcgggattaagcttccatcgatatcgccgtagactgttgaaaaccagctgtaaatcttcgatgaagttttccgagttctctgttttgattactacgtcatccacgtaggcttccacacgcttgccccagtgatcggctaagcatgtttgaatggctctctgagaagtcgctccagcgtttttgaggccaaatggcatggaggtatagcagaaagcaccgaatggagtgatgaacgctgtttttcctcgtcttcctttgccaaactgatctgatgatatccggaatagcaatccagaaaagacagcacagaacatccagcggtggagtctaccacctgatctatcctagggagcccgaagggatcctttggacaatgtttgttgagatctgtatagtcgacgcacatgcgccaatccactttattctttttgagtacaagaacagggttggctaaccactcgggatgtaacacctctctaataaatccgaccgcgaccaagtgagccaattcagcgcgaatggcctctcttttgtcgggcgtgaagcgacgtagtttttgacggatcagccttgcctgggggtagaccttcagtttgtgctcggccagttctctcgggactcccggcatatccgcaggttgccatgtgaatacgtcccggttgtcttgcagaaaccggacgagcgcgccttcctatttatcgttcaggctggagctgatgatggcagtcttgcgttcatcagcaaaccccaggttgatccttttagtttcttcagtcggccgcatagaggtcgcggcttgagcttcgttcgccggtgccataaggtcttcctcaggcttagagttcgcctgcgctgaagaagtcggcgacggtttggtggtgagggctgcttggatggccactcggaaacattctgcggcgccttggaagtcagcccgcacagttatgattgcttgtggccctggcatcttcagtatcatgtatgtgtaatgcgggatggccatgaattttgccaatcccggcctcccgatgatggcgttgtacccgtagtcgaagtttgctacttcgaacctcaggaactcggttctgtaattctccagagttccgaaggtgacgggcatgtagatgtggcccagcgggtattccccttcggtcggcacgatgccgaagaaaggagtgtccgactcgcggagctctttgaggtgaactcccaagccttggagtgtccgggggaaggtgacgttgatgctgcttcccccgtccactgacaccttcttcaccctgctctctcggatcaccggatcgacgaggagcgggtatttgcctgggtggtcgaagttgagccattgatctgcccgagtgaaggtaatcgggtgctcagaccaccggtacggagcgggaggaccggtggttgccaccaatatctggcgatcgttgagcttttgttgtcttctgttctcctacgatccgtgtccgccgaagatgacgttgacctccctgtcaacgcgtgggaaggctcctccttccccctcctcctgctgctggggttgccgtggttcttctggtcctccccgcggcggaggaggaggtagaggttggaagggtcggtcgtgtccgatggagtgcttgaagtccctgcagttccgcagggtgtggcgcatgtccttgtggtacgggcattgggcgtcgaggatgtcgtccagcgtgcgctcgcctccgcgaggtcctccccgggcacgagaggcaggtggtccagcggcgtgcacctcttcgcgaggtcttttctcctagcgtttgtcgggttgttggttcgcgtcgcgtcgtggcgctgctggcgcgggcttcgctcccccgatgaggtcctgagctcgctcgtcggcggtgatgtagaggtcggcttcccggaacagctgctcggaggtagtcggcgctctttgcagtatggctcggacgaaggctgagtcgttggatcctctgtagaagtcctcgaccacggccgcttccgtgacctcggggatacgatttctcatggtctagaaccttttgaggtacaatcggagagtttcgtccccccaacgcttgatggatttgaggtcccatggttgcgctggtttgtcagagagggactgaaagttggcggtgaagcgtcgactgaagtcgccccagtcgtcgatgcagtgtcgaggtagatgtcgtagccattgtagtgcgtcttgcccgagaacaatgggtaagtacgcaatcatcacgtcctcggacgctccggcggctcaagcggcggtggtgtagacggccagccagcctcctggatcctgcttaggttcatatttgtcgacattggataccttgaagttgggggccactgaatggccctaaggcatggagtaagggccgtcactccacacgtgtcctcctatcgtcgaggatgatgtctgtcccggggaggggagtagtcattgtgattcctcgaccgaccccgggttgtaccgccagtcgaggctgttgctgactcggttttggttgcctgactctgagccgggatgccatgatccctgttgtactcctcccgacggcgtatctcgttctcatgccgtcgttcacgcgaagcgttgatggagcttcacgcgtcccagtgactgttgatggcgtgtcgtagatcgttcggcgggtgagcgagcggtagaagatggttggctgcctggtgaacagtcgtcgatagccctcggcgtcgggagtctgagggagtccatcagctatccgagctagtacccctccgacttcactcggtgtgttcatggctcgggcgaagtcgggattcaggttgcgcccgaagagtggattttcccggcgctgccttgcgtccttctcggcttgttcctgagctcgtcagcgatcacgtcggcgggaattccttcgttctctgaagacgcgttcctccggagtttctcctatctccgagacctcgtcccgcgaaacaggttgctctggatcctgttcttcggcctcatgatgtcgccgaatgttctggcaccggtttctccgccggtgggattctcgctgaggtggttcttctccaggtgcggtcggctcgtcgtcggagacggggggcgactccactcttccgatgaagaggatgtcggggtagaatggtgcggcggtcgtggcgatctccttcccgttctcctttgagggcgaaggaacggaaagaacgacttgcttcctcccggtctctttcttccttgcgatctgggtccattctttcgtcggggaagtagacaatggggttctccgggtcagcgggctctcggcccctggcttgccgagggcgatcttttttcggagtgctggaggtcgcgctttttccttcctcaccccgatattctcggagcgtgttggagtggacttcttctttggcggatcggcgatgcggtgtagagttccctcttcatctgctatggatgagatcgttccaaagcagaatacggatccgggacggagggtgatcttgcggtggaaggtgacagccattgagcttgcttggatcggcgacacaccccctacctggcgtgccagctgtcggtgttttgggtccgaccgcacacccggggttgcccctcaatgtgttttaggggtaggatggtgtcaccgactgtagctaaatggttcgtgcctggtgcacgaggaacaatggacaatgtttacaggttcgggccacttggaaatgcgtaataccctacgtcctggtgagtatgctttgcgtatgggttacaaggtagctctctaaagcgtagagagttgaggtggatggttgaatagtaatggggtcgatcgatctgaaggggtgccccctaggccttatatattcgaccttgaggcaatacatgtggatatgcacctaaaagatagtgaaccgtttttgtctatcttcctatgattctgccgacttatcctcgcctggttacgtcgtatggggctccagcgcgggaaagtcggatcttctgttgcggtcgtttgctcaacgctgtggggccatccgggcttgcaccaacccggccttatgtcgatctgcttcactggttgctcctccccaggcccatgaaggagtgaccttacgatttattgggcccttgggcctttcgtgaggtcttttatccttctagtggacccgggggatatctgtcccccacagactcgaagtagtgtcgcaactttttgtcgtgtcagaattaccgcgtacagtagcttctggatttgtgggtagcggatcttggtctcggatagcacctcgctgatgaagtggaccgacctctggacgagcagtgcatgcccttcttcttgtctctcgactacgatcgcggcgctgaccacctgagtggtcctggctacgtagaccaagagggcttctccctcagcgaggggcaccaagatgggcgcattagtaaggagtgcctttaagtttccgagggcttcttcggcctcgggggtccaagtgaagcgcttggccttccttaagaggcggtacaagggcaatcccttctcgccgaggcgcgagatgaagcggctcagagccgcaaggcatcccatgaccctttgtattccttttaaatctttgattggtcccatgttggtgatggccgcgattttctccgggttggtctcgatgcctcgctcgaagacgatgaaccctaggagcatgcctcaggggacttcgaagacacacttctcgggattgagttttactccctttgcacgcaggcacccgaaagttacttcgaggtcggagaggaggtcagaggctttccttgtcttgacaacgatgtcatcgacgtaagcctcgaccgttcgaccgatgtgttctccaaacacatggttcatgcacctttggtaggttgcacctgcattcctcaagccaaatggcatagtagtataacaatacatgccaaaaggtgtgataaaagaagtcacgagctggtcggactctttcatcttgatttggtgataacctgaataggcgtcaaggaaagacacggtttcgcacccagcagtggagtccacaattttatcgatgtgaggcagagggtagggaacctttggacatgctttgtttaaacctgtgtagtctacgcacatcctccatttcccaccttttttctttacaagcacagggttagctaaccattcgggatggaatacctctttgatgaaccctgcagccatcagcttgtggacctcctcgcttatggccctgcgcttttcttcatcaaaatggcgcagggactgcttcatgggtcgggcaccagctcggatgtctagtgagtgctcggcgacatccctcagtatgccgggcatgtccgacggactccacgcaaaaatttcggcgtttgcgcggagaaagtcgacgagcactgcttcctatttggggtcgagctcggagccgatcctgaccttcttgccagcgtcgttgctggggtcgagagggacagacttaaccgcttcagctggttcgaagttgccggcgcgccgcttcgcgtcaggcgcctctttggagaggcactgcaggtcggcgatgagggcttcggactcagcgagggcctcggcgtactccacgcattccacgtcgcactcgtaagcgtggtggtatgaggatctgacaatgatggttccattggggcctggcatcttgagcttgaggtacgtgtagttggggacggccatgaacttggcgtagcttggtctccccaacaccgcgtggtaggtccctcggaacccgactacctcgaaagtgagggtttccttttggaagttggagggggttccgaagcaaacgggcaagtcaagttgcccaagggactggacgcgcttaccggggacgatcccgtgaaaaggtgctgcaccggcccggatcgtggacagatcgacccccaggagccctagggtctcggcgtagatgatgttgaggctgctgcctccgtccataaggaccttggtgagcctagcgttgccgatgacagggtcgacgacgagcggtgtcagggaccataattaggggtaccctcaaggctcctaattctcagctggtaacccccatcagcataaagctgcaaaggcctgatgggtgcgactaagtcagggatcggtccattcgagggactcgatcacgcctcgcccgagcccagcctcgggcaagggcagccgaccccggaggatctccgtctcacccaaggccccctccagcgacgaacatacttccggcttgcccgaggcccagtcttcgccaagaagcaaccctggccaaatcgccacgccaaccgaccaaatcgcaggggcatttaaatgcaaaggtggcctgacacctttatcctgacgcacgtcctccagtcgacagagccgaagtgaccgcagtcacttcgccgctccactgaccggcctgacagaaggacagcgccgcctgcgccgctccgactgctgtgccactcgacagagtgaggctgacaggcagtcaggcctggcctcaggcaccataggaaactccgctccgcctgacccagggctcggacttgggctcagccccggaagacggcgaactccgatccgcctgaccccagggctcagactcgggctcaaccccagaagacgacgaactccgattcgcccgaccccagggctcggactcgggctcagccccagaagacgacgaactccacttcgcccgaccctagggctcggactcagccctggcttcagccgacgatctccgcctcgcccgacccgggggctcggactcgacctcggccacggaagacagactcgacctcgacctcggaggagcctccacatcgcccaacctagggcgcggaccgaccacgtcaataggaggcgccatcattaccctaccccaagatgactcaggctacgggggacaagaccggcgtcccatctggctcgctccgccagacaagtaatgatggcaccctgcacgctctatgacgacggcggctctcagcccccttacggaagcaagaggacgtcagcaaggactcaacagccccgacaactgtctttccgccaggctccagcgctcctccgacggccccgacaccacccgaaccgggtgccaaaacctctccggctgccacgatggcatatacttagggcgctagctctccgccgctagacacttagcactctgctacaccccccattgtacacctggatcctctccttacgcctataaaaggaaggaccagggccctcttacagagggttggccgcgcggggaagaggacgggactggcgctcgcgtgaggccgctcgctccctcccgcgtggaacgcttgtaaccccctactgccagcgcacccgacctgggcgcgggacgaacacgaaggccgcgggattcccacctctctcacaccttcttccccccttcgcgctcggcctcgcgccgacccatctgggctggggcacgcggtgacattctcactcgtcggcccagggaacccccggtctcaaaacgccgatagttggcgcaccaggtaggggcctgctgcgtgttgatgaacagcttcccgtcaagctccagatgggcagtctccggcaacctttccagcctgggatggtgctccgtttcgggagtcttgagttcatgtccctcgacggcagctacgacatggtactccttcccccgacgtgcgacagcgacaatggcggccgacagcccgcccgtcggcggcggaatcgacgacgtcttccccgcgtggtggaagagcaacatttgagctcaccccgccctctcccccgccgacggaggaggaggcggggcaaccaaggccaagcaggaggcggcacctcgtcggctgtcgagcgagtcgacggcgtcggcgccccaatgggggacgcggcgggcatcgacctcgcgtttgagacgaagacgagcgtcgtctccccgcaacacgccaattccaagcaaacggacgacgccagcacgctcgcgaaaggcttgctgggcgtcaccctcgtacccgagacgacggtgcagtcagtcccagacgtgacttcgtcaccgcccatcgaccaagaggtacccaccggttcccatctcatgcctcttggattcagcctcaacccgccgagcggcttcgctttggcggacgctctcgtggaggcgagtccgaaccctctggggtatcgtatgcggtcaccctgggaccggctggcggacgtctcgacctacgggtcctcggggtccgaggaagatgacgagcccgacttctgttgggatttctccggacttggtaaccccagcgccatgcgggacttcatgaccgcatgcgactactgcctttccgactgttccgacggtagccgcagtctcggcgacgaggactgcggcccaagtcgtgaatgcttccacgtcgatctagggggtccctccgaaggcaaccatcttggtatgccggagaacggcgatctccctaggcctgtgcctcgcgttgacatcctacgggagctagctgtggtccccgttccggcgggggtcatgacccacagctcgagcaaatccgcggggtgccggccaggctcaacgaggggcaggagcacttgagccgatccaccgggacatcgggcaggaatgggcgggccaacctccggccggagaagggcgtcatctaccccaaggtatccagcactgcatcgccgacgatgtcaggatgaggccgccacccgcttccagtggggtcggccaaaacctagctgtagcagcaatgcttctccgcgcgatgccagagccatcaaccaccgaggggcggtgaatccagggagagctcaagaatctcctggagggcgccgcggtccgacgggccgagagctccgcctcccgaaggcagggtaccccttggaacatcgcgccgcgacttcccgattcctgcgggaagcctcggtccacaccgggcgcacgcgcaacacagcgcctgcggccccgggtcgcctcggcaacgagcaccatcaccgcgaccgtcgggcccacctcgacaagagggtgcgccgaggctaccaccccaggcgtgggggacgctacgacagcggggaggatcggagtccctcgctcgaaccgcccagtccgcaggccttcaaccgcgccatacgacgagcggcgttcccgacccggttctgaaccccgactactatcacaaagtactcgggggagacgagaccggaactgtggctcgtggactatcggctggcctgccaactgggtggaacggacgatgacaacctcatcatccgcaacctccccctgttcctctccgacaccgctcacgcctggttggagcacctgcctccggggcagatctccaactgggacgacctggtccaagccttcgccagcaatttctagggcacgtacgtgcaccccggaaactcctgggacctccgaagctgccgacagcagccgggagagtctctccgggactacatccggcgattcttgaagcagcgcaccgagctacccaacatcaccgattcagatgtcatcggcgcgttcctcgccggcaccacctgtcgtgacctggtgagcaagctgggtcgcaagacccccaccagggcgagcgagctgatggacatcgccaccaagttcgcctccggccaggagtcggttgaggctatcttccggaaggacaagcagccccagggctgcccaccgaaagatgcccccgaggcgtcaactcagcgcggcaccaagaagaagggcaagaagaagtcgcaagcgaaacgcgacgccgccgacgcggaccttgtcgctgccgccgagtacaagaaccctcggaaaccccccggaggtgccaacctcttcgacaagatgctcaaggagccgtgcccctatcatcaggggcccgtcaatcacacccttgaggagtgcgctatgcttcaacgccacttccacagggccaggccacccgcggagggtggcagggctcgcgacgacgacaagagggaggatcaccaggcaggagagttccccgagatccgcgactgcttcatgatctacggtgggcaagcggtaaatgcctcggctcgacaccgcaagcaagagcgtcgggaggtctattcggtgaaggtggcggcgccagtctacctggactggtccgacaagcccatcaccttcgaccaagccgaccaccccgaccacgtgccgagctcggggaaatacccgctcgttgtcgaccctgtcatcggcgacgtcaggctcaccaaggtcctcatggacggaggcagcagcctcaacatcatctacgccgagaccctcgggctcctacgtgttgatctgtcctcggtccaggcaggcgctgcgcctttccacgggatcatccccgggaagcgcgtccagcccctcggacaactcgaccttcccgtctgctatggaacaccctccaacttccgaagggagaccctcacattcgaggtggtcggattctgaggaacctaccacgcagtattggggaggccatgctacgcgaagttcatggccgtccccaactacacctacctcaagctcaagatgccgggccccaacgggatcatcatcgttggccccatgtacaaacacacgttcgaatgcgacgtggagtgcgtggagtacgccgaggccctcatcgccgacctggagagcctctctaaggaggtgccagacgtgaagcgtcacgccggcaacttcgagccagcggagacggttaagtccgtccccctcgacccagcagcgacgcctccaaacaggtccggatcggctccgagctcgatcccaaataggaagcagtgctcgtcgactttctccgcgcgaacgccgacgttttcgcgtggagtccctcggatatgcccggcatatcgagggatgtcgccgagcactcgctggatatccgagctggagcccgacccgtgaagcagcctctgcgccgattcgacgaagaaaagcgcagagccataggcgaggagatccacaagctaatggcggcagggttcatcaaagaggtattccatcccgaatggcttgccaaccctgtgcttgtgagaaagaaaggagggaaatggcggatgtgtgtagactacactggtctaaccaaagcatgtccgaaggttccctaccctctgcctcgcatcgatcaaatcgtggattccactgctgggtgtgaaaccctgtctttccttgatgcctactcaaggtatcaccaaatcaggatgaaagagtccgaccagctcgcgacttctttcatcacacccttcggcatgtactgctatgtcaccatgccgttcggcttgaggaatgcgggtgcgacgtaccagcggtgcatcaaccatgtgttcggcgaacacattggccggacggtcgaggcctacgtcgatgacatcgtagtcaagacgaggaaatcctccgacctcctttccgaccttgaagtgacattccgatgtctcaaggcgaaaggagtgaagcttaatcccgagaagtgtgtctttggggttccccgaggcatgctcttggggttcatcgtctccgagcggggcatcgaagccaactcggagaagatcgcagccatcaccagcatggggcccatcaaggacttgaaaggcgtacagagagtcatgggatgccttgcggctctgagccgcttcatctcacgcctcggcgaaagaggcctgcctctgtaccgtctcttaaagaaggccgagtgcttcacttggacccccgaggccgagaaagccctcgggaacctgaaggcgctcctcacgaacgcgcccatcttggtgccccccgctgccggagaagccctcttgatctacgtcgtcgcgaccactcaggtggttagcaccgcgattgtggttgagagacgagaagaggggcatgcattgaacgttcagaggccagtctacttcatcagcgaggtactgtccgaaaccaagatccgctacccacaaattcagaagctgttgtacgcggtgatcctgacgcggcggaagttgcgacactacttcgagtctcatccggtaactgtggtgtcatccttccccctggggagatcatccagtgccgagaggcctcgggtagaatcgggaagtgggcagtggaaatcatgggcgaaacaatctcgttcgcccctcggaaggccatcaagtcccaggtcttggcggacttcgtggctgaatgggtcgacacctagctcccaacagtttcgatccagccggaactctggaccatgttcttcgacgggtcgctgatgaagacaggagcggacgcaggcctgctcttcatctcgcccctcggaaagcatctacgctacgtgctacgcctccacttcccggcgtccaacaatgtggctgagtacgaggctctggtcaacgggttgcgcatcgccatcgagctaggggtccggcgcctcgacgctcgcggtgactcgcagctcgtcatcgaccaagtcatgaagaactcccactgccgcgacccgaagatggaggcctactgcgatgaggttcggcgcctggacgacaagttctacgggctcgagctcaaccacatcacccggcgctacaacgagactgcggatgagctggctaaaatagcctcggggcgaacaacggttcccccggacgtcttctctcgagacctgcatcaaccctccgtcaggatcgacgacacgcctgagcccgaggcaccctcggctcagcccgaggcaccctcagctcggcccgaggcatcctcggttcagcctgaggtaccctcggcccccgagggtgaggcactgtgcgtcgaggaggagcgaagcggggtcacgcctaatcgaaactgacagaccccgtacctgcaatatctccaccgaggagagctacccctcaaccgagccgaagctcggcggttgacgcgacgcgccaagtcgttcgtcttgctgggagatgggaaggagctctaccaccgcagccccttaggcatcctccagcgatgcattttcatcgccgaaggtcaggaactcctacgagacatagactcggggcttgcggccatcacgcagcacctcgagcccttgtcggaaacgccttccgacaaggtttctactggccgacggtggtggccaacgccactagaattgtccgcacctgcgaagggtgtcagttctacacgaggcagacccacctgcccgctcaggttccgcagacgatacccatcacctggccttttgctgtatggggtctggacctcgtcggccccttgcagaaggcacccgggggctacacgcacctgttggtcgccatcgacaaattctccaagtggatcgaggtccgacccctaaacatcatcaggtctgaataggcggtggcgttcttcaccaacatcatccatcgctttggggtcccgaactccatcatcaccgacaacggcacccagttcaccggcagaaagttcctggacttctgcgaggatcaccacatccgggtggactgggccgccgtagctcaccccatgacgaatgggcaagtagagcgtgccaatggcatgattctacaaggactcaagcctcggatctacaacgacctcaacaagttcggcaagcgatggatgaaggaactcccttcggtggtctggagtctgaggacaacgccgagccgagccacgggcttcacgccgttctttctagtctatggggccgaggccatcttgcccacagacttagaatacggttccccgaggacgagggcctacgccgaccaaagcaaccaagctagtcgagaagactcgctggaccagctcgaagaggctcgagacctggccttactacactcggcgcggtaccagcagtccctgcgatgctaccacgcccgaggggtccggtcccgagacctccaggtgggcgacctggtgcttcggctgcgacaggacgcccgagggcggcacaagctcacgcctccctgggaagggccgttcgtcatcgccaaagttctgaagcctggaacgtacaagctggccaacagtcaaggcgaggtctacagcaacgcttggaacatccaacaactacgtcgcttctacccttaagatgctttcaagttgttcatatacctcactcccacgcaaagtttagtcgtcaaggaagggtcagccttgcctcggcaaagcccgaccctccctcgggggctaaaaggggggaaccccctctgcgtcgaaactttttcctcgaaaaaagatcctttctgccagaatgtctttcgtgcttttcgactacttcgaaagtggatcctgaaaacgacgaagtacacgtaagcagccaaggctgaccgagccgagggactcctacgcctccgggatacggatacctcactcatcaccttctgcgataagtaactcgtgttcggataagtgattccgcggaccggacaagtcttcacgctcgaaagctcctctgccgaagcgattctttgggccttgtcgactgcgtcggtgacagaaccccatggacgggcaagagcgcgcgtaagcggcaaggccgaccgagccgagggattcctacgcctccgggatacagatacctcactcatcaccttccgtgaaaagcaactctcgctcgcatagacaattctgttaccgacgaaaaaagtccagatactcgaaacaagaggaaaagaagcgcagctttacaacacggcgagggtgtgtttgggcctcggcggccgcagaaaacacacgctacaagataatccgatcctgcaggctcggatcttgacagttgaagggagcagcagcaccctcggtgtcaactacaccttcggcgaggtccggcctagcctcagacggcgacgtggtccgaggatctccactctgaaggacgacttcatcatcacgcccgggccatcgccgccagggtctcctccaagaatccggctcgagcaggtgcctcggccgatcaccctgaggcctcggccagctgtcccccaaagacatcagcccggcccgaggcctcggtagatcaactccggtgtcggtcccgctaacggacgacccggccaggctccggccgaccaagtcttcttttcgagccaactctgcctctgttcgtgctgacaccgctacccctggcttcggctcatcaaagagcggccgaggggttcctttaactaagcaagagaagcctcggacatcaaggccgaccgagccgagggactcctacgcctccgggatacggatacctcactcgtcacctttgtacggggcgactcacgcttggtgaagcggttcagacaaccaacaggcgagtcttagtgctcgaaaatgaggaaaaaacacggctccgtgccaaaaatacatacatgtttaggcctcgacagccataatgaacaaaaacaccggcattcaaggtgccatcacaaacggaactccggtcccgtccccgcgggtatgaacaacctccacaccggggagcctgcggggcgacaagttccgggcggctcgccggcgacctctgcagcagcggccatggtcccaggatggacgcggccaccggaaggctctcgttcgtgtccccgctcaagggatgcgaaccagccatcaaagccgaagagcgggccgctccgaagcgcaccggcaagtcctcgctcccgccctcgccacgaaagcgaggaagagggcggaatgttgcatcctagctaggcagcaacagttcgccttccccggcatggctggaggacatctcctccgcagagctggaggatggtttccaccaccagaagctggaagaagaggtggccagccgacccgcgcggaaggtggagccccggctcgcctcgctctccgccccagcaaggatgatgaacatccttgaagctgagggcgggaccaatatcgcagcccggcttgcttctccccatccaggggctggtggtcaccatctcgggtgaccaccggcggaatgggtgcagccgggctgcatgatgaaaatccttgaagccgaacgatggctgaaaggtaccaactcccacggagttgcgttcctccaacgacaaggcggaagaactacgggtgtcccccattcggggctcggaaggtggaaagacacgatgcataagggagcgcgaagacatggttgcctttcaagggggtcaccctccttttaaaggggactctccctgcctgcgtccccagccgtcgtgggctgagtcttccccaacatgctccaaggtcctccccctacggcgcgggggctgggtcccacatgtcatgcaagctggcccagagcagaagaagccaaactaacgcgcgcggtgcatgcaaacgcccaacggttacaagcgcccctccactttcgcccagaccagcgggtgaaagggcgggcagccatgcaggcggcatgcaaccgcgccaagtgggtgcgcccctccgacttccaacgcgcccagcatgggggcccacgcccacgcgtcatgcaaccggcgcgccggtcgctacgtgcaagcaactgcaccgccactcgcaccactaccgcgcctcctcgactgcggaaccagtaccgcgactcgaggcgacccagcgcacgacccagcagcaccagccaggcgcgacggtcaatgcggccaaaaatgggccggcagtaatggcgatggcaggcgggagcagcggtcacgtcgtcagccaagcttacgtcccatcctggggcagtgagagagccctctctcacggcgtgaagacgacgcgcccgtgttccgttcctcgaacggctcgcgcacgcgcaacggccgccccgcgaaccgctcgcccagtcgcattaactccacggcgagacaggcggtgcctctagcgggggaagcaagcgacgcttcgccttcgccataatgaccgcgtcaaaaaaggtacgccacgtcattcgatttcgtatccttttccttttcctctttctctctcttacaatagggaccgggaaagggggatatcccgaaatggacccttctccatgaaggaaacaggctccgagcctccctactgatcagaggttcgaaggctggcccctcgaaggggttcaacagccgccttagagcgcgtgggctccacgcccactactggtcagaggttcgaaggccggcccctcggaagggttccacggctgcctcaggccactcgggctccgcgcccactactaatcaggggttcgaaggctggccctcgaagggttcacagtcgcctcagacatagagcaagggatgaccctgggtacgttcgatacataaccgaggctcgggctacgctcccgaggtaccctaggacatttccgagaccagcgggaacgatcttgtaacggaatcccatcagagggaggcatcgagccctcggaccccgttgacaggggaccgggtccggcagatcacccgtaggtacttttgggcgcgcctctaggcctctagccgacccctaacaaatggggcacggacgtccgctcggattacccgccagcagctcaccggtgacaccatgttcggtgccctccgagggcaacatggcgctctcccccctcctccttgcggaaaggcgatgcaggggcgtatgtaaaaaagtcgagtctgtccctgaccgtcctctcgccctgtgcagaggctcgggggctgctctcgcaaacccggcttcggccaaactgttgacagcgtcaacataccaacccgagaacttgggacccgaccgtgcgcctgggctacggccagctcgcatgagggaacgaccagaccagccgaagcattgcgcaaggcattaagacctcagaggagtcaaaccactcctccgaggcctcgggggctacacccggcgggtgcgctcgcgcgcacccaccggaacaaaacgcaaccgggaaaggctggtccccttgcaaaaaagtgcgacgaaagcttccaagcgagtattaacactcccttcgaggctcgggggctactgtcggggaccataattaggggtaccctcaaggctcctaattctcagctggtaactcccatcagcataaagctgcaaaggcctgatgggtgtgactaagtcagggatcagtccattcgagggactcgatcacgcctcgcccgagcccagcctcgggcaagggcagccgaccccggaggatctccgtctcgcctaaggccccctccagcgacgaacatacttctggctcgcccgaggcccagtcttcgccaagaagcaaccctggccaaatcgccacgccaaccgaccaaatcgcaggggcatttaaatgcaaaggtggcctgacacctttatcctgacgcgcgtcctccagtcgacagagccgaagtgaccgcagtcacttcgccgctccactgaccggcctgacagaaggacagcgccgcctgcgccgctccgactgctgtgccactcgacagagtgaggctgacaggcagtcaggcctggcctcaggcaccataggaaactccgctccgcccgacccagggctcggacttgggctcagccccggaagatggcgaactccgctccgcacgacccagggctcggacttgggctcagccccggaagacggcgaactccgctccgcccgacctagggctcggacttgggctcagccccggaagacggcgaactccgctccgcccgacccagggctcggactcgggctcagccccggaagacggcgaactccgatccgcccgaccccagggctcggactcgggctcagccccagaagacgacaaactccgatccgcccaaccccagggctcggactcgggctcagccccagaagacgacgaactcctcttcgcccgaccccagggctcggactcagccctggcttcagccgacggtctccgcctcgcccgacccgggggctcggactcgacctcggccacggaagacagactcacctcgacctcggaggagcctccacgtcgcccaacctagggcgcggaccgaccacgtcaacaggaggcgccatcattaccctaccccaagctgactcaggctacgggggacaagaccggcgtcccatctggctcgctccgccaaacaagtaatgatggcaccccgcacgctctatgacgacggtggctctcagcccccttacggaagcaagaggacgtcaacgaggactcaacagccccgacagctgtctttccgccaggctccagcgctcctccaacggccacgacaccacacgaaccgggtgccaaaacctctctggctgccacgacggcatgtacttagggcactagctctcctccgctagacacgtagcactctgctacacccccattgtacacctggatcctctccttacgcctataaaaggaaggaccagggccctcttacagagggttggccgcgcggggaagaggacgggactggcgctcgcgtgaggccgctcgctccctcccgcgtggaacgcttgtaacccccctactgccagcgcacccgacctgggcgcgggacgaacatgaagttcgcgggattcccacctctctcacgccttcttccccccttcgcgctcggcctcgcgccgacccatctgggctggggcacgcgcacgccttcttccccccttcgcgctcggcctcgcgccgacccatctaggctggggcacgcggcgacattctcactcgtcggcctagggaccccccggtctcgaaacgccgacaagcggataccttcctgggctcggtacgcagtcggggtggtcgtcttggtcgaaggtgatgggcttgtcggacaagtctaggtagaccggcgccgctaccttcaatgagcagacctcccggtgctcctgcttgcggtgccgagccgaggcgttcgccacttgcccaccgtagatcatgaagcagttgtggacctccgggaactcctcttccttgtcgccccccttcttgttgttgttggtgtccttgccaccttctgccgagggtccagccttgttgaagtagcgccagagcatttcgcactcctcaagggtgtgcttgacgggacccctgtgataggggcatgactccttgagcatcttgtcgaacgtgttggcccctccgggaggcttccgagggttcccgtgctcggcagcagcgacgagatccgcgtcaacggcgtcgcgctttgcttgcaccttcttcttggccttcttcttcgtgccacgctggacggatgcctcgggggcatcttccttctgtcctccctgaggctgcttgtccttccggaagatggctttgaccgcctcctgaccagaggcgaacttggtggcgatgtccatcaattcgctcgccttggtgggagtcttgcgtcccagtttgctcaccaggtctcggcaagtggtgccagcgaggaatgccacgatgacgtccgagtcggtgatgttgggcaactcagtgtgctgcttggaaaaccgccggatatactctcgcagggattcccctggctgctggcggcagcttcggagatcccatgagttcctagggcgcacgtacgtaccctggaaatttccagcgaaagccttgaccaggtcatcccagttggagatctgcgcaggaggcagatgctccagccatgcccgagcaacgtcggagaggaaaagggggaggttgcggatgatgaggttgtcgtcgtccgttcctcccaactggcatgccagccggtaatttgcaagccacaactccggcctcgtctcccctaagtacttggtgatggtagtcggggctcggaaccgggtcgggaacggcgctcgtcgtatggctcggctgaaggctcgcggacctagtggctcgggcgagggactccgatcatcctcactgtcgtagcgtcccccgcgcctggggtggtagcctcggtgcaccccttccctgagtcgggctcgatggtcgcggcggtgttgctcgtcgccgaggcgatccggggctgcaggcgtcccgtcccgtgtgcgctcggtgtggaccgaggcctccctcacgcgccgggagggcgttgcgcgatgctccgaggggtctcctcgcctccaggaggcagagctctcggcttgttggacagcagcgtcttccagaaggcccctgagctcgccctggatacgtcgccctttggtggtggacggttccggcatcgttcgaagtagcatcgctgctgcagctaggttttggccggccccgctgaaggctgggggtagccctgccctggcatcgtcaataatacgacgctggacgttccgggcccgatgacgcgctcctccggcgagtgcccggcctgcccactcctgctcgatgttttgtcggagctgcacaagccgccctgcttcttcgtcgagcttggcctgcacctcgcggagttgctcaagctgtgtgtcctgaccccccgcagggactgggaccacagctagctcccatgggatctcaacgcgagacgcaggcacaggggcgtcgtcatctcctggcatgccaaggtggttgccttcatcgtgatccccctgatcgatgtggaaacactcgcgacttgggccataaccctcgtcgtcgaggctgtggtcatcgtcagagcagccaaagaggcagtggtcacatgcggacatgaagtctcgcatggcactgggatcacggagcccggagaaatcccaaccgaagtcgggaccgtcctcttcctcggaacccgcgagtccggaggttgagacggccgtcagtcggtcccaggttgaccacatatggtgccccagagggttaggatatgccctcgcgaaggcgttcaccaaagcggggtcgcttggtggatcgaagctgaatctaaaagggacagggtggaaaacggacggtaccttttggtcgatggacggtggcgaagtctcgtcggggacggactgcaccgttatctcaggtacgaggctaacgcccagtaagtccttcgcgagggtgctggcgtcatcagtccgcttggggttggcacgttgcggggaagcgacacccttcgttgtctcaggtgcgaggacaacacccgacatgtcccccgcaggggtgccggcgtcgttgattcgctctggtccgacagccgatgaggtgccgcctcctgcctgaccacagttaacccgtctcctcctcctccggcgaggagggtggcggggcaaacccgggtgtccctctcctgccgcggggagatgtcgtcgtcgagttcgcctccgccgggcgagccgacgatcatcgttactgtcgcgctgcgaggggaggagtaccatgtcgtagctgccgtcgagggacatgaactcgagactcccgaagcgaagcaccgtcccgggctgaagaggctactgaaggctacccatctggaactcaacgggaaagtattcgttaacacgcagcgagcccctacctggcgcgccaactatcggcgtttcggacccgcgaggtccttcaaccgaccagtgaatttgttgctgcgtgcccctgcccagatgggttgatgcaagatggaacacaagcggggaaatgaggcttatattatcttgcaccgggatgctcgtagtaggggttacaagcatcgcgagggagcgagggcgagatcgagagagggagagggtccctgtgtgcgttcgtttctgcctatctcgtctaccccgcgttcctgcgttccccctatgtcaacgtcctgtgtcaacgtgccttaggaaggccctggacatccccctttatagatacaaggagatgcccagctgtacaatggggtgtagctatgtgctaacgtggctgacggagaagcgccttgagccctgtgtgctaacatggctgtcggaggagcaccttgagactctcttcagcaacgttctctatatacatcctctatatccgtcctttacagtcttctctaaaagattccatctcctatatttactttctctccaacaacatcctctaaatcacgtcctctatatgtaaatacctatattaaagacatttttaattttttaatttttgtacatacgtatttgtcatactctcaaatgtattatacatattttagttttattaaaccggttgtttaaagtattcaaatagataaagaaccgtttagagaaactctatatatagaggatccagcagcgttctctaaatttagaggaccgtttagaggacgttgctggaggaaatagaggacgtcctcgtcctctaaatttagggtacaggaccctttagagctccttgttggagctagtcagccctgtacaggtacaagcgtggccgccggagaggcgccttgagccctgtagaagcatagctggcggtgcggcatggatcatgctgacgttcccttgcttccgtaggaggttgggagcaatccgacgtcatgggcacacgcggggaaccatcattacctgttaccggagtaaccttagatgggacaccggtcttgttccttcgtagccttaggcagctagctaggagtagggtaatgatgtatcccctgtagcgtagtcggcccgaggccgaggtcgggcgaggcggagacttctcccgaggccgaggctaaggccgaggcctagggtcgggtgaggcggagaccttctcccgaggccgaggcctgaggtcgggtgaggcggagctccctattgtgctcgaggccgaactcgggagaggtcacgacttgctgttgctagtcttatcctggtgactggcacagtagccggagcgaggcgaacatcattgttttcctgtcagaacggtcagtgaaaggggcgaagtgactgcggtcacttcgaccttgccgactgaggcacgcgtgtcaggataaggtgtcaggcgatccccgcattaaatgcgcatgtgatacgatcggttggtagggcgatccggccgaggtcgctgtacgacaaagcctgcccgagctgggcttcgggcgagccgagggtgcgtctgctgcctgaggggaccctcgggcgaggcgtgaattcgtccgagactactgttgccgcccgaggctgggcttggatgaggtcgcgtcccttggtagacgtggccttgacttggaccgcgctctatcagccgtgtatggttcgttctgaagatgtgttccagctggattaaggagcattggggtatccctaattacggtccccgacaatattgtttagagttcctcgtgtagtaaaaggtccgaagaaaaaacgatggactacattcctcgaaaagcgaaaggggaagaaaaatagaagtgcaacaaagacaaaggtgttgatccgaagcagacgatggtaagacatatgcctttgtatcaattatatattatatattgtacttaatatgtaagtttaatgcatgattttatatcctgtgacataggaccttg

SEQ ID NO: 514 - DNA, 7373 bp, Zea mays
  Intron number 1 from transcript GRMZM2G178924_T01 (locus G RMZM2G178924) derived from phytozome v7.0 (chr-ID 1; pos 2 08018710 to 208026082)
cctcgtgcgtttgcaccgtcacgcttccctcccttgtgcgtttgcgccgtcacgacttctgcgatgccccgcccccgttcacgcgacaaggcggcatccccgccgtcgccggccggtgcccggcaacgcacccccgcgccgtccccgtccacctctctccacctcggtatcggccccgcgtcccccgacaacgacctcggcgtcggatccctcgacctcaagcaacccgccgctgcgcctccccgacacagcctgctcctcgcgggcgccgccctccgcctcggcctcggccccgcctcccccgatgacgaccgcggcgccagatcccccaacctcagcccacccgccgccgcgcctccccgacgcagcctgcgcctcgcgggtagtcgaaacactctctccgtgtcgggcaggggcgagaagggggcgaggagggcccatgctcgagtctccgcctcctcccttgctaccaccgtctcgcctagggccgggaactctagtagcgatgacagcgggtcgggggcggatacggctttggcgagcggcgagcgttatggcagtgcggtgccgttcacgacccggtctcgtatcgtgaagcggcgggcggaggcgagccctcaggcgggcggggaggtggggatcgggtcggctggtcgaggccaggtgcctgacgaaatgctgcaccgggacgtggggacgccgtcgaagcggtgcaggaccgtattggtcggaggagtggagacagtgtatatgtctgatacagagagtgattctgatgaggattgcatgatgctgggtccaagtgggaccgaactgaatcctattgctgtggatatgactgaaaatgggagtctggatgatcctgccaatgcaagcgacgtggagtctttgcagacgcataatctgctagggacgacaaatgttggggtggttgagcaatcagtatatccttcaggaagtgcttcaagttttgaagcaagaatctctgcagatatgtatgtctcgagccattacagttctagaaagggaagcaaagtgaacgggaagcttgttttggagaataacagttctcgtgctgatgctaatgtgggctctgcagttggtaccagtccccgcaaattcaatccatacagcaaaggaaagggaaagatggttgcagaagatactttatcatctctggtctccagtgaggacgagccagatttggatccagtgcattccaaagagactcaggttaatccaggatcagtttctgcttctatggtgtcatatcgcagacaaaaagcaaaagagagagctatcaggttggctcctgaatttgctttctttaaagcagataaagatgagcatagtgaagatgatgatgaagaactagagcctggtcctgactctcaggactggccaggctcattcgtaactgctgcaaggatgtatgaagaaagagaagctaagttgagagctcgagagttgaattcttcaaagctgaacaaatctgcaaatagggtcattgtttggtcgccttcaaaggatgagaagaatccagcacgagctcaagctgccccatcacttacaagcttatgcttaaatacacttgcgaaacattctgaatgtattggaacacttgaaggtattccagaggagctaaagaataggctgttcaagattctgtgtcattctaggaagatgaatacttatcttctcaatgaactattatgtgacagtcctacagaactgcatctcagtgagtgttcatggctgagtgaggatgactttgagaaaacttttgggaaatgcagcattgaaagcttgcaggtactatttgtttactctgcagtttctgtgctatggacacattatttttcctttcagtacaatcttatttcttttggataaattaacttgtgagaactcaatcagtgtttgtcttaatgtaggatctacagcttgatatatctgggagatgcatgcctgattacatattgccaactaccttagctaaggttcctaactgtatgccattgttgagaaaaatatctctgaagggaaattatcggctttctgataatggtttagtcacaatcatctcggctgcaccttctttatgttccataaatctgtgtgagtgttctcttctcacttcatctggaatcaatattcttgcaaacaagttacattcagttcttagagaactgtatatagatgattgcacaaacgtggatgctatggcaattcttcctgctctacagaagattaatcatctagaggttttgtcaatgtctggaatacaatctgtgtgtgacaagtttgtgaaggggctcattcctgtgcatggttcaaatctgaaggagttagcatttgctggttgcttgtaagtctttgcagattcctactttaggaaatagttttcttttggaagtatcagtaccatagttatattactattatgccagtattcaaaagcaacatggaactgtatatctgtcttgctatctaaatgtagggaacttacctcagcttccatcaagactgttggggaatattgtcaagaattaacttcattggatctccgcaacttgaataggctgcgtgactcagcactgtggcatcttcgtggttgtaggctactaaggaaactaaggcttcaaagaaacgcattcaggtattgccccacttcccctgatttttattgactgatccaaatttgaagtgcttcattactaagcagaattaagtgctgtgcaaacattcatgtccttttttgtcaatttttaatgtgtatcattgcatattattgttttccaaactcagatgcataatgattattatgtttgtatttttagcttctttctggcattctaaccattttgtcaatgctaactcaattgccttttctattatgtttgtgcattgtacaagtgctgatttttttctgactgatcgtaatgagggcctgatagtaatgtcatgacccacttaatcacttatagaactagttctgcatctgtaattctgtataattaaattactgttgttttaaagttgatgaattactaaggactgatatattacaaagggaaacggaaggcaaatcactactgtaatttagtgactcttggtttatttccatgctcatgaaggtatcctgaagttgacataagcaaggtttaatagtttatgtattgtggagctcatgtcttccattttacaaaaagtatcacccattaattcatttaatggtacttttaatttttcttggtcataaaatgctctgttgtgtatgagatggccacaaattcttccctatggtatgattaatttactcgtccattattacagtgatgaagctgtgtctcaatatttggaggaatctggaggaggcctgaccgagttaatgctaaacaatgttaagaaggtaatttctccattctttcacttcttgaatatgtggtagtccctcaatgatattgttatggtcgctagatcggtgagtgattggagaggggtatcgataggcaggaacgtcggccgggggcctctgcccacggccgagcaagaggagggtttctcccttctaattcttacctactttatttctcatccatggattacataaataggccggctgaccgcccctgtctagctagagatccttatatccttaaaactctcctaaaaactctcaacaaactaactgataaccttcctagataatctcaactaatctcataaataatctcaactaagcttctaatcttatctctaactatcactatctaatcctccttggagggcccatggctgctgctgctgccgtagcccctccgtgggcctccttaggccctgacactacacccctcctggacaagcagctcgtcctcaagctgcagcatgacgggtgctcaaagaccaagtctacttgacccaaaaccagacacctagaagacaagccttttacatctcggcttatcttattattctgaatctgaattttttttgaccccataagattaggcagacaccctccgcgcattggacttgcatgtgtgcagcaacctggatcccatggacgccatctggacgaaaggggagcacatgaacaggcacctggaataggccgcaacaataaccagcggaggcgccctcgtggcgtccgatagcggaatgtggtggcgctaaacagttgcgcgcccttgccgatgacgaggggagtgtcttccctactgtcgctgccgtagagttgaagttcgtcacccgcgggacacgtaccatgctcacacttggagatagcggcttggtgcagctactgatggccgaacgatagggtgaggtcgcgctctcgtgtgccgaggtcaaccgtcatcaaggctgccttgagcatctgccggcgcatctctcgcactctgtcgtgcaaggaagccacgagcagcagcctgtatgcccacagccgccgacatctggagccgtgcggacaacaccagctgttgctgctcatgttacactgctacattgatttgcagcagcccctgctcaaccatccggagcgaggcttgcatctttgcgagatcagcccttatgttggtccacaagtctcccatcgatggagctggtgattgttgagccgtggctgcccctagtgggtcgcccatggggatggagacgtcgtcaacgaagatgatgtgacgaaatttggcgttgtccttggagatgggcacgccggcgtccaggatgtgtgacaaaattggcaggcgatgctgcccatggagatggagacgctggttggcaggatggcgtgacgaaggtggcatgcggcgcagcccatggagatgggaacgccggttgcctggacgacatgacgaaggtgacatgcgacacagtccatggagatggggacgccggttgccacgaaattggcagcagaagccatgggatcggatcgaaacccaagctatccgataccagatgttatggtcgctagatcggtgagggattggagaggggtatcgatgggcaggaacgtcggtcgagggcctttgcccacggccgagcaagaggagggtttctctcttctaatttttgtctactttatttttaatccattgattaaataaataggccagctggccgcccctgtctagctagagatccttatcttcttaaaactctcctaaaaactctcaacaaactaactgataacctttctagataatctcaactaatctcctaaataatctcaactaatcttttaatcttatctctaactatcattatctaatccccttggagggcccatgggccatggctgctgctgctgccgtagcccctccgtgagcctccttaggccctgacagatataaatgttatccttaggacgaacttatattatttgtttagatgtggactgtttagtccctttccttatttttgagcaagagaaaaagctatttacagatcagttttgaggcggtttaatttgaacttatgttgcattaataatgtggaacaatattatctgaacattgatgcaaattactatatgaagacctgctactgataaaaaggcttaagtaaaccttaggatggcgttacatgcaacaaatgtttgttggctagtcaggagcattgtaatgtgcaggggttagagaaccactagtagggatcacattgaacttaaatggggagaggtacatttaacttatgcactcagatggtctatttattcaagctggaacttaatgagtgcacgtctgaacatttctggtttggtgtaagcataacataatttttgagatacatgattggttggacgcaatggacagtatgaacaaactgcaaatctacatttgggcatgtgcatgggcatgcttgagtttgttcaggctgcatcaatcactaagaaccaatctgatgtttgagtttgttcacttggctaaaatatctttgttgcacaaaagttctgtgatccagaggggtaaaacttcgtaagacgctgtctaggccctgtttggatccatggtgctaatggctagcaactaaaaaaatagcaagtgtgtctccaaacacccgacctactaatgtgttctaatcatagtacattttgtggcaagttgaaggttgctactaggtgctaatagttagcaatgctaagtttagtagatccaaacaggccataaccttttgtttgttgaagtgtataacaacttaaactgttatttactctctttttttttgcttgtttcttttcaatctgactaggaagttgtattaagttgttaatatgtttacttgaccaattctggtgatagctttcatctgtttcacttatgaataatccgccgctcataattagttctcatctgatgtattccatctaggttggagaccttactgttatttactcttttgcttgtttcttctcaatctgactggtaaattcagttggttaacatgttttctggaccaattttggtgatgtctttcatctatttcacttacgaatatccatcactcataattagttcccatctgatgtatttcatttaggttggagaccttactgctcttgcaatttctcgcaagtgttctgttctattgaatgccctggatctttccttctgccgtgaactgacagacgattctttggggctgattgtcgacagctgcccatcattgaggattcttaagctatttggttgtacccaggtatgatgaccttcctagcaaatagttacagagcaatactgtctcaacagtaaacataaataaatgtacttcctataacatgttcttactatcagcagttccaatcatgttccttctatcagcagtagacatcaataatgaacacctgttgattggtagtgtcatctgagtaaagagagcatctgttgtttggggctttggaaaccgtacttactgcggaccatttcattccaggtcacggatttgttcctcaagggtcactcgaacacatcggtcgaaatcgtcggaatagaagggagtatactcgcgcagatggataaccgttagtttgtgtggagaacagagaccgacactacattctccagttgtctaagcttaggattcgaggcatcaaggtccacatcgtggctgcagcaacaagtggggaatattttgtcgaccagtctaccttgcttataccagtcagccatgtagaaagctttcttgaaatgctttgtttttctcggataccttttttttgaaaggtttctttggttaactgaagcggtggaaaatctgctgctgcatcatgcaagttaacgatagaatatttttaattgtttagatggtaaaggttagggcttgtttggttcctttagtgtgtgtttggtttagctgtgagctttgaaaaagct

SEQ ID NO: 515 - DNA, 9749 bp, Zea mays
  Intron number 4 from transcript GRMZM2G030915_T03 (locus G RMZM2G030915) derived from phytozome v7.0 (chr-ID 9; pos 1 48078280 to 148088028 reverse strand)
ctcaggcatcccagatccgtcaggtaacgtttctgttctttccacatatgcagcagtcgtaaaactgtagcaatttctcaaaacgtcaaacagtcacctgctatatttgcctgttatctttatacttgccatgtattgtgcgcagatccgccgtaagatggttgagattatgatcaaccaggcttctacatgtgacctgaaagaacttgtttcgaagttcattccagaagttattggtaaggagattgagaagtctacctccagcatcttcccacttcaaaacgtcttcatccgcaagggtgaagatactcaaggcccccaagttcgatcttgggaaactcatggaggtaattgctacatgcatgcaaatagatttaccagactatctccctgttacttgttatcctaaaacttgttgcttatcaggttcacggcgactacaaagaggatgttggtgtgaagcttgagaggcctgtcgagggagatgaggctgggcaggaggttgctgctgccgagtagtttgtttgctagttctatatctaggcgagtctggacatgaggttgcttatgacgtgaacttatagagttgtcttggctatgtgttttcgtctagccctaagattttgtcttgaaacaagtttaaaattaagattatttgtaacaagtgtttaggattactcgtggtgatattctgtgttcgattactgctgtactaagttccatcatcctcatttttgtttggtcatcgataatttactttctcattcgtatgagatgttctctgcttatttgttgttagctgacactgtcagttaaactagtgcccccattcttttttatttatcatgatttagtttaaaaatgaactaggactccctctcgtgtattattagttgttgttttggataagatttgactaaaacttataaactcttgactacaaataattattttattatttagttttgaaacctaatgattatatgttcttatttattttaacatgtacttttataaaagtgtaattgtattaagagtttatttgtattttaacatttaacaaaaaaatattggttaacgttatattttggagaaatataggggcccattgagaagaaatatgttatagttgacactgaagtgaggcgaagcaccaggcttcgtgagaaatcaggaggctttatgaagtctggacacttgcatagtgcctacttttgcactacccctcccataaaccccagaaacatcaaaaggcttggcgcggagctctgcatggttgacaaagagattgctccccccccccccccccccccgaagctctagcagcaactaagaaacagctggaggtgatccaacgtccttgcaaagctaactccaacactaggggcaagagagagaaaaagaaagatgacaagaagaaaggacccaagagccagacagaaagtagagcatgattgctctactctgctatgtttgcttattgcaacgatattttattttggggtttcttattttgtctcctataaagttattgcaacggtatttcattttggggtttcttattttgtctcacatgaatagatacaatacaagtctagtggggcctcacaagcagccgaacattttagattgtgtatttttacttttggataatcatagaactgataggttgcacattggctttatcttcaatgatcgttggttaattttattttggacttatgcactcgtttgcatggattggttgctttggagggttacacatcactatattatatacatgacaatacttcgtcgctccctaattttttggctttatctgttaagtgcatggaccgctctaattttaaggtgttcagttgattccctttggcataattggcattatgtatgcaccatggcacatggcattccgaacgcacactccgtgtttgttactggtcttatgaatcacaatctttatacatacgatgaacaaacaaggagaatggaagatactggtccataatagttgggagatcaatgcatcagaaaaatgaaattccctgcataacagaattgcataatctaaatgtgacataatatggctccaagaaacaaaaagagaatcttttgatgaaccatacattagaattttctgccctcgaccttatgatggtttttgttataactcttagttggttcatctggtggcttgattactatttggcaaggtgccaagttttatggagaaaggattttccacaatgagcatgcacatatggtgagatttaaatacaaaataataaaccaagaatggttcctcgtaaacatttagcgccttccacccccgactcaaaaaattgagtttctgcaatggttctctaactttagtgctaaccctgttcaacctataatttttatgggagatttcaatcttatttgcagcttggacaacagaaacaagcctggaggaagtacaacattgatgcttgaatttaatagtgcaataagtcaacttggcattctggaaattgctttaagagggcaattatacacttggtcgaacaaacaaacaacaaccactcttggagaaactaaactggtgctttgtgacacaagaatggatctcgcacttcctaggtacagaggctcatacactcgtaagagacgtgtcacaccacgtgccctgtctggttgaaataaagatatgcattccaaaacctaacatctttagattcaaaaattactggttgatgcatgataacttcctttcagtttttcaagacacctggacccaaccattatatcaactggacccagtcaggagactaatggccaagtttaaaagggcaaggaaggcattgtctaaatggcataaacaactttccaaactagccaataccattgaaaataacaagcttattattcaattcatggacttgattgaagagacgagggatctaaccatccaagagtgcaaccttagagatattctcacacaccaacttcaaaacatgctagaacaacagaaggtatattggaaacaaaggtgtaaaatgaaatggtcccaaagtggagatgctagtacaattttttttcataccactgcctctatgagacaaaatcataacttcattgctacaatacaagatgacacatgacatatgatatcttatcatgaggccaaagccaatgtattgtttgaggcttacagaagtatacttggcacttcgggggattctgaaatggtttttgaccatgatacgatattacaaaatacacaagatttgagtattttggagtcaccattcatggaagacgaaattaactcagtaattacaagcctccctaatggcaaaacaccgggtctggatggcttcaatacatattttctaaaaaaatgttgaccgattatcacttagtatttttatgatctttgtacaagctttcatgctgaaaatgtttgtatgcaaagtatcaatgggtcacacattaccttgataccgaagaaaacttccccctcacagtcagtgactagaggccaatctctctacttaacacaagcatcaaactagtgacaaagcttcttgctagtaggcttcagaatgtcatcaccaaactaatccacagaaactaatatgggttcatcagggggcgcaccatataggactgtcttgcttgagcctctaaatatatttatatgtgcagaaaatctcaaaggcaaatggttattcttaaacttgactttgaaaatcatttgataaaatagagcataatgccataacggatattcttcgtcataaaggcttcagaacaaaatggttgaagtggatagatatgatcacgagctcagggacatcatttgtcatgttgaactaagttccagggaaaacgtttcattccaagagaggagttcgtcaaggagaccctctctcaccgctaccgtttgtccttgcagctgacctccttaattccatactcaataaagcaaaagacgttggtatcatcaagctccccttaatacaacttatcattgagctcccctcgaatacaacttcagggcatgacctctcgattatacaatatgctgatgacacaattttggttatggaggcttgtcctagacaacttttcttcctcaaggctctaatgaactcatttgttgactccacaggactccatgtcaattatcaaaaatcaaacataaaccctatcaacgtgtcaaatgaaagaatggagctactagctaaaaccttcaactgcaaaattggtacctaccctttcacatatctagggcttccaatgggaactacaaaactaaggattgacacattcttacctctggttcagaaaattgaaataacgcccatcagcatctttcttcctctcgcaagctggcacgctacagatggtaaatgcggccttcaccttgaaagtcgcctagaggggggtgaataggcaaatctgaaatttataaactttaagcacaactacaagccaaggtcagtgttagaaataaagtcaagtccgaaagagagggtgaaaacaaatcaaccaaagaaatagatcggatgacacgatgatttgttttaccgaggttcggttcttgcaaacctactctccgttgaggtggtcacaaagaccggatctctttcaacccttcccctctctcaaacggtcacctagacagagtgatcttttctccttaatcaacgagtcgcttagacccctcacaaggaccaccacaacttagtgtaccttgcgttgattacaagttgcttgagaacaagaatggaggaagaaaaaaagcgatccaagcgacaagaactcaaatgaacacaaaaatctctctctcactagccactaaatgtttggagtgaatttggacttggagaggatttgatctcttgatttgtgtcttggagtgaagtctagagctcttgtatttgaatgcaatggctgaaaacttggataccttgaagtgtggtggttgggggggtatttatagccccaaccaccaaaatggccgttggggaggctgtctgtcgatgggcgcaccagacagtccggtgcgccaccagacactgtccggtgtgccagccacgtcacccaatcgttagggttctgacggtttcgaccgttggagctctgacagattagggcaccggacagtccggtgccgcaccggacatcactgttcagtgtccggtgtgccttctggcgctgatctgactctgcgcgcgctgtccgcgcactgttcacgttcactgttcacttttgcagacgaccgttggcgcaatagccgttgcttcgcatggcacaccggacagtccggtgctacaccgaacagttcggtgctacacgtgacagtccggtgctacacctgacagtccggtgaattatagcggagtggctctcagaaacccgaagctgagtagttcatagttgatctccctggtgcaccggacactgtctggtggcacaccggacagtccggtgcgccatgccgccataccagggcagtcttcggttggttttgctcctttctttttgaaccctatcttggacctttttattggtttgtgttgaaccttttgcacatgtagaacttataatctagagcaaactagttagtccaattatttgtgttggacaattcgaccaccaaaatcatttaggaaaaggtttgatcctatttccctttcacacctccctaccaacattttatttatgtacactcaagatacacaactctgtcgtgaagcaaattgacaaatacaaaaaacattgcctatggagaggtgatgatattaatgccacacgacctcctcaggcagcctggcatctagcatgcagaccgaaatagaaagggggcctgtgattctagatctcaagaaacacaatgaagaattactgatgaaaatgctatacaaattctacaacaaacaagatatatcacgagtgcatgtgatatgggacaataggtacaaaaatggttcactgccctcagaaggtagtaaaggatcgttctggtggagagatatattgaaaaacttgccagcgttcttagaaatagccaaagtcaaaacatgcaacggaaccacaactcatctttggcaagaaaaatggggcgacattctgatttgtgataaattcctagagttttttcctatatagtgaacaaggatacaactctaagacaagcaaaattgacacccatgatttaggatttgttccatctacctctatctgcccctgcttacttgcaaatgctttcattggtcacaatgcatcataacatggaactgacggacacatcagacaaatggagatgcgccaacattgcagataagtactcttcccgtaagatctatgaaatcaaacataaagtcccagaagcgccatatacctttgctctgatctggaaagcaaaatgccagcctaaaaatattcttttggctactctgcactacaaacaaaacaccaaatcagtgctcaagagaagagagatggaattagactcctacacatgtgacaattgcatacgacagaaagaagaaacatggagtcatttgtttctaaagtgtagcttcacaaagagatgctaggaaattgtcgggatcacactaacatgatctttgaacccacacattgcaatccgggatatgagaaggaaactagtataactttgggccatggagacaattatcacaatgatgtggtgcatttagaaatgtagaaatggttcaatcttcgaaaacacctctccgaccacccactggtgcaaaatcagcttcgttcaagagttgaaccttaatatctataagataagatgcgggaaacgataactgacaatgttagacaatgcatatagtcattgtaatatgacaaaatataatctgtaaaaacatatatagaaaagtaatgaaaggaatactgtaggagcccctacagtaggaaactttatcaaataaaactttacaatagaactagaatgatagaaatagaatgggatgacaatgcaattctctatgaatgtgatttgaggtccaattcagttcatccattgcaatcgtgatattcaaaaagagctcaacctaatgatttatctcctgtaaaatagtattggttctaaaatattggatatagtattaatgatcaccattagtgcttttcaaaaatataatctcctccagtagatgactaataatctccttgaatacatgaaacacatataccatgtatcgtttcctctccttttctcgtggccttctcccgtgctcccgaccgccgatgctcttatccgtcattgttctacgcatgttcgacgcttgtgcctccatctatgtttgcgagatggcgtcgacacggacactcacagactcacctgacgacgcaatgaaatagtaggtgatgtcatatcatcctgtgtccaatcgatactattccacgtgattggttcatgggctacccgcagctaggctcgcgcgcagcaggctggctggatacggtaactttgggtgtacaagcggatgcaaataaataaccttaaaataacttattcctgttgattggatgcctgtattcggacgcgtaggctcgggtggccctggctgatctgatacggcatttttctacgtacgagtatccgctcatacagcctgcgtctcctttgtgcgggtaaccaaacaggagctgagacaaagtcaatgcatacggtggtaaagatgagatggtgcgggtaaccaaacatacggattttgaattcactcgtacacctcgcgtctcacacgtgtaagtaaccaaatacattcttagacaaagttaacgcagtgatgattaaggatgtgattatacagatccgagtgaactccgtcaccgtagcccgtagtgttcctgaactcactttctctgcaccgtccgttacgctgcagatgggccgaatcagatgggccaaccatgcctcgaagcacacatatgggccacaccgcatcgtgtgcgtccatccgctcttgggtgcctgctgaccgcatgatcgaacctggaaaccctcgagtcgtatataggtagtccgctctgcctcgaagtgccttctcccgcagagccgccgacaactctctctaccgtccgataccccaagcaccagcgcggcggcggcgaccatggctgtcggaaagaacaagaggatctccaagggaaagaagggtggcaagaaaaagacgttagtttgcttgcctgttatatcccagttcttcagatcttacttgggtcgattgctttctttctttatccgttgctgatgcggttgcgtggttgcgttacttcttttatgcagcgtcgaccctttctctaagaaggattggtatgacatcaaggcaccgtcggtgttcagtgtgcgcaacatcgggaagactctcgtatccaggacacagggtaccagggtatgtttttctttgattatcgatgtttttccgtactgcccctacattctgtgttgtgaacttgcgcatatatgcatgtatatgtagaccgcgctagtcatgcggtatattagatacgctcgttcgcgcgtttgtttgtggggactactattcaggtttcattgcaagaattcgtaggggaggtaattaatattgttcgggtttgattgatagatagtttgtcagtatttgagatcatacccttgcgtgcttattctaagctgttcgtaggtatcattaagtgcaatgcaactagaacggcatagtgaatctgctgctttactgataattaagaattagcctctgattgtatttcttctaaacgccagctgctcaaacccatagtcaaaatagaattttgtaatagctcaccttagtttctgatgtcccactcccatctgttactatctgtaatgtgtttatgtttgttggcacctatcatttttgcactttctgttggaatgattattattagtttgtgcttttgctttcatatgtacaataacgaattgccatttatttgagcaccccaatggcaacttgtccttgttcatttcaagtttcaaatcttttttcgtgcactatatcttgataagtaatcaatgatctgtcactgaaggccacatgatcttataatgacatggatatgattagtcttattaggtgccactctgtttgcaatgttattcagaacgtagatgcactgcttgctgtcctaatttactgattgacgtactttatctggttttagattgcttctgagggtctgaagcacagagtctttgaggtttgcctagctgatcttcagggcgacgaggatcaagcttacaggaaaatcaggctccgtgctgaagatgtgcagggcaggaatgtgctcacaaacttttgggtaataatcggcattcttttgctaacagctgttgccctttgttgtggtgtttatcactaacttgttttctatttctagggtatgaattttaccactgataaactgagatccctagtgaagaagtggcagacattaatcgaagcccatgttgatgtcaagacaaccgacaactacatgttgcgtttgttctgcatcggcttcacgaagaggcgcccaaaccaggtcaagagaacctgctatgctcaggcatcccagatccgtcaggtaacgtttcttttctttccacatatgcagcagtcataaaactgtagcaatttctcaaaacgtcaaacagtcaccttctatgtttgcctgttatctttatacttgccatgtattgtgcgcagatccgccgtaag

SEQ ID NO: 516 - DNA, 12877 bp, Zea mays
  Intron number 5 from transcript GRMZM2G180951_T01 (locus G RMZM2G180951) derived from phytozome v7.0 (chr-ID 1; pos 5 991885 to 6004761 reverse strand)
ggcctcatacagaggccaaacactagctcgaacaggtactactggatacttattaacattttgttatggcaagtgtagctgttagtgttggatagggtgaaaccctaaccctaatccagggtttggagtatattatatagggcagttaggtgggccaagcccattacacagggtaatcagataaataaaagaagacccaggcctgaccctgaacaggagtctaacatcctcccacagtctcaactctatcatgtacagatgttgagactggatcgaaactcagtgaatacactcgacgacaaccccttggtgaagatgtcagcgaactgcgaccacgtggtcaggtcgctgagaacgcgaacatcactggcggcgatacgctcgcggacgaagtgaaggtcgatctccacgtgcttcgtgcgctaatgttgcacaggattgggaggtagaccgcaccgacgttatcgtagtagacgagggtggagcgctcgagggggctatgaagctcctgtagaagctggcagagccaggaggcctcggccacgccgttggccacaacgcggtactcggcctcagcgctggagcgggagacgatgggctgtcgcttcgaggtccagtagacgaggttgtcgcccagaaacacggcgtagctagatgtggatcggtgcgtgtcatggcagccagcctagtcaacgtcggtgtagatcatgagcaccaatgtcagtgagggttgaaggagaaggctatagtcgatggagccgcggaggtagcgaagaatccgtttgagagtggtgaggtggggctcctatggggtgtgcatgtgaaggcacacttgctggacgacgtaggcgatatcgggccgtgataatgtcaggtattggagagcgtcggtgaggctccgataggccatcgcgtcagcgatcgaggcccgtcgtcctcggagaacttcgcttgtgtgtcgacaggtgtggagcagggcttatagtcagacatggcagcaggctccaggatgtcgagtgcgtactggcgctggtggaggaagagaccttgaggccgtcgtttggcggtgatctcgaggaagtggtggagaagtctcaagtccttcatcgcgaactcgcgctgaggagcgacaatcgtgcgctgaagaagggcatcactagacgctgtgaccacgatgtcatcgatgtagagcaggaggtagacggtgtcgtcgccatgccgatagatgaacaaggtcgtgttcgactttgcctcgatgaaatcgagggaaggccaagtagaaggcgaagcgactgtacgaagccctcagcgcctgcttgaggttgtacagagagcgattcagccgacagaccagattcgagcgagcagagtcgatgaaaccggtgggctagctgtagtagaccgtctctgtcagagtgctgtggaggaagacattcttgacgtcctactgatggaccgcccagtcccaggagagggggagagagtggacggcctgaacgttggcgaacttgacgatggggctgaaggtcttaacgtagtccactccgggacgccgagtgaagccttgaaggacccaacaggccttgtagcgctcgagtgagccatccgatgtcagcttgtgccggaagatccacttgccgataacgacgttggtgtctggtggacgcgacactaggtctcaagtgtgattactcagcagggctgcgtactcctccatagcgtggcgccaataggaatcgacgagagcggcgtgaaccgaggaaggggccgaggaggcatccggaggagcgtcgaccgacagaactagctagttgtcggcgtggagaacaccggtcgagcggcatgtcaccatcgggtggacatggctggggtcacgttggatagtgactaagtggtacaccggcggttcggcacaggaacgaatcgagagggcgaggaccaacggatcagtctatttgcgacggtggtagacgcgggcggggtcggtgaagcgtgtcggatgagacacaggcgatggggccgtgcagggcgcaggcaggggcggcagggccacactcgttgatggggctgcacatggcgcgagcggggtcagcagcgtcggtgccgcgcatgactcggacgaggtcggcgaggccgcgcgtggcgcgggcggggtcggtggggtcacacagggcacggggggggggggtcgacagggccacgcggggtgcaggcatgaaagaggacagcgtaagagaaacatcgacacagtctgcatcgagggaatcgagatgggggtggggaggagtcagcaagggggaaatcctcctcatcaaagacaacatgacaagagatgatgatgcagtgggtgaggatgtcaaggcatcgagtggagcgaggaaaagacagcgaggggatagcttgtgaggagcagtggctgaggtgtgggtatagcaggcacaaccaaagtctcgaaagtgggcataggagggggtgtgccatacgtggtatgctcactgtcggggctcttattagctatcttctctgggacctagtgggagatacaactgcaacctgatgtgagtgatacacacccttttcggctatccgccaattgtctgtactcggcaaaggctatctattaaggggttttcatcggctcggcctagtttgagccttatgaacatatttggaagacttgggctctcccgaaatgcagatttttcctatggttggttgcccataatagatgctggacgacagaccgattggctaggcaaatctgcaacactctcaactttgtcttctttgcgatcaggaagaggaaaccactgatcacctcttgacctcctgcgtcttctctagacaatttggttcctttggttaagtaaagttggtcttcagtccttatctccacaccctaacgctctaagcttcttggagtgatggagggttgttttagttgcggttaacatgcacaaggaattaactctcttatcgtcctaggcgcttggattatctagaaccaccgtaaccagagcttgtttgatgggcttagtggctcactccaaatctttcccttgctcttatttaggctggagatgagcgtcgtctctagcgattggctgggggcatagtgatctcctatctccttgccttgcttgagaatagttggatgttgtagttttataattttattatggatagttttttgtacctccttttttggcctccacgagatggttgtaacctggacctatttgggccccctttcttctattaatataatatgatgtgtagttctacatgttcgagaaaataccatctggtatcagagatcttaggttccgacactactgctagtttgctacgatggatgctaagacttcttctctatcagcacaatgggttgtgtcgccgacaccatactgcaaacacaaggttgatttgtcccttgtgtttcgggttgatgatgagtcattgtcaacggatagcgtctcgggttgagtcgtggactaaccgagacatgagtatatgtgttgtgcaaccatgtctgtcggcttgtggtgggtaggtgtggagcacagggacggtggtcgaaggcaaaggtgaaggtcatgtgggttcgtgccgatggatcgggagcgacgaaggacgagcgctgggagttgatcgacggaccggagaagccaggtgactagccgcagtggctgacacctgggacacacactggagcgaggacgtggtagagccgatcgtgtcgtcggcgtagtcgaggactggtgggacacatgtccaagacatgggggacgcgtaagtggtgcgctactcacgacggtttcatggttgagcctaaaaaccaccttgctactagttttgctgagtttgggcctcaaaactcggcgatggctattctggtggaaatcagaggtggcacatggcgaaatcgcgaagggtgtgtcaaggcgaaacaacttcatgtgtagcgcgtggccgtcagatcaaaatcccaggactaggtccatttcacccttgcctaagtggataggcactatgtatttagcggttgtttagggaatagaaataaccctctataaatagatgggtaggctgttatggacaaccatctctttggctattctcatttgtgttttgtttagagaactctagtttccattcactagtgtagttggagatccgcatgtgttttgtttgcatctgtgacttgtaatcttcaactctgtattcgaaggaagggtggccggatccatccacggagtagttcgaatcttgtactcagttttacctgtactgcagttttttattcgagtttgtctccgttctcgcttcctctcctctcctttggatttgtggaagaaccatcgagttctttagttgtgtttgctgtttcggtttgttgggtggagagatacactctttgaatcactgcatacgccatgttggtgcagtttttgatcgtgatccgagttgatctcagtttgcgttcatttgagaaaactccatccttctcgggaaatctgatctgcgcatagagttttgttttgctcggattgaaacttcacgaatcttctttccccttgcgcaaacttcctttgaaatttgatgcaattctgtgtgttttttactgcgcggcactgccgcccctgtgagcggcattgccgctgcccggcattgtcgcccctccgcgtggcactgccgcttgacctaccttttgtttttagctctgaacttttgcagacagtttggcaagttttcgagtagcagtttggtatattccattgacactggattgagtattactgtgttacatggtttcagtcgtcccgtggggttgcgttgaagtctgggattggaagtcacagtgctgttctcgagagagaatttgaagtggctcccattcaccccccctctggtcgcctcaccggtccttcacatatggagtgccaccatccgtccttaatgacataacacaggacctctccgaggtcatccaatagttgaccactttaaggtgcagcaggtcgtcgtcttctcatgactggcaccatgggagccaccaggtgtcatcatcggcgggcttcgtagccctggattttccctacgggatgacggggtatgggatgatgatgttctcatccttctctacctacgacggcaaggacccgtggactagatcaactattgcgagcagttgttctgtgggcagccttcacttgtcgaggcacctattccgaacttcgtttactgaaccctggcgccctgatcctcgaggcacttcttgcgttgggtgattgggtcccgacgccatgcctcgagggcacttcttccactggccccaggcgttccgaccctcgggcacctcgtgcgccaaccattagcgccctagtcctcgggacactttttgtgcttgccctcggggcatctatttagcccctcgtggcacttcatgtgccgatcaccggcatcttggccctcagggcacttcttgcataggtctctagggcaactcctctttcggcccctgagtcaactctttcgtccctatggcatctcaacattagggacttcccggtgtgacgcaaactagtaggcatccgatggggaaaaggcatggtgttccttacaggcgtgccttgcatagtgccattgcatttcatcactggtctccactggtcgctgttgcgattgctctcaggtctcgacacccaccagattacgccatgggatctagggggttgtacacatgccaccttgtcgccatagaaacaatgacatttgcagccacgaccatcagcacagctcgagggcgagttgtcttgaaggagcggagtagtgttatgactagtggatccattaggatgagaaaataataagaaaagaataatttagattggtttggtttgttagaataaagaaagatttggttacttaggataaggaaagatttggttagataaggaaagagataagttattgattagaatatttctttagggtcaagtaatcctggtccagatggattcataggtaaattctacaagacatattggtcaattataaaagatgtgatggcggtaatttcagaaatctgggggcacaaatttgctcattttgatacaataaatacaacattggttactcttattcccaagagggagggagctgaggaggtcaaggatttcagacctatcaacttagtgcacagcatggcaaaactaacaactaaggttcttgctaatcgattggctcaaaaactgcaggatatggtctcacctcgacaaagtgcgttcattcaagataacttcatgcttgtgcaacaaactgccagattttttcattaccaaaagaaagcaagaatcctcttgaaacttgacatcacaaaggcttttgactctatttcttgggctttccttctagaagttcttcagaaactaggttttggacagttttggagagacatcattagtggtcttttggcaacctcctccactcagattcttttgaatggagttccaaggagaactattaaacatagaaggggatttgagacaaggggaccctttgtcaccaatgctatttatactggttatggatgtacctagttttctagtttctaaagcagaggaaagggagctgctgcaaccactatcagccaggccactgcagcatatgctatccctttatgcggacgatgtggtattgtttctacagccaaaagatcaagacattcaagttgttctcagcattttgaagcttttcggggaagcttcggggctgcaaactaatgtgcaaaaaagctgtgtttatcccatccgatgcagtgttggggagatggaagtcctgcagcagcagctgccttgccaggtcttccttcccttgcacttatatcggcttgtccctgtcactaatgagactaaccagagggctagtgcagcccattatcgataaagttgctgaccaattacatgggtggaaagctgaattattgtcaagggctgggagaaaggttcaagttcaatatgtgatgacaggaaaacttatttacctcgcaatggctgttgatttgcctccaggagctctcaaggctatagataaaattgggttgtagaccaattgagttgggagggattcatacggaaaggaagagaggttagttgtggtcactgtttaggggcgtggggaagggtttgtagaccaattgagttgggagggatgggtattttcagcctaaaagaattgggttgggcccttaaaatgagatggctgtggttggccaaaactgatccttctaagccatgggcattcctacctatacacctctctgaaaaggttagatatttcttttcagctgtaatgtatactgaaattggagatggtgcttcaaccctgctttggcaagaccgttggattttgggaaaaagaatagaagactttgctcctagattgattgcggctcttcccaagcaatacagaaagtgcagaattgttcaggacactcttgcagataacaaatggataactgatattaagggtgtgcttactgtcggggtgcttgtagattttcttgacctatcttttttctcgaacgcgcaagagacatgcacattttttcattaagtaggaatagaaaaagatccaaaatggatcagtacaagaagacccccattacggtggtcgaaaacaaagaaacaaaaatacatccataaataaaaggaaacagaaactactttgacctaaagacctgggattggggctgttaagagatctaagtttgtagcccctcctaacacccacaggtccctttcctcctcagttctcttgatggcttcattaagacagggagaaaggccgtcaaaaacacaggcgtttcggtgtttccacaatatccagaggccgagactgataagcgagtttagtccttttctggcaattccatgcaactgatcactacatcttttccaccagagcatggtattctcttcatagacataaggcgtgaaattctggaggttaacctttgtcagcagcttgaaccagtaatttcttgcaaacacacagctcacgaggagatggtcaatggtttccatttcctggtcacaaagggggcacttatcagggtgatcaagccccctcctctgaagtctgtcagctgtccaacatctctgcagcgccacaagccataggaaaaatttgcatttgggggggaccaggaatgccaaaccttgtcacaatgctcaaaatatgttgatccaataaataaactctcgtaggctactttggcagagtatttgccattatgggcaaacctaaagatgtgtttgtcctctctctgcgggtttatgttaactgtgataatagcatcccaaagatcaagataatcagctagtacctccacagtgagagctccttggatatcattaagccaacttctatttgctaaagctgtctgaacagttctactgttttgaattcgccttggcacaactagtagcaatctgggagcaatatccatcacatttcgtccatgaatccatctatcttcccaaaagagtgtcgagtgtccattgccaatttccgtgtgagtggcagcatgaaagaaggatttcaccttggaaggaaaatgcatagggagtcctgcccaaggtttatcaggttccactttagtcagccacaaccatctcattctcaaagcccaaccaagttctttaaggctgaaaatgcccaaccctcccaactcaactggcctgcacactctaccccaagccaccaggcagtgtccccctctgacttctttttttccacgccacagaaatcctttcctgattttatcaatatccttgagaactcttggatgtaagtccactgccattgcaaggtagatgatcattcctgtcataacgtattggacttgtacttttcttccagaaaacctgctttcagtcaatatttatccagggtgtaatgataagcacatttcagtattgcatctgatggaaaatattctgcaaaagcagtctatattggactatttattggatccacacactttgatcactgggagcgaatttggcattcctgggcacctcctaaatgcaattttttatttggttagctgccttgaaaaggtgctggccagctgacaggctacaaaaaaagaggtctcaatcatcctgagaaatgccctctttgtttttttttctcgaaaacgcaggagagctgcatttcattaaaataagaaggtgagccccaaaatggggcggtacaatgccctctttgtgaccaagagactgaaactatagaccatctacttgtagggtgtctttgcgatgaatgtttggtttatgctgcttggacaagtcaacctccaaagttttactcctcaggttggagaagaaaatgtcatgcagtggtggaaaagctgcagtgaccagctgcaacagattgctagaaaaggtctcaactcattaattatcctgggactttggacaatttggaaccacagaaatagatgtgtatttgatggtctttctcctaacttggaaacggccatcagaagagcggaggaagaaagagaaatgtgggagctagctggtgccaagagcttggccctccttactaccccaatggcccaatcccggggattggcacgtagtgttttttagtttgtttagatggatcttctcaagtttctaagttttcgacctccgtaagggagtctttgtaccaggtctgtttcagaccttcttttccttcttcttaatataacgggacttggtcattgtgcaagagcttttgccttgcaaggtagaggtttttccaatgaagtacttggggctgcctctttctctcaagagattgaccaaggcgcagctgcagccccttatggataagctggctgatctcttgcccgcttggaaggttgatttgatgacccgtgctggtagtggcatacaggttcaatccgtgctcacggcaactgtcatttaccatgctatagccttggacttgccaaatgggcccttaaggctattgacaaaattaggcgtggttttctttggaggggtcgtaaagaggcgaatggtgggcattgcttagttgcttggggtaaggtgacccgacccaaagagcttggaggttgttggggacttgctctcaaatactttagcttaagaacaaggcaacacaaagaatgttaaacgttaaagtccttcacccttcgaagcattatttaccttaggatataacgactttaggacgaaggttacgaaggacataccttcgtaagcatgacatataaaaatggagaggaaatcatacgaagtataagagacaacatgaacaattaaatatgttgttattattgaatcatttatattttattactatgaagaaatagaaatgatttcatgttacaagtctaccttcggcttgaggaaaagtaaagagtacaagcgtgacgcaaaagcaaatgtcaagtcagcgtgaacagtactggagcactgttcatctatttataggcacgggacgcagcccatgtaaaattacactcatgccctttacatttgctaataattctataataattcatcggggtctagatagcctttttcccttttaagtcggtttccttttctgttatcacgccgaagcttccttgcgcacagcctcggcttcgttccatccttcgtatcccttgtgcttcttcacactgtgattttgactcaagtccgaaaggtccaagttcgaaggtacctgctcatgtattatactccagaaacattgttaaatcatgtttttgaggaccttcggaagccgaaggtccccaacagtggtcttggcatttctgaccttcaatgtttgaattgggccttgcgagttaggtggctctggctgaacaagacagactcctccaagccttgggctgatcttcctttgtatgtaacagcttgctgcagtccttgttctctattgcggtggtccctgaggtgtgtgatggtcgtagtaccctgttttggcgagacagatggctcatggggcagagactggaggatttggcttcccatgttcacgctcttgttccatttaggatcgctaataagaggacggtggtggaggcctttgatgacatgtcttgggtcagagatctgagaagttcagtcacctgggagatcatttcagattttctgaccttgtgggctgctatttctgatgtggtgcttcatgcaggagtccctgataaacatgtttggaggttttctagctcttgtcagtattcggttaagtcggcatatgagctgttgtttagtggctcaacttcttttggagcctatgagagaatttggaagacctgggttccggccaagtgtggcttcttatggctggtcatgcacaataggtgctggacagcagaccgtttggccaaaaggggcctcccgcaccctgcttttttgcccatccaccacctcttagtatcatgcgtcttttcaagacaattctggttcttgttgctgcaaaagttggggctgccgaccctctctcctggcaatgatgaatctaattttgatgagtggtggagcaaagcggctgggatggtgcatggtgattttaaagctggttccaattccttaatggtgttaggtgcttggtgtatttggcgccaccgtaatgactgtgtgttcaacggtgtgcggcctagtatctccaaggccctcattctggctgaagatgattttagattgtggtgtatggctggagcaaaaggtttttctttgctctcagcttatgtggttgatccgggttgaggtgttcttggggctgtgtggctgtggcctgggtgctgtgtagtgtcgtgttttgactttttgtgtatgtggcgggggaaggctgtgttggcctactatgtaatgtgttgtttttttcttttctctctttaattaaatgatacgtagctctcctgcgtgttcgagaaaaaaaagttatcatgcgcttttcgagataaaaagtaagcctctctatataaggagaggagatgtatcaatatcaagcaaaaaatacgaaggaaaacctttctctcttgctcgaccatgagcaagggccctggccaattcccttgcgctccctcaacctagccaccatcataacacatttatttgttgaagtcaaatacttacttttcaagaatacactggagaagtcaaatacttctgtcactcgttttcctttcaaatgaatgttgtaatatttcagtctgtatgaagttcatctcggccacgtcgtcgccttcggtggttgctttaatcttttgggtcctagtttgcgtgtggaggtggaggcttgcaccgtgaaatcaaagctgctacgtcaggggatgtggcttggtaacgatgacgtggagcgaccccccttcttcgtgggcttgtttgcttcgaagatgaggcatttggcggaggcggggcggtggatcaatgttttggaagtctcgctggtgaagaatcggagctgtctcgagtggggtttctcgtggcttggcaacgacggcgcgccacagtcttccttctcttctgccggtgtttgtagttatcgttgtgtttccttcggccttgtgctgcctatcttggggtgtcggagctgctcgtcacttgtgttgagctcggcaacgatgactcacgatggacattgtgtgtgtggggttgctgttgtctggtttgtttgtacgtcctgtataggttttgggcccggtttcccttaaaactgggtcaattcctttcttcttaattgagaggcagagctcctgccattacgttaaaaaaaatatttcagtctgtacctgttgattcttaatcttatatcatttgattgttctgaaacagttagaggc

SEQ ID NO: 517 - DNA, 1587 bp, Zea mays
  Intron number 1 from transcript GRMZM2G009538_T01 (locus G RMZM2G009538) derived from phytozome v7.0 (chr-ID 7; pos 1 64949935 to 164951521)
aggtatatcacattgattttcttgcaggcgtttcaagtgcttttccatttattgcaatttcctgtttactcagttgttaatctttttacggttatctatttgtttatatcactgcagatgacataacatgcattttgtttttttagtatagtattgtgaaagttggctcttagcgaaattaatttgtcacggtgttgctcttgtatctgctagtgagctgcctaggatcatccgggagagctgtagagcaccgtggcggttgctgaacacatctatagcatattttcctgcggtttaataattttattataacttctatctgcgtatagtcagtgctggtaaatctgaactttttatacctagtgaactgtagatatggtggtatggcctaaaatgacaatgactggggtattagtatgttggttttggaagtctgtaaattttatttgtttgtctatgatctgctggatgattagctcgtgtgcatttacatttggcaatcatagatcttgatgcatttggtttaaagagccttttggctattatctgtttatgcatatttttttggcatgcgtctgttgtgaattattcctgttttagtgaggttagaatttttaggatatcccccttcgtgcaatgcaactgtatttttgcactcttgtccatattactgtttaagattttttattgtttgtgatttgtggtgatgaccacattaggccttgttcggttattcccattacacatggattggatgtgattgaaaaaaattaagaagaaatttgacttgcttgggatttaaacccactccatccacatggattgcgagcgaaccgaacaagcccttaaggagttcttgatgaacttgagcactttgtgccgcgcctatgtcatctgcccatcttcagatggtagatgaaatactgatggagttgtgcctgaacatgtcaatgcatatatgttcttcttgccatgcgttttaccataatatgttcctttgaaatctgctaatctgtgtaatcaaaagattttatgactgctttgctcattaaaatggtgcctctgccatgaactggttgctttttaaataaatgctattcttaactacctgcttgtcatcatctttaaagattgtccgaatccctaacaagctctatatctacttgttatctagttttttttctccaaaatatttcatgcgatcattcttgcgatggtgtatgtttagtattttgttgccttaatcttggattgcctgtgaacttgtgatggtggttcttttggtacatgttgaacaagtattcctgaactgtactgtatataagattgcctattagtattctgttttctcaatgctatctggttttttttttttgcttagaattgattatctgcatgtttgccaaaacttgagttgctgggccttctgtacaaaggaatctggtctatatttatggccatctgcattccacttccagtccattctaacaatattttttttgtttgagtttttgagagatttctttcatggcatggagtaagaaattcggttctaattaaggtttattgcaaaattttatcttcagg

SEQ ID NO: 518 - DNA, 4080 bp, Zea mays
  Intron number 9 from transcript GRMZM2G088014_T01 (locus G RMZM2G088014) derived from phytozome v7.0 (chr-ID 2; pos 1 63832745 to 163836824 reverse strand)
gcgaaggcggtttttgtttgtggtatgtctagcatctcagttgtcacttgtgtattgtgcagtgccagaggaaattattgctgttagcatgtttgtttatatttaatgcccgctgactgtattttatgtctgctggcttgcctgggatgcttcccttgcttgttgcctgggtttcccctctttcttagctacatctcggcttgttacctgagattcttcctctttcttaatatcagcttagtctctcttataaatccttgtaacctctcgaccttttcaataaataaaatacatagaagcatgtttatgctctttcatggtatcagataatgtttgttgcatgaacaagtctctatggtctcaaacaagtccctcatgcttggcacaataggtttaccacatacctcttgcatcatggatttgtggaagcgaagtctgacaccaacttagggtgtgtttgattaagctctggcttttgaaaagttgttgtgagctatgggttgtggatgctaagggatatatactatgagaagtcaaaagtcgtttggctgagcagttgtggcttctgaaaaaactgttaaacgaaccctacatgtcatccacgatcctcaccgctcaaatctctccctctcatgtcacacccgggcttagggagtccaaaacccgggcgcgaacttcaccaagtgtgctaggatcaagtctcacacatatgatgacttatggtacagaaacgaatgtcacatctttaatatataacggagttctatacaaaataattaaataatgacatcatacgaacttacgaagacaacgatccaacaaccatagttgactgggagacaacgacatagaccactcacgaattcatcacaacatccttcatacgcctcatcctgtgttacattttcttgacctggggggtgtgagtacaacaagggtgaactcacatacgttcatcgttcaacaagttgtggggaataatgtgcatgaactcaccaaaggtggaagctcatgtgaagtgtaaggcttaccaaaagagatggttaaagctatgcattgcttttagagttggtcaaaattttattagcagttactaagtataagtagataccaatccaaataagtaagagatcaaaattaataacaacacccacaatgcaatgcgtatgcggattaagtttacttccataaattaatcatgtgagggtccgagctgctcatgaccgtgagcacggctgatataccagttttacattctgcagaggttgtgcatctttacccacaagtcgtgttacccatttgccaagggatcgcgactttccattcatccctgctgaggagacgaggcagagtaccactacgaggcctttacaaagttccactaacttcagaaaacccgatatggtttctgagaagggcaatataggaatccctcgtccgaaaagccatcgcagcatgatcgacccgagaaccttcctatatgcagctcctctacctcccttgcccctttcgggtatggtagtcctccactagctttcctatttagtcagccaagggcgtccccataccacccttgtggtagcactgttttcccgggtggtcgctccatgttccaattaacataatgatcttatcatgaacaataattaaaacaacatcataactggaacatgatcacaatgtaatattaatttcccaaaaccaggtagagcaatagcaaaactacccaattaaagcatcgtcgaagtcgatcccctcctgctgcaaaaaatcgcgtgccactaagcgagccttgtgtttgacgatggcgccgatttcatcattcttcaacttgaacacccacttattgtgtgtatggaatagtgtcaaatcagtgatcgtagtgttttcgctatgatgagcctgacccatctcgaaataattcagctatttcttccctaatcttaggccctgtttgggacagctccaactctagacaatttggtggagttggtgtagcaggtcattaggtgctccaggaaaccgtggagctggagctgtaagtctttataagccattgagataagtcattttgattattatttagatttttttaaaactatttaaattgatattataaattataactccacactggaactggaacctggagccatcccaaacaccctcttatccatagtagttggtggtataggatcggattctgaaacatgaagcttggatgggtggccattgttatgctgattgtctgtatgaaaataatctgtggtatgtggtggtgggaacctttctacttccctatgtgttgagtggtactcggtcctaggtgcgggaatgcttcagctttgatgggctgaaggtggagggtagtgctgttgtggtacagagtggctgcgtgttgtcaatactgtactattctgcgtactgtactccggacggtctgtgataggtcaccggatggtccacggtgggttatcggatggtttggcatagggccgaacggttcaagattatacttggatggtccgactgcgaccagaggcgatgttgcgtcaactaggtgttttgggggtaggggtggtaatggatcacgatccaaatgcttcttcacaaaatggtagggtcctaaataaattttagttaaaaaatgaatagaaatagggtccgatccttaaatcttatagtgtaaaatttagagtttattgtcacccatatgtggggcagtgactgtcctgggtatgagttcatcggcataccatataatggttgggtctgcgcaggcctgtttgttgtcgatgcatctagtgaggtcgtctatgttgcggcaacatgggatggaaaactgggaatagtagttttttcaattgtacatgtgatttttgagtgtttcttctattccccaatgcgttgttctaactgatcccgttgtaattctacaaaatgcttaatagattgatcatcaccagaattacttacatcgttgttgtggtgcgaaggtatgagggaatcgagcttgatttacccctgcttgataatcttttggtgtcgatctaccgtgaagtgtgaaaaaaatttctccttcgcttcttcacgcacctgggcacgtcgtcgcagcgcatcatcgtcacattgcttcatgagatcttcgaactgctgctcctcgaccgacaaactttccatagtcggcctaacgatgttatctggggtgacgttggtacgatttttggaactggccattggggccaatctaatagatttgaaacgcagtcatctccagcggagatgccaaaaagtgtgttgacgcctttttgggccaaacaccaacgatccctaaatcctacttgtaggggaaagagaccttgggggtctctttgagggagcgtggaccgtccacggtaggttatcgaaccgtccgcgactttgcgcaaggagctccactcttctctgtgggcgcacagatcattcgcttggatgtggcggaccgtctgcgagggcgcaaacggctttgtgatctcctgcagaacctggatcttgcctcccaagagggactccgtcggggaggaaagatcctagggttgtcttgagatagataggccacccaagacgtctctaaacgacgtagagccgaagaggtgaagattgaggttgagaaactacaactaagcctaaattacttctactcctaaggcacaaggtaaatttgggctgatacatcaattgttgtgtgtttcaatcggctgtacccttcatatatatatatatatatatatgggggagatctagacccgttcctagacggtttccaacaacttcccacaagatttattatcataatcatgtaagggataaggactccagtctgaattaatctaatcgtggaccgtccgggctattccacggaccatcggggcgtcgacagacgcataggtgccaaatctggtgctcaacacctgtactctgagtttcagtttgcctttaaacatgcttctttttgataattggcttcatataagagacatgatttgcaattgaatggttttcttagggacatctccaagcgcacactattggcgacttttg

SEQ ID NO: 519 - DNA, 2925 bp, Zea mays
  Intron number 2 from transcript GRMZM2G341089_T02 (locus G RMZM2G341089) derived from phytozome v7.0 (chr-ID 2; pos 1 5269848 to 15272772)
tgctctggaactgcgtcgtccccggcaaggaaggcgtaagcccacatctcactgtgtagtcctccccccatcttttcttcagttctgtgattctgtcgaatgtgtctggcttttgttccacctgaaaaacataaagtggtgagtctaaaaaagggtaactggagaagaatatatccaaacttttggttttgtcgtgctgagaagaatatatccaaacttttggttttgtcgtgctgagatgttagagcatctccaacagcgtgacctgtgatagtgtcctataattttaaaatgagtatattttataggatttagagcaccaacaaaatattctgtcccaacaggaaagcctcaaatctagattatagtacagaccactacggtgtacttaagagagtgccctataattttttgaccaaattttataaaatgagacattgttgaagtagtttttttctacgtagagctctatcttttaatttgaggcatcactttgagatgctcttagattgatcatcgttgtggaagcttaaaggccaaatagggggattaggctgtgacactagttgctaggggtctgcagttcttgatcctgagcacttgcttctggacttcgaaaacccttgcaacgatgcttcttcatctggtactttttgtactactaaaggttggcaaatgaatgcattgagcttattctttctagtgtacctatatttgggtttacagtgtttgttctgttgttcatgaagggtccagcaaaatttgcaggcgtgttgctttgtttggaaaccaaatgccttttcaattggttgccagtggcgcgttattctgatgacatgttaaatattcaaacgacttagtaatcattcacacttaacttcctaactggtttttttattattggtagaaaaagaacaattttagtctgttgtcccaaaacagaaacaagcagagcattataagattttcagaattcatgagtgggattctaagcagtgtccagcagcttgcgaatcagctcgcggatgcacattttgcgcgaccgcatcccactattcacacttccagcagatcgcaaatgccccaaaatgtgcagtcggccatgcggttgcgcgttctctcttttctgtgggagaggatgcacattcgcatccgcgagccgctggacacgggcgctttttccgttgcgcaaacgagggccgcgacgcgggagatgcgcttccgcatccgtccgccgttggacacagtgtgtcttttgcatctccttttttactcctttctagtaacataacatggtaaaactcttaacatctttccgagttcttttttcagaattcaagtttcaaaaattactagcctttcagcttaagcagcgtagaaccttaatggtttcccagtattgtcgccaagccaacgatactgggtggatgtgtcgaacaatctgatgctctggcaagtaagctgtaaggaataaaaaacaccagagcttatcaaatgtttcatgtatgctggtactgtggttgacacttaataagtgtggggttcttgttcaaatttgttgtgtgcacatgtttttcgatcctgtcccacatggaaatagcatatattatgtctaaaaggtaaagattgaaaagaactcatgtatctactcttgcatggaagagctgttccactagaagaaatcaggattttccgtttgcatagaaaaatcagtcccattctactataacatattcagggtattcctctttgaatagaagagtttatgctgctattctactataacaaatattttgtgttccctttggtgtacaagagattatacttgtaattttggctgcatgttttttttttcaaattggtcggtgcaattattttatgatattataggttaaactttgtaaaatgctacaactttctagggtatctaagatactgtttgatatatgttgtcagaacacaactatacttctgaaccttttgcttgaaacaaaaacaagggacatgttatattatggtaagagttttaagactccctacattctgaatttaacttaaacctcaccagtctttagctttaaaccgacaaaagacttaggtatttttattatagttattctttttctgaaatggtagttactctttcttttctcaaaaaaatgatcgacacttaggataaatctgaccagtttgttataactccgagagtagtaattttaccagtttataattagtcaaaaaaatcagtgttgtccttggtaaatctaggaagcaattgaactatggctactaaaagaacataattttgtaggtcatgctgtcaggcaagcagcacctggttgcagatgtaccaggacagtagttaatccctgtgctatagctagtagtattttattgaaccttacttgtggccagatgtaacatttgaaacgagctgatcgatttgtaactaaatgaatcagaagcatgattgaatcaactgaaaatctgaaagactgttgctgcggagcaggacgagccattattaaagactggttagaaaagttttcttagtattcttaagaatttgtacttttttataaaaactctgatggatgtacctgttaggtaatcatacaattaagttgttctgctttcttgcgctggccgcaaagcgcgggctggtgggttcctcccctggtctgattaagttgttctgctttatttgtaaatattctccatttttactggttctcagttcattattttttgtcaaccataccactttttctattggtggatagtcttcatcgcactgtgttacaaaaaaattgtggctctactcattctcctcatcccaaactgccttgtcatataaccaaaaccgtgtgattgattcatctttatgcagactgattgggaaggtggatatttcccggtcactct

SEQ ID NO: 520 - DNA, 20964 bp, Zea mays
  Intron number 2 from transcript GRMZM2G404647_T02 (locus G RMZM2G404647) derived from phytozome v7.0 (chr-ID 7; pos 9 0799406 to 90820369)
tattccaaggtttaacaccacttctgaactctcaggttagctcaacaatctcctcattcaaatcatggtctttgaaacagtattttttcaaattaactcccagcaaaggtgctatgacactaaaaatataagttttaattgaagttaggttcacatgcattcaaatcaagtttaaattttctgttgatagaaatgatgatagatatgtatgctctatctcttgcccataaaatttagagctaacataaacatcccttagaaggatcatgtaatataaatgccaagtctaatataaaatgaaaggttccatatgatcttgatctaaaaaaacttgatcggtaggggaaagattgtccccacggtatcatattaagaagaagctcaattagagtcccgaccgagaaaggtgacgaatgctggccctcgtgcacatgagggtccacccccttatagggcaaatctttacttatgttttgagccctcccagcccctacacgaggattcaccccccatagattagtccatcttgtgtgcacacaaccagggaaactagcgagtgaccttttttaacctcagcctgaaattcgctcctaccggtttcgaactcaggacctgagaagtgttactcagaccacctaaccaactcagctagaggccctttcgcgtatgatcctgatctaatactagggtagtgtttggttgcagagtttagtaggatggagccactccatcctagtactaaaggtgtttggttcgaatctagagagaacggagccgctctaatttaggaatattccctcaagatgttgcatctctagtcctaaaaaactaccggacccgagcgctcacgatcgaaggctcctctccccgtccctgtatgctcgtcctcttcctctgcgctcttgctcctagcacttcctcgtgtttgtccctggccatggcgcccgtgacctggcagtcgttctcctgcgccccgctcaccggtggccgagcacgcgacccgtgcgtcgtctacactgctccatttgctgaccttgcttctaatccccatgtgagcaagtgggcaagtccctgtgctcgctcatggccttggccgtttgaagccaaaaagtagcatgtgaagtgtggtcttgaatctgtacccatgctcctaatctgaaattagcttcaacttctacttgttcactctagaagcaaacaaaaaacagagtgactctattctgactaccaaacacaaaatataaccgctccgtctaagtaggttctcgaaccaaacactgcctatgtgttctatagttgtgacttcgggagtattttactgactagtcgggttgatgctcactaactataaaaacgacaaaaccaagaggccaaatcaaaataaatgatgttttttgttgctctcaatatttctcaatttatgatgcacaaatagttatttttacattaaattcataaattactctaatgctgatggaataagtcttgagcatctagaggacaacagtcgctttttgactgttctctgtagtctctttagcatctagaagacgacaatcgttttttgggtgtcctctgtagtctctttagcatctagaggacatcagtcactttttgactgtcctctatagtctctttagcatctagaggacaacagtcgctttttgactgtcctttgtagtctttttagcatctagaggacaatgacattgtgtagtgtttgaggaaatacacaggaaattgccccaactcatggtgtcatcctcttgatgagagtaagagttccattgtttacaattggtatcagagccaaactatcttgcagcctaaacatctcttgcttatctccttcccacgcctctccccacactcagtcggcagcaagagctccaactgttccttcctctcctgctcagacgagcagcctttcgtctgagacaacctcttctacacgcagcgacccctcactagcacaccatgtccctacgctcggtcacttcgagtgcgcggcgccagcaggaggtcaaggtcgccgcggcacaagaacgcgagcgagcagcagcagcagcggctgcagcgacagcggcgaggcagcacggctggcggcgacggaactggcagcagcgagagcggaagtagaagcagcggaggcggcggatgctgcacgtgcggcggagcagagctcgaggttcagcgcggtagtagagctggcagctctgcttctgtcgtcgacaacaccgatgaagagctcaggctggcgagggaagcagcgcgagagcaggcgacatagtgggcagccacgcatccccatgggggcgcgcgtggcggcagccctgataggcgccgacgcgctgacggcactccggttgagggcgcacgcggcggcaacccagacgggcgtagacacgccgacggtgctcccggcggcggcgaccgagtcaacggagatcgcggcctctacaggcggcatggctctccctcctcggatcggtaccatggtcgccgcatggcccaggccattgtcagggacatcggtcccagcggtgggtggcctaccctcaccaagaccaactacgtcgagtgggccgcggtgatgagggtacggctccaggttcgccacatgtgggaaacagttcggtatggcgacgtcgactaccacgaggctcgacgggcgctggatgccctcattgctgcagtcccgcccgagatgcagttttcgcttttgcagaagtggactgccaaggaggcctgggacgccatcgctgcgacccgcatcggcagcgaccgtgcccgcaagaccacactgcaggcacttcgcaaggagtgggagaacctggccttcaagccagttgaggatgttgatgactttgctctccgccttaacactctgttgcagaagatggtgtagttcggcgacgacacctacgatgaagagatagctgttgagaagctcttccattgcatccccgagaagtacaagcagattgctcgctcgatcgagtctctgctagacctctccacgatgacaatcgaagaggcgataggttgtctcaaggtggtcgacggcgacgaaccacaggctccctctgggcctatcactatcggcgcgaagctacatctcactcgggagcagtgggaggcctgccagggtggcaagaagaagggggagtcctcctcgacacgaggccgcaaacgcggcaagccgcgctgtggcagccctcccaagttatcgggcccacgtgcaccaatccttgccttgatggcctcagatggctatgcacgtgtactaggtaacttaacaaggctatcacgagttcaacaacttgaactcatcatcctaaggatctcccaccatacatgcatattacagtaatcacattcaatacacacacttcggagataagagcgaaagactttataaaacattcttctcatttctaaaactgaagtttattacataggaagagttacatttattaaaagtcctgatatactcaaagtgcataacttattacaatagcaggaaggtaggaaccctccaaagcttatacataagcctaactaatcttcttctagaactggaaacaccctctagcctcaggaacatctagagtactcatcacctacaacaacatgggttcgaaaaccctaagtacgaagtgtactttcgcaagtcttatccgattaaggaaaaatgactctcaaggatatgctggttaaataggaatcaaggagaaggctttagcaagaatcaatttagatagttttgcagaaataacttactaaagtgagtccttactttcaatattttaacgccagattaaatattaatagactctagttgcatctagtctaatttcaccatctcatcaatacaacatcttttttattcataatgtttacatcctgacttaggttgcaggtcagagatcaagtcttcactctccggggatataacggcgatccgaatcgatttactcagctgaggatctctaaccacacgacatatgtagcactcaacccttgcatatgtcaaccgttcccatagatcctccacaacgtgaaccggtccgcgctacccgggagcacagtactcctccgtccagcctctagccaggagggtacacgctactcccaccatctcccacgcccagtgcgcggttgtcttttcacgtatggaatagtcgggttcaagcttaccctgtcccatatccagggcatgtggccagttaagatagtccttgatcatacaggcctacatacgcatccaatccttaattaacctgggtggagcatcacctgttcctagcccaagtctcgagttaagtacttccacccttaggattgttttgtgttcctaaggatgaaaagagcattatagggaactttgcagtaagatcccaccatgcacctaatgaaaatattcttgcaggtagaagccatccttcctcaggataacccttgagctaggcattattgcaaaagacaacctctatccacaagatctaagcaggactaagtatttttgtaaatcaaattttgatacttcattaaaagtatctataaaggcatggatatcaaggtagtcaatgcatcaaatagtttccaagcaattcctataaacttaatgcacatttcactagacttaagtgtataaaagcctttttaaaaatacaaggaaggggtaaatgcaccggggcttgccttattgcaagagaagatcccaaaatccttctacccaacctttagttagatagctccatccacttgatgagcaggcattggagcagactccttcaaacaccacttcttctaggtgttctacaagtcaattacaaatacatgtatgcttatgttatgatatgaaatgcaaactctcataaggagaggtggggaacataaacactcctaaataagtacatgacaagtatacacatacttctgcacaacctagcatccaatagaagtgaccaattgaattcacttaggtaaactagggaactaatccaacttatatctcatccaaagcttaaaacttcttaagcaagtccctcacttcactaaactactaggtgtcctcatttcataggtgaaatccttttctttttgggaaataattagtttgctaactaaatcatataatagttccaaacttcgcccaagggttcatcttctgataacaagcttctccaaacaatttcatgatttttggtgctcaactcttatttctaaaattccaatagtccttcgaagagcacctttattcacttaatattttataactgccttaaaaatcctaaatctaactttaccagagagctcatgaatctagacatccaacaaaatttgtcttgctatttttggatttttctacaatttttggcaccatttcaaatctctcagataaataataaagggaaacgatttaagcctaggctgactctggcccacacggcccactgccaggccaaagctggcctgtggccgggagcccgcgccagcacttttgcagagagaaccctcggtaacacactcacctaagtcccttggtttttttttgctttcacaaaaactcggccccaacgccgccgcatacaactccggcgaacaacgaatcatggtgcgacggcgctaaccccttgcggccactaatccaccactagcacgtgtttacggccaaggttaacgaagtactgagcttcactacccctgcccagcacctgcacactctgaccatgacaccggcaagatcctcggcccggtgatcctaattccaaggcatacacacggtagagcttaaacaatcgactcaggaagcttcagtgattcacctagttgtcggtgcttgcgaggactcggccggagaaagcgtgagttgttcggtcgacgtagaggctgctcacggctccggtctgcggcggcgcaactccgttcagagcagcacacagcagtagaattaggaaacccagttcggtgagcttcactaattcagggagattaccaaacaaggctcacctgggtaacaaacttctcgagatactctggccacagcgaggtggaaggatgattgctgtggtcaccagacaatggagtggcacttgatgaactgaacaaagctgacttggaggctagggagacgagctcaggcctgcacacactaccacagagatgcccaaggaaccagctaaagctcgagacaacagggctccatggaccagcacttaagtaagggatagggctggggcaggttcgctggacctgtctatgtcactgtgatgaagaattctcagggtgccagcacgatgtgagctcaaacacacatcgcaatcatgcacatacacctctccagcacaaatatccctttagtctagttttgcagacagcaattaaaatagatatgactctatttatggataggcacaaacaagcccaactgaaatacgttcagcaaggggaaaagaaatgagacgcctagagcctagttatgcactgtacctttatttcaatccacataatcaaacaaaatacagcagggcgctgatctttatccacccacgtggttaggaacccaacagctagggctgcatctttgagtaggttcaaactagtccaaaactggatattttcagttgggagagatctctagatgcttagccatgttctccatccatatcatcagcgatatatatacaagtgcagccacagtaaggatgaaaatatcttcttcagatattcttggagcacactaaactgctactgcttgactgagttcacaacatcactccttcatttctcccagtttcaaaccacaacagggaatcaaccttaatgaactttgttcaccaactaaccctctaacaatttgccgttgggaccttagtcttgtacctcttggatcagacacaaaacagctccgaattccaaggaaaaacactaaaccaaaccaacagtgaactgaatcagcacaacactgatcccttgcagacctcccttttcaaaccttggtttctcacaattccatatgtcaactggtcaatcttccttaaccaaaactattcttcacttatagcccttcctacttggtataacattccatggcttaaaatgctcagaacaagagttgtggtgcactgaagttgagcaacaacactgaaaatccaatttcaaagtctgaaatagcatatcaccaagtctgacagaacatgtttgggaccattttactcccttctttgtgtagtaccagaccaaacccacttaaggaaacttgtgctcctatatatggtatttcactttactataatttttttaactcaactcgctttatactaattaccacagggttccaaaggtgggtaaaaacacactagaactgccatcaacagtcaactaaatcagcacctctcaagtctgacaaaggaaattagagggtactttactcccagatttatatagtaccaagtctatctttcttcaagaaacttattcaccttgttatggcctacaactttactatgtgtttcttagtcgaaatccacatgaatgggtcacaaatgggctccaaactcagaaactttcactgaaattcagttttcactaactgaataaaattcagtttcagccatagacagtccaactttgagccagttttactccacttttcgtgtaggatcatgctatacccacttactgaaaattattcaccatcatatggtctttatttcatctacaaatactatagcctaaaactttataggctagccacaaaccagctttcaaacaaccatcaaaacactgaaacttagtttcagttactgtttccaatctgaaaattcagaaatatagcagcaccacttagaaccactcttttgcctgggttccaaatgtttctaggggcaagttgcttaataaagtttatacttctatagctcctctacaagtttgatatagtgaccattgaccaaaacctcttggattccaaactacactagcccaaagcttgctccaaatgctgaaattcatgctctgaatttcactaagtctgaaatccacaatttttgacagctttactttggaccagttttactcaaagttccaaatagttttagagctatatgacttaaccaaacttatactcctcatgtagctctattactttgttataatgatcatcttcaaaatggttctagatcaaaagttacaaaggactaaaattgcctagttgctgctattatcaggaactccaaaactgaaactaagctgaacttttacaaattactccaaatttctccacacaacatggaaatctccaaataacgaaattgtgcaactttggaaatcctaccaccttggtattttgacctcttgcaaaatgtggctaaatctccaaatcaacttttgggctccagtttagagtttagagatactcaaccaccctaagtacttcaccacttgtaatccacatatcaaaatcaaacttctccatcctcctaaagcaaagttactccttaatctcaaattcaactttggcttatagaactcaggtccaaagtatccttgatttaggagttgtttgcttacactcaattccaatcaaggttttcaagccttaggattttgaagttaatccttcggtccaagtatttcttccacttgatctatctttgaaaacaaattttctatagactctaggaattgcctttagcacttcaaaactccaagtcaatttgttacatgctcaagggatgacctactcctgtttagcttaggtccttaactaggtcctctactctccacacaacatcaccttattgtaaaattttgatctggtgaatgcattctaggtgtaacaagcaagttaatgcaaatgcttatgatgacatatcagagttttagttcacgtaacacctggggtattacacgcgcaaggcgcgtggaggcgcccaggccggggcgcgaggacatgctgagggtggtgcccaaggcggcgccgtcggcaacaagaagccggcacgagacgacggttgtcacaactgcggcaagcttggccactgggacagggactgtcgacagccacgacgtggccagaccaacgtcgcacatgatggaataagtcatgtggtcagcagcagttgcagtttttgactgctgcaggacagcagcagttgcagcaggacaacatgcagcagtcttttgactgcgcaggacagcagtagcagcagtcttttgactgcgcagcagcagcaaccttttgactgctgcaggacagcagcagttgcagcaggacagcatgcagctgcagtcttttgactgcgcaggacagcagtagcagcacagcagaggacagcagtagcagcacagctgttttgactgcactttagtatctaaaggacagcacctgtgtgctgcagcgtgtagtgttgtgtgtagtgcagtgtagtgcagcccctagggctataaatatgtgtccccagcccctctaagggtatggcattgtgtagtatttgaagaaataaacagaaaattgccccaactcatagtgtcatcctctgatgagagttagagtccctctacttacaattggtatcagaggcaaactatcctgcagcctaaacatctcgtgctcatctccttcccgtgcctctccccacactcagtcggtagcaagagctccaactgttccttcctcccctgctcagacgagcagcctttcgtctgagacagcctcttccacacgcagcgacccctcactagcccaccatgtccctacgctcggccacttcgagtgcgcggcgccagcaggaggccgaggtcgccgcggcacaagaacgcgagcgagcagcagcagcggctgcagcgacagcggcgagggcagcacggttggcggcggcggaactggcagcggcgagagcggaagtagaagcagcggaggcggcggatgctgcacgtgcggcggcaacagagctcgaggttctgcgcggcagtagagctggcagctctgcttctgtcgacgacaacaccgacgacgagctcaggctggcgagggaagcagcgcgagagcaggcggcacagtgggcagccgcgcatccccatgggggcgcgcgtggtggcagcccggataggcgccgacacgctgacggcgctccaggcgggggcgcacgcggcggcagcccagacgggcgtagacgcgccggcggtgctcccggcggcggcgaccgagtcgacggagatcgcggcctctacaggcggcgcggttctccctccccggatcggtaccatggtcgtcgcatggcccaagccattgtcagggacatcggtctcggcggtgggtggcctaccctcaccaagaccaactacgtcgagtgggccgcggtgatgagggtacggctccaggttcgccacatgtgggaagcagttcgttacgacgacgtcgactaccacgaggatcggcgggcgctggatgctctcattgctgcagtcccgcccgagatgcagttttcgctttcccagaagcggactgccaaggaggcctgggacgccatcgctgcgacccgcatcggcagcgatcgtgcccgcaagaccacactgcaggcacttcgcaaggagtgggagaacctgaccttcaagccaggtgaggatgttgatgactttgctctccgcctcaacactctgttgcagaagatggtgcagttcggcgatgacacctacgatgaggagagagctgttgagaagctcttccgttgcatccccgagaagtacaggcagattgctcactcgatcgagtctctgctagacctctccacaatgacgatcgaagaggcgattggtcgcctcaaggtggtcgacggcgacgaaccacaggctctctctgggcctatcactatcggcgggaagctacatctcactcgggagcagtgggaggcctgccagggtgacaagaagcagggggagtcctcctcgacacgaggccgcaaacgcggcaagccgcgcaaggcgcgtggaggcgcccaggccggggcgcgaggacatgctgagggtggtgcacgtggaggtgcccaaggcggcgccgtcggcaacaagaagccggcacgagacgacggctgccacaactgcggcaagcttggccactgggccagggattgtcggcagccacgacgtggccaggccaacgtcgcacaagcggaggcggaggaggaggccctgctcctggcacatgcaagcatcgagccatctccagcggcaccggccgcagcggcactcctccaccttgatgagtcgaaagcacgcgctttcctcggcgacggctccaacaaggacatgatcgaaggatggtgcctcgacaccggcgccactcatcacatgaccggccgacgggagttcttcaccgagcttgactctagcgtccgaggctccgtcaagtttggggacgcctccggcgtagagatcaagggcgccggctcagtcgtcttcaccgccgcgtctggtgagcacaggctgctcaccggagtctactacatccccgcgttgaggaactctatcatcagcttgggacagctggatgagaacggttcgcgcgtggaggtcgagcacggagtcatgaggatctgggatccctctcgtcgccttcttgccaaggtacgcaggagtgcaaatcggctttacatcctcaatgtgaaggtggcacaaccttgctgccttgctgctcgtcgagacgacggggcatggcagtggcacgagcgcttcgggcaccttaacttcgaagccctgaagcggctcagcgccaaggagatggtacgaggcctgccgtgccttgaccatgtggagcaattctgcgatgtctgcgtgttgacaaagcagagatgactcccctttccccagcagtcgagcttccgagccaaggagaggctcgagctcgtgcatggggacttgtgtggcccggtgacaccagccacaccaggaggacgacgctacttcttgctgctcgtcgacgatctctcccgctacatgtgggtgctgatccttggcagcaagggagaggctgcgaacgccatcaggcgtgtgcaggtcgctgcggaggcggagtgcggccgcaagctgcgcgtgctgcgcaccgacaacggcggcgaattcacggcggctgagttcgcatcgtactgcgcggatgagggcgttcagcgtcactactccgcgccgtacagcccgcagcagaacggcgtcgtcgagcggcgcaaccagacggttgtggggatggctcgggctctcctcaagcagagaggaatgccagctgtcttctggggagaggcggtggtgacagcggtttacatcctcaaccgctcgcccaccaaggctctcaacgggatgacaccgtacgaggcttggcatgggcgcaagccggcggtctctcacctacgagtcttcggctgcctcgcgttcaccaaggagcttggccacatcagcaagctcgacgataggagcaccccgggggtgttcattggctacgcggagggctcgaaggcctaccgcatccttgacccaagaacacagcgtgtgcgcacggcgcgcgacgtagtgttcgacgaagggcgaggatgggcgtgggacaaggcggtggacgacggcacgactccgacgtacgacttcaccatcgagtacgtccactttgagggagctgggggagtaggcaactcttctccgagcaggtctaccccagcccccaagtctccaccgactccagcgccacactctccagcttctgctacaacgagctcttcaccaccacgcactccagccacgactccggctacagcgagctcttcgccaccacgtactccagcaccgacggtaccctctccgggaacgtcctctccgacaccagctcgtgtcgagcacgacccagtggagctcgtgacccctctgtcccgcgacgaggagcgcgtcgacgcgtgctacgacggcgagccgttgcggtatcgaagggtggagggccttctcatcgacccgtcggtgccaggccctgcatctcgcattctggcaggagagttgcatcttgcatgcgacgatggtgagcctcggtctttcgcggaggccgagcaacatgcggcttggcgtgccgcgatgcagtcggagatggacgcggttgagacgaaccgcacttgggagctcgctgatctccctcatggtcatcgcgcgatcacccttaagtgggtgttcaaactgaagagggatgaagccggcgccatcgtcaagcataaggctcgcttggtggcacgcggtttcttacagcaggaggggatcgacttcgacgatgccttcgcccctgtagcacggatggaatccgtgcgactcctccttgcgctggcagccctggagggctggcatgttcatcacatggatgtcaagtcggcgtttcttaacggcgacttaaaggaggaggtctatgtacaccagccgccaggttttgcgatccctggcaaggagggcaaggtgttgcgcctgcgcaaggctctctacggcttgcgacaggcaccaagggcgtggaatgccaagctggattccacgctcaagaggatgggcttcatgccaagcccgcacgaggcggccatctatcggcggggcaatggagaaaatgccctgctggtgggtgtctacgtcgacgatttggtgatcaccggcgccaaggatgcagaggtggcagcgttcaaggaagagatgaaggccaccttccaaatgagtgacctggggcatctctccttctacctggggattgaggtgcaccagggagactccaggatcacacttcgccagaccgcctatgccaggcgcattgttgagctggctgggctcaccgactgcaacccagctctcactccgatggaggagaggctgaagctgagtcgcgacagcacgacggaggaggtggatgctactcagtaccagcgtctcgtggggagccttcgctacctcgtccacacacggcctgacttggcatactccgtcggctacgttagtcggtttctgcagcgaccgacgacggagcatgagcaagctgtgaagaggatcatccgctatgttgcggggactctcgaccacggtctctactacccgaggtgccctggggaggcacaccttgtcgggtacagcgatagcgaccacgccggcgacatcgacaccagcaagagcacaagcgggatcctcttcttcctcggcaagtgccccatcagctggcagtcggtcaagcaacaggtggtggccatgtccagctgcgaggccgagtacatagcggcgtccactgcttcgactcaggctctctggctggctcgactgctcggtgatctcctcgggagagacactggagcggtggaactcagggtggacagccagtccgctctggcattggccaagaaccccgtgttccatgaacggagcaagcacatccggctgagatatcacttcatccgagactgcttggcagaagggagcatcaaggcgcgttacatcaacaccaaggatcagcttgcagacctgctcaccaagccccttgggaagatcaagtttgttgagttttgctccaggtccgggatgacccaactttcccacaagacgacgcacaagacttagggggagaatgatggaataagtcatgtggtcagcagcagttgcagtttttgactgctgcaggacagcagcagttgcagcaggacaacatgcagcagtctttttgactgcgcaggacagcagtagcagcagtcttttgactgcgcagcagcagcaaccttttgactgctgcaggacagcagcagttgcagcaggacagcatgcagctgcagtcttttgactgcgcaggacagcagtagcagcacagcagaggacagcagtagcagcacagctgttttgactgcactttagtatctaaaggacagcacctgtgtgctgcagcgtgtagtgttgtgtgtagtgcagtgtagtgcagcccctagggctataaataagtgtccccagcccctctaagggtatggcattgtgtagtatttgaagaaataaacagaaaattgccccaactcatagtgtcatcctctgatgagagttagagtccctctacttacagcacaggcggaggcggaggcggaggaggaggctctgctcctagcacatgcaagcatcgaactatctccagcggcaccggccgcagcgacactcctccaccttgatgagtcgaaagcacgcgctttcctcggcgacggctccagcaaagacatgatcgaaagatggtgcttcaacacccgcgccactcatcacatgaccggccgacgggagttcttcaccgagcttgactctagcgtccgaggctccgtcaagtttggggacgcctccggcgtagagatcaagggcgtcggctcagtcgtcttcaccgccgcgtctggtgagcacaggctgctcaccggagtctactacatccccgcgttgaggaactctatcatcagcttgggacagctggatgagaacggttcgcgcgtggaggtcgagcacggagtcatgaggatctagggcccctctcgtcgccttcttgccaaggtacgcaggagtccaaatcggctctacatcctcaatgtcaaggtggcacaacctttctgctcgtcgagacgacggggcatggcagtggcaccagcgctttgggcaccttaacttcgaggccctgaagcggctcagtgccaaggagatggtacgaggcctgccgtgccttgaccatgtggagcaattctgcgatgtctgcgtgttgacaaagcagagacgactcctctttccccagcagtcgagcttccgagccaaggagaggctcgagcttgtgcatggggatttgtgtggcccggtgacaccggccacaccaggaggacgacgctacttcttgctgctcgtcgacgatctctcccgctacatgtgggtgatgatccttagtagcaagggagaggctacgaacgccatcaggcgtgtacaggtcgctgcggaggcacaatacggccgcaagctgcgcgtgttgcgcaccgacaacggcggctgagttcgcgtcgtactgcgcggatgagggcgttcagcgccactactccgcgccgtacagcccgcagcagaacgacgtcgtcaagcggcgcaaccagacggttgtggggatggctccggctctcctcaaacagaggggaatgccggctatcttctggggagaggcggtggtgacaacagtttacatcctcaaccgctcgcccactaaggctctcaacgggatgacaccgtacgaggcttggcatgggcgcaagccggcggtctctcacctacgggtcttcggctgcctcgcgttcaccaaggagcttggccacatcagcaagctcgacgataggagcaccccgggggtgttcattggctacgcggagggctcgaaggcctaccgcatccttgacccaggaacacagcgtgtgcgcacggcgcgcgacgtagtgtttgacgaagggcaaggatgggcgtgggacaaggcggtggacgatggcacgactccgacgtatgacgacttcaccatcgagtacgtccactttgagggagctgggggagtaggcaactcttctccgagcaggtctaccccagcccccatgtctccactgactccagcgccacgctctccagctccggctacaacgagctcttcaccaccatgcactccagccatgactccggctacagcgagctcttcgccaccacgtactccagcaccgacggtaccctctccgggaacgtcctctccacaccagctcgtgtcgagcacgacctagtggagctcgtgaccccactctcccacgatgaggagcgcgtcgacgcgtgctacgacggcgagccgttgcggtatcgaagggtggagggccttctcatcgacccgtcggtgccgggcccggcgtctcgcattctggcaggagagttgcatcttgcatgtgacgatggtgagcctcggtctttcgcggaggctgagaaacatgcggcttggcgtgccgcgatgcagtcggagatggacgcagttgagacgaaccgcacttgggagctcgctgatctccctcatggtcatcgcgtgatcacccttaagtgggtgttcaaactgaagagggatgaagccggcgccatcgtcaagcataaggctcgcttggtggcacgcggtttcttgcagcaggaggggatcgacttcgacgatgccttcgccctgtggcacggatggaatccgtgcgactcctcgcgctggcagcccaagagggctggcatgttcatcacatggatgtcaagtcggcgtttcttaacggcgactaaaaggaggaggtctatgtacaccagccgccaagttttgtgatccctggcaaggagggcaaggtgttgcgcctgcgcaaggccctctacgacttgcgataggcaccaagggcgtggaatgccaagctggattccacgctcaagaggatgggcttcatgccaagcccgcacgaggcggccatctatcggcggggcaatggagaaaatgccctgctggtgggtgtctacgtcgatgacttggtgatcaccgacgccaaggatgcagaggtggcagcattcaaggaagagatgaaggccaccttccaaatgagtgacctggggcatctctcctacctggggattgaggtggattgaggtgcaccagggagactccgggatcatacttcgccagaccgcctacgccaagcgcattgttgagctggctgggctcaccgactggaacctagctctcactccgatggaggagagattgaagctgagtcgcgacagcacgacgaaggaggtggatgctacacaataccggcgtcttgtggggagccttcgctacctcgtccacacacggcctgagttggcatactccgtcggctacgttagtcggtttctgcagcgaccgacgacggagcatgagcaggctgtgaagaggatcatccgctatgttgcggggactctcgaccatggtctctactacccgaggtgccatggagaggcacaccttgtcgggtacagcgacagcgaccacgccagtgacatcgacactagcaagagcacaagcgggatcctcttcttcctcgtcaagtgcctcattagctggcagtcggtcaagcagcaggtggtggccatgtccagctgtgaggccgagtacatagcggcctccactgctacgactcaggcgctctggctggctcgactgctcggtgatctcctcgggagagacactggagcggtggaactcagtgtggacatccagtccgctctggcattggccaagaacctcgtgttccatgaacggagcaagcacatccggatgagataccacttcatccgagactgcttggcagaagggagcatcaaggcgtgctacatcagcaccaaggatcagcttgcagacctgctcaccaagccccttgggaagatcaagttttttgagctttttgctccaggtccgggatggcccaactttcccacaagacgacgcccaagacttagggggagaatgatagaataagtcttgagcatctagaggacaacagtcgctttttgactgtcctctgtagtctctttagcatctagaggacaacagtcgttttttgactgtcctctgtagtctctttagcatctagaggacaacagtcgctttttgaaagtcgcctagaggggggtggataggtggaaactgaaatttacaaactttaagcacacttcaaactgtggttagcgttagaataaaagttaagtccgggagagaggggaaaacaaatcaaccaagaaaataaagcggatggcgcggtgatttgttttaccgaggttcggttccaaataacctagtccctgttgaggtggtcacaaagaccgggtctctttcaaccctttccctctctcaaatggtcacctagatcgagtgagctttctccttaatcaaacgggtcacttagaccccgcaaggaccactacaaactttagtgtctcttgctttgattacaagtgtcttgagaacaagaatgaggaagaagaaagcgatccaagaacaagagctcaaagaacacgagtaaaaactctctctctagtcactaggagtttggagaggctttgattcttttgaattgtgtcttgtattgattgcactagctcttgtattgaatgagatgtctgaaaaacttggatgccttgagtggtggtggttgagaggtatttatagccctcaactaccacatagctgttgggggggctgtctgtcgatggcgcaccggacagtccggtgcgccaccgggcactatccggtgcgccagccacgtcacccaaccgttagggttctgaagattctgaccgttggagtgctgacttcatgtcgcaccggacagttcggtgcggcaccggacaggtgttgttcactgtccggtgcgcctctgacgcctgctctgacttctgcgcgcactgttcacgcactattcacgcttttgcagacgaccgttgcgttggatagccgttgctccgctggtacaccggacagtccggtggcacaccggacggttcggtgaattatagcggagcggcgcctgagaaacccgaaggtgaagagttcagcctgtacgacccctggtgcaccggacacagtccggtggcacaccggacagtccggtgcgccagaccagggttctcttcggtttctttgctcctttcttttaaaccctaactttgatcttttattggtttgtgttgaacctttatgcacctgtagaatatataatctagagcaaactagttagttcaatatttgcgttgggcattcaaccaccaaaatcatttataggaaaaggtttgaccctatttccctttcactttttgactgtcctctgtagtctctttagcatctagaggacagcagccgttttttgactgtcctctgtagtctctttagcatctagaggacaatgacattgtgtagtgtttgaggaaataaacagaaaatcgccccaactcatagtgtcatcctcttgatgagagtaagagttccattgtttacaaatgcaacatggaaccaatgccattaaagaatctactactccctcgtcctgaaataaaaggatccagagttcaaaatttgcacaaagagaggtgagaagatgacattttaatttacatggctctcgtcccttccctcccccctaacgttccaccttcctccgcatcggttcccacttcggggtcggcgaccaccatcagcgttggcgcaatttcaaccatcacttcaaagtgtgtgccggccccccttcccccaagtgtcgtcccctgtctcgtcccagtcgaaggtggatgcacagctgggtcgttccaggttctaacgttagtgcaacaatagcctcggcggctctgttggtgaggtggtaccagattcggatgaggttcgcccctccttctagaagccgattctgatggctaaaatccggccagaagccgaaacaaatagggcctatgtgttataatggaataagtaggtaatctagatacaaatctgagggatatttagattacatattacagtggcatgtggataatttagcttcagatttaggttgttactttgtgttatttcttatatattgttattattctttttagaaaataaaataagtctaatgctaccgaattgatgactgatgttttcttccctgagaatttaggatttttcttgcggtagttttgttgaagtatataaaatggtcatctccttgtaagctttattatcaatttaatattttgtatgttgcaaagcaccagatttcatagcctcccagccaatttttaagtgtaccctctagaggcatatttaatgtcaaaacggggaacatgtttgaactattctgccttatcatttttttttcagtggatactatttcatcctctaaagtaagcacacca

SEQ ID NO: 521 - DNA, 5329 bp, Zea mays
  Intron number 3 from transcript GRMZM2G090100_T01 (locus G RMZM2G090100) derived from phytozome v7.0 (chr-ID 1; pos 8 6600953 to 86606281)
ggtatgtttatgcttgagctttcttaatttgaacaattttaccgttttttttagtttctgttttggcagcttttcttactgtttgttatgcttccttgaaactctctgttacctcttcataatcatttgtacattagttttatagcaattcaccatgtctaaatctaatcttgacagccttgatgtcctttgttgtatgattactgtagaaagtactttgtggcaatttactttcagtggctgtggagtagaccattttgatatacgattcaattgtaaacttgcacttaatccatcaatctgcatggatctggtgtttgttgggctctatggtaaattggcaatatattgtgaaaagttgggcaagagtaaataggaaactgaagttgtggcaggagactagagtccaaaggttaaggatagcataaattaaagaaaagcttgtccaacaccgattaagatggtttgaacatgccccgcggagacctttagaggcactagtgtgtagcaggatcttaaggtgtgatagtaatgggaagaggcaggagaatactgaagttgatatgtgcagaatcagtaaaagtagatttgaaagaatggattatacccaaagatttagacttgaataggagcaaatggaaaacagctattcacgtgccggaaccttgatttgcggcttttgatgggtttcaactctaagctgtcccaatttgattggtactaaaaagctttgttgttattgttgttgtattgtgaaaagtgcaaattactgcctcccatgtgcgcacactggaaagttgtctgaataacctcctaaagtaattttgtgaccattttacccctccagatctttcaaatggtccaatttatcacctataccatatttctttatttctccacatacaagttgagtttcaaattcagtttttgtagggtaataatagtgacagtgaattccataacttatgttagaaaaacactttgagtttttcatcattcttttgtataattatgtatctataggctgtagcattcatttattattaaatgccagagctaaaataatgatgaaaagttctcaatatgtttttctaacacaaattgtgttttctgtcacccttcaaagctaaaactcaacttatatatagagaaaaaaatggacaaatcctattaaggggtggattggaccaactgaaagatctggaggggtaaattgaacacaaaattattttagttcatatgcagggagaataagtttttttttcttgaatacgcaggagagctacgtatttttgtattaagaagaagaaagggaggagaaaccccggtacaaagtttctacaattgcctaacaacaccagacacaccccatacaactaagacacctcttctagatggaagaaagagagcgctttggctccagccatacgccaacccattaactcctcccttgcagctgccaacacaaccgcagcgctagggttacacttataaaaaacacacctatttctatgtttccacagagaccatgcacccaaaatgactagagaattgaatcccttggataaaggtttgcccaccctgtcagcactattcctccaccaggtttcaaaacagacatcaacatgggaagggcagagctcctagaaaccacctgtctgcagaaggctgaaccaaaactgttttgcaaaactgcactgaaccagcaaatggttgatagtttcttccatctggtcgcaaagagggcaagactccgggtgatccaaaccgcgcttagcaagtctgtcagccgtccaacatctatcgtgctccacaagccaaaggaagaacttacactttcctggagcccaggatttccaaatgcgttcagcaggctcaaagttaacagagccaagaagcaaagtcctgtaagctgagctagccgagtattcacccgattcactgaacctccaggcatgcacatcgagaacatccggctggagaaccatcccctctagcaagtcacaaaggtccatgagattagcaagggctgtaacagaaaatagcccccctcaggtcagccaaccaattgagatcaggcaaggcgtctttgaccaggcgcctagaagcaatgcgcttgggcaccatatccaagacagcaggtgccacatccttaatacatttgccatttaaccaacgatccttccaaaagagagtatcagacccatctcccaagtgagtgataacagccgcagccaccaagctttgcacaatgtcacaagtttgaatctgaaaatccgaccatggcttagtccgatcagatttttgcagccaaggccacctagcccgcagcgcccaactcatgatccgaaggtcacttatgcccagaccccctaggtccttaggtctagtgactttgggccaagtcagcaaacaatggccaccattcacctccttccttcctctccacagaaagcctcgtctaatcttatcgattgctttaacagcccaaggagggaggtccagcgccagagcagcatagataattttttatgtcatcacaaattgaacataaatggctctaccagcttttgtcatcatatcagctttccacccaggtaactgagctgcagttttatcaacaattgcttgaacttgacttctcctaatctttccaagagaaagagggaggccaaggtactgacagggaaactccgaaatggaacatggaaggagctcctgaacacaagcaagatcatcctcagaacatcgaataggaaaaacattactcttctgaacattggtctttagaccggacgcatccccaaaaatcctaaggatttccagaatcagatttatgtccgaggggaccggcttgaggaaaaccaccgcatcatccgcgtacaaagagaaacggtgctacaaactgttcgtggacagagagtgaagcagcccttcatcagaagccctctggattagcaagttgagagtgtccatgactaagatgaaaagcaatggagataaagggtccccctgctgaagaccccgctggtgagcaatgtagtccccgggaacaccatttaataaaattctcgtcgaagaagaggctaacaacctcatactagatctgcccaaaacccaacttctgcaggacttccaacaagaaagcccaagagaccgaatcaaaagccttagatatgtcgagcttgaaaagaatgtgggcttgcctttgacgatgaagaaaccttgcagtgtgttgcactagcatgaaattgtctaggataaatcttttcttaataaacgtcgtttgattaggagaaaccataacattcaaatgccgagccaatctgttggccatcatttttgttactaacttcgcgaagctatggacaaggctgattggacgaaaatctttcacttgggctgcaccctcaaccttaggcaaaagagtgatatacgctgagttgagcagccccatgtttctaaattttcgagcccaaacacaagagatcgctgccattacatcagctttgattgttgcccaacaagccttgtagaaacgaccggtgaaaccatccgggcccggagctttatctgacggcatagattttacagtgccccaaacttcttcctctgagaaaggcacatccaactcatctagattgaaagaaggcatcccaagggcatcaagattaagagagttttctctccccaaagcagtcccgagcaggccatcatagaaatggaacaaagcatcagccttatcctcatgtgacgtcaaaataagttgtttgcctccaggaaacaaaaatgtcagttttttctcgcttgtttgtgttccgtttgcttgggtctgagtttcagaattttgttttcacaccttcagttggggctagtggagggattctagtggcttggaagaataatatcagctcatgtggctctaggattgatgatcattgtgtctcggtgaatcttagccttgagactgggtcatcttggtggttgtcatgtgtctatgcccctcaagggaatcatgagaaaattcagttcctacaagacctcagattgattaggacccattgttctgggccatggctggttgttggcgattttaacatgattctgagtgatgaagacaagagtaattccaatgttgatcgtgctatgatgggcaggtttagaaggtggaaggatgatcttgccctgctggagcttcctctgattgggcgcatgtttacttggtcgaatgggcaaacctgtcctactttagtcagattggacaggatgttttgtactgctgattgggaagagttatttccagattgccttcttcagagtgctgcaactcaagattcggatcaccgccctctcttgttgggcctgcatgatattaataaaaggaaagggcgcttccattttcaggccttttgggtgaaattggagggtttccaggatgttgtggctaacgcttggagttcgattcccgcaggccagtgccctcttgttagtctttccaagaaattacatgctatggcaaaggctttgcaacgttggagtgataataaagtgggggatttaaaacttcaacttgaaatggctcgggagctccttcataggctggagatggctcaagacagcaggactctatctccaagtgaggattggttaaggcgtgctcttaagaagcacaccttggtgctctcctccttgtcgagatctatagcccgtcttcggtccagaattaattggttaaaagaaggggacgctaatacttccctgttccatgctcaagctagattcagaaagaaggagaataagttggactttttgccaatatattagtgtttcctgtatatctcgccatacttctttcagacaaaattgcaccttttgcccaacaaattcgatattgaagtattaaacccatttattacgttactgaatgcgttgcaggttgtgttaatatatagccaaatttacagtcgaattcttatgtcttatgtgtataatacaggccacgagccgacgaggtctaaaggggtgtttgaatgcactagagctaataattaattggctaaaaaattgctagtggaattagctagccaactattaactaatttactaaaaatagctaatagttgaactatcagctagagtgtttggatgtttccagctaattttagccactaactattagctctagtgcattcaaacacccctaaatatgcctgattctttactataagaggattgggaaatggtttctatttccataatcagagcaaagactacagttactgctgtgactttaattgcaccactgaccaagtgtttgttatttgcagat

SEQ ID NO: 522 - DNA, 6580 bp, Zea mays
  Intron number 3 from transcript GRMZM2G077744_T01 (locus G RMZM2G077744) derived from phytozome v7.0 (chr-ID 2; pos 2 339137 to 2345716 reverse strand)
tgacggctcccccgtcaatcctgctattaaaacgagtaagtgaatgaactgcacacttgctttcacctgagctgaatttagaatgggacctcatacatattatactctattctgaagcatgtgttcaagatatcatgaattgctagtgattcagctggaagaacaagtatgcagtattgcagcgtttccttgtgtaaacataaaatagtttttgcttattgatgattgcatctaggaaggaagatgacaaactgttaatgggttatagttcatatttttacttcacttattagttagggaacttaacatctgaagttcaaacccatgaattttttatctctgatatagtgttttaaagtgcgagcttaagcatttagcagtgcctttgggaaaattctaagcacgttatagcagctgctataggagcgctaaggcatatagtgttttcacaaaacaaatgcaaattattgccaaaagaatttgataaaaaacagtaaaaggagacttgcaaggatggaatatacccaatgatttagccttgaataggagcaaatggaaacagctatctacatgtctgaaccttgatttgtggcttctattgggttccaaatctagcctaccccaatttggttgggactaaaaggctttgttgttgttgtattgccaaaagaagggattttcaacaggaagcaataagtaatcacatagtaggtagtagcaacaatacacataacacataggtgagtaggtgacaccgggccactcacatagtgacacaatacataagaatttattaagctaaagtttaaacaatataagtagtttaagacttgtccagctatctagtacataagcaaatagtcgaattgccaaccaattaagtgtagaatagctaccgtaagacataagtatctactgtcacatggccacatcacattgggcagcataagtaatgatctatcacttgataattgtaatctaaaaagatctgaacaaagtcacagaagatgatgcagatggtgaatgcatgtaaaatggtgattctcatcttctgaatatgtagagaaatcagctgattgtatttcttcgtcatcaggaatcaacttccttctctttcgaagctgggtatctctctttcttttgttttgtgttgctgctccttgtgatgatgatgcgtttgctctaacttgtactccttctgctggttctggttcagcattgggcacaataccagtgattgattcattttcctcatcctcaagaacattggtcatggggttttcagcggtccctttgtctttttctccctttgtttgagttagaatcatcctgtcatgaagttgtctgttacgtctctttgtgtgaacctgtaggttaagttaaagtgaacaaaattgcagaaatgttcacgttcaaggaaaatataacagtaagagatgcatgtaatttattctaaatatttattcctttcttatagttgctcaaatgcactccaattcctctcacaatctgaggagttacgtgtcaaacctagaatcccttcaaccaattccctaagctttggtgcacttgtgccacgatctagccaccatttagattcattataaaaaaacaggacaggagttaagaaagcacaggtaccacgtccgcagcctccgagaaggtgaggccatcacatgcagctgccacttgcagtctattgtggtcactcacagccaccactcacagttcacggccgttgccgcaccgctgagccgccacaataggttcagaactgagagtggtcatgaatggagaggggagaacttgaaatgatagggtttgtaagcacacttatatagcatgtatagatgggctggatttgggtggtggaaattttgttgggactcattttgtgtctggttagctggttggacatttggcgccactaagtcaccgtaaagcgtttagcggcgctaatgcatgaaatggcgcccgtagctgcagttgtggtaatacgtgcaatattgtagcggcacatgtctaaggtttttgaagtgtaattacttcctttttagggaagaatagcatggatctggttaaacttaaaataagaacaaggagccaaggtgtgagtctattctgaaatgaaaaagaagcttactcccggactattacagcttccatcagtgttatattagttccatacaaacgacccactctaataccttaggttagtaatatattttgtgttgagatttacatgttttatcattatgcccatactttgatgctgttatttatggatgcatatattccgtccttttagtttgatctgatttatgtcaaactcgtttgaatgctatcaggaaaacttattttgctgctttttctcggtgcctcaacttttatgtgtattgactatcaacaccagctttatgattgccaggaatcgccttctgcattatctatgcatgattttctttttgaaataaatcttattgctgcactttgttttgttttgtttttgcatttgttatgtttggatcacttcataaattgggaaaacctatgtgtctgcttctccctgatgcttcaatgtttattacctttctattaacctcaaaattggcttggctatattgaacactaaggttttattttacatcagacatcacaaagcttcgtccgcatatgaatgtttgtaacaatatgggcatgtttctttttcatgtatgaggttttgcatgtgtcatgtgtggtaccccctcaactagcagcctcttgttttttgttacttcgaatcaatactaaataattccctaactggatactcggtgggtagtacatttatgtttcagtctttcagaatcatgctcagctgcctatttcacattggattagctttatctttcctttttacctattcttttctttcccagaatttcttttgtctactaaactcaaggtttctataatggaattattttaatcgttattcactgggttaacaataataatttcagagattgggacagctcatcacttcccaccttgtttggtccttgaatatttcaactgtcagccactcagcctccctttagttgggtagatttcaattgctacaacattcatgtctttctagtgtttatcttgtgtttattcatattaagtaatccagggtcttcatacttttgacactagcgtttactgaatcttctttgtctgtgacctgcatatgtttttttcctttagtgtatataagaaaaatatctttacgtcaattatacttctttttatgttcagaagagcctcttttgacattctagaaccattgttaatggatacccaatgaaatttagggcattggtgccatggtagagtgtatttggtacattgaacccactgctatgccatttagggaaaaaatctactctgattaaattactaaacattttgggtttgctggagaaacacttgttgcaatactatgaggccaagcctatttatttatggaagcatcttttatattagtgaatctctatgctatttcacaagtactatgcatcctatttggagtcagtaactaagtgtttacacctaatttgtcctgcatactacattactgtagtttcttattctctagtttggattaatagctggtttttcccctcatgttctatttgacctttgcatgaactactagaagaaaaaaaatactagtatatgaactaaagatgctcttttcagaggcaagcttcttgcttgatgacatggatctggtgtgtcatctttcctgtggacatagatgttttagacaacttcattatgttagttctaggtgccacgattcataccttgacaattgccttacaagtgtccaagcctccaaggttattttgttattggcagcaaattgtttactaaacataatgcatgcatctcctgccttcatagctcatgtgttggatttatgaaatattgttttaacaatctcatcagtttttttatttcgtctttgtttggtatgatgtatcctggaggacatatcctgtgcaatcactcattttggtgcaagcgtgcaatcaaactatccagagcatccagtctagatccaacggtttcatatggaagtggttaaatgtaaaatagacactaggttttaggtggaaggggttaaatgtaaaataacagttaccattagatctagatcggatgcaccagatcgcttgattgcatgcttgcaccaggataagtgattgcataggatattttcccgtttacctggtactcttggcaactaaactgggtgtgagtgtgagtactgtctactgggtcgggcgctgggtatacttacccaccttgtaagtccgtaactaggctttgcctcttgcatgaattgattgggctggtgacgagcacaggtaggatccaattacatttcagcaactggattccatgttttaggagctaggttcctactatcttatttggggttcatgttcattaatttgtgccctggtcgtgttctgttggagacttgtatatccgttacttagatagttagctgttgctgctaaatgcctaagctgggtgtgatgagtgtcgttttttgcattttggcggttctggtatgtgcgtcatgattcttttcagctgctgttcacctattggcggattggaattggtgcatgctctgttagttttacttgaatttttgttacttatggatgagtgtcggtttgtgtgttttggcatttcctgcatgattatttttaggtgccaccatgcattggtggattaaatagattgctgcatacttcctttgatttacttagcccggagtttttgaaatctgttacttagattgtcatcttttgttgtttaattttaagttcattgcagggtggagtgttgatttgtgtgtttttgtagttttggtatgttgtgcatgaatcttttcagctgccattctcctataggtggactagataatctactgagagctctgttagtctgactcaatgcttgcaattattgtaatctatacattgatggtttgttgaataagtgtactgtactatattggaattactacatcatctgcatgtacaggttttaatcgttaagtgatggataatattagtggcacctggatgttttaattttcttttggcttctgcatgaacatcagtgctttcaaacaatggtaaatgtaatttacataagcgtcaaagttttcgggaacaaaagcatattggatgcacctatccatgttttatgttgtctctacatgtgtcatggtcttgttccattgtacatttgtactatttagggagcaaactgtccttccacatttgctaaatggacctaccttagtaaagtagtccccatgacatatttttttgtgccaggcagccaatgaaaggaaaatgcaagtacaatatagctctttttttctcttcattctttcttcagttgcatgacttgctaatgaatctctagccccctgtaattaggtgtttctgttctatgcatgatttcatgcttattggtatatactcttctcccccccctggtttctgtttactgttcttatcactttctgatatttgctacgtgacaccttttacaaaatgctctattcagtattaacttgctaactttgaagttatcatgcattcatatgtgcatgtagtggtgtatttacaagtagccctgtttttatgtacaaccccattgctgttggtttgttgatggtatttctgttaggtgagtgataagttttcaatatacgtcgtattgtgtgagtgataaagatgaaatttgggtaagcaagggttacaggaaaaagagcaaaagctgggttccttttttctcggaaaaaaagatggattccttctttttctcgaaccaaaaagattggttccacacttgtgattttaatggttggatgactgaaattgtgtgatttggtgacagtgaggcagccctcaccactgcaccagacctacccttctaactatgttaaatatttataaaagatttttttttctaacttgacttcaatttttggttgaggcatgagcatgaacatgggcacctgagcatgtaatactcatccaaattctgcttcatttctcattaatcattgccccaaactcctctcagtgcccctccatgatctgaaatcatcgtctctgaactcttattggatgatgcatgttctgatagtaatctcgatataaattcctaatattgctgtgttgctgtgcgaacaaccagcagacatgcctttgttaagtaccgttgtgtgaatgagtggtggaatgttttttcaatacctgtgttatggcgacttaactacatctatcttccaccttgactccttgagggggtttatactgatcagaaaaggtgtttaaggactacaagaaagactttaagggcttgcactgatatggtgctttattctagttgcataccttgaaatttgatgccatatttaattatgcacatgccaagatttggtcttcgtaggagtatatttgcgcagttgaatcttattgacctgccttcacatattccagagaagcagctg

SEQ ID NO: 523 - DNA, 6292 bp, Zea mays
  Intron number 1 from transcript GRMZM2G026952_T01 (locus G RMZM2G026952) derived from phytozome v7.0 (chr-ID 9; pos 1 16948203 to 116954494)
acccgcagtaccagacggcgcagcatcccacggcggtattcacggacccagcttacgtctttctatttactgtgatgtgtgtcaaatttcatcaggagggtaaaattccaccgctgtttgccgaaaattataataataatagtaatctatgactgaacttactctgatgagatggcattggtgtaagtgtaatggtattgtgacgatgtgtcctcttagtctatctccagcagcttacccatccccatattcaatcaaacttgtactacaagtgcaaaacagtgtttttttggataaactttgggtagactgccgcagacggtcttagttactccttgctcattaaggccgcgttcgtttgcttaggttcgaaaacaggcatgtatttattcctggtccaaatagagtggatccaggtggttcactgaaacttggtctgttataaatccggctctggaatgaaacctggtggccactaaagcctgttcgtttcagcctggactaattccattccatgcagttaaagctagcaacccaagtcttgtttgacaatatattgcacaatgcagatttaatatattgctggccataatgagcataatgagcagccgaacagctgaaccagctgtagacatgccaaaaacaaaaatcatgcagggaatatagcataacaagagacagcaccacagtataaagactcgagtgggacatagcctaaacttctagtggatcatcaactaaatgcagttttttccaatactttgcttcccaataatgtccatatcgaagctgctaagacatctcatttcttagccaaatcaaagctgattcttgatctgcttcacaagcacatatgaaagtttctctattctctttgctcttggcgaagattgaatatgcttttgccttctccaatttggtcacttcttctattgtattcataactgatatgcaccttttgatggagaaatcatcactttgagttacctccatttctcttgcctccttttctcttgcagattcatattctacttgcttgctcctcatttataggtatttgttcatcatattttctatgttgtcactctttctaggcttctttggttccttttcttgtttgtttcttgatgcaacaggtcttcgttgtccactttcttcatctcgtgacaaaatattagcccttccttgaagcacatcttcattcctttcagtgagtgcatcatcaacttcatcatctacatcatgaacaacattcagatcaaagccttgtggcccattttctgcatcctggagttgctcattcggttcttcctcttgcagtgcctcgagagaagtgcaactccaagtcccttcagccaagtgtcctacacaataacaaggaaatatgaactgaccgacaattaactaatacaaggaaatccatcaacaacacctactaaacaaagctacagctatagcaccaacataaagctactagaatcatgcatgtttggaaacttaccatcataaagctctcccaaagcatcaaagagcgggaaggttgccttgttgttaaacttcttgattttaggaaatgtctgcataattaaagaaaacgttaatcaaatatgagattctcccacataactaatttgataactgaatttcaagaaataaacttaccaccatgagattctcccacaaagttggtggtccttcaaccatattccttttctcattccaggttgacccgctctgttgctttgagcatcttgtagtctctcttcaactgaccttctttatcctgaatctgagcctttgtaaaggagacatacttgttcctcacatgaaactccttaaccatcctattccacccttcagagttccaaccattgtcacctctatacccactatctttaaattcatggagaatatcaacaagagatctctcaagtcctggattccaatctgctctttgtttcactactacataaacaatggtcacacattagtaatacaaaacttacaagaaagcatgaagaaacattgaacacaatacctcttggagaacctccactcttttttgccccacaacatttaggagaaggcttctttttagtagcacttgttgtaggaatatacctacgcagctttggggaactgctcatgttgaaccttggggagccttttccaaccatagcttttcaaagaaaaaacttattacatgttacaatactactaacttaaagtgttgatttatatgttacaatactactaattattacatcttattcaaccgcgaaaatactaatttagatgttggtggtactgagcccacatttcttgggcgatggtatctcttaaagcattgccttgtgtagtgcctgggtcactcatttgatcaccacttggtagagcaacaaagtttgatggatcaatattatctggctgatgatctaaccattcctcatcaccatgaagtgatcgaattagattgtggaagatgacatcagctataggtatctttacttggttttccagcgtgtggaacgtggcaactttgagaatggggaagcgctttttaagcacccccaaagccctttccacatggttcctcagaagtgtgtggcgatggttgaagagctccttcgggttctgtggtcttcgatgtccagccccaaattccttcaagtggtaccgaactcctcggtatggagcaagaaaagatggagtatttgcatacccaccatcaactagatagaattttcctggaggtacttgaaaacccttgctcatagctgatgttagcactctagaatccgtagccaatccctcccatccactagaaacaaaagtgatactgagatcgaaatcacatgccaccatcacatttatgctaagtgttcccttctgatttcaaaaaggagaatgtttatcaggagatatagaaataggaatatgagttccatcaatggcactgagacaattcttaaagaatggatagaatctaggattatcttgtattttttgatgcacttgattaggatcaggaggctgaatgaaacgacgagagagaacatgaatgaccttcttaaagaagtggttgatgtgatgatggaaggtgtcattactatgaccaaagtacacttggagatcctgatatgaggcgttgcaacttagcatgtataagaagaacgccaacttctcctcgaccgtgatccttgtatcaacaacgatctttctccttctaagataagttgccagctctctgaagatgtgtggttccatccgaaatgtaacttgacagttcttgacatgtccctcgaggagtcgtcggaccttaacctcgcctgtctcatctgatgtatggcgtttcttcttttgtcccccacctctagttgaacccatcagatgtaaggcagggaaaataaacaacatcatgtcatcatcttcttcttccctcctctttctaatatgatcttgcaatgacatactcattgtagaactaaataatatatattttttgtcaggtagaagttaaataataaaatagacttaaagcaaatcatgtatcatttcaaaagtacaagtaataaggactaaagtaaaccatatatacgtacaaagaatttaataccttttggagttggtaccggatcccaagagggaggaggttcaccttccccaactataattggtgttgtagggatctacatgtaacaactcaaataagtagctgtcatacatgatcataaagtatacactaaattcttgaagaaaacacatgaatctagacacacaaatgaatcaggataaataaatctactcaggacaaatgaatctaggtttgtagttagagaatgatttaaacaacgcagatttggaaagctaatctggacattttttgaaaatcaaaacaaaactgacgacattgacattccttttccctatatacacatttaacatcaaatcagtatagcacaaacacgaaaggaaaatatctaatcagtgttgtagggatctacatgtaacaaaacataaataattagtcaaacaaataagttgcaggcctgttcgtcatatgatcaactttaatttgctagtacaatatatacaatataatgtgcccacttgcagagatggaccgacttgcttgtgcctgcttgcagtagaagcaaaaatggtccgatttgcttgtgcctgctatatctgaccttggagaagtcagacattggagaatatggctgcatccattgggctcagttatagcagtagaagcagagatagtcctgcttgcttgtgcctacttgcagctagcttctactgcttctccaagatggtccgacttctccaaggtgtagagtgtagacgaagctaattaggtgatccatatacatatacttgcatctaagaagaataaccgctagctatgtctgaaccccatggatgcatcactagcaagaggaaagataggagggattactgagacgataacgattatgaatgaagaagaggaatgcggatgatctatcttatctctcatcaccggctaggacaagaataggtagggagagcagcacatctaagcagtgtggctgcagtagatctgagcatccaaaacgactccgctgattgtgtttctctctcagattcttgtaaagtgaatataaaaaaatgcctcggtcgcacaacgtgcggcatctgcaaggcggtcaagcccttggcggtttgtcgcggggagggagagggaagcgccgccaagggcaggcacaactggacacgacttcgtcgagggcggatgtggagggagaaggaaagcatcgcaagggcaggtgcgttggggaagagagggtgacgcttaccggtgagaaagcgacggggagggtggccgtcaacgctgcgctgcgccgccacgccgtcactggcgtcgtcgcctcttcgcctcctccgcgccagtgctgcgctgtctcgtcgatatcggatccggaggtcggtagaccaggattcatgtcgggccgttgtggaagagaaaacttcaaaccggatcactctcgctttcgatctgggcccaaacgaacagctgtcgcataaagggtcgaattctaaaccgggacatttccttccgcctggaatcagacccggaatgggataaacctgccgaaacgaacgggccctaaaggaagtctattccccgctctggagatcgatgatggtaaatactgcttgattcattaaaggacgtctatttacgctcttacctatatccaaacgtttattcgacatacctgatttgtatagtttcccagaattagagctctcatgaactcggtatatttgctgcatatacagtctttttgaaggtcgtaagacagttctgttttctggtgaaccatttcataatgcaaatgtgggcttttgccgtgatggtcaaatacagtctgttttgtttatgaagcaagatatgtatttgaaaatattatgttctttattaaagctggagttttgatggactctttcctgtattacatgaaagtaagtttctttgtatgcactttatggataaatgattgtattgtataaatcagtttgcttatacattatatggtgtttgttttaaggaatagggtgatccatcatattctcactccatgtttttgttttgttttgtttggggaatggaatgagttgatccattgtcatctcattcctttcaagctattcctgtgaggtaactgtttttttcccttacctattcctgtgaggcactgttggctaacaggaacctcattccagggttgggccaatgaggtgttgcatgcaagtttgttcaggttgctgttgaaagaccgactgttggatagtaccttcaaatgaacatttgctaacacagttccatggattctgctgttattgtactaataatgtcacatactccatgatcacaccaataattcatggataaatgaaacactggtaaaaaaaaactgtggtgttttatctgcctgacacctgctttgaactttgcttgagatttctgttttttagtttctaagtttaagaatatatttctggaaataagatatatgcaaaagaagagtattatactgatgtaatgtacatccgtgtttgtaagtaagctacatcaaactgttaaccatatgctcctagagtattggtaacaatacacaattgctgcaacacgctgtggtttagtgcaaattcacacgagtcatgttgccaaatacctaaccatggcgttgttctaccttttcttgcaggttgggggtggtataggtacactcaacggtgtaag

SEQ ID NO: 524 - DNA, 1091 bp, Zea mays
  Intron number 1 from transcript GRMZM2G028928_T03 (locus G RMZM2G028928) derived from phytozome v7.0 (chr-ID 9; pos 2 0227280 to 20228370)
ggcagccccagtacctcgacaaactgcaagtgcggtgctaattcttcccgctcactctccttgttcgataacttagagaaacaagcaaatgttggcccttaccgatcaactatcagatggtgagaggtgatcagtcagttaggccatcatttccgtattatgttttcatgatcagattccggaactgcattgatgtctgcattagttttataaatagttgttacattttggcattttgagcttttaccattgcactgccagtttcaaggtctatttgtgggcacaatgttacgctaattccatatcagttgatgactatactgctactagtttcatgactgaaacttctacaatttgtatccacattctatgagtttgtatcttgtagttactgtatttatcttacctacaatataaactcttactacttccagtcaaagaaattattgtttagaacaagattggtcaaatatttaaaaccgcaaacatcaattactattacattatttagtgtggaagtgtgcaagttaaatgccagatatcttctacatttgacaagatttggtcaacttgtttccgaaatagttggcaaaatctcttctattgcaggattttaggagtatattctataagaatttaggggtcaaagatacacattgaagagtgaagaccatgaaaagtcaaatgtgtcaagtatttatgacccgagggagtataacagttgttatgagaagccactagctgccagatcatctgagggttaccaggtcccaaaaatgaatagatctattttttttttcattccaaaggatgcaaatagagttgctgtattcattttctttcagaatttgagatagtacaacttcttggggtgtaatattatgtgattcaactacatttaattaagagtgtttattttcacaacctcaactccttttccttataccctgatttgggaattactttcagaaaactgctttgatattggatcagtctttgatgtttagtttgatattgtgtgtcttctgttgtaacatttatctatgtggggaccaggttgagagagaaagggggattactgtcaaagcaca

SEQ ID NO: 525 - DNA, 2642 bp, Zea mays
  Intron number 1 from transcript GRMZM2G386624_T01 (locus G RMZM2G386624) derived from phytozome v7.0 (chr-ID 1; pos 7 1494804 to 71497445)
ccccgacatagccgtcgacaggctcatctcccagggtaagggcatatactctcacctcgctctaggctctagctctgtcctcgcgggctccaattgtttagtgtggacgttgtcgtgcgatgcttgtcagcgctagggctccaattgggtaccatggccccgctctctccatgaaagtctgcgatagcccgatctccatggaagggtccagcaccttcgccccggatctgcgtccgcgtccgttctctctatggaaggcgactccgcgcatagctcctgaccgtcgtccccgcgcgcctgcgtccttgtccccgcgcgatggctgggctccaaccgcgagtcgatttgcccgatatagccgccatcatgcacccccacccgagatagccatcaccgtcgatggaggtgtcaagcccgcgaggcgggacggcgaatcaaaggcaagaggtgtcgtgcatagggcctgaatcatgactaccgtcggatgtgcgccggtgcggttgacggagcacgaggcgaggaagtgaatccaagacggaggcacccacgctatcaacggagatgccgagcccgcggtggtgcacgcccaagccgaggcgagagcaggtccaatatgtacaaggtgatgttttccttttcttttttcgatctctaaggtccttcctaattcccatttgttatgcttcctttcgtccatttgttctccatcctatgctgacccgtcatgggcgctcccggtcgaccgatgtggtgggcagggtcggagcgcgcagacgctgctctcgctcaccgtgaaatagaccatggacgcggcgcaagccagcggtgacaggtctaaattccccctcccttgttccctcgcggccttggcgccacgaccgccgccccacgatgctccgcgaccaccgcacctgctccccctccatccctccatattattgtgctactccctttgatgccgtcgcttgcatcgctttagcctatggatcccatcaccctgctcttctcctctgttggctcgaccatctttgcctcctccttttgcctcttcctccctcctcccatcgccacaggcacaactccacaagcctgcggggtgggaccgatagggtggacctcacattcgtcgctgtgaagcttagggcgttcggacggtggagtcttggcgagcggcctgccaagtacacggcttgttgattctgctgctctagaacaactcagtgctatagaagtggagggacgagttaaactattatgagtagataggtaatgtgatcgtttgatatatatacatattatttcttttggtcacagaaaatgaagttctggtgagagttcactattgcgggcacaaatttaacctgctagaatttgttgagctcatttacattcttttgcaatttcagatattttgttgattagtgatatttaagattttctttttgtaaagcatagatttggttttccatattgtagatattttttcttctatgtgttcttgtcatataattctgatgatgtttctcttctgttttttacatataccattgattttaatcactttgatcactgttattaattattctacttcctattgaggaacatgctacatatttggtttttgaatgtccatagttttttagagaaaacaatgaaaaaaattatctccttattgatttcttttgatttatctactcattttctctacatgttttgcaatccttgaaaaatcctgtttattgcagcatcttaatgcatatctgtttttgctcttctctcttcgcttcctattccttagaagcatttgttacataaactaaaatggctcctaacattcgacaattgtaatgcattttttaggtagcacctcattttattagcgtgcctgtagacattcttctcttgaaaaaagtgacatgaaccccctcactccagtttattatcacatgatagaatatctgtgaaaatctatcaaatccactgaacactatgatccattctgatttgattaataaatcagagttataatctggtgttgtggattaacatttggtgatcacaatttacttgaacaacaatttgtatttacaattttctacaacaacaatgtttattattctctatctttgatattatgaatactgccgaatccatatgctggcaaacaaatttcttaactatacccttttgtatattcaggcaattgatcacataattaattcagctgccaaatcaaactacatgtctgctgggcagatatatgttcctattgtcttgaggggtccaaatggtgctactgctggagttgatgcccaacactcataggtttttgcacaaacttgcctctatatggttgctctgttgctgctgctggagttggtgcccaacactcacaggtttttgcacaaacttgcctctatatggttgctctgttgttgctgctattctttagaagacaaactgttatgccaaatgatttaatgtcctgaaagtctttgctgggatatacattgacagaggatacatcaattgtaggattaaacagtttgttacatgagttatttatctccatactataatggtttgtctaactgttctgaaaatagaaataaaacgtaaatgtgttcactgaaagaggtgtc

SEQ ID NO: 526 - DNA, 467 bp, Zea mays
  Intron number 3 from transcript GRMZM2G004784_T01 (locus G RMZM2G004784) derived from phytozome v7.0 (chr-ID 2; pos 1 98720200 to 198720666)
aaactttccttgcaatatacaggtttgtacttgcctcatgccttttattctttggatgtactttttttcctgctcacctgagcatgcctaatacacattgtggtgaatttttgttattaaatcgatatggaacactttggatgaaacctttggcgtgttatatcagatttactctttttgtgatagctggtcctggtttttgtagtcacctattcattaatgcagtttgatgggttgctgtccttataattataaagatggcttgtgatatatatttacgcatgaatacttgagtaatgacgtgcatcctatatgtgctatgttgatgtgagcagttgagcataaactcacaactcaaacatattgtctgagccgctgtaagattgtattcaccatcggtcatgagaaactaatgccaatttttgtaaacagtgggaaacttttacagagcttggctgtagcaacta

SEQ ID NO: 527 - DNA, 3021 bp, Zea mays
  Intron number 1 from transcript GRMZM2G018217_T01 (locus G RMZM2G018217) derived from phytozome v7.0 (chr-ID 3; pos 5 318741 to 5321761 reverse strand)
accaccagcccgtcgccaagtgagccctgccgccgcccctcttgttgcttctacgcgtattgtttcaatggtacaaactctcgcgcactgcgcatcgaaagttattgtcctgtggagtgtggaataccacattgacagcgttggttagttccgtcaccttggggagcagctcttcgtgcattttacacgcatagttttagaattatcggcactgaatgtatctcaagatctctatctagtgttttttcctagtatttcaagccaagacttgttagttacgagtcagtgacgaggaatcgaggatcagattagttttaaagttttcacaccaaattccagcaatcaataggggtcatattgtcatggaatgtgtgaagtgggttagttgcaagtatcgacttgttgctgagcgttagcagatgcttcgaatcgccagcaacacagaacacgctaaccatttttacccgaaaaaaaactacaccaaccattcaataatttatacttacatagcctgatcgatggataaatgtactcatatgtaatttcagattcttcctacatgcaatttgtctttttggggacattgtgtttcaatgatattctttcacaatttggttaggtccagaccagtgcaaatatctattaggccctgtttgtttcctttcattttgaggaattggaatctaactaatggagtaggttatttttttaagaatgtgacattccacaactttccaaagtttatatataagcctatctcaaattcataggatgggagatggaaattgattctatagatttacatgataattttctaatgtacaacttataacacactcttctacttgcttctctgtagaataagtgtagtgtataactatctctcatatgatttatgataatatacaaatgtattatatatacaattatattaacttaattagtttgtgtctaaattatgattattagaatgaaattcaattccaacgaaacaaacgaggccttattggaaagtttacttttcctgtcatgtggatcgagaaccgggtagaatctctcgaaatatgctgttgatttgttctgcaatgttagaaacttagaatagcacatcatctgtgttggttaattccaccgccttgggaagtagctgtgtttacattttacacacatagctttcaattcattagcactgagtgtttttctcagttcttttgtttcttctagtgtgttggttatggattgatgatggggttgagatgagcttttcaaatttctacaccacatttaacaatcaatggggttatgttgtcatggaatgcacagagtggattagttgtaaatgtcgacttgttgctcgggatgcatctctgttagcattatctgatgcttcatacagcaagcaactagattaagagtctgtttggttgggttgtggctgtgaaaaaaattgatgtaggctgtgagctgtggaaaaaactgttgtgggttgtgagctgttaaaaagctaaaaaccatttggtggaaaccactaaaagccgttaaaagtccttcgatatatgttttcacagttccattcgaaagccattaaaagcaggtccagtggtgctttcagttttgcattacgagaaagtcggcttttagaaaagctgcttcatggatctagtcctttgatttggcttttacaggacaaaagccaaagccaaagcaaacacaccctaagcatttaatcagcaaaagtgattttttatcatatgttgttttcaaatatttcctacatgcttcaaagtaaagcctttgcaattgtgccctggtggacgttcatgtttcttcttctagtaactgattacatttcttagttgcgctaaaacacacttagctgaagctttatgatatttgcatcaatattttataaaccactgcattgaattttccttcctctggatcctgccaattcacgagtcttggggcaaaccagttctggagaaatgataagaccctaccttcgagttgaatccttgcaaaagtgtttaaattctgcaatattactgctgaagtctttgtagttatcatggtatgaatagttgttttgctttgtatggaccattactaataatttctattagttaaagttaaaaagaaagtaagtcaaatagcgattgcttgttagttgtcgctaaatctgtctgttgctgaacatatgtattctggaggacatttgtgcgtcatgccatcttcataaaatgtattacactcctttgttctgtccatgtggttcgagctttaatatattttgattttacagaataaattgttaaggaaactatttccaaccataatattatataaaactgctttgttaaaagttggcaagatatcgttcttgggggtaaaacagatctttgtaacggataatgccccacctatccaacttctgtttgaatccttgcataagtattaaatttctgcaatggtactactggcctggattttgtagttaacatgatatgctagtttttcttttggatgagcatgatcttgacaatctctattagctaaagtgaaagagaaatgaaatcacagaactattgtctgtcactaaatctgtcttctgttgaacatttatatcctggagcataaaaactgattattactctttttagttccatgcggttcaagctttaatatatttgtactgtacaggatagtttgttaagcatattatatacaatgcatcagtgttagataaactgtttcattgaatctatatgattctttggatactgccaaatcatgattcttgtggcaaaacatatgttagtaactgataaatccctgtcttaggtttgaaaacttccataagtattgatattctgcagtgtgactggccaggttttgtagctgggtatgcattctatatgaacatagtattttcaatcagctagagtgaaaaagaaaggaagtcgaaaaattattgtttgtcatgaaatgtcagctattgaatactttctctactgctggtag

SEQ ID NO: 528 - DNA, 686 bp, Zea mays; identical to SEQ ID NO: 220
  Intron number 4 from transcript GRMZM2G144054_T01 (locus G RMZM2G144054) derived from phytozome v7.0 (chr-ID 9; pos 5 6869860 to 56870545 reverse strand)

SEQ ID NO: 529 - DNA, 11599 bp, Zea mays
  Intron number 1 from transcript GRMZM2G042349_T01 (locus G RMZM2G042349) derived from phytozome v7.0 (chr-ID 6; pos 8 5303253 to 85314851 reverse strand)
ttacctttctcaaaccttttatttatctatctgtcatcattttgtgttcgaaaaacagatgcaaattattatgggcaacaatcatgctactattgttctacaagagtccagtttttttgtagaccgattggcttgctaagttttggtgctactatatatgtggtgatcttttaactggaggaacatatttaaagattcattattgggatcaagtcaggttcaattgtatttgtagcttaatttttcccctccacttcctctcatcatgatgttttcatattggcattgtaggcctcaacaaaggagagccaggctgagctgtcggtgccattggcagtgccttcagtcaaataagtatgtcatttattttagatacttataattgcaacgcacggaatttttttaatcatttttgcaattttattgtcgtcgactctaggtttggattaggactgagtatggctttctccattctaggttttggcttctctacctataatctccattttgttacttgctatcctaaaatgtgttgcttctcaggttcatggcgagtacaaataggatgtttggttcgagtactgatgtacttagttctgtgcatacttatttttgtttggttataaataattcactctcattcatatgagatattgtgctttgtttatttattgatagctgacactggtcacccaggagcacgagatgagcgtgttggtctagagggagctcggcgccctgggcatctcgtacaagcacccagtcgccaaaatggacatagtcatcgtcgttgttcactgtgattcattatatacactggattatcaatgttcactgtgattcattattctccttgtttctttctacaagtatattagagttttgaaaaaatagaccattcctttaaattttcatttgtcatttctatttctgttgtatgctctagacatattgtgcactaacattttatcaaatgataatctatacactgttgcaacacacgggtaactaactattctctattgaagcaaacattgtgtgtaattgatgcatctaatgtcgattttttggtccattcctttatcagcattttccattttgcatttgactacatcaatttggaattttgatattctttgaattcaattcattttgtaagcttgtattacatataattaatgttgtggtggtgttgacagaatgctttgattgtttcagtttgtattatgtgattttggccccttgttttggggaacatgaactgatcagatcagcactccttttttatctacggtgtcctaacatctcaggaataaagaacaaaagcgctaaattgagcagcaactgaacactggtcatgacgggccattctgatcacgtgtgagtccaaaccagtttcagtttagaatattggttcagtagaacaattgtcttcaaagattcagaaactaagaaaggaggataattttgaagacgtgaatgaatagctaaagagacaagagtggttgtaggtgggcttcagaagttctgatgatttgggagctgcccaactcgcaaaatgtaggaagttaaacatgagtagaggtgctttcttttatcgggctgaactctgctaaccatgtggcatggttttggacaaaatatggatacgtataaacaataatagtattttgcactcagtacattttttggtggattatagtcgagaaggctaagaatagtgcccgactaagtctaacatataccaaatccattgttgtccaccccggttaggatacctggctttcactcatgtcatcatttgatgtttacatcataggcttttcttaaaaatgcaagaggatatccttatttatcaaagcgtcataagaggcttatgactggattttttaaccattcaaagtcagaaagtagtacttttttaccataacctgccctttgtacaagtgtctaggtttagttcaaaattgctggttcagttcgtattgtgtaagaatttatgagattttgagttagattataatatgtgttgcttaaattagtgctaatggatttttcgttttctattaggaatggctatatttgtgaaagggaaataggctcataccttttcctaaatgattttggtggttgaattgctcaacacaaataattggactaactagtttgctctagatcgtaagttctacaggtgccaaaggttcacaataaaccaatacaaagttcaaagaaagggttcaaaaagaaaggagcaaagcaaccaaaggctgccctggtctggcgcaccggactatccggtgtgccaccggacagtgtccggtgcaccagggtggattctctccaactcgctagcttcgggaattctgggagccactccgctataattcaccggactgtccggtgcagcaccggactgtccggtgtgccagcggagtaacggctaaacagcgccaacggtcgtctgcaaaggaacagtgaattgctacagtgcgcgcctgcgcgcgcagaagtcagagcaggcgtcagaaggcgcaccgaacagtgaatagtgattgtctggtgcaccaccggactgtccggtggcccacatgtcagagctccaacagtcagaacccaacggcttggtgacgtggctggcgcaccagacagtgtccggtggcgcaccggactgtccggtgcgccatacgacagaagccctcaccaacggccattttggtggttgggggtataaatacccccaaccaccacacttcaaggcatccaagtgttcagccatcaaacctcatacaagagctctagacttcattccaagacacaaacaaaagagatcaaatcctctcccaagtccggaatcactccaaacaaattagtgactagagagagagagagactttttgtgttcttttgagctcttgcgcttggatcgcttttcttcttcctctattcttgtgttcaactcacttgtaatcaaaacaagagacaccaagttgtggtggtccttgtagtggactaagtgtcccatttgattgaagagaaaggctcactcggtctaagtgaccgtttgagagagggaaagggttgaaagagacccggtctttgtgaccacctcaacggggagtaggtttgcatgaaccgaacctcggtaaaacaaatcaccgtgttcatccgctttatttctttgttgatttgtttttcctctctttcggactcgtttatatttctaacgctaaccccggcttgtagttgtgcttaaagtttgtaaatttcagatttgcctattcaccccccctctaggcgactttcaattggtatcagagccgatacttcattagagcctaaccgctcgaagtgatgtcgggagcatccgccatgagggagatcgggaccggcgacaagtctgcaagctcggggagaacacattcaagggagtccacccacaagcacaaggaggaatcctcttcctccatcaagtcccaacggaagggtgacaagaagaacaagatgaagaaggtggtctactacgagaccgactcttcgtcaccctccacctccggctcagaatcggcatccgccacttctaagcgccatgagcgcaagaagtatagtaagatgcccctttgctatccccgtatttcaaaacgcactccattactttccgtcccattaggaaaaccaccggtttttgacggtgaagattattctatgtggagtgataaaatgaggcatcacctaacctcactccacaaaagcatatgggatattgttgagtatggagcgcaggtaccaaagaagggagacaaggattatgattcggaggaggtcgaacaaatccgacacttcaactcccaagccactactatactcctcgcctctctaagtcgagaggagtataataaggtgcaagggttgaagagtgcaaaggagatttgggacgtgctcaagaccgcgcacgaaggagacgaggtgaccaagatcaccaagcgggagacgatcgagggggagctcggtcgattcatgcttcaccaaggagaggagccacaagccatgtataaccggctcaaaaccatggtgaactaagtgcgcaacctcgggagcaccaaatgggatgaccatgaaatggtcaaggttattcttagatcacttgtttttcttaaccctactcaagttcaattaattcgtggtgatccaagatataaactaatgtctcccgaggaagtgataggaaagtttgtgagctttgaactaatgatcaaaggctccaaacaaatcatcgagcgaggcgccacctccacacccgaggtgcaacctgtcgccttcaaagcgatggaggagaagaaggatgagtctacatcaagtaggctccccatcgacgcctccaagctcgacaatgaggagatgactttaatcatcaaaagctttcgccaaatcctcaagcaaaggaaggggagagattacaagccccgttccaagaaggtgtgctacaaatgtggtaagcccggtcatttcattgctaaatgtccattatctagtgatagtgacaggggcgacgataagaagggaaagagaagagaaaagaagaagtattacaagaagaagggcggcgatgcccatgtttgccgggagtgggactccgatgagagctccaccgacgaggacgccgcaaacatcgtcgtcaccaaagggcttctcttccccaacgtcagccataagtgcctcatggcaagggacggcaaaaagaaggtaaaatctagatcctccaccaagtatgcaacttctagtgatgaggaaaattctagtgatgatgaggataacttgctcaccctttttgccaacttaaacatgcaacaaaaggaaaaattaaatgaattgattagtgccattcatgagaaggatgaactcttggatagtcaagaggatttcattattaaagaaaataaaaaacatgttaaagttaaaaatgcttatgctcaggagatagagaaatgtgaaaaattaactagtgagctaagcacttgccatgacactatttccaaccttagatttgaaaaagacaaattgattgctaaggttgagaaattaaatgttagtgatgattctcttgtcaaccttaggaatgataatgctaatttaattgctaagattgataagttgaatgcatccctctctagccttaaaaatgaaaatgaaaaattaattgctaaggctaaagacttaaatgtttgcaatgtttctatttccaatcttagagatgagaatgttatcttacatgctaagattgttgaattaaatgcttgcaaaccctctacatctatcgttgagcatgttactatttgcactagatgtagagatattaatgttgatgctattcataatcacctagctttaattaaacaacaaaatgatcacatagctcaacttagtgccaaaattaatgagcatgacttagaaaatgaaaaatttaaatttgctagaagcatgctctataatgggagacgccctgggattaaggatggcattggcttccaacagggagacaatgtcaagcttaatgcccctaaaagattgtctaactttgttaagggcaaggctcccatgccttagaataatgagggttatattttatatcctgctggttatcctaaggataagattaggagaattcatgctaagaagactcattctgtttctcatcatgcttttatttataagaatgaggcttctagctctaggcattctacacatgttaaaatgcataagaaggaaactcctattgcatcaaatgagcctaacatttcatttaagacttttgatgcatcatatgttttaactaacaaatcaggcaaaatagttgccaaatatgttgggggcaaatacaaggggtcaaagacttgtgtttggttacccaaggtgcttgtttctaatgtcaaaaggacccaagaccgattaggtacctaagaacaaggcctaaacttgttttgtaggtttatgcatccgggggctcaagttggataattgatagcgggtgcacaaaccacattacaggggagaaaaggatgttctcctcctacgagaaaaaccatgatccccaaagagctatcacattcggggatggaaatcaaggtttggtcaaaggacttggtaaaattgctatatcacctgaccattctatttccaatgtttttcttgtagattctttatattacaatttgctttctgtttctcaattatgcaaaatgggctacaattgtctttttacggatgtaggtgttactgtctttagaagaagtgatgattcagtagcatttaagagagtgttagagggtcagctatacttagttgattttaatagagctgaactcgacacttgcttaattgctaagactaacatgggttggctctggcatcgccgactagcccacgttgggatgaagaatcttcataaacttctaaagggagagcacattttagggctaacaaatgttcattttgagaaagacagggtttgtagcgcatgtcaagcagggaagcaagttggtattcatcatccacacaagaaaatcatgacgactgataggccgctcgagctactccacatggacctattcggcccgatcgcttacataagcatcggcgggagtaagtactgtctagttattgtggatgattattctcgcttcacttgggtgctatttttgcaggaaaaatcacaaacccaagagaccttaaagggattcttgagacgggctcaaaatgagtttggcttaaggatcaaaaagattagaagcgacaacggaacggagttcaagaactcacaaatagaaggctttcttgaggacgagggcatcaagcatgagttctcttctccctacatgccacaacaaaatggtgtagtggagaggaagaatagaactctacttgacatggcaaggaccatgcttgatgagtacaagacttcggaccggttttgggcggaagcaatcaacaccgcttgctacgccatcaaccgcatctaccttcaccgaatcctcaagaagacatcatatgaactcctaaccggtaaaaagcctaatgtttcatattttagagtctttggtagcaaatgctttattcttgttaaaagaggtagaaaatctaaatttgctcctaaggctatagaaggctttttacttggttatgactcaaacacaagggcatatagagtctttaacaagtccactggactagttgaagtttcttgtgacattgtgtttgatgagactaacggctctaaagtagagcaagttgatcttgatgagctagatgatgaagagactccatgcgtcgcgttaaggaacatgtccattggggatgtgtgtcctaaagaatccgaagagcctccacatgcacaagatcaaccatcttcctccatgcaagcatctccaccaactcaagatgaggatcaagctcaagatgatgaaaatgaagatcaagaggaaccacctcaagaggaggacaataatcaagggggagatactaatgatcaagacaaggaagatgatgagggtccaaggccgcctcacccaagagtcgaccaagcaatacaacgagatcaccccgtgaacaccatcctcggcgatattcaaaagggggtaaccactcgatctcgtgttgctcatttttgtgaacattactcctttgtgtcttctattgagccatacagggtggaagatgcattaagggattcggattgggtgttggcgatgcaagaggaactcaacaacttcactaggaatgaggtatggcatttagttccacgtcctaaccaaaatgttgtaggaaccaagtgggtcttccgtaacaaacaagatgagcatggtgtggtgacaaggaacaaagcccgacttgtggccaagggttattcacaagtcgaaggtttgcattttggtgaaacctatgcacccgtagctaggcttgagtcaattcgtatattacttgcctatgctacttaccatggctttaagctttatcaaatggacgtgaagagtgtcttcctcaatggaccaatcaaggaagaggtctatgttgagcaacctcccggctttgaagatagtgagtaccctaaccatgtctataaactctctaaggcgctttatgggctcaagcaagccccaagagcatggtatgaatgcctaagagattttcttatcgctaatggcttcaaagtcggaaaaaccgatcctactctctttactaaaacaattcctaatgatttgtttgtatgccaaatttatgttgatgatattatatttgggtctactaacaaatctacttgtgaagagtttagtaggataatggttcaaaaattcgagatgtcaatgatgggggagttgaagtatttcttaggatttcaagtcaagcaactccaagaaggcgccttcattagccaaacgaagtacattcaagacatactcaccaagtttggaatgaaggatgccaaacccatcaagacacccatgggaactaatggacatctcgacctcgacacaggaggtaaatccatagatcaaaaggtatatcgatcgatgataggatctttactctatttatgtgcatctcgaccggatattatgctttccgtatgcatgtgtgcaagattccaagtcgatcctaaggaagttcaccttagggccgtaaaacgaatcttgagatatttagtttatactcctaagtttggcctttggtaccccaagggatccacttttgatttaattggatattcagatgttgattgggtagggtgtaagattgatagaaagagcacatcagggacttgccagttcttgggaagatccctggtgtcttgggcttcaaagaagcaaaattctgtagctctttctaccgccgaagccgagtatattgccacaggccattgttgcgcgcaattgctttggatgaggcaaacccttagggactatggttacaaattaaccaaagttcctctcctatgtgataatgagggtgcaatctgcatggcgaataatcccattgagcacagccgcactaagcacatagccattcggtatcacttggggggatatcgagattgcttatattaacaccaaagaacaattaggcgatatctttaccaagccattagatgagaaaacatttaccaaacttaggcatgagctaaacattcttgattctaggaactttgattgattccttgcacacatagcttatttcaatacccttgatcttatctatttcatgtgctatgactaatgtggttttcaagtatatttcatgctaagtcatagattgaaagggaaatggagtttttcgtcgaagacaaggcttccactcactccatcgaattattcatccttcgccatcgctccacaccgctctccaaattggtataatcttcactcctatattatttaccaaagggggagaaagtttgaaaaagggcttatatttcactcacaagtatccgtttttggcgattcatgccaaagggggagaaagtattagcccaaagcaaaaggaccgcaccaccaccaatttcaaaaatttgtagtctttcaatttgtattaaagaagtattttttaaagattttcaaattggtatcttatttttgatataatttcaaactagtataacctcttcaaaattaatatctaaaaccctcttgaacactaagaggaggatttcattaagggggaattttgtttagtcaaaggaaaagcatttgaaacagggggagaaaatttcaaagcttgaaaatgcttctcaaaatcttgttcatttacctttgactatttgcaaaaagactttgtaaagaatttctaaaagaaattgcaaaaacaaaacaaatggtgcaagcgtggtaaaaaatgttaaaattagaagaaagcatccatgcatatcttatgaaatgtatattggtttaattccaagtaacctttttgcacttacattatgcaaactagttcaattctgcacttatacatttgctttggtttgtgttggcatcaatcaccaaaaagggggagattgaaagggaaataggctcatagcttttcctaaatgattttggtggttgaattgccccacacaaataattggactaactaatttgctctagatcataagttctacaggtgctaaaggttcacaataaaccaatacaaagttcaaagaaagggttcaaaaagaaaggagcaaagcaaccgaaggctgccctggtctggcgcaccggactgtccggtgtgccaccggacagtgtccggtgcaccagggtggattctctccaactcgctagcttcgggaattctgggagccactccgctataattcaccggactgtctggtgtagcaccggactatccggtgtgccagcggagtaacggctaaacagcaccaacgatcgtctgcaaaggaacagtgaatcgctacagtgcgcgttgcgctcgcagaagtcagagcaggcgtcaaaaggcgcaccggacagtcaccacaccggacagtgaatagtgactatccggtgcaccacatgactgtccggtggcccacatatcagagctccaaccgtcggaacccaacgacttggtgacgtggctggcgcaccggactgtccggtgcgccatacgacagaaaccctcaccaacggccattttggtggttggagctataaataccccccaaccaccacacttcaaggcatccagtttagccatcaaacctcatacaagagctctagacttcattccaagacacaaacaaaatagatcaaatcctctcccaagtccggaatcactccaaacaaattagtgactagagagagagactttttgtgttcttttgagctcttgcgcttggatcgcttttcttcttcctctattcttgtgttcaactcacttgtaatcaaaacaagagacaccaagttatggtggtccttgtagtggactaagtgtcccatttgattgaagagaaaggctcactcggtctaagtgaccgtttgagagagggaaagggttgaaagagacccggtctttgtgaccacctcaacggggagtaggtttgcaagaaccaaacctcggtaaaacaaatcaccatgttcatctgctttatttctttgttgatttgtttttcctctctttcggactcgtttatatttctaacgctaaccctggcttgtagttgtgcttaaagtttgtaaatttcagatttgcctattcaccccccctctaggcgactttcaatttgtgaacataaaaattagtaatctggagagggatttacaatattgtgctatttcaacctagacgagcaaaactgaagctaaagtgttctacttgtttagtgcttttatcttacctattttactaatcgttctggttccttatggttatagcaaagtttcgtttcctatagcattccttccaatttgtccaaatgttaggcatggaagaacatggatataggaggtggcaatggtgaatggagtttattttgttggtataatacttttcaatcatgttctcgtttacattaattacctttctcaaaccttttatttatctatctttggtcatcattttgtgttcaaaaaac

SEQ ID NO: 530 - DNA, 25544 bp, Zea mays
  Intron number 5 from transcript GRMZM2G026182_T01 (locus G RMZM2G026182) derived from phytozome v7.0 (chr-ID 3; pos 4 1141191 to 41166734 reverse strand)
aatctactgccacttatgtttctgacccgtacgacaaggtgtacagcaacatccctgaagaaacacatatgctcaagcttgttcccaactgcggttattgcaccgcgaagaagtttgagtatgagccacctgggttttgttgtcgtggtgggaaggttgagctagctccagtggagaccactccccaactcaagaggttgtgggatagtgcagactctgatgctaggcactttcgtgataacattaggtttttcaatggccatttctctttcacttccctatactgtttcctcgatagtatgacaactaatgtaagggattttggtatatacacgtttcgagcacagggcatgatgtaccacaatatcaagtcatttggtagggaaggtggggcagagcataaacaccttgagctttacttttatgatgacgatcccagtctcgagcatcagtaccgtaagtgccgtgaagagcatcaacagaaagacaaggaggttatcaaacagatagtcgacatactacgtggaaacccatactccgaacaccttaggaccatgggccacgttgacaaccttgatgactatcatatcgcgttgaacctagaccagacgttgaaccagaagacatataacacacctctcacttcggaggtggccgctgtctggatcgaagggagcgaagggcgaggccagttcagcaagagtgttatgctccatgggaaggacagttcaatccactgcatccgctcataccatggatgctacgatgcactatcatatccactgttcttccctagaggcgaacttggatgccatgcaaatatcccaaaggttggagtatccatggacgaagtggatgcataccgtgcgacacatagggcaagtaatgcaaatgatgaagatgcaggttagttgttaatttgatatttgagatatttgcacattattaactatgctttcgacatcactcacttttcaatccttgcatatgcagaatctcctagcatttatgtgtgtctgtacgtgactactactgctacaaattccagatttgtcccggggtattcaatccaatacttcatggaaagcggcttttccagcagttcgcggtcgacacgtacataaagattgagagctctcgtttagatttcatacgtaagaatcaagatcggttaagggcagacctataccagggcttggtggatagcatgctagatggagatattagagcagagaagattggcaagcaaactgtgttgtcgacatcgtttattggcggtcctcgtgacatgagacgtcggtatatggatgctatggctctggtgcgcaagtttggtaaaccagacatctttcttaccatgacatgtaaacctaactaggatgagataagtgaaagggaattaggcttacacctatttcctaattgattttggtggttgaattgcccaccacaaataattggactaactagtttgctctagtgtataagttatacaggtgccaaagggttcacacttagccaataaaaagaccaagaattgggttcaacaaagagagcaagggataaccgaagtgtgccctggtttggcgcaccggactgtccggtgtgccaccggacagtgtccggtgcaccaggggacttcacgctgaactcttcaccttcgggaaaatccagaggcgctccgctataattcaccggactgtctggtgtacaccggacagtgtccggtgccccaggggagagtaactctggaactcgccagcttcgggaatttgctccgctataattcaccggacgtgtccggtgtacaccggactgtccggtgagccagcggagcaacggctacttcgcgccaacggtcacctgcagaagcattaaatgtgcgccagagcacgcagaagtcaggcacgcgcgtagtggcgcaccggacactctacagtacatgtccggtgtgccaccggacatccaggcgggcccagcagtcagagctccaacggtcgatgacgtggctggcgcatcggacactgtccggtgtacaccggactgtccggtgcaccatgcgacagacagcctccaccaaacgactagtttggtggttggggttataaatacccccaaccacccaccattcattgcatccaagttttcacacttccaaccacttacaagagctaggcattcaatacaagacacacccaagtgatcaaatcctctcccaattccacaaaagctttagtgattagagagagtgatttgttgtgttcttttgagctcttgcgcttggattgctttcttctttctcattctttcttgagatcaatactcacttgtaaccgaggcaagagacaccaattgtgtggtggtccttgcggggaagttttgttcccggttgatttgagaagagaaagctcactcggtccgagggatcgtttgagagagggaaggggttgaaaaagacccggcctttgtggcctcctcaacgaggagtaggtttgcgagaaccgaacctcggtaaaacaaatccacgtgtcacacttcttatttgcttgcgatttgtttttcaccctctctcgtggactcgattatatttctaacgctaacccggcttgtagttgtgattaactttgtaaatttcagtttcgccctattcacccccctctaggcgactttcaattggtatcagagcccggtgcttcattagagcctaaccactcgaagtgatgtcgggagaacacgccaagaaggagatggagaccggcgacaagcccgctacaagccacgggaaagcttcatcggaagagtcccgcaaaaaaggaaaggggaaggagaagaaagcctcttcccacaagtcgcatcggagtggggacaagaaaaagaagatgaggaaggtggtctactacgagaccgacacctcatcgccatctacctccggctccgacgcgccctccgtaacttctaagcaccatgggcgcaagaagtttagtaagattcccttacactaccctcgcacctctagacatactccattgctttccgttccattaggcaaaccgccaacctttgacggtgaagattatgctaggtggagtgatttaatgaaatttcatctaacctcactccacaaaagtatatggaatgttgttgagtttggagcacaggtaccatccgtcggggatgaggattatgatgaggacgaggtggcccaaatcgagcacttcaactcccaagccacaaccatactcctcgcctctctaagtagggaggagtacaacaaggtgcaaggattaaagagcgccaatgtaatatcccaaaaaaatgttgaccaaaagttgatcttcggtgagtggatatgggaaaaagggttgtgggccgttggatgctgcatcagaagtcatgtgaggcgtcacttcttttctcccacaaaataaaccctaggtggccaccctcttccccttcttggccgccaccccctcccctttcttagccgcctcacttttcccccttggctggtcgccccctatccccccattgcagcagccctccaatacttcttcctccctagatctccccccacgcaacaaggatcgagaagaggaggaacaagatggattgaagaggaagagaggatcaaggagatgtgctacccccatctcttgcagatttttcttagggaaaacccctaggtaaggatgggatccttgtttctccctataattatgtgcttttggaggttgtggatcatgtggattgaaggattagaggttggattaggtgtggggttaggttttgatttcgaatttaatttctgcagaatggcagattcgacagtttctgttcataccagttttccgtgatcttagtggcctcaaaaaaataaaaagtctatatatgagtcgtagataatttgtagatctttccgtggccgcgaagaacacctcaatcggacatcagaacagaaagttatgacagtttgattatagcagtttttcagtctcataattctgtgcagaatctgttctcttaagaattaggcaattttatcaacagaattaaactgttggttggtaaaagaagttgtagataattttataagctttccagattgttaaagagtgcattcatatgatttgtgaaactccagttatgtttgttttactgtggctgttactgtttgcctgacaaaaatgagtgggtctgttcactggtgggtttcatctagtaaatggccgaattggctcttccaactatggagacttttgtagagggataaaagttcttacttccagcagaatttcataattttgggttcagtagtttgggagatatcgaattttaaagttaaccatactgctgtctaaaacagattcagtcagttatctcgtcagatgttttagaacttgtagatggcagaatttaattatccattgactactgaagttgtagagtattttgtgtagatactgctagagtatttgtttgatatcaccgctgttttaattttaaagatacaaaattaacaaacagcgctgctgctgtgtgtcatgtggttcagggtgggagtctttccactgggtcttggtttcaagtgtaggagtgttttgttgattgatggcaaatgtttgtgaaatatttgtactaagttttatgcccgctagcaggtggctacactccagatcatgtctagtacatttcttcttcttcgctgaaggcaagtgaatgtagcggtggttgcttccgttctgacctgttatttctattgcctacactctaatattcagaagtattggattctttcataattggacactatggtgatgctttatgtggtggaaccgcccgaattattccaacttaagtgcctaagccccgccttagaggctagaccacacttaaatgggaataacccgtcaatccctcggatctagtccgacacggccactgacaggatcaagtaccacaatctcactcgaaggtgagtcacagagcaaatacaataaagcataaaaccatacatgtcagagtattaaattattacatcaccatcatcatcatcggagtttttgcaaaagtaaccatcattgttcgaagtgcagcggaaataaactaacggtaaataaatagagagatggggaagcctgtcccatcactcctcatgctcctcctcagccgaggcagggtcccactcgacagtccaacccggtggcaagatggacggccaagtcactccagcaaccatgtcctccagagaacctgtaaaaattatgccacaagcaaggttgagtatactaatactcagctagacttacccggtgtgaggagtctactcctctacctctagacatgcagctgtttggctgtggggtttggttgccaaaagcactagctgagtttctaaatcaagtttttaactttgtcaaaattaagtgtgactctcttaaggctaaagatgtactatctattcatacatagtagcaaacatttttagcaatcaacatcttgtatcatctcagcacaattccacttgttactcaatgtagcagcatggatcaagcagtctcattagctgcgagaagcagacgattcgaatcgagtttttatccttgcaaggtaaacctaaacacacgacatgcaggggcactccgtccccacacacatcaaccgtccccatcgattccccgtcagcagatcagggctcaccgccttggcgtacaatgcctcactgaccccgactggccgtcgtgcagtgaccgcacttgtacccaccataaccggaatgggagaccacgtctcaggtcgcgtgaggggatatgtccactgccaggttcactcaggtactaggcttaccgatttaccatatttctcggcatatgtttagtacgttcaaacgcttgactcacggtaccacaccttaatccttattccaattttcatcttgtagacaacgcatccccatggatcgttgtctacagaccaccatcattatgatataaaaatggatacaaccaattcctgacctcgcgcgagtgctagaaaaatcactcgacttctaccgagatcctaattaataaagcagctactcgacctagcatactagtatccatctcaaaggaatcctgagttcatgcaactagggtttcaggcaactcctacacttaagtgcacaatacaagcctacaaacattaagtgtagtaaaatagcatatataaacggttatgcataaaaccggggcttgccttccaaagcagtggcaggcaggtcctctggtgcagactctggggctggatccggggctacctcctgagcagctccttgctccggcacgaggatgcactctccgtcagcaaggttacagtctatcgaaatgcaatgaacatgtatgtcatgattatgcaggatttaataacattatgctaaagagatctaagttaagaagtaacttagggtttcttagtcatgcggggcttccagtgggttaggcttattactctttaggcttgggtttttagtgaagataacatagtggatgggtattgtctggatacatttcagtggacaattttacaagggttttatgatgacattaattaccactattcatttccctttttcttaatttctacttagggtttctagggtaggtttgagctacgacagtgttttaataacttccaaaaattctgtaaaaattacagtgggttgtcatttgctattctagcttgttttaagaatttgaagcttaaagtacaaaggctaggctttaaacaaaaataacaagagttatgcaaaatgggccattttacactacacctcttagttaggggtaggttctgtcctaaaggttatttttggtggcatcccatagtaataataggcttctgtgctaaaaatcacagaaaactaaggggtggttatttagttatgattttcttaagtttaatgtcacaaaggcactttctactacattattatttgaaaaatgtcaaacagcagatttcatatttttcctaagttctcattaataaaacattagttatcccaagggtgggggtgtttttaccttggggttaattctgtagagtttttctaagtttcacttgttttattaaaacaaaagggatcctacttattttatactaaaacagggtatgatatatttttccagtaaactaccttaaataagtatcctaacaaaaatagaggtgctttctggttcattgtttaaattacattttctatttttcttacccttaagcatattatagaataaggggtaaaaactaacttaatggagtggacagagaggtttaacatttttatttgggttagtaggtagatataaacttctccaaatttttccaaccctagtcaattagtgcaactaatttttgccctattattgagcttttggccaaaactataattaaatcagagctttaaagttttctatagtacatagggggttttatatttttcttaagtaggttacattatttatagtctgacaaaattgatttgaccaaatttaaatgagctaaacataagttatggattttcaaagtttctgttcaaattaaaaacagatttaataaaggttttctggaaaaacagtttacaccgaggtccctgggtttaaactaaatcaaccttcgcaaatctaccctcgcgccactattcccctgtgtctctgacacttcacaaaaccccctgactttctctccctctcacccgcagtccttccccttacgcaaacagtaaccgcgagaaagaaaagggtggcgcggcttaccggcggcgagggaggtccggcgaagggtggggttggctcagggagactctggcggtcacgtcgaggtacggcttgacgtcggggatggccggagtcgcccggtccacgcgcgcaggcgggtgtcctcgtcggcggcgagtgtaccggccaaaccacggcgaactggttcaattcgaaggcacggtgagcttcacggggtaacgtagcgaccgtgtgcacaaggaatcgaaggatggttgagtggattacccggtccacgtactccggcggggttgagagctccggcgagcggggactggcctctccggcgaagcaaactccgattcctcgctcggggagcttcacggaggggtgcacagtcttctccgagggctggacggggttgggaatggctctattggcccggtctacggtgacagagggattgggcggccgcggacacgctgcgcacgggcaaacgacggcgagctagactccggtgaggtttgagggtgcgcggaagagtacagtcgaagtctgggagggttttataggcgcgggcgcgggccatggcgctggcttggctcgggcgcggcgctgggcatgcgggggcgcgcgcgagcgtgctctggcgcgggcaggaagcgtcgaacacgtggaggtgtgtttcttccattgttcaaacgtctccagagatcgcaaacgtgcgaatcttgccatgaatccggcgcagacctcttcctggcacctagggctatctcacatgtgtgagttccaatggaggatacgccctagatcaggagatagacgggcgccaaatctggcttgtctcactgcccacctcgcgacaaaactgatgccaaatcctatcaaacgtccaagtctcggtttccactttttcaagggggtgccttaggtggtataccacatttttggtatagaacctaagtggttttggtgccatcttcaaggtgaacacggttggtctttggattagggttagaatttgacttagggagaaatagagagttctagctctctctccacttggagatttgaattggggtttctctaggggtctttttgcaatatttccccccctaaatgatggttataaggttagttaaagtttgggtaaaaatctctcatgcttgcacacttgttcactctctttcccctcttacctagggttttgggagatagggtttaagagaggtctagggttcttctcccctcttatccaaggtagtaagtgtgcaaggattagagtaatgctttttaggtcattggcaacttgattaacacatgatctccaaggttcttatgtattgccctaagcctttaccccatataattcacagtccttagtaccaagatgtgctctagccatggtaacacctggggtgttacactttacttgcttgcattatactgatgctcaatcatatattgatgatgattatgattcgagtatgattcatgagattaattcacacccctgaaggtaaatgaagtattatttgaggttggtattgtatctgaaggtaaatgaagtattatttgaggttggtattgtatctgaaggtaaataaagtattatttgaggtttgtattgtatctgaaggaagtgaaggttattgataaatgcagcatgccatatacattgcatgactcatttgcatctgaagttttgtcatgacctatggtccgaccgtaccggtacaatttagcattgtacgttgtccgaggaggggtacgatgcggctttatacccttagaggtatgaaggcagaggacatatgcattgcattcatatgcattcattgaagtgatatttgcagatgatgtggttttatactcttagaggtatgaagatagagtacctacacattgcattcctatgcatacattgaagtgatatttgcaggtattgttgacgcagggaagtgttatagaacctattgtggttgttcgaggaaatgagatggtattggttatagtgggactactgagttccatatctacaagtatttctgattttaattgtgactcttttaaaatgttgatgaattcaatttgtggtttaaatatctcgtcaaaattattcgcttgctgagatgtttcatctcactcttgcattactcaatgcaggtgcttattgctcatcaagggaagtgggaagtagcagcacatccaccttcactcttataataacgctgcttaggcgcagtcatgatttaattagaagcttcttgtcaaaggatgtttgtttctaactagttgtgcacactggataatttagctcatgccgttatggttgtcttcctattgctagcagactattaatgtctattatgttttcttatcatgatatctatttatactttgttgcttccccgtttatgccattttcaaaggagatgctgtcgaaattttatatacgaatgttagatgtgtagtttagtagcattctggggtgtttgtggatcccggggtgttacagttggtatcaaagcataggctttagattcttggcaatttgaagataaatttgacacacttgcacatataggaacggtatgggtacaaatatctttgatatatattaatgtctttgaagtgcagatgacaataatttcacccctccctattgctttatggtgatgtggtaagttgtttatgacctaatgcatgatataatttatctctaaatctttatattgttttattaatgcatttgatatcgctagtcttttgtgagattgacgttgttattatgcttgtgatatacaagtatgcctatgttgttttcaccatgtttttcatggttgagttttattacaataatattgttatatatgcttgattgaggatgtatctaagaggagtgtgaattgtgtgttttgggttacaaggcaaccatcaatttgaattttagttgtggagctgttggtggatagttccaactatctttgcaaagaatgattgtttatgacgagaaaccggttctgaaagaaatgaatattggtactttatatggatttttgggggaagtcttttcatagccataatggcttacatgtctctctcctattgtgtgttttagttgccacaaagcctagatgtggtttaaagtggttgcctgttagtcatactaattgtagaataaatctttgattctcttgatccattgattatgtattaatacattgaggatctgatggttccctttccgatgcatgcttgtggagccatttttagaccacctatctattggtttgaaggaagtcattgcctagcctagagttggttgggtgtggctagtcacctactcctagatgatgtggtttttacatcagcttaatatgtttgtcaaatgtgtgaaggattaggggttattattgaccttgtatgtctggtactttgagtgcatcgtatgatagaatgaaatgtaagtttctgaactacagtagatgaagacttatgttatgtgtaggttaacctcactagtttagatatttttccctagttgagttgttggatggagtatagtgacattggttaaccaagtattgtgttgttgtgctgtcagtgctctttgtggagcttttggcatttcttcgatgaaatgtgccgcacagaatgttattggcttcttgttggctttattgctccattagttctatagatttgctcccttttgtggggtgcaaagaatgttagattacatgattatcttttcatgatggcaagaataagatttaggaagattaggagttttgtttcaatagaactacttgtttcgtggtgctttgaggtgaggggtttgatcttcttatacattcatcgggtggggatatttcaccatttaattaaaattaattgttgaagttggtaagggttgtgcttagtgcatattaccccttcataaaagagtgttgtcttaagacattgatgttgatgtatagttgcatccaaatttgatggtgtgaaattttagtgttgattgcatctatgacttgctttgagcttcattgcatgttgtttcatgcttgatgtcaggtcgtgtagtttccttaaacaattagtccaaggtagaagttcttgtgttaattaagaccaataatggacccatgttttgaatggtggtgctatatgtggtaccttggatgttatggttggagtggttgaattcgaggacgaattctttttaaggggggtagagtgtaatatcccaaaaaaatgttaacccaaaagttgatcttcggtgagtggatatgggaaaaagggttgtggccgttggatgctgcatcagaagtcatctgaggcgtcacttcttttctcccacaaaataaaccctaggtggccaccctcttccccttcttggccgccaccccctcccctttcttggccgcctcacttttcccccttggctggtcgccccctatccccccattgcagcagccctccaatacttcttcctccctagatctcccccccacgcaacaaggatcgagaagaggaggaacaagatggattgaagaggaagagaggatcaaggagatgtgctacccccatctcttgcagatttttcttagggaaaatcctaggtaaggatgggatccttgtttctccctataattatgtgcttttggaggttgtggatcatgtggattgaaggattagaggttggattaggtgtggggttaggttttgatttcgaatttaatttctgcagaatggcagattcgacagtttctattcataccagttttccgtgatcttagtggcctcaaaaaaaataaaaagtctatatatgagtcgtagataatttgtagatctttccgtggccgcgaagaacacctcaatcggacatcagaacagaaagttatgacagtttgattatagcagtttttcagtctcataattctgtgcagaatctgttctcttaagagttaggcaattttatcaacagaattaaactgttggttggtaaaagaagttgtagataatttcataagatttccagattgttaaagagtgcattcatatgatttttgaaactccagttatgtttgttttactgtggctgttcctgtttgcctgacaaaaatgagtgggtctgttcactggtgggtttcatctagtaaatggccgaattggctcttccaactatggagacttttgtagagggataaaagttcttacttccagcagaatttcataattttgggttcagtagtttgggagatatcgaattttaaagttaaccatactgctgtctaaaacagattcagtcagttatctcgtcagatgttttagaacttgtagatggcagaatttaattatccattgactactgaagttgtagagtattttgtgtagatactgttagagtatttgtttgatatcaccgctgttttaattttaaagatacaaaattaacaaacagcgctgctgttgtatgtcatgtggttcagggtgggagtctttccactgggtcttggtttcaagtgtaggagtgttttgttgattgatggcaaatgtttgtgaaatatttgtactaagttttatgcccgctagcaggtggctatactccagatcatgtctagtacatttcttcttcttcgctgaaggcaagtgaatgtagcggtggttgcttccgttctgacctgttatttctattgcctacactctaatattcagaagtattggattctttcataattggactctatggtgatgctttacttacttgcattatactgatgctcaatcatatattgatgatgattatgattcgagtatgattcatgagattaattcacacccctgaaggtaaatgaagtattatttgaggttggtattgtatctgaaggtaaatgaagtattatttgaggttggtattgtatctgaaggtaaataaagtattatttgaggtttgtattgtatctgaaggaagtgaaggttattgataaatgcagcatgccatatacattgcatgactcatttgcatctgaagttttgtcgtgacctatggtttgaccgtaccggtacaatttagcatcgtacgttgcccgaggaggggtacgatgcggctttatacccttagaggtatgaaggcagaggacatatgcattgcattcatatgcattcattgaagtgatatttgcagatgatgtggttttatactcttagaggtatgaagatagagtacctacacattgcattcctatgcatacattgaagtgatatttgcaggtattgttgacgcagggaagtgttatagaacctattgtggttgttcgaggaaatgagatggtattggttatagtgggactactgagttccatatctacaagtatttctgattttaattgtgactcttttaaaatgttgatgaattcaatttgtggtttaaatatctcgtcaaaattattcgcttgctgagatgtttcatctcactcttgcattactcaatgcaggtgcttattgctcatcaagggaagtgggaagtagcagcacatccaccttcactcttataataacgctgcttaggcgcagtcatgatttaattagaagcttcttgtcaaaggatgtttgtttctaactagttgtgcacactggataatttagctcatgccgttatggttgtcttcccattgctagcagactattaatgtctattatgttttcttatcatgatatctatttatactttgttgcttccccgtttatgccattttcaaaggagatgctgtcgaaattttatatacgaatgttagatgtgtagtttagtagcattttggggtgtttgtggatcccggggtgttacagccaaggaagtttgggacgtgctcaggaccgcgcacgagggtgatgaactaaccaagatcaccaagcgggaaacgatcgagtgggagctcggtcgcttccgtcttcgccaaggggaggagccacaagacatgtacaaccggctcaaaaccttggtgaatcaagtgcgcaacctcgggagcaagaaatgggatgaccacgaggtggttaaggttattctaagatcacttattttccttaaccctactcaagtacaattaattcgtggaaatcctagatacacactaatgactcccgaggaagtaatcgggaattttgtgagctttgagtttatgatcaagggctcacggaagatcaacgagcttgacggtccctccacgtccgaagcacaaccggtcgcattcaaggcgacggaggagaaaaaggaggagtctacaccaagtagaacacccatcgacgcctcaaagctcgacaatgagaaaatggcgctcgtcatcaagagcttccgccaaatcctcaagcaaaggagggggaaagactacaagcctcgctccaagaaggtttgctacaagtgtggtaagtccggtcactttatagcaaaatgtcctatttttagtgacagtgacaggggcgacgacaagaaggggagaagaaaggagaagaagaggtactacaagaagaagggcggcgatgcccatgtttgtcgcgagtgggactccgacaaaagctctagcgactcctccgacgatgaggacgccgccaacatcgccgtcaccaaggggcttctcttccccaacgtcggccacaagtgcctcatggcaaacgacggcaaaaagaaaaaggttaaatctaaatcctccactagatatgaatcctctagcgatgataatgctagtgatgaggaagataatttgtgtactctttttgccaacttaaacatgcaacaaaaagagaaattaaatgaattaattagtgccatccatgagaaggatgatctcttggactcccaagaggactttctaatcaaggaaaacaaaaagcatgttaaagttaaaaatgcttatgctctagaagttgaaaaatgtgaaaaattatctagtgagctaagcacttgccatgagactatagacaaccttagaaatgagaatgctagtttgttagctaaggttgattccattgcttgtaatgtttcaattcccaatcatagaaataatgatgatgatttgcttgctaagattgaagaattgaacatttctcttgctagccttagagatgaaaatgaaaaattgcttgctaaggctaaagatcttgatgtttgcaatgctactatttccgaccttagaagtaaaaatgatatattacatgctaaggttgtagaattaaaatcttgcaaaccctctacatctaccattgaacatacttctatttgcactagatgtagagatattgatattaatgctatacatgatcacatggctctaattaaacaacaaaatgatcatatagcaaaattagatgctaaaattgccgagcatgaacttgaaaatgaaaaatttaaatttgctcgtagtatgctctatagtgggagacgccctggcattaaggatggcattggcttccaaaagggggacaatgtcaaacttaatgcccctcctaagaaattatctaactttgttaagggcaaggctcccatgcctcaagataacgagggttacattttgtaccctgccggttatcctgagagcaaaattaggagaattcattctaggaagtctcactctggccctaaccatgcttttatgtataagggtgagacatctagttctaggcaaccaacccgtgctaagttgcctaagaagaaaactcctaatgcatcaaatgatcatgacatttcatttaaaacttttgatgcatcttatgtattaactaacaaatccggcaaagtagttgccaaatatgttgggggcaagcacaaggggtcaaagacttgtgtttgggtacccaaggttcttgtatctaatgccaaaggacccaaaaccatttgggtacctaaagtcaagaactaaacatgttttgtaggtttatgcatccgggggctcaagttggatcatcgacagcgggtgcacaaatcacatgacaggggagaagaaaatgttctcctcctatgagaaaaaccaagatccccaacgagctatcacattcgaggatgggaaccaaggtttggtcaaaggattgggtaaaattgctatatcacctgaccattccattaccaatgtttttcttgtagattctttagattacaatttgctttccgtttctcaattatgtcaaatgggctacaactgtctatttactgatgtaggtgtcactgtctttagaagaagtgatgattcaatagcatttaagggagtgttagagggtcagctatacttggtagattttgatagagctgaactcgacacttgcttaattgctaagactaacatgggttggctatggcaccgccgactagcccatgttgggatgaagaatcttcataagcttctaaagggagagcacattttaggattaacaaatgttcattttgagaaagacaggatttgtagcgcatgccaagcagggaagcaaattggtgcccaccatccacataagaacatcatgacgactgacaggccactggaactcctacacatggacctattcggcccgatagcttacataagcatcggcgggagtaagtactgtctagttattgtggatgattattctcgcttcacttgggtattctttttgcaggaaaaatcccatacccaagagaccttaaagggattcttgagacgagctcaaaacgagttcagcttaaggatcaagaaaattagaagcgacaacgggacggagttcaagaactcacaaatcgaaggcttccttgaggaggagggcatcaagcatgagttctcttctccctacacgccacaacaaaatggtgtagtagagaggaagaatagaactctattggatatggcaagaaccatgcttgatgagtacaagacatcggatcagttttgggccgaggcggtcaacaccgcctgctacaccatcaaccggttgtatctacaccgaatcctcaagaagacatcatacaaactcctaaccggtaaaaagcccaatatttcatattttagagtctttggtagcaaatgctttattcttgttaaaagaggtagaaaatctaaatttgctcctaagactgtagaaggctttttactaggatatgattcaaacacaagggcatatagagtctttaacaagtccactggacaagttgaagtttcttgtgacgttgtgtttgatgagactaacgactctcaagtagagcaagttgatcttgatgagataggtgatgaagaggctccatgcatcgcgctaaggaacatgtccattggggatgtgtgtcctaaggaatccaaagagcctccaaatgcacaagatcaaccatcctcctccacgcaagcatctccaccgactcaaaatgaggatgaggctcaagttgatgaaggacaagatcaagaagatgagccacctcaagatgacgacaatgatcaagggggagatacaaatgatcaagacaaggaggatgaagaacaaaggccgccacccccaagagtccaccaagcaatccaacgagatcaccccgtcgacaccatcctcggcgacattcataagggggtaaccactagatctcgtgttgcacatttttgtgagcattactcttttgtttcctctattgagccacacagggtagaggaagcacttcaagattcggattgggtggtggcgatgcaagaggagctcaacaacttcactaggaatgaggtatggcatttagttccacgtcctaatcaaaatgttgtaggaaccaaatgggtgttccgcaacaagcaagatgagcatggtgtggtgacaagaaacaaagcccgacttgtgtccaaaggatactcccaagtcgaaggtttggatttcggtgaaacctatgcacccgtagctaggcttgagtcaattcgtatattattggcctatggtacttaccatggcttcaagctttaccaaatggacgtgaagagtgccttcctcaatggaccaatcaaggaagaggtctatgttgagcaacctcccggctttgaagatagtgagtaccctaaccatgtttataaactctctaaggcgctttatgggctaaaacaagccccaagagcatggtatgaatgccttagagatttccttatcactaatggattcaaagtcggaaaagccgatcctacactcttcactaaaactcatgaaaatgacttgtttgtatgccaaatttatgttgatgatattatatttgggtctactaacgagtctacatgtgaagaatttagtaggatcatgacacaaaagttcgagatgtctatgatgggggagttgaagtatttcttaggatttcaagtgaagcaactccaagagggcaccttccttagccaaacgaagtatactcaagacattctaagcaagtttggaatgaaggatgtcaaacccatcaagacacccatgggaaccaacgagcatctcgacctcgacacggaaggtaagtccgtggatcaaaaggtataccggtcgatgataggctctttgctatatttatgtgcatcgcgaccggatataatgctttccgtatgcatgtgtgcaagattccaagccgatcctaaggaagctcaccttacggccgtaaaacgaatcttgagatatttagtttatactcctaagtttgggatttggtatcctaggggatccacttttgatttaattggttattcggatgccgattgggcagggtgtaaaatcaatagaaagagcacatcggggacttgccagttcttgggaagatccttggtgtcttgggcttcaaagaagcaaaattccgtagctctttctaccgccgaagccgagtacattgctgtaggccattgttgcgcgcaattactttggatgaggcaaacccttagggactacggttacaaattaaccaaagttcctcttctatgtgataatgagagtgcaatccgcatggcggataatcccgttgagcatagccgcactaagcacatagccattcggtatcactttttaagggatcaccaacaaaagggagatatcgagatttcatatattaacactaaagatcaattagccgatatctttaccaagcctcttgatgaacaaacttttaacaaacttaggcatgagctaaatatccttgattctaggaacttcttttgttgaattgcacacatagctcattcatatacctttgatcatatctctttcttgttctatgactaatgtgttttcaagtgaatttcaaatcaagtcataggtatattgaaagagaattcgagtcttcggcgaagacaaaggcttccactccgtaactcatccttcgtcgtcgctccgagccactctccatctttgggggagaaggactccgtctttggtataatcttcactcatctatttatgaccaaagagggagaaagtaattctaagggctctaatgactccgtttttggcgattcatgccaaagggggagagagtattagcccaaagcaaaaggaccgcaccaccacctaattttaaaaagagtttctcaattggtatgatttttcaatttggtatctccttgtgttcaaaaagggggagagaaagttgtattttcaaaatcgatatcttaaaaccctcttgaacactaagaggagagttcatctagggggagttttgtattagtcaaaggaaaggcatttgaaacagggggagaaaatttcaaatcttgaaaatgcttcgcaaaatcttattcattcacctttgaccatttgcaaaagaactttgaaaaggatttacaaaagaatttgcaaaaacaaaacatgtggtgcaagcgtggtccaaaatgtcaaaaattaaagaaacaatacatgcatatcttgttagtatttatatttgctcaattccaagcaacctttgcacttacattatgcaaactagttcaattatgcacttccacatttgctttggtttgtgttggcatcaatcaccaaaaagggggagattgaaagggaattaggcttacacctatttcctaattgattttggtggttgaattgcccaacacaactaattggactaactagtttgctctagtgtataagttatataggtgccaaaggttcacacttagccaataaaaagaccaataattgggttcaacaaagagagcaagggataaccgaagtgtgctctggtttggcgcaccggactgtccggtgcaccaggggacttcacgctgaactcttcaccttcgggaaaatccagaggcgctccgctataattcacctgacgtgtccggtgtacaccggactgtccggtgagccagcggagcaacgactacttcgcgccaacggtcacctgcagaagcattaaatgcacgccagagcgtgcagaagtcaggcacgcgcgtagtggcgcaccggacactctacagtatatgtccggtgtgccaccggacatccaggcgggcccaacagtcagagctccaacggtcggaacccaacggcctgatgacgtggccggcgcaccggacactgtctggtatacaccggactgtccggtgcaccatgcgacagacaacctccaccaaatggctagtttggtggttggggttataaataccctcaaccacccaccattcattgcatccaagttttcacacttccaaccacttacaagagctaggcattcaataaaagacacacccaagtgatcaaatcctctcccaattccacaaaagctttagtgactagagagagtgatttgttgtgttcttttgagctcttgcgcttggattgctttcttctttctcattctttcttgagatcaatactcacttgtaaccgaggcaagagacaccaattgtgtggtggtccttgcggggaagttttgttcctggttgatttgagaagagaaatctcactcggtccgagggaccgtttgagagagggaaggggttgaaaaagacccggcctttgtggcctcctcaacggggagtaggtttgcgagaaccgaacctcggtaaaacaaatccacgtgtcacacttcttatttgcttgcgatttgtttttcaccctctctcgcggactcgattatatttctaacgctaacccggcttgtagttgtgattaactttgtaaatgtcagtttcgccctattcaccccccctctaggcgactttcaataaggagggagcttctccctgggcagacaccacaagatcatctggatcttgtagtgcgtgtctttcatgcaaagctacaggagttaaagcataggctaactaaacaggatattctcggtaaggtccgagcctacgtctatgtcgtggagtttcagaagcggggtttgtcgcatgcccattttctactcataatgcagaggaagtacaagctcacatgccctgagcagtatgaccttttgatctcagctgagatcccaagcaacaagtaccctgaactatgaaagatggttatcaagcatatgatgcatggcccgtgtgggtcgctaaaccctaactgcccatgcactaagggtcataaatcgtgcaagaatcattacccttggcctttcagtgacacaaccttgcaagggaaggattcgtaccctgtttacatacgtcatgacgatggtcataccgaaaaggttcgagggtgcgaattggacaatagatgggttgtccttacaacccatacctccttcgtctcttcaactgtcacatcaatgttgaggcatgtgggagcatcaaggctgttaaatacatgttcaagtacatatacaaaggccatgatcgtgcttctgttgttatgagagatgtgagcaaggcagatgaggatgtagatgagatcaagcagtacagagatgcaaggtcggtgactcctccagaagccttatggaggatatacggctttgagcttagtcagatatctccacctgtgatgcagctgcaactccatctttcaaacatgcacatggtggcgtttcacgagcggcaaatggtcgagcgagtcgtcaaatgtccaggtgttgataggtcaatgctcacaacatattttgaggcgaatagtctacacaaggaggctcgtggcatcctgtatcatgacttccctgaatggtacacttggcagagtggtaagggaaaagtctggcaacagagaaaacgagatacaggtggacaagtcggtagaatagtctctgctcatccggccgagggggagagctactatcttcgtgtactcccaaaccatgtgactggcaccacttcctatgtggatctaaggacagtagatggtgtcacgctactaacttttcatgaggcagcagagagaaggggactgcttgagtcggacaacacactggatgagtgtctcactgaacgtgctcttttccagatgccatcagcgctgcgacggctttttgccacaatacttgtgtactgtgagccaagcgatgtggctgtactctggcagaaacacctagattctatgtctgaggactatcaacacaggaatccgtgcaaaactcatgttgagcagatggtattgattgacattaggaacatgttgcagtcaatgggaaaggacataaagacattccctcttcctcctatcatggacgcgtatgacgatgctattggtactgctagggaggtttacgaggaggaaattatcgaaccggcagcagaagatgtggctctcaaagactgtcttaacaaggaacagagggccgcctatgataagattatgtctgccgttgacactgattagggcagattattctttgtggatggacctggtggcaccggaaagacttacctatatagagtgttgctcacgatgctacgtagccagggcaagattgcagtggcaacagctacatctagcgttgcggcttccataatgcctggaggaagaaccgcccattcacgcttcaagatacctctcactattgacgatggtgctgtatgtagcttcacgaagcagagtggaaccgcagagttgctacggaaagcatctctcattatctgggacgagtcttctatgactaagagacaagtcgtggaggcactggacaatagcatgcgcgatataatgggtcgacccggactaccatttggtggtaaaaccattgtcttcggtggggatttcagacaggtcttgcctgttgttcgtaaagggtcaagggctcaagtggtcgcttcttcgctatggatgtcttacctatgggagtccatgtcccacttaaagcttgttaccaatatgagggcaaaaaacgacccttggtttgcggagtatttgctacacgtaggcggtggaactgaggacacaaatactgacggcgacatccgtcttcctgacgaggtatgtgtgccttatagtgggagtgacagcgatcttgacaacctaatagactttgttttcccaaatctcaacaaaaatatgtctaattcgacctacatcacttcaagggcgatattgtcaacgcggaacgaatgggtggatatgataaatgttaagatgattgatcgttttcaaggggagcatatggtgtaccatagtttcgatagcgccatggatgatccccataactactacccacccgagttcctaaacacactgacgcctaatgggctgccaccacatgttttgaagctcaagattgggtgccatgttatattgcttcagaatatagaccctgcaaatggactttgcaatggcaccaggctggtcgttcgtggtttccaaagaaatagcattgacgcagaaattgtactgggtcaacacgctggaaaacgaattttcctgccgcgtatacctctgtggccctccgatgaagagatgttccctttccagttcaaaagaaagcagtttcatgtacgacttagctttgcaatgacggttaacaaagcacagggtcagactattcccactgttggtgtatacttgcccgaaccagtgttctctcatggccaactatatgttgctctatctagagcgacagcccgatcaaacataaagattcttgcaatcccatccgtcgatgggaagaaaacgttaaggaagggtgtaagaaagaaccccacattagattgtgggacatatactaagaacatcgtctacaaggaggtcctaacaaactagacctacggtaagtctgtcaaaactcaattgtttgtttcaataaaaagacaccgacacaagactaacactcaaatgtaattgttatgttttgatgaggagatgttaaggagcagagggaggctgggtctacaatggatgttgttgctgcacaaacaaaaccaattgctggtacctttcatttactcttagtccagtgattgtgtagtctttgtctatgctcttcattgttagtttttttcttatgataatgaagagttgttgattgattatattcaagtgcttctacagttagctcccattcatataatactaagattatataaatgtagctactagctagacatcatctctgttgaacagttctcttctggtgaattttgttttgtcctgttcgtgataaatttacatcttggcattcagtttggttagtaatctacatgtgtagttcagccattactgtttttcataaacaaatgtagtttaggaatcagcttatgtgtgtttctgttgcttggatgaattcacatgctagtttttagtgccctgctttggatttaccaagttaaaaaaattgacgccatatgaaaattcaggctgaatggatcaaatggttgtttgttttacaaagaagatcaaggactggagcaacgtagttgttgccta

SEQ ID NO: 531 - DNA, 2807 bp, Zea mays
  Intron number 1 from transcript GRMZM2G063945_T02 (locus G RMZM2G063945) derived from phytozome v7.0 (chr-ID 5; pos 1 61082413 to 161085219)
gctagacgcggtgacccccacaccgaacacttcctcctccacggttgccgcattgtccttggtggcaacacaagctcttgtacctccagccggtgaaatcggagactcaagaattttatgttttcagcatcatttacaggtgaggtgaatttaatgctgacggcttatctcttggagcagaagcaacaggtgagctcattgagccctcaatggtaggtggctggacctggtggaccgaagatcctgagccattctgcataccagcacatggtaaatgaagtgatttctagattgctctcatttcagactttgctaaaaatttcgttctccatggagttatggaggcatatacgttcttgctgttagttggtgcttattctcttctaaattccttaatcaactgcatcatgtttacaaattcattagtccctgattcttagtaaacaacgaacaaaccttctacagtaccacattgtttttgcagttctcattgtgttgtgcaacaaccaaaatcaatccacagacatgctaattgtggtaaggacataagatttgaccaaatccaccagtccaaaaaagggggagaatctatctataaactggattagaaatatagggacacataatagctgaatattagatagagaaaacaatatcttgtgagctaatggtttcttaggatgagcatacatgtacactgaattcgttcaactggaacatcaaatggcctaagttaagcccaagcacggaaacataaacgtgcagttcctcaagcattagaaagcagtaatgcaaacacctgctttgaagatatcacatgaaacacctttcatatgcattcatgtccaataatcagggaataagtaatctgttagcaaatgctaccagtagatcttcaaatttcttgctgaattctgcttcagtattagatgaatcccattcaaaattgtactcttgggcaatagccttcatgacttcagctttgatccatttgatggagcattcaccgagagcttttcgattatctgtatgaaagagatcttcacttttgtgagcaaacaattctgaattctgaaatagaaaaggcacatgttggagtttccacttactgtgcggttgacactgctgtcagggcgcaattccacagcgccaacaacaaactcctttccatacttggtggtaataaattacggagatgcattagctcaggcaagtctgaacatcttcctaatgcaaagattatactagcaattgcttcacgcagttctaaggggcattccctgctccatgataaaactaataggtgctgatcatattctgttaagtgaaaaaagaatcttgagccatggcttagaaaattgtaattcaatcacagttcataaagcagaacctacttttggacctcaacagtagggacttttgccaggacaaattcaccgaaaagctctaaaatctcgtaggcagccaatatattttgctccctaataatgtgctccagctatgattaataatgatattattagaaaatgttaagaagaaaaagggaaaaggccaaattacctgcccccaccccacgcacgcgtgggagggagtgtgcatctggtactatgtatcctttttattcatcaatctccatgcgactaaggaggtgaggttaatatgtcctttaataagatttgtcttcttgtttctcctcgtaagttcaaattctatagttggagaacatcaaaacttatcttacaaaaatacgttgaaagtttcatcattatttgtatttttaaataggttttgtatctatatggttagtttattataagatgtactgatctataaataatagtaacgaaatatctataatatatatttctaacataagttatgatgttctctaaaactacaaatttaaactaaaaactcagttggggtaggggtgtagattgtacacaaaattggttcaagaggttatccaggcaatgttcatatgtggggccctgtttgtttcccttctagattataaaaactagattatgatggaagtgtatgatgataaattatcatttggagattacaaaataagctgaaataagctacccaatactagctgatttcaacttatttatgatactaaagcggtattttacctcctaccattttaccataatccaacttatataatttaggagggaaacaaacacacccttaagatattgaaccatttctttgtgcatatttcaaaacttactaccatgaagaagttcccttaggccccgtttgtttcttttcattttgaggaattggaatcttactaatagaataggctatttttttagaatgtgacattccaccactttccaaagttatcatataagcctatgtcaaattcatggggtgagagatggaaattgattctatagatttacatgttatttttccgatgtacaacttatagcacactcttctatttgcttcgctataacataaatgtagtatataactatctctctcatatgatttaggataatatacaaatatattacatatataaatatataaacttaattagttttttctaaattataattattaaaatggaattcaattccaacgaaacaaacggggccttagttttttttgctgtcaggaattctaaaatcttacaggaagttcactaccattaaaaggctcagaaacacaaatgcacacccttgctaaaaacatcactgggacttctttggtctacacaaaatattttattctattgtgatatgcaagtcctgatcccatgcaaaatgtttgcaggataaaca

SEQ ID NO: 532 - DNA, 10720 bp, Zea mays
  Intron number 1 from transcript GRMZM2G172442_T02 (locus G RMZM2G172442) derived from phytozome v7.0 (chr-ID 2; pos 2 00895526 to 200906245 reverse strand)
cgccgtatatccctttctccccttccctttctcctattcccctgttcatttctccgtttcttgatcacgcattgcgtcccgcgctccgtgagtcgtcctggcgccccatttccgtctgatctgcgatatttccacctgccctcgtggtgtttcgtctggtctgggcgccttccttggtctttgggatcctagatgcgatatggttcttgttttttggggttgaagtccatttcttcgtgatttaggaggcaatactgccgaagagatacccctttggtccctattccaccctaccattcatgatttcagtatgtgctttgtaccagtctccttttagatatgatgattcattctcacgtgcttattgtgtctaaattgttatagatccttgggagcatgtgttggggatgggtctcggtgcagtatttgtgaaccagctggtaaaatttgacgagaagctcaaggaggacctcgacaagatgcttgagcgcgccaggctagccaacgagcaacgctacattggtacagtgctaacttgcttatggcatcttaacaacagcaaagactttgcccaagttagaagtctacatcggatatatccaaacaatctcaattggtgttggacaaactttttttcaattggtgctacctgtactcatgtatatcatcgtttgaagccacaaattaagggtttatacacgtcgatagctgttctctattcatttctgttcagagttagatctttagtatattccatcttttctagtctcctctttccatattaacttcggtcttctcctatctctcttcctattactatcatgtattagtatcccactatatattggtgtctctggaggtctacatcggatatattcaaacaatctcaattgatgttgtacaatctttttttttcaatttggtgctacctgtacccatgtatatcatcattcggactcgatcccttcttatatagccacaaatccaacataatatacacatttccgcaacacttattatctgttgaacgttgaacatgatgcctttttagcctaatatcctgcaccatgcaatgtaacaggtctaattgctgtcatataaaagtttccttttagtttgcgtgatatgctctggttgcatagacgccaaatgtttggtgccacttcctccatcatgctttgttttatggctaacatctaatcaatacccctatctctctatctctccgtagcattgatcctaaataacggaagttatcctccttgggcatttcttgaccttttaaactaacatctccttgtgtatagtgttgaagtcccatctcacgtactctgttttatttctattgaatctaaaacttttgaactctagagtctcatgccacaagtttagtttcctattatcctgcccgactttcatcaatgagcactacatcgtcctcaaaaagtatataccaagggatatccccttatatgtctcttgtgacctcatccatcactaaggcaaaacggtaagaggcctcaaaattgactcttgatgtagtcctattttaataagaaagtcatctgtgtcccatcacttgttcaaacactagtcacgacattgttgtacatgcccttaatgaacccagcatgtttagttggaactttatatttgtccaaagtccatcacgtaacatttcttagtattctgtcataagacttctccaagttgatgaaaaccatgtgtatgtccttctgatccctatattgctctatcacttgcccttcttatgctttggcatgttatgtttgcaaattcatttatctactgttgtcagtagtttttgcttataatctgccatattgcctcagccttcagcaatcctactataagagttagcacatgttgtatcattttcttctgattttaacatgtaagttgttataccgccagctttttatccttaatgcaatattcgaggaaagaattgcacatttgatttttgaacaccttagtacactaatttgatctgcaattttatttttatgtttcaatctactgttggggacttgttctcaagtgctatgagttaagaacaagacaacatagaaaatgttaatcgttaaggtccttcgtcctccgaagcattatttcccttaggatataatggtttacggacgaaggttatgaaggacgtaccttcataaattcattaaacaatgacgaaggatgaaatataaagaatataaaagacaacatggacaattatatattattattaggtataaacagaaatatcgttgaattacaagtgtaccttcaatcagaatgaaatgacagtacaagcgtgacgcaaaaagcgaatgccaagtcagcgtgaacagtacgggagtactgttcacctatttataggcacgggacgcagcctgtgcaaaattacattaatgccctttacatttgataataatcctatagtaatctgtcgaggtctaaatagccttttcatctttaagtcggtttcaactgctgctgtctcgccgaagctttcctgtttacaccttcggcgcttcaccaaccttcgtattattctggtctactgtgatgcctgacttgagtccgaagatacctgttcacacattatactccagaaacactattaaatcctgtttttgaggaccttcggatgccgaaggtccccaacagtagcccctcgcaatattaatttgttcaaaataataaatttagattgcgatctggacgaaggctttacgccgaaggtccgaaaaaacaccttccctttgctagaatagcaacattcactgacaagcggggtctttcaattttcaacgcacttggcgtataaatacggccataccgcagacgcatttgacacgctccctggccaactgctcccgctcactcaaattttagctcttgtgcactacgatttgctaagcttttagttttgaagcttcggctttgaaaatagttttttagtgtctccgaagatgtccgaagataagaagactgctgctgagacgaaactgagcctcgacgaagagaaaaatttggggtttcttatagcgatgtcaaagaccaacacagaaaaaatcaccaaggagattctggaaggtttgtctgaggatactggtgacagtgacagctatgatgtggacagtggtggggaggactccgaagatcgtccctggcgaccaagccattcagtttatggtaaatcaactatcaaagaaaatcatcttgttaatatgagaggaaggtatttccgggatttgtccattgtgagggcggacgaaggggaaaaaacttgcccacatcccgaagagaatgaagttgtagtgtactgaagctttttgaaagctggactgcgatttcccttgagcagcttcgttgtggaggtgctgaaaatattcgaaatctatctccatcaacttacccccgaggcaattataaagctgaatatcttcgtgtgggccgtgagaagccaaggtctgaagcctgatgcaaaaagcttctgtaatatacacgaattatcatatgagacaaaaccttggggtaaggaacagtatcacaataattttggttgctacagttttgtttctcggtccgggtcaagctgccccgtgccaacctttcggaagagatggcccggcgactggatgacagaatggttttatgtgaagaatgatctgacaatacgagaagatatcaaaggtataattatgcgccctatctggcaaagcttcggccttcggaggccgaaggttgaaatgaatgaagctgccgaagaatgccagagggccttcggcgcagtctgctctttcattggaacgagagacttagtacaagagcatatcgccttcagggtatggccgctcgcggagaaatgggaaatgccacaagaaaccgtaaaagaggccgacgaaggtggacttatcaggttgaagtacacttttaaatttggagataagttcgttgagccagatgatgactggttaaaaagtattgaaaatttaagtgatgaactgcttggggcttattcgaaagccgaagacactgcaatgtcagcagccttcggaggccgaaaaaagaagaggctgaatcgggtatttgatgcaatcgggtttgtctaccctgactattgctatcccattcgaaggcagaagagaaaaaacacaacctctgcaaaagaagaagctgcaactgctcctagcgagccagaaccgaaaagaaagaagataaaggtccttacacatcggccgcgctatattgaaccagcttcggtgcctgagtttaccggagaaacttcttcggccaccgaagccgaaaaaccagctgagccaaccatgctgccagaagtcgcagaaacggccgaagtgccaacaaagatagaattggaacaatcaaagattttgttatcagaaacgaaagagaaggccgaagcgccgtccacagaaaaaatggaagaggtaaaagaagcaactgagggatccaaaacatcagaagttttgagtcctgcagtaaaaaatcaaaaagtgccagcagtgactccaaaaagaaagagaatggccaatgtgctagatgtactggaaacgatcaaatcttcaagcacacctccgaagagggttgctgtcatttctgaaacaacaactgaaatttctggttctaaagctcccgggcaagagactgaagccgaagctgggccctcagagcctacaaagataaaatccttagaaagtgaggcagaaaaaataacaaagccaacttttgttgaagaaaccggtgtcattgcccccgaagcatcccccaaagttcgtgattatattcttcgtcatgcttcggggaaaaaactatcagaaaaagaagagcaagaggcccagcactacgcccaaaaactgaaatatccaaagggggcgttaatattcaatggcagtggagaagaagacttcttgtattgtcttcccgacagcaaggaaatttctgtctgccgggagatgagcaggagcttcggattcccaactttagaagacgggctctcgatgctgtcgaagaacgatctggccgacagcctagcttacaatagcttaaaggtgcgacaaatgaaatccttgtattttttgttgagtccaaaatttttcgtttgtttaaacctattgacgcacacatatttctctttgcagggcctgatacttagcaatgcccttagggcacagaaagatgctgaagacgaagggtgttctatagccctgagcaaccttcgttccgaagttattgaactgaggaacgaaggtcttgaaaaagataaaatattacactcattgataaataaaataaaggaagacgaagttgcttttacaggtcaagttgaagctcagaagcgggaaattgaagatcttcggaaacaactggccagagccaaggaagaacgcatacttgaagaaacaaagcgagaactcagcgaccaatgtgctgatcacctagaaataactgttgaagagcttcgttcgtccagaaagagatgctataacaaatctatagagtgcgttaagaagttaaaagctagcttcgccagggttggcgccttctcaagcgaagaaaactttacgagaggcaatcccgaaggtcccatcgagtggatcgaccacgaagctgaggccttcgaagaaattttaaatagccgaggagatatatgtgccttctctggtgccagagggattgccaccatcttagagaagaagggctgcgaacatgtaaaaattttagcacagtccgaggctgctttgtcctttgaagatgcgagagatccttcggccgaagctagtataattggtggaaaattttttaccgatatctgggataatggtggccgagaaatggccggagaaattattcgaagaagtgaaaagggcattcacgatgctagagaagtagctgaggctgctgaaaaaagcgcagaggccgaaggtcaattaggtattaactaatagtttttattgtgttgtaatctttagcctttaagatttgtttgcgatttgtaatagcaatgtagccgtatcctgtcttacttcagatcctgctaaaacgtcttcgggccctcagccgaaaggagacgacgaaattaaaaagatggctgaagatattatggacgaagtcgtcaaacggctcctgaatgaggctgcagaagtcgttttgagagaagattaaatatttttgtgaaaacttctgaaatgtaatatactgtaacattttgtaactgcaaatgtaatatacctatttttgttagtcaattctttacgatgcatgaaactttacacgtaccgcttttgagtctttgacgaaaaaacaccttcccttcttttcatgcttcgtgaagaagaatttttcattgtcacaacaatatccaatgttctgatgaataatatccaggcttcgtaaaaatattttccgaagctacccttccgaagatcaatgatgtatctttttgtgactgatttctctcttttttcaaagcgttcttccgtagattgataatgtgtccacctcttgtgtcatgtgcaaaatgatgtatgatgcttatgctatgcgaaatgatgcgatgatgttatgttatgtgagatgatgtttactccgaagatacatacgcatccctgcaataaaacacaatcttttataagcctcccttaggagcttcttcgccttttacttcagcggaatcagcgtttatttttcgctgcaagcctcccttaggagcttcttcgccttttactttcagcggtattcgcgttgacttttcgcgcttcgccttttacttaggcggtatcagcgttgacttttcgctgtatgctctgcattccctttggaacgactttggagcagaaaacttacactgcgctccctttggaacgacttttttgtgacttcggtaaacttactctgcgttccttagaacgactttttgttgcttcgaagaattttcgataggtcgaaggtcgtctttgttatcacaagtctttgaattttaatcaatataagcctgtgaagaaaatatattttccttgtaggaatcaacgaaactaattacatgaaacctaaacaatgtcctttattacagaaaataaaactgaatgaaaaagattgctattaaggtaggatatttgtcaatagatgtgctttgactctggcacagtgctattgactgtacgagcttcggactgctctctgaagtccctctggtgtggagcatactggctcccttctggctgctggccttgttgcaacggaggtggaggcggaggctgttgccaggaagcttgaggctgacttgccgaagcaacagaaactgcaggatgattgcccacatattctgggatgtagggcgaatgatacgaagctgtatgcatgacctgcttcggctgagcttgttgtgctgctgcttcagctatttccttttgcttctgaatagtaacatggcacatcctggtagtatggcctttgttctcaccgcagaataagcaaaagattcttcttggttgatcgccaaatcttcctccaaagcccctggcgcctctgcctcttggagctggtggtcggaaggagctttgctgttgccccgaagcctgtgaggaacattgtggcctttgctgttggcttcctctatcatcattttgtgtagagttatgaattgatctcacgtgcctcgggtagaacctccctccgaagcccctggtcatttcagaaaacctgaaagcctcctcccttctttggcgaaaatcattatcggcccgaatgtactcgtccatcttctggagcagcttctccaaagtttgaggaggcttccgagcgaagtactgagctgacggtcctggtcgaagtcccttgatcatggcctcaatgacaatttcattgggcaccgttggtgcctgtgccctcaaacgcaagaaccttcggacatacgcctgaaggtattcttcgtgatcttgggtgcactggaacagagcctgagcagtgaccggcttcgtctgaaatccttggaagctagttaacaacaaatccttcagcttctgccatgaagtgatcgttcctggtcgaagggaggaataccaggtttgagcaacactcctgacagccataacgaaagatttggccatgactgaagcattgccaccatacgaagatactgttgcttcgtagctcatcaaaaactgcttcgggtctgagtggccatcgaatacgggaagctggggcggcttgtaggacggaggccaaggtgtagcctgcagctcagcggacagaggagaagcatcatcaaaaacgaaattcccatgatggaaattgtcataccagtcatcttcgttgggaaaaccctcctgatgaagatcttggtgttgaggccttcggtgctgctcatcctgggcaagatgacgaacttcttcagaggcttcgtctatctgtctctgcaattcagctagcctggccatcttttctttcttcctctgtacttgttgatgaagcatctccatatctctgatttcttgatctatctcgtcctctggtggtgtcgggcttacagccttccttttctggcttcgggcctcccgcagggagactgtctcctgattgtggtccaatggttgcagagctgcagccccagtcgctgaagccttcttcggcgccataacgaaagtttatgatcgccgaaggtgttcaaaaaactcagagtggaagtgagttcaccggaggtgggcgccaatgttggggacttgttctcaagtgctatgagttaagaacaagacaacatagaaaatgttaatcgttaaggtccttcgtcctccgaagcattatttcccttaggatataatggtttacggacgaaggttatgaaggacgtaccttcataaattcattaaacaatgacgaaggatgaaatataaagaatataaaagacaacatggacaattatatattattattaggtataaacagaaatatcgttgaattacaagtgtaccttcaatcggaatgaaatgacagtacaagcgtgacgcaaaaagcgaatgccaagtcagcgtgaacagtacgggagtactgttcacctatttataggcacgggacgcagcccgtgcaaaattacattaatgccctttacattagataataatcctatagtaatctgtcgaggtctaaatagccttttcatctttaagtcggtttcaactgctgatgtctcgccagaagctttcctgtttacacctttggcgcttcaccaaccttcgtattattctggtctactgtgatgctcccgcgagtccgaaagataccctgttcccacattattatccagaaacacttattaaatcctgtttttgaggacccttaggatgccggaaggtccccaacatctaccttgctgatagcaaagataaagagatttacagaatctatactttgactttccaagtgtgaaacaaaactgatgtatcacaatttgctcagatatggaaatctttaagtctctgtaccaggaattcaggatcttgcataaaatggaaatggaacacagttcccatgaactacatttcttcataaattcctttttgtgtggtgtgaatatccacagtcatccttgctagtgtaatacaaaagggctagtgtcacaatttagtattgtttgttttttactgtgtgtttcacagtatctgattcgaataagatgtattttggactaatagagtaaacttttgacttagtgggtttccagagttctgtattttgaagattgattggaataagattagtgtgaatgttgttctctaatagcactacaccatcaggagccccaatcattcatatttgatatggcgatgtagaaattttcttttggggacatttaatgtttagtcctgccatattggtacctagcaagagatggttttagttccaacctttggccctatatctattataagtagagtacttggagtaggtgacatgacttcagtccctttcaaaggcctcaaagtctgaacctaatatcatattcttgtttgaatctgcacacattttgcactagctcattaatattttgttgacttttgcttctccttttttacattcttccttgtaaacccaaaaaaattgactgcattttctttgttaaccgcttaattatgacgaagagcataatatatttcattctcactttactgctgggaagtccttaataatccagaaaaaatgtggatttaaacgcttgtcttgtgttataatgttgcttgatatctataatatgttggcctacatgaccgaactttatcatattagatagttgtagtacataataaatagttaatatcttcaattgatatttggctacggatctaagtctggttgtaaattgaatgttaaaccagaacaaagttcccaagtaggaatttcgtatagctgcaaattggaagactttactaccattttacagctagaaggtgatgaaaaacaaaagctgcaaaaaaatgtggttgcatggctaacatatacctggttgatgctatttcagtatttctagttgtgaatctatttagtggctgaaaacagttgaccattctaccagtatttactataacataaaaacataagaggccctgggaacagctggtgcctgtcttaaccattctgtttggtagtcatgggacctaacacattttccgtttcaccttttgtgcag

SEQ ID NO: 533 - DNA, 2849 bp, Zea mays
  Intron number 3 from transcript GRMZM2G122064_T01 (locus G RMZM2G122064) derived from phytozome v7.0 (chr-ID 1; pos 2 07599896 to 207602744 reverse strand)
ataagggctgaagtttggccatttctgcttggagtgtaagacgattttcctattttctttatgtattaaatttcacatagcaattatattgttacgtagtcaaacttgaagattcgaccaaaatgttcttgtgaagtactatggtgcatatgtgctagtagttatttaaaacctacaaatgtggtctcatgtgataatttcccccatgagtagaaatatattactcctataattttatgaaaagttgaaaatagggggctatggaatttagcggtggcttgctccaaccgctatgacagctagagcggtgctacagcagccattggctgataagccatttagcgtcttgagaaaagacatgcaatttataggtcagaacagccattattccagcagaaatacaaatggttgctcacataacataagagagtaggtgaaaaataagatatatagcataagtatttgtcaagcagcccaatacataagcaaacaccaacaagacaattaaatgctagtgcaagttcttaacttaatggaacatgtacaacctgttcagcgctgctgaataaatagcctgctaagctgtttagtgctgctatggcctgatataggaccgatagtggccatatcgcagacaagaggaaagatgtagatagatagatagatagagggagggagatgtctctagctgctatagcggcgctatagcctgctgttctcaacattaattttatgcaatggagggaaaaaaatttctggtgacctagattgcactgctttgtcatgacattatttacccaaattaatcttttcatcataaggtctctgtggcaggagactctagagtccaaaggttttatacggtagaactaaaactggatatatgagatgtgactttggcacaactagacatgaggaagtagatgttagtttggaaggtcaagtagtgtccaggaaggatatttttcaatatttaggatcattactacagagaaacaaggatattgatgaagatgttagtcacttagtcatataaccaaagcagtgtggattaagtggcatcaagcatctagcattctatgtgacaagagggtaccttagaagctaaaagggcaatttttataggacgacgattagacctgctatgttgtatgtgtagaatgttggtctataaaaagacgacatgtacaataggtaaatgttgcggaaatgcatatggtgtgttggatttggggccatacaagaagggatcaagtccagaacggcgatatacatgataggctaggggtaacactaattgaagaaaagcttgtccaacactagttgagatgatttgtacatatccaacagagacttccagggacactagtgcgcagtgggatcctgagacgcgatagaaatgaaaacagaggcccgagaagactgaagttgacatgagaaaaagcattaaaaggagacttaggatggaatatattggcaaacgggcctctagttgagttggttagataactctagtagcacttctcaggtcctgtgttcgactcctagtggaagcgaattttaggttgtggttagaaaaggtaactcgctggttcccctagttgtgtgcacacgagacagactgatctatagactatagggggtggatcctcgtgtagggcctaggaggctcaaaccacgggtacagatctgatctatagggggcggaccctcatgctgcactgggggtggggggggggttgtgacctttcttggccggttcgagcttcttcttaatacaatattgtgggggcagtctttccccaccaaccgcatttttgaggatggaatatatccaaacacttgaatgggagtgcgtggaaacagctatccatgacttgtggtttctgttgggtctcaactcgagcctactccgacttacttgggactaaaaggttttgttgttgttgtatgattttttctatcctgttttgacatacaagacatctaatcctgcaccccctcgtttaaacttgctctatctacgacctccgcgagttaattttacatttccttttattaacttgtctagtaatgtatttcatctccattcctagacaaatatgccttatgaacagaaatggagggagcacttactgaaaaattaaaaaaaaacatgccaaaatttgggagtttgtgaaacctcgttattttaaaaacgctgctcaactggatcagcagaaacccaaaacacgccaaaagctaaatgcatttcctctcataggtcaacagttgtccaaaaaatatcagcattggatttgccaagcgtcatctgaaatgtgactgatcaatgtgtcatactagcagtgatatgtgtccctaggcttcacatggaatcctaatgtttgatgatattctttttaatttatgcctcttgggtactatggtagttttttcttctattattattgggcctccctagtgttattttgtaaagctgcttgtttttcctaagccacatctttgggccaatcaatcgaaatcagtagcatctgtgcatctatctcagatagactgaaagccaagaaaagcgcattatttacctgttcggcacttcggctgcactaaaatggctgccggcagcagctgcacctgctgttcggctagcttattgctagaagcattagctgcagcatagccactgaaacaagcaggcgaactactcaatatgtttaaaaaagtaaatgtaacttacatcaagaaaaatctgtttaatttagtttattgaggcttagccttttgttattagatacctatcatatttaattgcctcaagtcgacagactgaccaattcatattatatacagct

SEQ ID NO: 534 - DNA, 1589 bp, Zea mays
  Intron number 2 from transcript GRMZM2G000874_T01 (locus G RMZM2G000874) derived from phytozome v7.0 (chr-ID 7; pos 1 16929 to 118517 reverse strand)
agaaactgcaccaaacatcaggtattttatcattttggcaatcgagtgtgtttcatggtagaaccatttttatgttcattactagagtgtgggcttttatcctttgctgtctccaaggaaacatggatgaaattgctacgcctcacattgtattttgacaatctacaagattcatgagctccacagaaaactgacaatctcatccattatcccttttctattaacaaagttgtttgctcaatctatatttgtgtgatttatagcctcacgtcggaagttatatatgtcattcaaaatttgacatctatagatatttattcataacttttaatcaaagtataaggatgaaagaagattttaaaatgtgatgtatatgaactaaataaccttagcttatgactgcaataattggacgcccggtgggaaatcctctcagtgccagatgtgatggaccatcctgccggtgtcacctctagccttcgcttggtaattgtaattcggcagcgactgaaaccatggctcaattgcagggccgacatgttgtgttgggcgcctttccatggttgcagggccggcacggatgtatggttgtcgtgctgagtgagcaggccggaagatgctcttttagtactttgtctgatcaagtccatttagattttccctatgtcaaactattttacctttgactatcaatttttaaacttgacaggctgatgacacaattcacattattactaggtttattatgaaaaagacagcatattcttgacgatattgctatatgaagtgtcatactaagagactactgatcggatggacgagtgtattattttagtagttagtggtgcttgtttagaactaagattgcaaatacactgagatgatttgggtattataatacaagccaagctgcaaatatggaaccatgcaacttccacaattagtcaagttatctttgggtcctgcttttaattcttgggattccaaactcatgtttggtcaagacaaggacattacgacattgtatattctacatacttttattctctctaataatatgttattatgtaaatgttataatttcaagctgaggactgattatgctctggtttactgagttatgaattcccactttgtcatgaaaattacttcggttttaccatggtcagaactgtatgtaaggttgactccaatgttgagcaaaaagttggttatatactctgacttcataattagagttccatattgaaaaatgcatatagtaaaataaaaatgttgtccacattttaattctccagtctctcaaccatgcaaaattgaatgtaatcttttacaactctttgtttgtacacatcattctttatgcatgttttgagttatgttgaaattgaccactatctttggctttttgcatagtgagaataaaacaaatagtagtgtctatatgtctgttctttactatcatgtaagctgtatatacaccaaaccaatgtatgatgcacctaaggcttgggtttttactttttgagtattaatccatgtaaacaatgaactaaaacccttcttacctgtcatgttttgcaggtgca

SEQ ID NO: 535 - DNA, 1238 bp, Zea mays
  Intron number 3 from transcript GRMZM2G061885_T01 (locus G RMZM2G061885) derived from phytozome v7.0 (chr-ID 2; pos 1 84694138 to 184695375 reverse strand)
ttgccgttgctaggtaatttaaacagagtttgcaacttttagtaggtattttcatgttatcagggttgaagtttactaggtgatgcctgctgagataatattgtttcacaatgctgttctttataagattgcatccgaaatgtttcgttctttatctatagtagttagcatatatcagactatagtttacatattacttttgttaatgtcatttatctatttgcttactcagtaccattctaaattgtgcttatcgtttctggacaatatctgtatcttatttactatagctctggcattctgattgctgctgttaccttacatataattagcatctaaccatggtgattgagtttatgcaagatcaaatgttttgtttgaattgactataattactaaaatctgctctgtgatgaagtttgtggggatcgagtggtacacaatctagcttattggggtcattgcataaaatcattctatattagctgatattttttctctttaatattctatgattttttgaaatgcatgttgttttccatttttccatgtatgcaactattctggttcaggtataaggtaattgattcatttattaaagcaaaagggaataacaaaagaatggaatattattctgaagttgtaaaaatcatatattctcgaaaaagaaaagaagcgttaaacatcatattatgaatggatggagtaacttctgaattcaaggtatcacatcaataatgcaatcattcattccctgaaacaagcacaattactatcgcaagtctaggcatttctcagtgacctatcgttgatttcctaaattgggcagtaatacgttcacatgggtaaacttgagctatgctggtcctgttatccatcctgaaaggctttgttgttgttgttgttggtcctgttatccatcctgaaatggtacagaagttatccttttgtgctttgttatcccacgagtcataatgtatgacaatatgacatggcatgatgacaaagttatccatatgtgatcttaaatgaacccagacattgtttagcatgtggttgtccaggggtaccaatgtaaatgtttggattgtgttttctgatttcatttccaacatgaacttgagctgctggatacctttgtatcttgattttcttatatttagttgcacaaagaaaattgctcttaaaattagttcccaactaaattttgttgtttatgtacagagctatcgctcctg

SEQ ID NO: 536 - DNA, 2657 bp, Zea mays
  Intron number 2 from transcript GRMZM2G023275_T01 (locus G RMZM2G023275) derived from phytozome v7.0 (chr-ID 10; pos 71277465 to 71280121 reverse strand)
cataactcctaactactattgtatcaggtaattttctacataggtattagtttcaagaatgaattccatagagaaaatgagtcacaaacatatttttcaacgaaagacctgagaattaactctgtcaaacatattaagaacataactataagttcggttttcagatcagaacataaaaagttatgtccaaatatcctatagaatggttcgaacttgtcttggtaattgttccacttccataaaaaatgaaatccatatatattttcttagtttggtggaaattcatggaacttcttgtcatttgcatagtacacgattttgtgatatgtaattttaattcatagtaataaacataaatgttcttactaatacaaatcacttttatatcttaataaacttttggtgttttagtgttagggctttaacactttggctgtaatcaagtactacaaagataggatgtggggactgtaagggacaacaaatacacatttttctataattttggttaatggtgataagaaattcttatcatacattaaccttgtgctatctgctatggtacacggggacaactacaaatagaaatggagtgggagttttgatcgataaaattctcaagaatagggtggtggatatgagaaggtgataaaattctcaagtttgtcaggggttatttggtcttgaacgtaattagcatgtatgtggtatgcccccaaagcaggtcacaatgagagtgctaaaagtcttttctaggaagacttaaatggcatggttagagctatatctattagtgataagcttttcataggagatctcaatttacatgtaggtacaacaagtgcaggtttagaggcggtttatgaaggttttgtgtatggtagtaggaaacatgagggagaggaagtcttggactttgcaatagcttttggcatattgatagccaacactttctctttagaaagagaatcccatttagtgacctattgtagtagccaacactctagttagattgactttgtccttacaagaagagaggataaataagcatgtttggattgcaaggtgatacccgaggagtgcgttgtctctcaacataagcttgtggtggcggtctttcgtttccaggtgcgtgtccgtagggataaactagccaacattgcgagaacaaagtggtggatactaaaaggggatactatagaagtcttcaagaaaaggaccatcaaagatggcacttggaaggaagaagttgacacaaacaatatgtgggagaagatagcaacttgcattcggaaggtggtattagagttagagttgtgtggagcaaccaaagggagtggagaccaagctaaagatactttgtggtggaacgagaaagtacaaagagcaattaaggagaacaaagaatgctacgaacatttataccatgacaagaatgtggacaacatagaaaagtacaaggtagcaaagaagacaacaaagtgagttgtaattgtggcaaagggtaggacatacgagaatctctaccaacgtttgagtacgaaggaatgagataaagacataaataggatggttggtccgtgggaggaagacaagagactttaaccaagttaagtgcattaagactgtctccggcagctatcgtatctcatcccctatttcaaatttcactatgtaaacagtgtaatctacagtgcaaattccctattttacacgacctgttgcggacagcataaggatgaaacatagcatctcttggtgaaggaggatcagatcaaacatagatgcaataatatcttgacaaattattcaatgggcagaacgagaacaccacctttcggttagatgactgttttcatgacacaatagacactttatgtgtaggatccaagaatctaaagttagagatgttagagtggacgcactgaccaaatcaatccaaaagcttatacacgcttaacactaatgaccagccacaaagaaccggcacttctcgggcacccaagttttctaaattctctcccaagggctgaaggcaactgtaccttgaagtaaattcatgtaagcagatttgggaatcctccacatcaggttggagaaccacttctgacaagatatcccacagatccaaaaaaccaaagactagtgagcataattacagttaccatcaagcgaagggtattttagaacaagaaagtcttcaaaaatagattttgataattgagttacttgcattatattgtcaggtgctgcaaaactaacaaccataaagtattttgaatatataattagttgacacaacttttgtacactgaacatgcatataacttgactaattactgaccaacattcgtaaagtttgtcttagaacaaaataatgcctttacgttgatgagcaaaagaagtattaggtaagtgttttgaatgaagatggattgaattttttttcaaaaaaaatcattactccatttagagaaggttacaaattttgtattatagttttacatgtcccgcatattatttattttaaatatctggatggttgtacttccacgtactaaatacagtacaatttgtttcagtttctaaaactattcttgatgatatttttcctttttgcagatttgttcatcttagaagctttgttgcacttactc

SEQ ID NO: 537 - DNA, 749 bp, Zea mays
  Intron number 5 from transcript GRMZM2G094935_T01 (locus G RMZM2G094935) derived from phytozome v7.0 (chr-ID 6; pos 1 60866836 to 160867584 reverse strand)
atgtatgccctcaacctacatctgtgattctgtgcatgtttaaaatccttcttttttggtgttttagtcttgaataatgcctattgtgtgtctgtttttcatacaatcgattgctttagaccatgtttgaatgcactagagctaacagttagctactaaaattagctgaagacatccaaatagttaagctaatagttcagctactttgagtaaattagctaatagtttacttagttatttgttagctagctaatttcactagcaattttttagccaactaactattagctctagtgcattcaaacacccccttagtttcatgtaggaattgggcaaaattcaaaagtacaattatgagcttaaccatggaatgtgatcttagacatatgtgcataatctagaagtcaataaaccagcataatctaggtaaattcaaaatatgttgaaaaggcatatgggcataatctaggttatgtcctgtgtcttgaatttaggtatttccagtagtgctcttagcttatacctatgtgctgctgcattcaatcttgatactgatttgtgcaactaaactcagtagccttttttagcaactcaaatgtatgtactatactatgttaatattacatgaggttatgaattttttgcctgaggctgtatgctctttgatgcatgcttgcatgtgagaagtttcttttctgaccatgaagtcatgacataatcttattcttgctggactcaaaaggaggcat

SEQ ID NO: 538 - DNA, 29386 bp, Zea mays
  Intron number 12 from transcript GRMZM2G424491_T01 (locus GRMZM2G424491) derived from phytozome v7.0 (chr-ID 2; pos 147271168 to 147300553)
gataaacccaatcaggtatctacttgttcttgaaatttgagtgttttactgcaaattaactggttagatcttgttccaactacccttctgcattttttgcttacagtcaaggttttaaaattaaagacatatgtcaagctttcatttaactttctgattatacactcccattaattgtttagcttagaaaaatttgtaggtcttggactttaggtacattgttatggattgtgatgggattggggaattggagagggggttgtagttgcaggaatgccggtcggggcctccgcccacagccgggcaagaagaaggcttgcttctaattcttgcttacccttaactgatacaatggtgtctcttttatagagacgattgacttatctctatccaactaacctaatctgatctaatccttatcccttccctaactaatctaattcttatcaaccaaatctgatctaatccttatctcttccctaactaatttgatccaaatcaaatctgatctaatctcgatattgttcatgcgctacagtaaccacgtgaacaatgcctccctaacactacaccccacctggacatgcagcttgacctcgagctacaacctatcgatgacgttaatgatgacttcgctagacacaaacctaacacctaaaaataagtcttttacatctcgacttattttattattccaaacctgaattagactgcgactctttactttttttgaccccttaagataagacaaacaccctctgcgcaatggacctgcacgtgcgctgccacctggatcccatggacgccatctggatgaaaggggagcacgtggatggccacatggaatgggtcgcaacaatgaccagcggaggcgccctcgtggtgatcgatagcggaatgtggtggtgctagccagtgtgccctcgccgatgacaaggaagggagtgccttccccaccgccgctgtcgtagagttggagttcgtcgtttgcgggatacacaccatgctcgcacttggagacagcgggccagcgcggttgctgatggccgtccgacagggtgaggtcttgctcaggtgtggcaaggtcgaccgccacaaaggctgcctcgagcatctgccggcgcacctcctgcagccgccgacacactaggaggccacgcgttgcagcctacagccgcaccgccgtagacaccttttaggaactcgcccacgcaatcgccttcctctctgtgagctgtggcaaggttgctgggatgactaggcgccgccgcttgaagatgggcgttgtccttgccggcgtgttaggaggcaatgtgttgccgcctatagctgcgccgtcgatgcttagatgccatccacgcccctgtagaagacgtcatcgcaatgctgatgtggcggcacaggcatgagggcggtgaaggagagttgccatcgtgaattccggcgccgtcgttgatgagagggtgtacgatggaattggcgatggtgatggtgacatgtagatgaggtaaaggggcagccccgttggtgcgggggcacctacaccgattgggcgatgtgacgacgtcagtggcagcaagggtggtaccgtggtcgctggtgggtgcgtgatcgccgacggctgtggcacagactggtgttgggagggacacgccatgcgcaccatagagcgcacgaggatggcgaagttgttggtgatggcggtaagactggcgttgagcttggcgttgaggccctcgagggtcatcggagtcggatcgcctgacatatccgataccagattgttacggactgcgacgggattgggaaattggagagagttgtagttgcaggaacacggccgggcaagaaggcttgcttctaattcttacttacccttaaccgatacaatggtgtctcttttatagagatgactgacttatctctattcaacttgttagataaccgtccttgtaatgggcctggcccaatcactctggtctattaatacactgtccaacccattctagggttagggtttcactattctacatggtatcgaagccttcctctctccctccctttctcacgagccgccgccaccatcccccctccaaggcgccgccggccacctccctggcccagccgccgccccctcctccccctccccttcccttagcgcctccggccccgtccttcctgcgccaccatggcgccgcccctcactacaggaatcctaacgattcccgtcgactaaactaattcccgtcggcctcggccgaggccgacgggaataaggtaactcccgtcggctataagacgaccgacgacaataactttaatccccgtcgactgacgtcctagccgacggggattaactaactcccgtcggttagcctacgagccgacggggattcgttaactcccatcggttagcctatgagccgacaaggattcgttaactcccgtcggtcagtgacccaggccgacgggagttaggctatttacagccgcggtgaactcccgctcggctcattttcctgctctccgaaccgccgcgcgccgctgtctctcccctgcgccgccgcccctccctacgccggcgcccctcccctacgccggcgccccacggccgcctcgcagccccacggccgccgccggcccacagtcgccccaccgccacgcgcctccccgcgcccctacgccggcacccctctccaacgccgccactgccacgtcgccaccgccacaccacctcgtctctccaccgcagccgccgctgcactcgtcggtccaccagcgcctctctcctacatcacacgccgccgctgcactcgccggtccggccgccgccggcgcccacgaatccatttcgcgcaaggtcctccacgaagaacgtcatcgaggtataatactaaacctatgcaatgcaaatatgttagaagtgcttaatatgtatgttaatcagtttattttcgtcggttttttgtggccgacgggagttaacttttattcgattagagttagcttaaatataaattgtgtgccttgcaagtattaggttaaatataaattgtgtttattttagttaatgattttgattgtgaatgtcatgttatgtaagtattgtttctactacttgttgcaactacatatatttttagaaactatgtgtcacccgtttcaaaccgctatgcatcacatgtatgtattatacatgttttgtgtgacgtgtataaacatgaatgtcttacacacgctttttactcgtacacagccgtaataatgggtgatagacgtgattggatgtatgaaggtttcaaaaagggtgggtgtcacacaagtgaatggtttgccaaaactcagatgtttctggaccatgcagctgctttgtcacaaatagataatattaggtgtccatgcaataaatgtagaaatatgactagccacaccaagaggcaggtcacactacacctgtgctcacatggtttcgtgctagggtataaggtctggtatctccacgaggagtcacgccttgaacgagcaacagaagtagaagttgatgacagtgaagatgttgataggatgaaccagatgcttgaggatctacagcctgaactggccccagatcatcatgattcacctacaccggaggttcagaagttcttcgacctcaaagcgtcagaagagcctcttcacgggcacactgacgtgaccgtcctcgaattcgtgacccggctgatgtcaatcaagtccaagtttgcattctcaattaattgttacaagaagcttgtggatttgattagcgaggttcttcctacgggtcacaagatgcccaaagacatgtaccagtccaagaaattgcttgtggatttgattagccaggtaggcccgatggggattaattagtaactcctgtcggccaggtagggccgacggggattaattctttacccccgtcggttggcctggtcgacggcaattaacaataactcccgtcggtctatacgcggtcgacagggattacttattcccgtcagccgccgacgggaattagggtatccccgacatccgatggccatcgacttaagatcgacggggaattactaattcccgtcggtttagaggttattcccgtcggttttcagccgacggggattaactggattcctgtagtgcctccttcccctcaccggcggcgcggacgccgcgactactggcccggacgccggcaccggcgcggccctacccgcgggcgcagccgctctggcactcgtcctccccttcaccaccggcacagacgccgccacccccacgccgccgtcgctggagtggctgccggccagggcgccgctgtcgtcgcggccctgcccgcgggcgctgccgccggcctacgctctgtcaccgtctccctgccgccggtcgaccagcaccccctcaccagcgtcgttccccctgggccccgcaacgagcttgctgttggtgggccccccctacatctccggcctcgggcccctccccgccggctcccccgttgcgccgcaccaactacagcggccagtggcggagccaggatatctctaagtctagggccggatataacattaaaaaattatactgactaaaaaaataaccgtgcaagtgcatagataatgtcacatataaactttatttgaacacaataattataatttaacgtaaagttggcttaaacaagtacttaaataaattcatcaattttttgggttgctttcatcaacaatagaaatacttcatgaaattgaatggtattacgttattacaaacataattaaagaaaataaactacaaaattatttggaactgaactaaaacaacttgcagctgactacaacgagcatcctatgacatttggctattatggcttcacaagccgagcctaatcacaccaaaaaaactacacgacaattttagttaatttttttagcatgtaactacttaaactccatcccaactatgttgaacaaaaattgtctcttgtctggttcgatagactcaccgacgatgtatgaagatgttgcattcatcgcaaagcggtcgcagccggcacaactacttgagcattgcgctgtcgcgcaactcgcggacgagcatcacacatcgccacaggtcgcagtcgcttggcgtttacgcggccgaccagccacacatatcgctcgtcgggtcgtgccaccgtgccgctcgccagttcacgcttcacgcagctgcagccgcctaccgtgccgaaagcctaaaaccctagcacagccatggggccaccaatggcgcgtcggcctctgcttgtgttgtaaactgattttggtgctgtggaagtgtggcatgtccactgtagaggcatactgggtcgacgctagttcacgggctttattaataacctggctcaagagtagggcctaggccctagtggccataggcctacatcctcctctggcagcggcaacatgggtccccgctgggtttctctgcccacgcaaccgccacgtgggtcgacgccactgcccccacgccaacctcaccgtccagatggcaactgctcaacgtctcctcctcgggcaccctccagacgccccggcaaccccccgccaactcccgaggcacttcttgccactggactcgacgccgaccacatcgccgccctccacgcacaggccgccggtcttcacaacattcggtcccgcgtgtccatcgttctggaccggcatcctcacactacctattaggatatgtaaatcaggatcaattagagtgatcctgtagacaggctagttgctatgtatagcacccaggaatagcttccttgtataggtgatagccttctatttatgtaccttccatgtatgcctgattggctctatatatgaaaggctccccacccacattgggtgtgtggtgattctctcctttcctgtttattctacatggtatcagcttaaccgatccttcctccactccccaccgcaccctctgctgtgctgcccctctcacctaggtcaccatgtcgaccgactccgccaccagcttctcctccaacatcatgggctccttccctgcccctgctgtcctcgttgctccctgtgaaacaatcaatgtcaagaaccacatcccagtgatcctggagctgcagaggcccaacttcaaccagtgggaaccgttcttcacctctctctgtggaaattcggactcctttcccacatcatagaggaggctggttctgccgaccctacctggaacattgctgacgcctgcgttcgcagttggctccttgctctgttgggccagatgtcctcggcctggcgacggcgccaaatcagaccgcgcgtgccctctggctggccatcaggcgcctcttcgaggccaacaaggccccgcgcgccatcttcttgggccacgagttatactcgatgacccagggcgactcctccgtcaacgactatgcccagaaaatgaaggccaccgccgacgcgcttcgtgatgtcggtcgcatcatcaccgactcggagctcgtcctcaacttcctgcgtggcctcaaccctcgcttcgccagcaccgccgacaacatcgccgattcgcacccgctgccggacttcgccaccacccgcgagaagcttgtcctgaaggagctccgccttgccaacaaaggcactgtggcagcccagacggcgttccacgccgcatgcgacactggctgtcgtactgtctccagcatcaccggcggcggcttcaccggccaccagagcggctatggtggcggccctagcagcagcagcaacgacgggaagggtggtcgctggaagaagggcaagggcggcgcccgaaatctgctgcaccggcggcttcgtggctctgctacccgccctggactgctgggccgcaccagcagccatggcgtccaccagcgtggggcggccctggcgtgctcggggctcctcccctggcccaggctcacaccgccttcgcccccgctcaactctccagcgccacggactctgctccgcctcctcaacagcagcagggcggctgggatcaggcaggactcatcgctgccctgaaccaaatgtcgctttaggggttcgccccctgggtgctggacaccggtgccacctcccacatgtcgtcctcggatggtatactccaatcccgactcccccctcctgcttctggcattactgttggcaacagctgtaccatcccaatcacatgtcgtggcaaatccactctgtccactcccaattccacctttcgccttactgatgtcttgattgcacccgccattgtccgcaaccttctttcagttcgtcaattcactcgtgacaataattgttctattgaatttgacgcttttggtttttctgtcaaggaccaccagatggggcgtgtgattcttcgctgcaatagtgacaacgacctatacaccttcccttcaccatcggtgcaccactgcagcctcgccgttaccgccacgctttggcaccaccgcctcggtcaccccggatcctccagcctcgccaccctacaaagcatgtcgatcatttcatgtaataagagcccccctaccctttgccatgcatgtcagcttggcaagcacgtgcggctaccatttagtcattctacatctatgaccactgctccttttgatttagttcactgtgatgtgtggacgtcacctgtactgaggacttcaggatttaaatattatcttgtcctacttgatgatttttcatattactgttggtccttcccgctgcgacacaaatctgaagtacaccaccacatagtcgatttcatcgcttatgctcagacacagtttgccaccacacccaaatcatttcaagccgataatgggactgagtttgttaacactgccaccacctcatacctcgccagttgtggcatcttgctgcgcctctcgtgtccctacacctcaccacaaaatggcaaagctgaacgcatgcttcgcacaacaaacaacaccatccgcaccatgctcctccatgcgttcatgccgccatcctactgggctgaggccctcgccactgccacttttctcctgaataggcgtccttcctcctccatccaaaaccagataccttaccaactcctccacaaacgcctcctggactactcctcacttcgcattttcggatgcctttgctatccgaatctcaccgccacctctccccacaaactcgccccacgatcagcaccctgcgtcttcttaggctatccctcctcccacaagggatatcgctgccttgacatgtccacccgtcgcattatcatctctcgccatgtaatatttgatgagtccgtgttcccgttctcggcagcaccttcagtggcctccgtgccgtcctcacttgattatctgatgcagggactatcttcacagtcggcacctgcgagcactgcttgcctgcccgctgtacccacggctgccccgcccctggacgaatccccagacattcatgatctggccattctctagctgggcccccatgctgctcctacgggcgagcaccctcccaccgctccccctgcgggtgggtctttgctgggcggtcagcgcttcggcgcagtctacagccgacgcgcccggcctcctgcagagcaggctagcttcgtagaggcacctgcaacgcctcctgttgtgccaccggcaccccaggcgcctccagcaccagcagcagcgccacctgctgtgccagcagtagcagcaccagcgacacctgctgtgcaatcagtagcaccagatgctgcccctggtgccgcagctccggctcctcggcctgaatcgcgtcctgtgacccgatcccagaccggcacacttcgcaccgtccaccgctacggcttctctgcatccgccacttcgccccttccagcgaactaccgcagcgcgcttgccgatcccaattggcgcgctgcaatggcggaagagcacaaggcgctgattgacaatggtacttggcgccttgtgcctcgaccacctggtgcgaacatcgtcactggcaagtggctgttcaagcacaagttcaactctgatggctccctagcccggcataaggcgaggtgggttgttcgcggcttctcctagcaggccggcgtcgactacgacgagacgttcagcccggtcgtcaagccggccacgatccgcaccgtcctcagcatcgccgcgtcgcgggattggcccatctgccagctcgatgtgaagaatgcctttcttcacgaccaccttgaggagaccgtctactgccagcagccatctggcttcgtcgactctgctgcctctgaccacgtttgtttgctgcagaagtccttatatggactcaaacaggctccgcgagcctggaaccaacgcttctccacgttcatctgcagcatcggcttcaccgcctccaagacagacgcctccttgtttatctacaaggctggcgacgagctggcctaccttctctacgtcgacgacatcattgtcaccgcgtcgtcttcagccctactccagcatgtcatcgcacgcctccactcggagttcgccatgaccgacctcggtgatctacaccacttcctcggcatcacggtgactcgggacagcagcgggttgttcctttcacagcgacagtacgccttcgatcttctctagcgtgctggcatgtccgagtgccaccctactgccacccctgtggacgccagggccaagctgtctgccatagagggcactccagttcctgacccctcggagtacaggagcctcactggtgcactccagtacctcatcctaacgaggccggacctcgcctatgatgtacagcaggtctgcctcttcatgcatgaccctcgcgaaccgcaccttgcgctgatcaagcgtatcctgcggtacgtcaagggctccatgtcaactggtctgcagctgggctccggcaccatcgaccaactcactgcctactccgacgctgactgggccggttgccctgacacacgccgctccacctccggtttctgcgtctttctcggcgacaacttggtctcttggtcctccaagcgccagacgacggtgtctcgctccagcgccaaggctgagtatcgcactgtggctcacgctgtggctgagtgctgctggctgcgtcagctgctccaggagctgcacatctcgattttgcacgccacgatagtctactgcgacaatgtgagtgttgtctatatgaccgccaacctagtccatcatcgtcgcactaagcacatcgagattgacatccacttcgtccgtgagaaggtcgccctggggcagttccgagttcttcatgttccctccgcctaccagttcgtggatatgatgaccaagggtctacccgtccagctcttcactgatttcaggaccagtctgtgcgtccgtgagtctcccgctgcgactgcgggcggatattaggatatgtaaatcaggatcaattagagtgatcttgtagacaggctagttgctatgtatagcacccaggaatagcttccttgtataggtgatagccttctatttatgtaccttccatgtatgcctgattggctctatatatgaaaggctccccacccacattgggtgtgtggtgattctctcctttcatgtttattctacactaccctcgctggagagggcaggtcatcctcaccctgcggcgctacgccctcgacgaccatgcccttgacgacgtcgccaccccgctgtccccggcctggtccctgatggacaccgtggtgctctcatggctccacgaaactatcaccatcgagctctaggacatcatccgcgaccaggcgaacatgggccgtcaggcgtggctcgccctcgaggaacagttcctcgggaaccgagacgctcgagctcttcacctcgacacccagttccaccagttctcccaggggggatctcgacgtgggggagtactgtcggcagatgaagggcctggcggactccctccgtgatctcgccgagccggtggcggatcgcaccttggtgctgaacctcctgcggggcctcagcccccgctacggtcacttgaaggctctcatcaagcggaccgtgcctttccccaccttccatgcggtgtggaatgagcttctcctcgaggagctcaccatggcgcacgaggctcacacgccggcctcggcactctacagtgccaacaccggtgcccaggcgtcttccgggggacatgccccccccgcacctcgtctgtcgggccccccactcgccctcccaccgtgaccccccgtcgcgcttccaccaccgacggaggccgtcgccgtcgccctcacaagggcggtcgtgggggtggcagttcctcgtgcggaggtaccaccggccggggcgacgaccaacactggccatcattctacaacccctagaccggcaccatctccatgtggtcgggtccgactcccgatgcctctcgccctccggctccggcgtcggccctcctgaccacgccacctgcctacggcgtgccaccatatggtgcgccaccgacgaccccgacaccacctccgctctagcctatggggccatccaccacaacaccatgctccccgtttgtcggaggctggacgccaacgccctcgccgccgcctacagcaccatggcgttggccccaccatcctctgactgggtcatcgactccggtgcatcctatcacaccactcccaccacaggcatgctctctcactcccatccacctccttccacacaccctacctctatcgtcgttggcaacgggtccactcttccagtcaccttagtaggtgcctcggttctccccggaccgttctacctcaacgacgttctcgtagcccgtcacatcgctcacaatctcctttctgtccgtcggttcaccactgacaattcttgttccattgagtgaccctactggtttttctgtgaaggatctggccaccaggaccccactcgcccgatgtgacagcgtcgggcccctctacacactccggtcgtcgtccaccgtcgtgtctccacctcccgtcctggtctccaccgccacctccaccacctggcatcgtcgtctcgaccacctaggacctgacgtcataaccaagctttccagcactttagattcttcttgtaacaggggacattttgtgggcctctgtcatgcttgtcagcttggtggccatacccatctcccttttcctacatcttctagggctgcacaggcttttgacctggttcattgtgacctctggacctcccctgtactcagtctgtctggattcaaatactatttggtgattttggacgattttcccattttctatggacttttcctctccgattgaaatctgacacgttttccacccttactcaattcttcgcctgggtctccacccagttccgtcgccccatccgtgcactgcagtgtgacaatggccgcgagtttgacaaccacgcctctcggtcgttcttcctcgccagtggtgttcagttgcgtctctcgtgcccccctacacctctgcccagaacggttgggccgagcacatgattcgcaccaccaccaacacgatccgctgccttctcttccaggcgtctcttcctgcccgctactgggcagaggcccttcacacagccacccacctcctcaaccgcctcccctcgaaggcggtgagccaccccaccccctatttcgccatgtacggcaccgcaccttcctacgcccacctccacatatttggttgtgcctgctatcccaacacttccgctactgctcctcataagctgtctccacgctccactcgctgcctcttccttggctactcccctgatcacaagggggatcgttgtcttgagctcacttccaatcgcatcatcatctctcgtcacgtcgtcttcgacgaagatgtgtttccccttgctgcctccttcctacccaccgacctcaactccctgcttgagtccgatctgagtacccatccccccgggcacctcgcctcgcaacgttgcccgcgccacgcgcggcttccccgtcttcgcgtgtggctccatcggccttgacgcccccgctcgcaattcttcccacaccatgtgcggccacgtcgcctgcgcctccacctcgcacggtcccgttgaccctgcctgcgcctcgtgcggccccgttgactccgtccgcgccacgttcagccctgtcgaccccgcctgcgccacgcgcgtccacgccgactccggccccgtcgacgcgcgggaatcgcttcgccgaccccgccctcgtctaccactgccgcgggcacgcgcctccctcagcgcccgcggacccggcccctcgataagcgcggccagattcgccgatcccgtcgtcgtttatcattgtcgcgggcctgccatgccagcggcccccgcgccgtcggtgtaccacccggtcgccattcaccgcgaccccggacacgttcaccccatggtgactcgccgcagcgccggtgttcttcggccagtcgaccggctgattctggctgctgacacaaccactgctccaccggacgcctccccggtcccttcctccgttcgcaccgtgctcgccgaccctcactggtgtcaggccatggaggagtatgcggccctgctggccaaccacacctgggacctggtgccacatccacccggcaccaatgtggtcactggaaagtggctcttccgtcacaaactgacttcggtcggctccctcgaccgctacaaggctcgctgggtcctccggagcttcactcagcgcctcggcgtggactacgatgagaccttcagccccgttgtcggcgtttcgaacccggggggtccctggaccgacgagtaaattgtcgccgcgtgccccagcacagatgggtcggcgcgagacggggcgcgaaggggggaagaggagccggagggagacaggcgtgagaggtgaaacccgcggccttcgtgattgtcccgcgcccaggtcgggtgcgcttgcagtagggggttacaagcgtccacgcgggagggagcgagcggcctcacgcgagcgccgtcccgtccttccccgcgcggccaaccttctgtaagagggccctgaaccttccttttataggcgtaaggaaaggatccaggtgtacaatggggggtgtagcagtgtgctaatgtgtctagcggaggagagctagtgccctaagtacatgccatcgtggcagccggagaggttttggcacccggttcgtgtggtgtcgtggccatcggaggagcgctggagcctggcggaaggacagctgtcggggctgtcgagtccttactgacgtcttcttgcttccgtaagggggctgagagccgccgtcgtcatagagcgtgcggggcgccatcattacttgtttagcggagcgagcccgatgggacgccggtcttgttccccgtagcccgagtcagcttggggtagggtaatgatggcgactcccatgatgtggtcggtccgagccctgggttgggcgaggtggaggctcctccgaggtcgaggtcgagtctgtcttccgaggccgaggtcgagtccgagcccctgggtcgggcgaggcggagaccgtcggctgaggccagggccgagtccgagccctggggtcgggcgatgcggagttcgtcgtcttccggggctgagcccgagttcgagccctggggtcgggcgaagcggagttcgtcgtcttccggggctgagcccgagtccgagccctggggtcgggcgaagcggagtccgtcgtcttccggggctgagcccgagtccgagccctggggtcgggcggagcggagtttgtcgtcttccggggctgagcccgagtctgagccctggggtcgggcgaagcggagttcgtcgtcttccggggctgagcccgagtccgagccctggggtcgggcgaagcggagtttcctatgacgcctgaagctggacttggctgctgtcagccccactctgtcgagtggcacagcagtcggagcgacgcaggcgacgctgtcctcttgtcagacctgtcagtggagcggcgaagtgactacggtcacttcggctctgtcaactggagggcgcgcgtcaggataaaggtgtcaggccacctttacattaaatgtccctgcgatttggtcggttggcgtggtgatttggccaaggttgcttcttggtgaagactgggcctcgggcgagccgaaggtgtgtgttgctggaggggtcctcgggcgagacgtagatcctccgaggtcggctgcccttgcccgaggctgggctcgggcgacgcgtgatcgcgtccctcgaatggaccgatccttgacttagtcgcacccatcaggcctttgcagctttgtgctgatgggggttaccagctgagatttaggagccttgagggtacccctaattatggtccccgacagtagcccccgagcctcgaagggagtgttaatactcgcttggaggcttttgtcgcacttttttgcaaggggaccagcctttcttggttgcgttttgttccggtgggtgcgcgcgagcgcacccgccgggtgtagcccccgaggcctcggaggagtggtttgactccttcgaggtcttagtgcgtttcgcaacacttcggctggtctggttgttccctcatgcgagctggccgtagcccgggtgcacggtcgggtcccaagttctcgggctggtatgttgacgatgtcaacggtttggttggagccgggtttgcgagagcagcccccgagcctctgcacagggcgagaggacggtcaaggacagactcgacttttttacatacgcccctgcgtcgcctttccgcaaggaggaggggggaaaagcgccatgttgcccttggagggcgccgaacatggtgtctccagtgagctgctgacgggtaatccgagtggacgctcgtgccccatttgttaggggtcggctagaggcccggaggcgcgctccaaaagtacctgcgggtgatctgccggacccggtccctttttgacggggtccgagggctcgatgcctccctctgatggaattccgttacaagatcgttcccgctggtctcggaaatgtcctagggtacctcgggagcgtagcccgagccttggttatgtaccgaacgtacccagggtcatccctcgctctgtgtctgaggcggctgtgaacccttcgtgggccagcctacgaacccctgatcagtagttggcgcggagcccgagtggcctgaggcggccgttgaacccttccgaggggccgaccctcgaacctctgaccagtaatgggcgcggagcccgagcgctctgaggcggctgttgaacccctccgaggggccagccttcgaacctctgatcagtaggggggctcggggcccgtttccttcgcggggaaggatccctttcggggtatccccctttcccggtccctgtggtaagagagagaaagaggaaaagggaaagaatacgaaatcgagataacgtggcgcaccttttttgacgcggccattatggcgaaggcgaagtgtcgctcggttctcctgccaaaggcgccgcctgtcccgccgcggagttaatgcgacggggcgagtggttcgtggggcagccgttgcgcgtgcgcgagccgttcgaggagcggaacacgggcgcgtcgtcttcacgccgtgggagagggttttctcgctgtcccacgaggtgacgtgagcttggctgacgacgtgaccgctgcttctgcccacctgccaccgccattactgccggcccatttttggccgtattgaccgtcgcgccttctcccgcggctgactggcccgagaccgatgcgcctggctggcactgttgggtcatacgcagggttgcctcaagtcgcggtactggttccgcagtcgaggaggcgcggtagtggcgcgagtggcggtgcagttgctcgcacgtagcaaccggcgcgccggttgcatgacgtgtgggcctgggcctccatgctgggcgcgttggagtcggaggggtgcgcccacttggcgcggttgcatgccgactgcatggctgtccgccctttcacccgctggtctgggcgaaagtggaggaatgcttgtaaccgctgggcagttgcatgcaccgcgcgcggcggtttggcttcttctgccctgggccagcttgcatgacgcgtgggacccagcccccgtgtcgtagggggaggaccttggagcgtgttggagaagactcagcccgcgatggctggggacgcaggtggggagagtcgcctttaaaaggagggtgatccccttgaaatgcgaccatgtctttgcgctcccttatgcaccgcgtctttccaccttccgagcccccggatggggaacacccgcaatccttccgccttgtcgtcggaggagcgcaacttcgcggaagttggtacctttcagccattgttcggcttcaaggattttcatcaggcggcccggctgcatcccctcgccggtggtcacccaagacggtgaccaccagcccctgggtggggagaagcaagccgggctgcggcatctgcccctccctcagcttcaaggatgttcatcatcagtgctggggaggggagtgcgccgagttggggtcggtccttgcgcgggcggcggcccgctccttccctcagtgatcggggggaagggcgttcgccgttcgtggcgctggcagctgccgcgtgcccggctttctgacccgagtggcttcggagccgcttccggcgccgccttccgccacggcagccggaagaggtttctccgccgacgagatagccggtgccgcccacggactgacctccaactctacggtcttctgcccgtccttgcctctcgagtgagggcatgggcgagggccttatggcagcagcatccgccctgaggtcatcgctgctgctgttcggccccccggagcagaagtcgtcgtcgtcgctgctgctggagcgggcaacggcgagccatccgtcggcctttgttgctccgcaggcccccccaatcgtgtggggttgttcgtacctgcggaggtggaaccggagttccgtttgtaatggcaccttgagtgccggtgtcttgttcattgcggctgtcggggcctgaacatgtatgtatttttggcgcggagccgtgttttttcctcattacgagcactaagactcgcctgtcggctatctgaaccgcttcaccaagcgtgagttgcctcgtgcaaaggtgacgagtgaggtatccgtaccccggaggcgtaggagtccctcggctcggtcggccttgctgtccgaggcttctcttgcttagttaaatgaaccctcgaccgctcttcgatgagccgaagccggaggtagcggtgtcggcacggacagaggcagagttggctcgaaaagaagatttggtcggccagagcatggccgggtcgtccactggcgggaccgacgccggagtcgagttgccggggccgcgagcctggccgatgtcctcgggggacagctggctgaggcctcggggtggccggtcgagccgtctgctcgagccggattcctggagaagaccctggcggcgatggcccgggcgtggtgctgatgtcgtccttcggagtgggggatcctccaacctcgtcgccgtccgaggctaggtcagaccccgccgaaggtgtagttcacgccgagggtgctgctgctcccttcatctgtcaagatccgagcctgcgggatcggattatcttgtagtgtgtgtatgttttctgcggccgccgaggcccaaacacactgtcgtcgtgttgtaaaactgcgtttcttttcctcttgttttgagtattcggacttatttgtcggtaacagaattgttcgtccgagcgagagttacttttcacggaaggtgatgagtgaggtatccgtatcccggaggcgtaggaatccctcggctcggtcagccttgccgcttacgtgcactcttgctcgtccatagggttctgtcaccgacgcagtcgagaaggcccgaaaaatcgtttcggcagaggagttttcgagcgtgaagacttgttcggtccgcggaatcacttatccgagcgtgagttacttatcgcagaaggtgatgagtgaggtatccgtatcccggaggcgtggagtccctcagctcggtcggccttggctgcttacgtgtactccgtcgttttcaggatctactttcgaagtagtcaaaaagcacgaaagacattctggcagaaaagatctttttccgaggaaaattttgacgcagagggggtttcccccttttagcccccgagggagggtcgggctttgccgaggcaaggctgacccttccttgatgactaaactttgtgtgtgaacgaggtatacgaataactcgaaagcatcttaggagtagaagcgacgtagctgtcggatgttccaagcgttgctgtagacttcgccttaactgttggccagcttgtacgtcccgggcttcagaactttggcgatgacgaaaggcccttcccagggaggcgtgagcttgtgccgccctcgggcgtcttgtcgcggccgaagcaccaggtcgcccacctggaggtctcgggaccgaacccctcgggcgtggtagcgtcgcagggactgctggtaccgcgccgagtgtagtaaggtcatgtcccgagcctcttccagctggtcgagtgagtcttctcgattagcttgattgctttggtcggcgtaggccctcgtcctcggggaaccgtattctaagtctgtgggcaagatggcctcggccccatagactagaaagaacggtgtgaagcccgtggctcggctcggcgtcgtcctcagactccaaaccacagaggggagctccttcatccatcgcttgccgaacttgttgaggtcgttgtagattcgaggcttgagtccttgtagaatcatgctgttggcacgctctacttgcccattcgtcatggggtgagccacggcggcccagtccacccagatgtggtgatcctcgcagaagtccaggaactttctgccggtgaactgggtgccgttgtcggtgattatggagttcgggaccccaaagcgatggatgatgttggtgaagaacgccaccgcctgttcggatctgatgctgtttaggggtcggacctcgatccacttggagaatttgtcgatggcgaccaacaggtgcgtgtagcccccaggtgccttctgcaaggggccgactaggtccagaccccacacaggaaacggctaggtgatgggtatggtctgcagggcctgagcgggcaggtgggtctgccttgcgtagaactgacacccttcgcaggtgcggacaattctagtggcgtcggccaccgccgtcggccagtagaagggctcgaggtgctgcgtgatggccgcaagcccccgagtgtatctcttgtaggagttcctggccttcggcgatggaaatgcatcgctggaggatgtctgaggggctgcggtggtagagctccttcccgtctaccagcaagacgaacgacttggcgcgccgcgccaaccgccgagcttcggctcggtcgaggggtagctctcctcggtggagatattgcaggtacggggtctgccagttttgattaggcatgaccccgctccgctcctcctcgatgcgcagtgcctcaccctcgggggccgagggtgtctcggaccgagccgagggtgcctcgggttgagccgagggtgcctcgagccgagccgagggtacctcggactgagccgagggtgcctcgggctcgggcgtgtcgtcggtcttgacggagggttggtgcaggtcttgggagaagacgtccgggggaaccgttgttcgccccgaggctattttagccagctcgtccgcagtctcgttgtggcgtcgggcgatgtggttgagctcgagcccgtagaacttatcttccaggcgtcgaacctcatcgcagtaggcctccatcttcgggtcgcggcagtgggagttcttcatgacttggtcgatgacgagctgcgagtcaccgcgagcgtcgaggcgtcggacccccagctcgatggagatgcgcaacccgttgaccagggcctcgtactcagccacattgttggacgccgggaagtggaggcgtagtacgtagcgcaagtgcttcccgaggggcgagatgaagagcaggcctgcgcctgctcctgtcttcatcagcgacccgtcgaaaaacatggtccagagttctggttgggtcggagctgttgggagctgggtgtcgacccattcagccacaaagtccgccaagacctgggacttgatggcctttcgaggggcgaacgagatcgtctcgcccatgatttccaccgcccactttgccattctacccgaggcctctcggcactggatgatctcccccagggggaaggatgacaccacagtcaccggatgagactcgaagtagtgtcgcaacttctgccgtgtcaggatcactgcgtacagcagcttctgaatttgtgggtagcggatcttggtctcggacagtacctcactaatgaagtagactggcctctggacgggcaatgcatgcccctcttctcgtctctcaaccacaatcgcggcgctaaccacctgagtggtcgcggcgacgtagatcaagagggcttctccggcagcggggggcaccaagatgggcgtgttcgtgaggagcgccttcaggttcccgagggcttcctcggcctcaggggtccaagtgaggcactcggccttccttaagaggcggtacagaggcaggcctctttcgccgaggcgcgagatgaaacggctcagagccgcgaggcatcccgtgactctctgtacgcctttcaagtccttgatgggccccatgctggtgatggccgcgatcttctccgggttggcctcgatgccccgctcggagacgatgaaccccaagagcatgcttcggggaaccccgaagacacacttctcgggattgagcttcacgccttttgtcttgagacatcagaatgtcgcttcaaggttggaaaggaggtcggaggctttcctcgtcttgactacgatgtcatcgacgtaggcctcgaccgttcggccaatgtgttcgccgaacatgtggttcatgcacctttgttatgtcgcacccgcattcctcaaaccgaacggcatggtaacatagcagtacatgccgaaaggtgtgatgaaagaagtcgcgagctggtcggactctttcatcctaatttggtaataccctgagtaggcatcgaggaaagacagggtttcgcacccagcagtggaatccacgatttgatcgatgcgaggcagagggtagggaactttcggacatgctttgtttagaccagtgtagtctacacacatccgtcatttccctcctttctttctcacaagcacagggttggcaagccattcggggtggaatacctctttgatgaaccctgccaccattagcttgtggatctcctcgcctatggctctgcgcttttcttcgtcgaatcggcgcaaaggctgcttcacgggtcgggctctagctcgaatatccagcgagtgctcggcgacatccctcggtatgccgggcatgtccgagggactccacgcgaaaacgtcggcgtttgcgcggagaaagtcgacgagcactgcttcctatttgggatcgagttcggagccgatccggatctgcttggaggcgtcgttgctggggtcgagagggacgaatttaaccgtctccgctggctcgaagttgccggcgtggtgcttcgcgtctggtgcctccttagagaggctctctaggtcggcgatgagggcctcggattcggcgagggcctcggcgtactccacgcactccacgtcgcattcgtacgcgtgtcggtacgtggggccgacggtgatgaccccgttggggcccgacatcttgagcttgaggtaggtgtagttggtgacggccatgaacttggcgtagcagggcctcctcagtactgcgtggtaggttctcggaacccgaccacctcgaacgtgagggtctcccttcggaagttggagggcgtcccaaagcagacgggtagatcgagttgtccgaggggctggacgcgtttcccggggatgatcccgtggaaaggcgcagcgcctgcccggaccgaggacagatcaatccgcaggagcccgagggtctcggcgtagatgatgttgaggctgttgcctccgtccatgaggaccttggtgagcctgacgttgccgatgacggggtcgaccacgagcgggtatttctccgggctcggcacgcggtcggggtggtcgtcttggtcgaaggtgatgggcttgtcggaccagtctaggtagactggcgccgccacctttaccgaacagacctcccgacgctcttgcttgcggtgccgagccgaggcgttcgccacttgcccaccgtagatcatgaagcagtcgcggacctcggggaactctcctgcctggtgatcttccttcttatcgtcgtcgcgagccctgccaccctccgcgggtggcccggccttgtgaaagtggcgccgaagcatggcgcactcctcaagggtgtgcttgacgggcccctgatgataggggcacggctccttgagtatcttgtcgaagaggttggcacctccgggaggtttccgagggttcttgtactcggcggcggcgacaaggtccgcgttggcggcgtcgcgtttcgcttgcgacttcttcttgcctttcttcttggcgccgcgctgagttgacgcctcggggacatcttccggtgggcggccctggggctgcttgtccttccggaagatggcctcgaccgcctcctggccagaggcgaacttggtggcgatgtccatcagctcactcgccctggtgggggtcttgcgacccagcttgctcaccaggtcgcggcaggtggtgccgtcgaggaacgcgtcgatgacatccgaatcggtgatgttgggcagctcggtgcgctgcttcgagaatcgccggatgtagtcccggagagactcccggttggtggcgacagcttcggagatcccaggagtttccagggcgcacgtacgtgccctggaaattgccggcgaaggcttggaccaggtcgtcccagttggagatctgccccggaggcaggtgctccagccaggcgcgagcggtgtcggaaaggaacagggggaggttgcggatgatgaggttgtcatcgtccgttccacccagttggcaggccagccggtagtccgcgagccacagttccggtctcgtctcccccgagtactttgtgatagtagtcggggttcggaaccgggtcgggaacggcgcccgtcgtatggcgcggctgaaagcctgcggaccgggtggttcgggggagggactctgatcctccccgctgtcgtagcgtcccccacgcttggggtggtagcctcggcgcaccctctcgtcgaggtgggcccgacggttgcggtgatggtgctcgttgccgaggcgacccggggccgcaggcgctatgttgcgtgtgcgcccggtgtggaccgaggcttcccgcatgaatcgggaagtcgcggcgcgatgttccgaggggtacccctgccttcgagaggcagagctttcggcccgtcggaccgcggcgtcctccaggagattcttgagctctccctggatacgccgcccctcggtggttgatggctccggcatcgcgcggagaagtattgccgctgcagccaggttctggccgaccccactggaaaccggtggcggccttaccctgacatcgtcggcgacgcggtgctggatgccctggggtagatgacgcacttctccggccagaggttggcccgcccattcctgcccattgtcccggcggaacggctcaagtgttcctgctccctcgtcgagcctggcctgcatctcgcggatttgctcgagctgtgggtcatgaccccccgccgggacggggaccacagctagctcccgaaggatgtcaacgcgaggcacaggcctagggaggtcaccgttctccggcataccaagatggttgccttcgtcgggaccccctacatcgacgtggaaacattcacgacttgggccgcagccctcgttgccgaggctgcggctaccgtcggaacagtcggaaaggcagtagtcgcacgcggtcataaagtcccgcatggcacgagggttaccaagtccggagaaatcccaactaaagtcgggctcgtcatcttcctcggaccccgagggcccgtaggtcgagacggccgtcagccggtcccagggtgaccgcatacgataccccagagggtttggactcgcctctatgagagcgtccaccaaagcgaagtcgcttggtgggttgaggctgaatccaaaaggcgcgagatgtgaatcggtcggtacctcttggtcgatgggcggtgacgaagtcacgtcaggggtagactgcactgccgtctcaggtacgagggtgacgcccagcaagtcatttgcgagcgtgctggcgtcgtccgtttgcttggggttggcgtgttgcggggagacggcgctcgtcttcgcctcaaacgcgaggtcgatgcccgacgtgccccccgttggggcgccggcgtcgtcgactcgctcgacagccgacgaggtgccgcctcctgcttggccttggttgccccgcctcctcctccgtcggcgggggaggggacgggacaagcccgaatgttgtgcttccaccacgtggggaagacgtcgtcgattccgccgccggcgggcgggttgtcggccgccattgtcgctgtcacgcggcgggggaaggagtatcatgtcgtagctgccgtcgagggatatgaactcaagactcccgaaacggagcaccgtcccgggctggaaaggttgctggagactgcccatctggagcttgacgggaagctgttcgtcaacacgcagcagggcccctacctggcgcgccaactgtcggcgtttcgaaccccggggggtccctggaccgacgagtaaattgtcgcccgcgtgccccagcccagatgggtcggcgcgagacggagcgcgaaggggggaagaggagccggagggagacatgcgtgagaggtgaaacccgcggccttcgtgtttgtcccgcgcccaggtcgggtgcgcttgcagtagggggttacaagcgtccacgcgggagggagcgagcggcctcacgcgagcgccgtcccgtccttccccgcgcggccaaccttctgtaagagggccctggaccttccttttataggcgtaaggaaaggatccagttgtacaatggggggtgtagcagtgtgctaacgtgtctagcggaggagagctagtgccctaagtacatgccatcgtggcagccggagaggttttggcacccggttcgtgtggtgtcgtggccatcggaggagcgctggagcctggcggaaggacaactgtcggggctgtcgagtcctcgctgacgtcttcttgcttccgtaagggggctgagagccgccgtcgtcataaagcgtgcggggcgccatcattacttgtttagcggagcgagcccgatgggacgccggtcttgttcctcgtagcctgagtcagcttggggtagggtaatgatggcgactcccatgacgtggtcggtccgagccctgggttgggcgaggtggaggctcctccgaggtcgaggtcgagtctgtcttccgacgccaaggtcgagtccgagcccctgggtcgggcaaggcggagaccgtcggctgaggccagggccgagtccgagccctggggtcgggcgatgcagagttcgtcgtctttcggggctgagcccgagtccgagccctggggtcgggcgaagcggagttcgtcgtcttccggggctgagcccgagtccgagtcctggggtcaggcgaagcggagtccgtcgtcttccggggctgagcccgagtccgagccctggggtcgggcggagcggagttcgtcgtcttccggggctgagcccgagtccgagccctggggtcgggcgaagcggagttcgtcgtcttccggggctgagcccgagtccgagccctggggtcgggcgaagcggagtttcctatgacgcctgaagccggacttggctgctgtcagccccactctgtcgagtggcacagcagtcggagcggcgcaggtgacgctgtcctcttgtcagacctgtcagtggagcggcgaagtgactacggtcacttcggctctgtcaacaggagggcgcgcgtcaggataaaggtgtcaggccacctttgcattaaatgcccctgcgatttggtcggttggcgtggcgatttagccaaggttgcttcttggtgaagactgggcctcgggcgagccgaaggtgtgtctgttgctggagggggtcctcgggcgagacgtagatcctccggggtcggctgcccttgcccgaggctgggctcgggcgaggcgtgatcgcgtccctcgaatggaccgatccttgacttagtcgcttccatcaggcctttgcagctttgtgctgatgggggttaccagctgagatttaggagccttgagggtacccctaattatggtccccgacacccgtcatcaagttcgccaccgtctgcgtcgtcctcacctcgccctctcccggaactgggcgattcaccaactcgatgtcaagaacgccttccttcatggcactctgacggagactgtctactgcagctagcctaccggcttcgtcgacgctgccaacccggacctggtctgtcggctgaaccgctcactctacggcctcaagcaggcaccgcgagcctgatacagccgcttcgccacctatttggcctccatcggcttcatcgaggccaagtcagacacctctctcttcatctaccggcgggacaaggtcatcgtctacctcctcctctacgtcgacgacgttgtgctcacggcgtccaccgacgacctgttacagcgcacgaccctcaccctctagcgggagtttgcgatgaaggacctggggcctctccatcacttcctcagcatcactgccgaacgtcggccccagggtctcttcctgcaccagcgtcagtatgccaccgacattctggagcgagctggcatgtccgactgcaagccctgctccacgcctgttgacacccaggcgaagctctctgaggccgacgggcccccggtcgccgacgcgacgtcgtatcggagcctgacaggcgcgctccagtacctcaccttctcccggcccgacatcgcctacgttgtccagcaggtgtgccttcatatgcacacaccacgggagccccatctcaccgctctcacggattctgcgctacctctaggactcccttgactacgacctcctactccaaccatccttgacgtcggatcttgtggtctacaccgacgctgactgggtcggctgccccgacacgcgccggtccacctccggctatgccgtgttcctgggcgtcaacctcgtctcttgggccgccaagcggcagcccgtcgtctcccgctccagcgtagaggttgagtaccgcgctgtggccaacggtgtggccgaggcatcctggatgcgtcagctcctacacgagctctgcagccccctccagcgtgccaccctagtctaccgcgacaacgtcagcgccgtctacctctccaccaatcccgtgcaacatcagcgcacgaagcacgtggagatcgacctgcacttcgtccgggagcgtgttgcagcaggtgacgttcgggttctcagcgtcccaacaacgctgcagttcaccgacatcttcaccaaggggttgccctccagtgtatttctagactttcggtccatcctcaacatctgtacaagatagagttgtgactgcggggggctgtgtgtgttagataaccgtccttgtaatgggcctggcccaatcactgtggtctattaatacacttcccaacccattctagggttagtgtttcactattccacacaactaaccaaatctgatattatctttatcctttccctaactaatctaattcttatcaatcaaatctgatttaatccttatcttttccctaactaatctgatccaatctcggcactgttggtgcgctacagtaacaatgtgaacaacgtctccctgccatacaactacagagattggctgccaaaaggggaaaaaacatcaaatggcatatatgttattgttgtatttttttgtacaacgtatgtgggctttgcaaactactgaactcgcatatttgtcaaaatgtgttgtctaaagttgagatcattatcaaatatcaaatggttcttaaattattacattttcttccatagagatatgtcttgatctaacctagtaacattttcttgtcagtggtgcatttttacttggtggaggtgtttataccc

SEQ ID NO: 539 - DNA, 5521 bp, Zea mays
  Intron number 3 from transcript GRMZM5G894506_T01 (locus G RMZM5G894506) derived from phytozome v7.0 (chr-ID 6; pos 8 3166464 to 83171984)
aagtttggaacaatttcgacgagttaaccaatctggtaaatggtaagcgtgtaaggtatgctgctcgatgcaagttctgtcatgagacattaagtgctagatcctcttctggtactggtcacttgcttagacacaattgtagtgctaagaaggcccacgatcgctctggccaaacccaaactgtgcttaagtacaaccccgatggttctttgcagcgttgggagtactgtccttctgttgcaaggaatgaactttgtcgtttgatagctagagatgatctacctctatggcatggctccactgatgcatttcaagaatacatcactcgtgcacataaccctagatttgtgcatgtttctaggcaaactactgctagggacatgattaagttatataatgagcgtaaggtaaacttaattggtactttgaaaactgatgttacatctgtttgtctaacctctgatatttgggctggcaaggctaaggaagactatttaagtgtagttgctcattttgtgaattctcactgggaaatagaaaaaaggttgcttggtctaaggttaattgatggtaaacatagtggtgttagtattgctaatctggttgctactgtgatagatgattatgctttaactgataaagtatttgcaatcaccttagataatgcttcatcaaataatactgccatgaaatatctgagacctttcttgtctggttaccttggtgtgcctgctcctgttgtgactgatgatgatgatgattcatttacacctactgatgatgacttgtgcactatgttcttgcatcaaagatgttcctgtcatgttattaatttaattgttaaagctggtcttcaacatttgaaagcttatattgatgactttagaactgctataacctttttaaatgcttcaaatcaacgaatagctgcatataaaagctattgtatgagtatggctattcgtcctcgtaagtttggtgttgacatggatgttagatggaattctacatacttaatgcttaaacacctagtaccatacaagtccagcttttctgtttttatcaaaactcagtatcctttgcattctgatggtactcctttactcactgatgatcattggacaattgctgaaaaagttctttctttcctagaattattttatgaatccacagttgcattgtctggtgtgtactaccctactgctactttgatgctacaccatattctaaggatagccagacatctaaattcatttgaaaatgatagacttcttagggctgctgttgttcctatgaaagataaatttttgaaatattggagggatattcctattctatatgctgttgcatttattttagacccaagggctaagatgaggggttttaacaaactccttgtcaggttagctagcttaactggtacaaattactctaatgttccaattgaagttagatctaaactatccaagatatttcagttgtatgaagctaaatttggtgacacacgcctgcgtgctaatcaacacccaacatctcttggttctggtaagaaaaaaatggcatgggatgaaatctatggtgatgatgactatgatggtgagctttctgtgggaaggagaccaggttctagttctatctctactgctgcatccacttctgagctggcatcttacttagatagtgatactattactgagtttgatgaggacttcaatgtcctatcttggtggcatcagcataagctcacttatcctattcttgctctacttgctaaagatgtattgacagtcccagcttctactatatcttcagagtctacctttagtcttgctggcagggtgattgaagagcgtcgacgtcgcctggctccagatatggtcgaggttttgtcttgcataaaagactgggagcttgctgatgctcacctgcagcatactgtggaggaagagacaagggaacttgaagctgaacatgagaacttgtaccttgatgatccagaagaacacaaccagtagttggtggtggactggtggagtggtggttggctagcttagttgtttgcctgatgcctgatggcttattcttgtaatgaactcatggactgtactgtatctgtatgaacttatgccttagggcttaggagctgtggctgtactcttttttccttcttaggcttttttctcacgaggtgtgagtttttgcctaagaaggtttttaatgaggcagccattgcacacagctccataattatttgtttccatattttatgtgtgcttgtgttttagtattttagaattttagaattttccagaattttccagatttatgtgtgcttgtgttttttcgggccagtggagggcacggcccggaatggcccagaggctttcgggccaacccggcacgtttttggcctctctgggccgtgcttggacacatgtcctggcccgtgacccgaaccggcacggcccgagtcaacagcgtgccgggccaggcacgaccctgttcgtgccgtgcctaaccgggctcgggccgggtccgtgccgggcggcccggatggacatctatacctggaggtgcacgagcagcgggtgggcgcgacaggtcgacaagtgggggagctaatgggggccagcaggggccatggcccctcccaagtatgaggcacaaacaagagaaatatatatatatatattctaaattttgtatatctaaatatatatactttaaattttgtgcagtgtaattaatcaaaggtttaatatagtggttgataatacatgatccataattttgttgtagtatgtcaaccaaaatctaaaagagacaaagaatataagataaaatattcgttgcatgaccaatcgatacacgaaacatcagacctaatttgcttgcagacactgatatatatgaacctcatccctttatgattcatcctatcatctggctaggcagctgtcgattgacgctgaccacttaacttgactctaccataaccccataaccgaagtccaaagaaagtgatcacgagaagcagcagaatgagcgcaaacaacttatatacatactacattagatcttgtggataataaaatctacaaatttcaactaaagttggcatctgatagttggtgtgtacatgacaaatttgacatgtacctgtataggttgacgaattttcatggatcctcaaagctagttagttttttgaattctctaaaaaaattgttagttgcctcttgaatactagagtcattatataaaagttgaatctcattagtcgaatattcatcgttatatcgtctttattattttggtattgttcttgcgtcataactttagttcaatatatcaattagctagaaaatagactcatgaactaagaagataatccataaagatctagaattcttatttcatgtcgagtgcttaaatttaatattattatacaatatttttttatcatatagtattgatgaattgatcatccttccttatatcataatccttgctccgcccctttaggtcgagaggctgacggagcgcacgtggcgcagctgtttattcgtggaggaggaggagcgcgcctggctgagtgggaaggagatggagcggccgaaggcgggcgccattgcccattggaacgggtcgttgatgcactatgcacgatgtgttgcttgctttgtagcctcagctcgttttggagagagaggccggcggggaggaagaggggtgatatagagcgaaggcacccatcagcactccatcacacattagcacgacaatgacataaagaaaatgagcgggcaggtaggatcaagagattaattaaacaagattgtttaaccatcttaatttgagaaataacttagcttccataagaagcgatgcaaactgtcttggccagtttccaatgccgtccaaatcaattgaaataaattctactttattgcattaacctctgcaggagaaagtagagaccaaaatcggcggtggtgagcatttgccttattctgaaaatagtgggtaagcctgctaatgacaaaaaatccaatccactcccacccatacccaaatataataactttgatatccatcccacacctaccccaaaatataagaagaaaattaaactcaacacatccaataatattattgactccaaaccaacccgtaattggtggaaacccatgaaaacctcgtgggttcagcttattgtctcacatcaagccaactgcatacacatacactaatacataattgcacttttataggtagtttcaatgacgtacaaaaaacatagtccacgacataaaaaacagtgacaataatattatacattgatacaaaaacaagtttggtcgatgaacatttaggtctcgagaaaataacaaaaaaacatctgttaaagatccttaatgaacaattatcttttcggcaagaaatataaactagcatagtggaaagagtctctgatcaagctcgaagctagcaacagtggaagggcacatctaggtagtatcagaagcccaccgaacgacacataaatcaccgtggaagtgaaaagaaaagaaccatgtgtgaacggtcccggagcgacagtgtgttcgcttcatacgagcacggcccatcggcctgctagccgggccgggccggcccggtagcacgctgtcccatctaagtatattgtttaatttaacaaaaaaatgtgtagctatgggggcttaaacacacacccacatatatgagagacttaaacacaccaacctagccaatgtggttgcaattttattgtgttatatgttgaattattatacttaatatatataaactattacctttaaaaaaaatgtaactgtgtcgtgtctgtgccagcactatgggtcgagatggcggcccaggcacgacactatactagccgggtcgggtcgtacctaggccgtgctttttcgtgtcgtgcctggactggtccatcgtgttagtgtcaattggctatctatagcgccaggggacagggggcgtcgacatctaagtgtgaaagtgtctaattagcgtcgggcgtcaacaggagccaggggagctccgttcgccgaggcgaagacttagggagaggagagactccggtcgccggggcaggaagcaggatgcgaccattggtgcacgggtgaagacttggagagttaaggttgagttggatatgttgggacttgggactaagttgggagtcgactcgaatacagtccaacggtctacggatgggtgaagacccatggaagcccacgcctatgcaaacccatctacacctatgggtatcaaccattataactcacaatacaaaataaacccacccaacccaactcattcacaattaaaccccatcacaacccaccaaaataaactcatttcttaaatccacctaaaatacccgtttacacccactccgtttgcaggcctaatagtggggctgctgttcatgatggctgcagctgcagtgtctaattcaactgttccagtgcgctct

SEQ ID NO: 540 - DNA, 14877 bp, Zea mays
  Intron number 1 from transcript GRMZM2G127455_T02 (locus G RMZM2G127455) derived from phytozome v7.0 (chr-ID 10; pos 87773787 to 87788663)
ccaggtaccacccgctccgcccttgtccgttgttcccgtgccttgtgttgttgatccgtggtccgtggacgcggttagagattcagtaacggtggtgaggtgacgcgcattgcgctggcgcggccgttttgaccctcctgctctcgcggggttgggtccgcattgctgcattgacgcttagcggcgaaacatgaagcttctattggttggcgctgggtgaagtctagtcagtgtagattgaattctattggtgttggtatagattgaattctattggtgttggtatgctcggtccacactaggtatattgatcgacgacctcatttcagctggcttgtttacattgcagccaggcgcgcttatgggacttcgatggggcagtgatttgtgtggaacacgttaagctgaagttactcactgatcaaaacctgaaagcttcgcccatggacttctgtacctgttcatttttttttttttgccgtgaacccagcttgcagtcccatagcgtgtaggtctaattgcaacactgctctgttaactgtgtatgatcagcacactaattgctgcaaagcaagtcttcgttgttgagctctcagcagctcataggtatgccttttatttttaaacaaggctatttgcttactaggacaggcagagagctatgagcactgcttatggaattttttgaaacgaaccggcaggagatctgcccgttatattaaaaagagaggagcccaaagtggcgaggtttaaaatacaaagacaccccacaaaagcatgaccaagccgaaaaacacaaacacacaagactaatataaaaggagactaggagaaaaaccaagctcaaacacacaaaactaaagagatgctaggagattagccagctggttggctcctgcacgtatccaggctgatgcctcagatataatagatgcgagaatctgagcacatgtggaggatttgtggtcgaaaatcctagcatttttctcacgccagacggtccaattcactagaattaagaggcttctcaagcccttcctgttgcaatcttgagttgtagctagggacgtccaccattgtaggacagactcactgcggtcctagttacttggactaaggccctccaccgttgcccatacaaccacctctccccaaatccgcttggttaaacgacactcaacgaagaaatgcaatcctgactccaaagtttgcccacacaatgcacagacatcgttgtggggccaatccctcttcgcaagacgatccgctgtccaaattctattttggatggctaaccaactgaagaatttacatttcggtggcgcccataccttccaaatgatccagttcatatttgtaagctcagagccgaggaattgggcaaggtatgctgattttgccgaatactgtcggtcttctgagagtttccaactaatagagtcgcaaatacccggttgcaaggatattctttgcaaaattgaccaaagcctacaatactccacaatgtgttgctctgtcacctcagcagaaagcaggttgaggtccctaatccaagtatgatttcacagcgcttcactcaaagatctgttctttcttcggggcacattgaaaatgagaggcaaaatgtccttcggtcttaacccttgcacccacgcatcattccaaaaggacacctttgtcccgtctcccaccgaaatcgaagtcgctgctgcgaagagctgtcgttcttttgtcgtgcaagggagttcaaaggccgtccagaacctagttgatgaagcccaatcttgccacaaccaacgcaaacgcaaggcccttgcaaatttggttaaatgaaggatacccaagcctccacactcttttagccttgcggaacggatccaatttaccttgcatttacctcccgtaatttgtgcacacccagcccaaaggaattttttccttctcgaatcaattaaattcaatatttccttaggagcccgtaaagcagagagaaggtagattgcttgggaggtaatgactgacttaactaaagtcagtctgccagccatagagaggtttttcccattccagccattgagcttgttcgaaattttgtcaattaagaactgaaattcgctcttcttcagtccggatgatgagagcgggaggcccaggtattttaaggggaaggtagcccttctggctggcatattccttagggccgcgttgaggtcaataccttgacaacagataggcacaactgtggacttatggaagtttgtcaacagccctgacgcctcaccaaatagcccgagcagctttagtattgtctcgacctcctctttttttggtgcaataaacaaggccgcatcatcaacgtacaatgagagacaaggcaaggcgagcggcccctaattttgctgagaagtcccgtctctattgccaagtctaaaattttctgcaatgggtcaatggcaagcacaaataacaatggtgagagtgggtctccatgtctaagtcctcgaccatgagacaaggggggattcgggatccgttaacaaagacccttgaggtggatgttgagaggatggctgcaatccaatctctccaccaagaagggaagcctagatgttgaagcagcgagagaaggtattcccatcggaccgaatcaaaggctttcgcaatgtccaatttgaggaagagcgagggtatgttcatgcgttggtagcgcctcactgcactacgcacggccataaaattatcctgaatagtccgtttcttgatgaacgcgctttggcatggtgagacgatttcatgcatatgtggcgctaatcggagagcaagagtcttgatgatgattttgacaaaggagtgaatgaggctaatcggaatgctcctcaccgagtcaaaacttaatgatggtgtatctgaagagagtgatgggtgtttttttgtaggagatgtggccattttcatgtttgtaccattctattagaaacactgtacagtggcaccgtgacatctattgagtgtattgcagctatcaagcaatctgtgtcgccttccatagcacctcgctctgcctccacacattcggtatgtaatttattgtttcagaccattactcaaaacatcagccgctgtaacatatctcaaaaacaaaccaaattggtgctatagacaagttaatttgtgttaccccttgaaaattaagaatcctcccacacaggtgcggaacacagagcttgtgctgccgagcttcagcccagagcctaggcccaaaacagaatttcactagcctctgtttctgcccatactactgatcttgctttaaatacatgatttgagtagaaactacctggcttgattatgggcatccctctttctctgggtctaatctctgaaccaatacttggccaatcagttttgtggatgctcacattttttataaactgtcgatgattgatgcctgcttcataagaacacctcctgaatgactttttttatttatcgagttgctactatctattacaatttttgtgcacattataggttgggatgaccttgtatttcaattatcattacccaaagcccttgataaaacacagtactgtgctagtgttctgttgcttgtttttttttgagaaaggggataaccccctatttcattacgaaatagaaagagacataagttcttacaataccacatgagcacccagaattttaaagctgacaaaacacacaactatcagctaaaaaggaccaaaccctgaccaaaccaaactactagtagcaacacaaaaagtaacacagagctgaccaacatcaaagttcacacagatcacaccaaagcagcaagcagcatttctatctcatagtttttcctgtagctaggcgctacaagggagaagaagtagaacgaccgcacagttattgaaccaaaataaccagataacaaaacatgtttcatttcatcggattcgtctgtcaactggcctccaaccacgagtcttgttgtagatctcacacgccatctttttgattttgagacttccgagctccaccaattttcttgccttctttttttgacgaatagcccaagtattaagccaaaaacaacaagagaaaatcacgttagtcggatcatcaattcggtcagtcccaaagcaacaattattgcgacatctccagatcgcccaaatgacagcaccacagccaaacagaaccagatttttttcagtcttattaaaactgttaatccaagtaccaaacaaatcatccacattatcaggaatagaatttaggccaagagcagagtagacaattctccacgtaaatctagctaccggacactgaaaaaacaaatggtctatggattctgaaaatccacaaaagatacattccagattacccttccaatttttcttgaacaaattatccttagttaaaatcttcttgtgcataacaagccacataaaaactttgatcttatgtggaagtctagttttccacaagaaactaggagccaaaggaatctgagagcacttgatttctttgtaaaaagaattaaagaattaacagaataacctttgctacccaaaagccaaacagatttatcttcttcctcagaaataatagtattattacattgtgtaataagattgttatactcaacttccaaggcaccataaatcctccttctgaaattcacagctctaaaatcagaagaaaaagcttttttcactgtgatatctttatcataagcaaaatcatacaacctagcatatttagaagacaaaggttctgaatcacaccaaatattatgccagaagctagtattactgccgtctcccactttttttttacaatacttgtaaaaattatctctagtatccaaaacacctttccaaaagtgagaatcactttgtctttttttcagagagataataggccttcctttgatatatttatatctaataatagtctgccacaatccattcgagttttccaacttccaaagccatttagcaagaagcacctcattcatcttgtgaagatccaaaacccccaaaccaccctgacctctcggagagcacaccattttccagtcagcaaggtggtatttcctttttgtatgaccaccttgccaaagaagcctttttctaaagatattaatattcttcacaatgaacttgggagctttatacatcgaaagcatgtatagggggacattggtgaggctgctattaatcaagactaaccgaccacccaaactaaggaattttccttgccaagcccccaattttttctcaactttctccactgtgggtaaccacaaagacttgcaaagtttcttatcatcaatcggaactcccaaatatttcattggaagacaattagaagggcaagtaaagatgtcagcataccagaattccttatcaacagcttcacctaaacagaaaatttcacttttatgaaaattgattttgagaccagacatctgttcaaataaacatagaatgaacttaagatttctggcaccctccagatcatctttgagcaaaaaaatggtatcatcagcatactgcaaacaacaacagccattaggaattatatgtggaatgagcccactgataataccttcatctttggctctgtgaaccatacaagcaagaccatcagcagcaatattaaatagcaaaggggagaaggggtcaccctgtctaacccctttatgggtggtaaaatagggacccactctgtcattagtcttgatggccactttaccacccctaacagttctcataacccaatcacaccatttgtcaccaaagccttttttcatcatcatatgatgaagaaagttccaatttaccttgtcatatgctttctcaaaatcaaccttaaagattatcccactctgcttctttttttcacctcatgaataatctcatgaagagaaaccactccatccatgatatatttacccttgataaaaccatactgaaaatcactgatcactttattgatacagctggccaatctgttggtcaaaactttagtaataatcttgtaacacacattaagtaaacaaataggtctgaaagctttaatgtcaatagcattaggaactttgggaataagagtcaccaccccaaaattaagtctctcaatgttaagagtgccagcatgaaaatcttgaaagaggttaaacagatcatctttaatcgtgtcccaaaactcctgaaaaaattcagcagggatactatcaggaccaggagctctattatgtttcatagaaaacaccacctctctaatttctttcatgtcaaacggcctggtcaagtgatctctgtcattatcatccaacattttcatatccaaatgattcagattcatactagattcttgagaatgaccaaacagattttggtaaaaagaagtcgccaggtgatttatctcatcatcatcatgagcaattctgtcttcatgagtaagagtcataattttaagcttccttctcttacacttggcaagtaaatgaaaatatctagaattttcgtcgccatccaaaatgaatttatcacgagctctctgcttgaccttaatattctcctcatcaactaacttcttaagagttaattccagatcaagcttctccatcctgtcattctctgacaagccacacacttcactaattttatcaaacatttctattttgtccaacagttcttttttcaattttttgtattgcccttcaatattaatattccaacctttgagcatttgcttcaaacgtttaattttcgttttccaaatgtcaatactctttttatctttcactggcatataccaattatctatcacttttttgtgaaagtctggtctagtcctccagcataattcatacttgaaatctctacttccaatcgagacaacatccgtttgaatgcacaaaggaacatggtcagaaaaggatctgttgagacctcgaacaataatattattgtaagcaagatcccactcaggactagccaggaatctatccaacttttcaaaagtagggtccatcctattattagaccatgtgaacaatctgttgttcaaatcaaattccacaagaccattctgctcaattatactgttaaaaaggaagctccacttattaacaccacccggtttgtttttttcatttgcttttctaataatattaaagtcacctccaacaagcaaaggagcacgacttctcgaacaaaaggaagaaagctcactcaagaatctgctcttgttctccttctgagcagcaccatacacattgacaaagttccatataagatttttttctctatgaaaaatcaaagtacgaatcatgaattcaccaatttcgttttcacgtacatcaaacacattagtattaaaaccaaccaataaaccaccagacctgccattaggggggcaaaaaaccaagcaaaaggcttgttgcccgccagcgaatcaagccaggaatcattaaaatggcttttttgggtttcttgcagaccaattagatcaactttctcatctctaatgagttctttcagaaactgaactttagaactcgccccaagaccctgacaattccagatgagacctatcatcagaaggggtcaggggggagaccaaaattcactgcttcccgctttctattaggtgtatacctaattttgggggaagcatttttttctgttttttacgatgtttgatttttcttccttttctaaggaccataacatccatgagatcataatcaatatctttctcagaatcaatatggacattgctatccacatcatcaatatcatcatcaactggttcctcacattttttgcttccacatgactgaatagccagaatctttctggacatttccaaaccctttatcagttcaatgttatcaatggcagaggaaacagaaggacccaaacaaaccccaattctactagaaatatcaagcaaactttcattactagcattaagtaaagagaagggattattgttcatacctttattgaggaaagcgtctttagcttcagctctagaaatagccttgtctgccaccttgatgtcttcattcttctctaatcttgaactttttcttataccatcagaagtagccatcagggtctcacttgattttttttccaccgaaatctgtttttcttccttagataatggaattgaaatcacctcaccaactttaacttggaagtcagtatgcatttcctccatatcatttgcaaattcttcaagttcttgagaacttaacagatcatcttcattaggatcaaaatcaaccttttcatcactaagatcttccaatctcatagcatcatctgaaatctttttaggactttccatgaaagcttctgtattcttaagataatctttgccctgggaggaggtttctcccactttaagattaggtaatgcatcttcgtcacaaccttcatcatcatttctaggttttttcccagatttatcaaaaaccggatcatttatcccatggatatcaacagaagctctcttacccaaattaattgtatcatcattccatccttcatcgctaatagattcaattctgaaatatatgtcatatagaaaaggtttcacagccacttcaacaactggcgggatcatagccacactcttaatatgaactttaaagcgcacaatatcctcggaatccaaagacataagatcaacttcctcaacagccccaatcatggaaccaatctcacagattgactgataattttgtagttcttcaggaacattctcagcaactatccaggcagtatgtaacctagatttaggtttagcacgagaactccatgggacaacaactatcttagctccagacattttcatcttaagttcaggaaagcttatcatctcgtcaagacgttcttgagaggggaattgcattaagaaaccagaatggcactttgtagccttccaagatttaccccagggaaaatggaaaccaaagtccttcaccaactcatcagcagatactaaaccctcaatcaccttaaccaatccaatgaaaaccctctttggttttttggaaaaaggtttagcaaagtgagagagatagaatccaagaccatcagcagccatgcctactatgggcatattcggtttgctctgttttggcaacacacatctagctgtgacatgagtatcttttcgacaaatatcacaccaaagagcattgaaacagtttctagcatgatgtccatcaaccccacatttttggcaaaaagcgggacgaaccggatcaatatctttcttcaaagaagatggagataagatgggattacctgattgaatgccatctccagatgaagaagacaacaatccatcctgagggtcagattttccaacctgcggcttcaatctccaactcatgttgcggttacggttccaagattgggaaccttgagcagaatctttttgtccccagcgatcccaagaaggattggggatattcttgttcttcggatccatctcaccaagaaacttgcaactacgaacaacaccagatcccaaccgaggccactcttcttcggaaatcggcgggcgcagagaagttacgcaccagccaccatgaaaaccagaacgagaggaaaccgggagcgaccaaagacgcgagagaaaggcggcgcagtgagggaaggagtgcgaacccacaaagtcaggaggaaaccctaacctcgactcgggagacgcaaaaccatgagacgcgaccggaggaagaaaccccaccgaatggtctagggttgaggcgagcggtgcgacccccgggctccaacccgaccaagaaaccaaattcccaagagcagcaggcgagcacttaccatgggcctcaaggcgagcagcaggcaccggcccagcggaaacaccatgagacgccacatgaacagggacgcgcggggaagacggagacacggcccagatggttttacgccttttctttttcgccatcctcaactctagtcaataccatgagaaaatcttccgctttccagttcttagcaataaaatttcaagtcgtgttctgttgcttgtgaaactcatttttggaagtacacagttaattccgttctgtattcaacctccatagaaaaggatccgacttacaaatcacaaacactattatctgcatactgcaattgttttttttcagttatgagttcagttcatagaatgggaatgtgttgttttgtttgtgtactatcgcatgtttttatctcagtacagatcgagtggactatgatgtggcttcaaatgcatcagaggggtggatatcaatatatcatcatatcttaatgcctcaacaaactctatatttgtgattgcacctttgatcatctgtgttggcaatttactctagaaaaatcagatacacgatctttgttttcttttttcatctggcattcctatctgggaattgggattatcatgtagaagcttatatacttagtctgataggacaggatacatcaataacatggttagttgtcaaaaaatcaacaaatttgcgctctctcctccccttctatcgggcgatcacctcatgtgacgtctcggatggccgggccaccgcgttctggctcgacgagcgacttcgccatctgcttccctgccttgttgtctcactgcgtcgacgccggtgctagcgtccacaacgtcctgtacgccggcatcgataacttcctgcaacgccgtctctcccccgcggcggaatccgagctgctcctactccgggtggccatcgacagcgtccgtctgtctatggggcatgacacccgccactgtgctctcccggatgacgacgacagaatccacacaggcgcgctctactaggttcttcgttcgatcacggttgaccccgcggcgcccgagcacctgtttggcaaaaccgtgcccccccccgtccggttcttcgcctagctcgcttgccgcgatcacctccaaaccaagaacaacttccaccgcaagtgcatagtcgccgattcgtcgtgcactgcttatggcaacgccccggagggcgtctctcatgtcctccttcactgcagcttcgcgtgcacactctggagctcccttggcgtcgctcgacctcctacgccccctgactcacttccacgcacggagttctcgacgttcgtgctgctctgcaagagaagaaacgccgtggtctttgatggagttcacccctccctcacggtgacccttcgccaggcaaggacgaggctgcgctgcaggcttcgtcgcgccgactttggtgtcgcggacctctggtgtcaggcatttgccgcggcgatgccctgacttttgagtcaagtatataatataattattcatttgggttgccccccccccccggccgttaaaaaatgtatgcaccttgcatttcgttggcactcttgagagtgctttcaactctattatcttcttcctttgctccttaattctttcttatgatttttaggccattccttttgatttagtggacctaacacaaattcagcagcacacactgcaagtttcatgtgaccttttcaataacatggctttagctctgtaaattgtttgcttctatttgacctggttatcactgtgactcatgtgacctatgcaccatggagaggccatgcttgtagcatggtgttaaatcgtccagttgtgacttgtgaggctaccaaccagggctcaaaccctggttcttacaaaaaaagaaattgcccccttgctgcgtgttcccgaaaagtacgggcgaagacccagcttgtggcaacagtgtccctttacagtaaaaagccatcttttgggtgcattttcccgacatttcaagtaatgcctttgggatgtgtctcactcttcaccccttgggtcgaggtttatgttttgtttttcttcattctgttttttttttttgcatcgctgctgattttcctagctgctcaaaggttaccagaatacaaatatcgctatgagccttgacatctgctggcacatatgtgtggtcacagttcaacggtataatttatggaactatttataatcacagctcatgcatatgacttgtctctaaaattgtaaatgactaatgggggctgttatgagtgttgaaagtaagagatttttttttcattgaggacaaaaaagtaactgaacttaacttgatttgtgcaggtccaaaattgagtgctatgttggttacaaggctttcccagtatgctttcatatgtttatcatcatgctgatgccatatagaggcaagagccttttagcttgtcatcaagtaggaatatattgttttctttgtctcgtctctcgtctttgtgttttcctggtaccactgtatattttttttattttgttcaataagaggataaaagcaaaagcatctcttatgagtttgaattggtcgcttttcctaacatcaacattttcagcaaactataaccatattaactgaatcaggtttttaatttaaaataaaaacatggtgctttcaattgtgctatgtattgtatcagatactgctgtatgttatttgattttgttcaataagaggacaaaagtatcttatgagcttgaattggccgcttttcctatattcacatttttaacaaactatatagtcattttagccgaatcaggggttttaattagaaataaaaatacagcgctttcagttgcatgatgtattgtgtcagatggaatcagtgatcttttttatattctttattccattagatcaatgaataacatgaaactttgatatcccaggttgtagccctaccttatttatatagtttgatttttttatattgctccgtattttctgttatcttccacttgctaatgatgatgtttgctggaaagcaatgtactgttgttggcaatgttgagaatgcatattacaatacaaattaaatgtcttttttcatctggaggagcactaccactcagttcccattttgatgccttactactacatctacttctcttcatacttctttttttttggctttcctttcaactgatgtattcatttttgaaacatgcagatacttccagtaatgcagcaaatatgtcatagtagatacaggattcttctaaataaagataattaaagtgcatatggccataagttgaaacatcatgttatgaaatcaagctcttggctagtataatgtatctttttttatagtttttcttattggctgattgctagatttcttagtttttaggcttctctcaaattgctttttagtgctaatggtccttatcagcattattggtctcataacatttgtgaaaaatccaacgaccagtcactttatgccagccttttcatgcacatggccatgccccatcagttgtacgacataaaacgatagttgttgattctaaagcaaacctcttttcttttcgaaacaaaattggactagctttatttgggaatagtgcaatgcaggaaataaattcatattgatattggtttattcttgactagtcacaaggaaaggaacccaccagaaaggccaagccaaatctgttaacaatctagctaagccaaaggaacaccatgttttcccttcatttttgttaacttaatttcttgatttagcattgtatcccctgtactatgttaagatgctttatagttcatgcaatcaaattttctgatttctgaactaactcaatagtcaatatgttttagactatggatcagtcctatgaaaattgtatcattatatttggatttaaaaaatgatttagaaatgctcttgttatttaatatcccctagtgtactaattgccaaagtctataagaaaataaaaggcagggatgtgtacgagtaaggcttctcaaaatccaggcaatgtaccttttaatgaagatgttgaaaaaccatgttctttaactcatttgggttttttcagtcatagctagcttgaggggggtgatacaccattttatgtaaacaaaactcgccctagactattgcacaaacaatgaggaatagacccagccacccaggaagcatgctagcttcagcccccatgacagctgaatattaactcagccaaagtgcaaagctttaagagatttcactgactaaatttacagaacacatcatggctatgttacataaataatgatgcacaaactcaatggatcatatattgagtctcaccacattgaggcttcatagattacccaatctacatggtaggtagatattcatgaatagtttcttccttttttctttcctgaatgtgtttacttcttcttgagaatgattgctcctttgtaccctatcaaatcaaccaatcgttttccattcctgtattcaagtagaaagcgctcaagtagcttgggttctccacacagaaaagtttacgacagaaacgggaaagtgaaagggggaagaaaatagctctcaggtcaacattccaaatttcttcttacaaatatacaactgtcgtttgtcggcaacttatcaaaaaaaagaaaaagaaaatacaacatgcaataattaatttgcatggacgtgcatggcagcagttgaaatgtttgggtctacttgcatggtgagagctaccaacacatgcagttttgcccatggctgcctatatttatttaatttccaccagagagtgaacaaaaactcaaatatgcaaaagttgagtcgttgtgtacagaaggaaacatcatttttcaagataaagaaaaagagactctagaacgtacttttgtatgcattctgctgccacttctaatgccagggctgtcctttccttgatattgccaggtcttcaactgaggagcagctgtggagg

SEQ ID NO: 541 - DNA, 15174 bp, Zea mays
  Intron number 8 from transcript GRMZM2G165418_T04 (locus G RMZM2G165418) derived from phytozome v7.0 (chr-ID 9; pos 5 7830558 to 57845731)
cgtcaatcagcactgtgtgacaaccattcaaaaatgttagtaaccccccataactctccctaacattttatccttttgtctggcaaagttgagaacttgtatgaaggattgggaatatgtgcagttatttatggaaggaacacaacaccaatatattaattgcttgccttgacctctagggtcgatggggctatatatttatacaggcaagtgctgcctattacaagttgaatcctacgtggttacaacatcccaatcgactctaactctaaatgatttggacacatgcagtgctgttttgttttatctcttaacctctaatcagagtcaatttcttctaatctagtccaagaggattctggacaactaaggcctagcctatttatagcatattctaacatccccctcaatcgtatcttgcacaagttaagattgtctctgaatgaagtcaacttctacataatcccttagtaaagccatcttcaacttggttctttgtagttataattctgaccttcaaaagtcctttagctactctttctctcaaaaaatggaaattaatctcaacatgtttcatacggccatgaaacctttggatttgctataagataggtagctccaatgttattagaccagatccttgcaccaggaggacaaggaacctgtagttcaagtaaaagtgaccggacccacatcaactctgtcatcgcattaactatggttttatattcagcttcaatttgacctagagactatgggctgcttgcgagcactccaacattgcaaatttctactaagatgtattgcaaagccttctgttgagcgtctatcatctatgtcacttgcccaatctgcatcagagaaggcatccacaagcgttgagggagacttcacaattttgggaccatctccaaaagtgaacctgacatatctaagaatcctcttcaccacagttcaatggtgctggtctggctgctgtacctgtacaccacactcttgaacctggatagagttttgtgtcatcttcgagcctgtcaccagtagcagcttcctaattttccttagtagcattgtcagatgaatgattattgattagacaataaaggatcagcatcacaagtcctatcgttaaagttagatgaaggtaaaagggtggaaggtaacaaattgattttggcccttagtctagcaccaacattagggtgagggtgaagcttagcaaacggaaaacttcatcaaaacaacatctcgtgaaatataaatacgacttatggatactttgagagatatatcatttatgtccttggaaaacacaacaaattgatctaagtgacatcttgtgggtgttgtaaggacgcaagttaagtcatctggcacacccaaaaaccttgaggaaagaatagtcatgaggttgttcaaataatatctcaagagatgaatgatcaagccaacttggtgggtgtgcgatttctaaggtatgcgtcaacgacaaatgcttcatcccataatcttagtggtattgaagcatgcacgagcaaagattggtcaacctctactatgtagcgatgctttctttcagaaaatccattttgttgatcaacatggggacaaaacaggtgtgagatacctatcttggtgaaaaacgagttcagacattgatacttgcctccccaatcagtttggacagcaataatcttggtgttagcgctcaatcatgttataaaattcaacaaacttactttagatttaatttttagcacatagacctaggtgaacttgtggaaatcattaataaaactgacataatactttctttgacctacaaacttaggagtaggaccccatacatcgggaaaacaagttcaaggggttttaacgagacttattgatgtaggttggccataaataatcgatgttagacttcggatcgactggccaaacgtgggctaccacatccggccgcttgtcccctttgtgatcaagatgtggaaaccatcaacaacattctagtatcctgtgtgtttgctagggaagtatggagcttagtgcttaataggatcatccccgcaataagaccttgtcagggacgtgactgactgacttagctctatggaggcgggaagctgtgattcaattgtaatccatttgtgtgtttgggccctatgatggccataatagcagtgggctgtattggcctagtattgtactataaatattggacaagtagtggagaaagacataaaagatagaataccagaaattgcacatacctgtttttctcctttctgtaattcgcatctggaagtctttttcctcctcgacaacgactcacgacggtggaggtgcgccaccgtcccaggtcgttacagtggtatcggattcagcgtccttggctgcgggtgctcatcaatggcaagtgcggtttcctgggcgtgcaagtcggagacatcatctcggcgctggaaattcttcaccacggcgcaacaacggttgatggtacactcgaaattggcggccacggtggctgagagggcggcgaccgagcgagtccagatgagtcagaagatggagcaaacagagaagatggtggaacaattccgactggagcagaggagcaaagaacttgggaaaatgccaggagcagccgtggaaggggaacaacaccatcagccaccaattcctccattcatcagaccacggcaggaaaggagggaaccaccacgaggtcttcatggtggcatgcatcagtcagggagaaccacacccacatggggagcagtatcatcaaccactacttaagctgccatttctgaagtactctgaaggcgatccagtgatatggttgaacaattgtttggagtatttttcgatcttcagtgtgccagctgctatgtgggtttcagttgcatcgatgaatttggaacatactgcggcacaatggtggcagtttcacaagacgcgcaatggtttgggaggctggcaggaattttctgcagaagtggtggcgaaatttggggctgaagcgtatccgaatgctctaaggaaacttttggagttgagacaaactgatactctggatcagtatatcaaggattttgatcggattcgatatggtgtagcagtacacaatccattgttcgatgagatcttttttgtgactcattttgtccaaggactgaagtatggtatccaaagtgtggtcagaatgcagctgcctactactgttgatcgtgcaattgtgttagcccagactcagtatgatattttggagcaggcaaaagttaaggggcagcgtcagccattcaataacaaacataccatgataggatttaagggagaagggaagcagggtgatctgtccaaagaacgacaggtgatggattgtgctacacatgttgtgaaaagtttgagccgggacacattactaaatgcactaaacgagggcctgcccaactcaatgctgttatcactgagaatgtagagatggttttaacagatgagttgttgcaacagcttgagcaggaggatgatcaataggggttgtgttaccaggtttcaacacatgctttatcgggtactgttgggttgcagaatatgagaattcgagcagtagtgcagaagcaaatcatggtaatgttggttgattctggtagttccactaccttcattagtgaacatatggttcagaagttggcattacctacacatccattttcaccagtgactgaaaatggcaaatggagcttctatgaactgccataaaatggttaagaatgtggaatggtgggcaaatggtcacttctatcatactgatatgagagtcttacccattagtgcttttgatgcaatcttggggtatgactggctacaggatcatagtccaatggaatgtgattggaaggctaatattctcagttttgtagatgagaatgttccagtagttcttaagggagatgagggtgaggactcaatgatggtgctgcagatatctgtctcaattacacaagtgggagaaggcaaatgaggtgtgggcctttgtgttggtggaaactagtgtggaacaacagacacatatccagcatgcagatattcagtgtgtgctgaactgctgatagaatttggggattcattcacagttccaaatcaactacctccatctagggtatatgatcattatattccccttctgcaggagctgttcctgtgaattccagaccatacaggatgaaatagagaggcaagtgaatgctttgttggaggctggtttgattacacctagtgtgagtccctttgcctctccagttctcctagtgaataagaaagatgggtcttggagattttgtgttgactacagaaaactcaatgacatgactgtaaaaaacagatttcctatgccccttgttgaagaagttctagatgagttggcaggcacacacttctttactattcttgatcttacagcaggataccatcagattcgaatgggtgagatagatgagttcaagacagcgtttaaaactcatcagggccattaccaattcagagtgatgccgtttggtctcactaatgcgcctgcaacttttcggtgtgctatgaactcagttttggcacccttccttagagcatctccaacaacgtgacctataaaaatgccctataatttgaaaatgagtatattttatagaatttagggcaccaacaaaacaccccgctccaacagtaaagccccaaatctagattatagggcagcccactacggtgtagtatatttgagtcacttgagagggtgccctatagttttttgacaaaattttatgaaatggggcactgttggagtagtttttcctgtgtagagccctatatttcaatttgaggcactagtttgaggcatcgttggagatgctcttaggaagtttgttttggtattcatcgatgacatatattgatctatagtgcttcttgggttgaccatttactgcatttgaggatggtgtttaagaagttgagagaacgccagttttatttgaagagaggtcaaagtgtgcttttggcaagactgagctgctatacttgggtcatatcatttctcaagatggtgtgtccacatatccttctaaggctgatgctatgaaaaagtggcctacacctaccagtgtgactgagttaaggggatttttgggggttgactggatattacaggagctttgtgaagcattatggcatcattgctaaacctcttaccaatctactcaaacataaggcatttcattggagtccagaagctgaagcagctttccaacagttgaaacaagctatgtgtgatacaccagtattagccttacctaatttcgagaactgtttgtggtggagactgatgcttgcatgaatggaattgggggcagttctcatgcaaagaaacatacccattgcatatcttagtaaagccttgagtgaaaaaaatcagctgctctccatttatgataaggaatttctagctctcctaatggcagtggaaagatggtgtcagtatctacagagggctgaatttgtgattagaacagatcacaaggcattgagcttcctaactgaacaagtgttgcaatcagatctacaaaagaaggctatggccagattaatgggattgcaatacaagattgtttataaacaagggaaggagaacattgctgctgatgcattatcaagagtggttcatcttatgacattacaaaccttgacagaagtgaaacctttatgggtacaggaagtgcttaactcctatgtgactgatgaggaggcccaaaggttattggctgaattggtgcttcatagccccaatgaacaagggttttctgtgcagcagggtgtgatcagaaaaggttctcagatttgggatgctcagaattcagcccttagaactaagatgattgctgcatttacatgacaacatagtaggaggtcactcaggttgtctggcaacctatcagagggtgaagaggctattttggtggaaaggattgaagtctgatgtcaaactgtttgtgcagcagtgtgcagtgtgccaacatgctaagtctgaaagagttctctatccaggattgctccaacccctacctgttacccagggtgcatggcaagatttgactatggattttattgaaggtcttcctaagtcggaagggtgtgatacaattttggtggtggtagatagatattctaagtatgcacatttttttctttgaaacacccattttcagcagcaactgtggcacaagtgtttttgtacaacgtggtaaaacttcatggaactcctaagtccctgatctcagacagggataaaatttttactagccacttttggaaatctttatttcagtcattggatacaaagttggctctaaccactgcctatcatcctcaatctgatggtcaatcagagagagttaatcaatgtttagagatgtacttgagatgtgccattcatgattgtcctgctaagtggaagaagtggctcccattagcagagttctggtacaatacatcctatcacacttatattggatgctcacccttcaaggtattatatggatatgacccggtgtttgcggcagccccagtgtaagctgatgaaggggatacaacagtccaggacttactgacagagaggcagcaatgctctgaaattctaaagactcggctagcagcagcccaaaacagaatgaaaattcaagctgataagaagagatctgatcggatggttcttctcaaattgcaaccctatgtgcaaagctcaatcgttaatcgaccttgccccaaattggcttacaagtattttgggccattcaaagtcttggaaaaggttggttcagttgaatatcgattggagttgccagaaaattctttggtgcatccggtcttccatgtgtcccagttgaaggcctttacaccaaatgctgttccggtgttctcggatttttctcaaatggtggatttatctcaagttgatgtcaagctcttgtacattgtggatcggtgaatggtgcggaaaggtagtcatgctgtgattcaagtacgtattgtttgggctcatctaccagatgaggtagcgacttgggaagattatgaagtgatcaataagcgctttccagatgccctttattggggacaatcaagctcgagcgaggggggtgatgtcagggacgtgactgactgacttagctctatggaggcgggaagctgtgattcaattgtaatccatttgtgtgtttgggccctatgatggccataatagcagtgggttgtattggcctagtgttgtactataaatactggacaagtagtggagaaagacagaaaagatagaataccagaaattacacatacctgtttttctcctttctgtaattcgcatatggaagtcttcttcctcctcggcaacgactcacgatggtggaggtgcgccaccgtcccagggtcggttacagacctcctaggattgatagtcgttttaactcctggtggtgtcgagcctcaggtactttgcccaaggaagagaggaaggggttcaatccctttgtggtcctagttgcctgggaactttggaaacataggaatgcctgcgttttcagggttctaggcctgctgtccaagcccaaagtgttgcgcaagctgttatggatgaaggtcatctttggtgtttgtgacggaacctcccaaggtattaggcccacctacagttttccttgtcttaaggaccttggacaaccctgtagatgcacataatcactcgacaagttcggtaactgtatcctcatcatttcgcccaagagcgcttcacccgtcacacaaatattacatcacatcggaggaaataataagcggaagcaaattacaataacttaatttacattcatcaatatagagtgtattattattacaaaaccagggtattacgagtgcatagagtattattacagaccagggaggcaaaacaccctcccgcacacacaagtttattgttttcaaagtgggaggcaaacatcctcccgcgaccaacttcactgctggggctcttccttgggtaccacctttgaatagaaacaacaaaactctgctgtctcctcacctacaacaacatgggttcgaaaaccctgagtacggagtgtactttcgcaagtcttacccgacaaaagaaaagactctcaaggatatgctggcttgagggagtcaaggtaaggctattcaagaatcaaagactatgtttacagaaatgcttactaacagtggatccttaaaaatccaattttattatcaggttaagtcattacctgtatctagagttctttctaccctagatcaggcacttggcctacactagccgtcttttatcaccccttttttactttactggaatgctacgtgtaagtcagtgaccaagtcttcatgtccgagaagtaacgacgtttcgaatcgattaatactcagctgaggatctccaatcacacgacatatgtagcacttaacccttgcatatgtcaactcgccaccgggtttctagagaccagaccgggttcacgccaaccgagagcacagatacaccatcgtccagcctcttgccacggagggtacacgctactctcgccatctctccactcccagtgcgtgttggcctttctggtattggtctgcccgaggcaaagcttacccatgacgaggcatgtgaccagttaaagcgtcctcgatcatcaggcctacatcgacacggtccttaatcgactcagacggagacactacaccgagacttccttctcgtgcaagtcacccgcccggtcccgtttttatcattttcaatcccaaaatttggtacctgatagaggtacatcttgtccgatgttgaacccatcacggccatgatggatccaccatcaagttttatttttgaaaacatcccattccatctgaagcatcatcttttgtttaaaacaaaacattttgtttttctaaagcaagactaagcatcagaaaactttttaacaaaacaagtaatcaaggaaaggataaacagttccaaggaaggaaatgcagcaatagttcatcactcaactcctattacctaatgcaacatttcaagtgataaagagtttaaaaccaaaaggaaaaagggtaaatgcaccggggcttgccttgtgttgtaggggattcgggatctgttccacagatatcaaaataaaaactattcccggcaggtggagtctcagctggtggtgcagtttctttttcttcgacaattacttcttcgttttctatacataaccatacatatacatgaatgctcatgtgatgctatgaatatgcagttataatagagatacatcaagttgtatcttgaatacaactttccttcacggtacacctgggtaactaaggttttccgagtcaacactctattaggataagacaattattaccttagaaagctagggttttggggttggggatcaaacaatgtccaaaacatgtcaaacttcacctaagggttctaattatcatattaagcttgcccaaaaagttttatgatttttggagcaattaagtaatttctaaaattccaaaagtctaggtttagaccttcttaaatgttgaataattcatggttgggactaaaaatcttggaactatttttattaaatactagtggaatttaggagtctagtaaaattggtcccatatttttatcatttttctagaattttctataaatttcctaagcctggcagaaaaagaaaagggaaaatgatgaacagtgatgtgctgaaaccagcccgaaccggcccacgtccaggcgaaacgcgcccgcgcgcgcgaccgcgttgttcattttgcgcagaggacctcgactgtttcaataaccggttaagaacccttggccactattcactgtttctctgacaatcacacttaggtccctaaacttctgtttcttcgcaacgacaggtccccgatgatgaacgccagtgagcacgccctccggcgaacctgtaccggccaagacacttaataaccagagccctagcttggccgacacctaattccgccctcggcgacagtaatccctcccttaattacacgaatccggcccagagttcgtctgtccacggtggcgacgaatatcgtagacaaatcgtggtgttctaggcgattcaatgcggtctagttcaatcaaacgggtctgcgagcaacatgagacttgagggaagctagaacatcacacagaagggcatgaactaacccgtagacgactggccacggcgagatgtctcacgacggcgtttcgaccgatttgggggaaatacgaaattgggaggctctggtgaacgatcagaggcgagagctggtgctttggatgcgtaataacctagcggagctcactggggcatcaatttatagagtccatcagcggtggcgctcaatttggagaaggcgcgctggcggctggagagaggggaggttcactggtgcgagctgtcgtggctttcaccggggtagtgtctcaggcgatgaacaagctaccgaaggcggtttactgcgacgtggtaaagcatcgaggcacgtggcattcgcgcggcaggcggcaaactccggcgaggttacctggaccggccgcaaggcaagtgggtacggggccggctcccggtctcatccacggtgaagatctttttcaccctgagtcgttatccgcgcggctacgggcacgcctacgggcacgaatcgcatcgccgacgcgaatccaggcgcggggtcaccggcggctgcacctgaagatcttcaatactgtaccatcagaactccattcagagcgcctgacagggcattttcaggagtgtttttcacaaatttttatgtggcaaccctctaattggtctgtagcaaaattaatctcctacaaaccagctttgattttgttatagcaaccataatcaaacatccactggatcttactcaaaatcgcccccaaagtctgtcccagttcactgtcagtcaaactccagcttcaggggtgtctgacatccagacttcaggtccatttatctccaaattttgcatgtcaccaatgcttaatcacttaagcaaagttatactcctatcatagctctacaaatttgttgtgttgacctagggcaaaattcttgtaaatttagagatatagagctccaaagttgaccccattccactgaaattcagtcttagccaaatagtgctcatgtgacccttttgcaaataagtccaaatttcaccattcaacttgaaaattctccaatgtgaaggttacttggtttatggtgttttatcactttgatatttgcactttggtccaaaagtgcatagaatttgcatttaccccctaggattccaattagggttttctagggtttcttttagggttttgagtactttagggtttttgtgccactaaagttcatcaaatgtgatactttgtgaacatttctcatggcttttcagatttttacccatttaggctactactaccctcatatcctaatccaagggttaagtaccctaccctagggttaatcacacatcaagtcacctcatcacaacttgtttgaaaattttacctagtgaatatattctaggtgtaacaaacacatgaaatgtcaatgcacatgatgttatgctcaagttttagtgccaggggtgttaaagtgtttagctggggctgctgcccttccgggtttggtccttaggactgaaccttctttggtcgtgaacggggttgttactgtgtaagtgtgagttgtaatacacacccaccccagggtgtataatcttttggggggtttctttcttcttaatgaaatgacgcgcagctctccttcgcggttcgtgaaaaaatgtaggatagggaagctaatgactctttgcaagcattatagagagactcttctgactcactagaacacataattttattttgcttgactaacttatgaataatctgaaaggaagtatgaccaaggcgactatgccactggtgaggggacatcttgatagccccaagacccctcgctgtatacttggtaacgggtagagaccgtcttcacatctaccgtggagcagaaccttcctcgtgtctagatccttaatcagaaagtgataagaaaaatactcaagtgagatatgattgtttttggaaaaacaatgaaccaagactagattctttggggcacgaggaacgtgcaagacattgatgagacacaatgttttaacaggggtatcagtaacaacatgaccaatgttgtcaatattcatacctgccccactatgtgaggatttgatttgtccccttgtacttattctggaccatcggcttgtccaggtcagatctaaagtgatctgttgccgccatgtcagtagcagttggttgtaacaccatagccaccttggttggccacaactgtagtcttggtgtcagaggtgtagctctatcatagcggtaccagcaattgagggcaatatgccttaccttgccgcagacttgacagatcttgtcagtgcgctgagcttgtggacatccatcagtcaaagataacgatggaccttggtggccaccaggaggaccacatccatggtcgtggttgttgtttttgcgcccttgactagcagcattagcaaatgtttgatgacctccatggagtagatccattgtggcgttgaaactgagaagctgagaggtggcttcagctatggtgacatgctcaacacgggctactagagcggagaccattaggttatactcttcatcaagtcctgcagaatgtacaagacgagttctttatcttcaatgatcttctttatatatgtcgtctcatgcaatagatttcatcttagcaatatttttttgaatacgcgggagagttgcgtatcattatagtaagaagcgttgtaaagtacaacaaaagctgaccacacccctcactcatatgtagttagtagttacatgatcgccaattaatcaaacagaaaaacgacctcaatacaaacaacacccctggtaagactgctagggctgttggacacctgctagagggagcctagtgagctccttagctccagcaaggcaccaaaggtgtccctctttttcaataagggcgagaccattttggacatcaggaagggttccattgaagactcctttgttcctttgtttccaaagcatctaggcaccgagaatcactagggaattcagttttctttagaaaatacttggagctatcttatcaacacggagccacgactcgccaaaagaaagatcacccctctgtggggcgagaaaggccagcctaactttgttaaggatattgaaccagacctgtcgagctaatacgcaaccgataaggatatgctgcatggtttcatcaactcgtataacacagctgtcagatggggcagtcctcctcattctatctgctgtccaacacccataatggagggccaactaaataaagaatttgcatttccttggtgcccgtctcccagattattttctagaaagcggaatggacagcgccaatgaagaaagtttcatacgccgacttggaagaatactggccagattctgagaatctacatctatgtacatcaggggcacccgaggttagggagtggtgccctccaacaaatcaacatctccatctatgtacatcaggggcacccggggttggggagatgccctccaacaaatcaacaatctgaaagagctttgccaagacgacaactaagagagcatctccaatatcctgcaaccatgcattattttgcaaggaatcctgaactgttcgtttgtttcttcttttagtgatcaaagaatgtatattaggcgacaactttgccagcgaagcaccatgcagccaattgtccattcaaaagggagtattgctatcatcccccacaatagatatcatggccacatcgaataacactttcgcccaattatgagtttgaatagggaagattgcccaaggcttgcctagatgtgtctttcttagccataatcatctcatgtgtaaagcccaactgagttttgagaccatgaatacctacaccacccagccccaagggatcaagtaacctttggccaagctaacagacaagacacccttttgcatctttctaccacgccataggaaaccctgagggattttatccatgactttcaaggcccaaggaagaagatcaattgctatggcctgatagatgatcatagaggtcatgacaaatctgaccaagaccgtctttcctgctctactaagcaggtctgccttccaccccgtattacctttctattgtagttgccagggcaatccatgtgttcatggtttggattcttgactgacacgtaactcttctacagttctgaccacacctcatggggtgtttcgtatattgatctgatccatgacttgagtcatggatgccatgaggaagccaaggatctgttgctggagtgcgacccatcggatgtacttcgggttgacatcgtcgatcatcttgccatcctgtttgacggaaatcttcttgttgggcgcgctacacccgtgccatctaggtagccttgtagctgcgcacctataaggatggacaaaacctgcggtttccagaatgagaagttggtcatgctgagctttacaacaactttgctctaggagatgcgtcaaaactgcaaagttggatgacgccatgggatcttgtcgctagtgaggttgatgtcgacttgctcttgttcaggacgctggctaataggtataggaggtggctctgattaccatgaaggaaacatggcgccaagatttaaattgcttgtctggacctcttgggtcgatgtagctgtatatttttacaggcacgagcagcctattataagaggaatcctactcggttacaacattccaaccgactctgacctaaatgatcagtacacatgtagacctgttctattttatctctaacctctaaccagagtcggtttctactctagcacaagaggatcctagacaactaaggctgtagcctatgtataacatatgctaataatttatattgcagaagttattatatgttttatgagttaacaaaggcctaaaaacagatttgaggaac

SEQ ID NO: 542 - DNA, 18442 bp, Zea mays
  Intron number 1 from transcript GRMZM5G829563_T01 (locus G RMZM5G829563) derived from phytozome v7.0 (chr-ID 3; pos 2 05821860 to 205840301 reverse strand)
gctccacgccgaagccgacctcacccaatccaaaggtaacatatctacactggaattcttaatgttgtgttcatgggaccagagcatactcctgtttcaccgtcctgatttcctggcacctctcatttcatcgagtgtcaagtatcagtgttattaaaactaccctaaatgtcaaaacgttaattaaaggttgaaacagatcattaactatctttgggctcaatctgctagttacttttggtccaatccggaccagtcttcacacgcttgccctactccccccgccctgaagcctgatggctagtagcgccacccaaggttttaaagtcggcaagtactctagtcgcatgagcaacgataaggtgactaatcatgattagtcgtcgatttgctcgattagtcgagcttctagtcgtcctatagtcgttcacctataaaagtaccatgtgtgtatatatatatttgtagcatgactgcaggacagcagtacactatagctgtagcaagacaacagtacaacattatactatattgcagatctactgacaatatcacaatataactgtacaagcatgttttcactaaaaggtaaaaatcacttgccttggattatacaatagtgcactaatttcaactccaggaattattagaatgccaaacaatgaagcgaagcgcaactcaagaggaggccaaggtagacacaatactgctcaataagtgaacactgaacaaccaaaattacagagcaattaccgtttgaagaggtgctcatctcggtctctgaattttgaatagaggagttgtcgcctactcgcctggtcggggctgaacagacaacagaggagaacgggcgtgtgttgtagggggggggggctctgcagactgcagccgccgagtgatagagggccggagggggcgctcctactgctcgagcagagggtcgtcagagcacagcaggcgtcagcgatgggcaaggggcggcgacaccggagaaggggtggcggcgctggagaagggcgcacgcgcgagtgtgcgtaatgtgcagtggcggagccaggaactctattagtgtagggccggatataacactacaaattatttatatcaactaaatttttgaaatcacacaaatatatagctggtggcacatatgaattccatttgaacacaataattgcaattaacataaaattaacttaaataagtggttacctaattaagaaaatgatatatgttcgtctcaatgatcaattcattaattatttgggttgcttttatcaacaataggaagtctttctggaattaaatgatattatgttgttgcatacacagtcaaagaaaacgaactataaagtataaacttgtaagaactaagtgtaccactcatttgaacatgttgacatgtgaagcatctctatatgactgtattagaacctgccctttggctttgctaatgactgaaaagaaaatgttactgatatttggttttggtaacatgtaacaaccgaataaagtggacaacaatgatttaaatgatctaagaacaagctaagcacagtacattctccactgaaaactcatttgtataccaatttcactatcctgcacagaatagaacatttgcatgccgaagattgatttctcctccactagtccacatatgtcgcatccatggtttaaatgtggtgctgctggcgtggctacacatgaacttgtaggtgacattcgtagcggcggtggctatggaaacataccgttgcccagcgagggagtcaaggagggagtcagcgatgcggttggagaaaaccacgcctgctcgccgtggcgccatcgcattaccacccgccaccgtgccgctgcctgcctcgctgtcgccgcgtcaccggtcgtcgccccgccgcctgcctaagcctaacccttgttggaacacgaacccatacccctaaccagggatggggagtagtattaataggcttagtaactgggccaggcccattacagtgaggggtgagacggtaattacatggggaacaccccaaaccctagaatcctagacgggtagtctaacaaccctggtgactagcacggtgtctaacaccccccccgcagtcacaactctatcctgtacagatgttgagactggaacgaaagtctaagaatacactcgacggtagtcccttggtgaagatgtcggcgaactgcagcgtggtggggacgctgagaacccgaacgtcaccggcagcgacacgctcgcggacgaagtggaggtcgatctctacgtgcttcgtgcgctgatgctgcacggggttggtggagaggtagaccgcactgacgttgtcgcagtagacgagtgtggcgcgctggagaggactgtggagctcgtggaggagctggcgcagccaggaggcctctgccacaccgttggccacagcacggtactcggcctcagcgctggagcgagagacgacgggctgcctcttggcggcccaagagacgaggttggcgcccaggaacacggcgtagccggaggtggaccggcgcgtgtcgggacagccagcccagtcagcgtcggtgtagaccacgagctccgacgtcggggatgggcggagtaggaggccgtagtcgagggagccgcggaggtagcgcagaatccgcttgagcgcagtgagatggggctcccgcagagtgtgcatatgcaggcacacctgctggacggcgtaagcgatgtcgggcctggagaacgtgaggtactggagcgcgccggtgaggctccggtatgacgtcgcgtcggcgaccggaggcccgtcgtcctcagagagcttcgcctgagtgtcgacaggcgtggagcagggcttgcagtcagacatgccagcccgctccaggatgtcgatggcgtactggcgctggtggaggaagagaccctgaggccgacgttcggcggtgatgccgaggaagtggtgtaggggccccaggtccttcatcgcgaactcccgctgaagggcgacaatagtgcgatgaagaaggtcggcggtggatgccgtgagcacaatgtcgtcgacgtagagcaggaggtagatggtgtcgtcgccgcgccggtagatgaacatggacgtgtccgacttggcctcgacgaagccgatggaggccaggtaggaggcgaagcgactgtaccaagcccgtggcgcctgtttgaggccgtacagggacctattcagccggcaaaccagatccggacggtcagcgtcgacgaagccggtgggctggctgctgaaagggaattaggcttacacctagttcctaaataattttggttgttgaattgcccaacacaaataattggactaactagtttgctctagtgtataagttatacaggtgctaaaggttcacacttagccaataaaaagaccaagagttgggttcaacaaaagagcaaagagccaaccgaaggcacctctggtctggcacaccggactgtcacacaccggactgtccggtgtgccaccggacagtgtccggtgcaccaccggacatgtccggtgcaccagaggactccaactcgaactcgccaccttcgagaatttccagaggcactcgcgctataattcaccggactgtccagtgtacaccggacagtgtccggtacgccaaggaagagcggcctcaggaactcgccagcttcgggaatctccaacggctagtccgctataattcaccggacatgtccggtgtgcaccggactgtccggtgcaactccggagcaacggctatcaccgcgccaacggctacctgcggcgcattaaatgcgcgcgcagcgcgcgcagaagtcaggcgtgcccatactggcacaccggacagtaaacagtacttgtccggtgtgcaccggacatccaggcaggcccacaagtcagaagctccaacggtcggaatccaacggaactggtgacgtggctggggcacccgacatgtccggtgtgcaccggactgtccggtgcgccatcaaacagacagcctccaccaacggtcaagtttggtggttggggctataaataccccaaccaccccaccattcattgcatccaagttttccacttctcaaccacttacaagagctaggcattcaattctagacacaccaaagagatcaaatcctctccaattccacataaggctttaagtgattagcgagagagatttgccgtgttcttttgagctcttgcgcttggattgcttctttttctttctcacttgttcttgtgatcatcactcaattgtaatcaaggcaagaggcaccaattgtgtggtggcccttgcggggaagttttgtttcccggctttgatttgagaagagaagctcattcggtcggagggaccgtttgagagagggaagggttgaaagagacccggcctttgtggcctcctcaacggggagtaggtttgcgagaaccgaacctcggtaaaacaaatccgtgtgtcacactcttcatttgcttgtgatttgttttgcgccctctctcgcggactcgtttatatttctaacgctaacccggcttgtagttgtgtttatatttgtaaaatttcagtttcgccctattcaccccccctctaggcgactatcaagtggtatcaaagcccggtgcttcattagagcctaaccgctcgaagtgatgtcgggagatcacaccaagaaggagatggaaaccggcgacaagcccactacaagccaagggagcacttcatcggaagagtcccgcacgaagaggaaggagaagaagaaggactcctccaaacggaaggagaaaagatcttcctcttctcaccacaaagagaagaaggaaaaatcttcttcccacaagtcacatcggaaaggcgacaagcacaagaggatgaggaaggtggtctactacgaaaccgacacttcatcaacgtcgacctccgactccgatgcgccctccgtaacttctaaacgacacgagcgtaagaagtttagtaagatccccttacactatcctcgtacatctagacatactccattactttccgttccattaggcaaaccgccaacctttaatggcgaagattatgctatgtggagtgatttaatgaaatttcacataacctcactccacaaaagtatatggaatgttgttgagtttggagcacaggtaccatccataggggatgaggattatgatgaggacgaggtggcccaaatcgagcacttcaactcccaagccacaaccatactcttggcctctctaaatagagaggaatacaacaaggtgcaaggattgaagaatgcaaaggaaatttgggacctcctcaagaccgcgcacgagggtgatgaactaacaaagatcaccaagcgggaaacgatcgagggggagctcggtcgctttcgacttcgccaaggggaagagccacaagacatgtacaaccggctcaagactttggtgaaccaagtgcgcaacctcgggagcaagaagtgggatgaccacgaggtggttaaggttattcttagatcactcatattccttaaccccactcaagttcaattaattcgtggtaatcctagatatactcaaatgacccccgaggaagttatcgggaattttgtgagctttgaatgtatgatcaagggctccaagaagatcaacgagcttgatgaaccctccacgtccgaagcacaaccggtggcatttaaggcgacggaggagaagaaggaggagtctacaccgagtagacaaccaattgacgcctccaaactcgacaatgaggaaatggctttaatcatcaaaagctttcgccaaatcctcaagcaacggaagggggaaggattacaaatcccgttccaagaaagtttgctacaagtgtggtaagcccggtcatttcattgcaaaatgtcctatatctagtgacagtgacaggggcgacgacaagaagggaaagaggagagaaaagaagaggtactacaagaagaagggcggcgatgcccatgtttgccgggagtgggactcggacgagagctccaccgactcctcctccgacgaagacgccgccaacatcgccgtcaccaagggactcctcttccccaacgtcggccacaagtgcctcatggcaaaggacggcaaaaggaagaaggttaaatctaaatcctccactaaatatgaatcctctagtgatgatgatgctagtgatgaggagaataatttgcgtaccctttttgccgacctaaacatgcaacaaaaggagaaattaaatgaattaattagtgccatccatgagaaggatgatctcttggactcccaagaggacttcctaatcaaggaaaataaaaagcatgttaaggttaaaaatgcttatgctctacaagttgaaaaatgtgaaaaattgtctagtgagctaagcacttgccatgagactattgacaaccttagaaatgaaaatgctagattaattgctaaggttgattctcatgtttgtgatgtctcaattcccaatcttagaaatgataatgatgatttgcttgctaagattaaggaattgaatgattcttttgctagccttagagtagaaaatgaaaatttaattgttaaggctaaagattttgatgtttgcaatactactatttccgaccttagaactaagaatgatatgttgcatgctaaggttgttgaattaaaatcttgcaaaccctctacatctaccgttgagcacacttctatttgtactagatgtagagatgttgatattaatgctattcatgatcacatgactttaattaaacaacaaaatgatcatatagcaatattaaatgctaaaattgccgagcataacttagaaaatgaaaagtttaaatttgctagaagtatgctctataatgggagacgccctggcattaaggatggcattggcttccaaaggggagacaatgtcaaacttagtgctccccctaagaacttgtctaactttgttaagggcaaggctcccatgcctcaggataacgagggttacattttgtaccctgccggttatcccgagagcaaaattaagaaaattcattctaggaagtctcactctggccctaaccatgcttttatgtataagggtgagacatctagctctaggcaaccaacccgtgctaagttgcctagaaagaaaattccaagtgcatcaaatgatcatgacatttcatttaagacttttgatgcatcgtatgttttaactaacaaatccggcaaggtagttgccaagtttgttgggggcaaacacaagggctccaagacttgtgtttgggtacccaaagttcttgtttctaatgccaaaggacccaaaaccgtttgggtacctaaaatcaagaactaaaatcgttttgtaggtttatgcatccgggggctcaagttggatactcgacagcgggtgcacaaaccacatgacaggggagaagaagatgttctcctcatatgagaaaaaccaagatccccaacgagctatcacattcggggatggaaatcaaggtttggtcaaaggattgggtaaaattgctatatcacctgaccatactatttccaatgtttttcttgtagattctttagattacaatttgctttccgtatcccaattatgtcaaatgggctacaattgtctatttactgatgtaggtgttactgtctttagaagaagtgatgattcaatagcattcaagggagtgttagagggtcagctatacttggtagattttgatagagctgaactcgacacttgcttggttgctaagactaacttgagttggctctggcaccgccgactagcccatgttggaatgaagaatcttcacaagcttctaaagggagagcacattttaggactaacaaatgtacattttgagaaaaaaggatttgtagcgcatgccaagccgggaaacaagttgggactcatcatccacacaagaacatcatgactagtgacaggccactggagctcctacacatggacctattcggcccgatcgcttacataagcatcggcggaagtaaatactgtctagttattgtggatgattattctcgcttcacttgggtattctttttacagaaaaaatctcaaacccaagagaccttaaagggattcttgagacgggctcaaaatgagttcgacttaaggatcaagaaaattcgaagcgacaatgggacggagttcaaaaactcacaaatagaagactttcttgaggaggagggcatcaagcatgagttctcttctccctacacacctcaacaaaatggtgtagtggagaggaagaatcgaactctattggacatggcaaggaccatgcttgatgagtacaagacttcggatcggttttgggccgaggcggtcaacaccgcctgctacgccatcaaccggttatatcttcaccgaatcctcaagaagacatcctatgaactcctaaccggtaaaaagccaaatatttcatattttagagtttttggtagcaaatgttttattcttgttaaaagaggtagaaaatctaaatttgctcctaaaactgtagaaggcttgttactaggatatgactcaaacacaagggcatatagagtctttaacaagtcctcaggacttgttgaagtttcttgtgacgttgtgtttgatgagactaatggctctcaagtagagcaagttgatcttgatgagacaggtgaagaacagactccgtgcatagcgctaaggaacatgtccattggggatgtgtgtcctaaggaatccaaagagcctccacatgcacaagatcaactgtcctcctccacgcaagcatctccaccaactcaaaatgaggatgaggctcaagttgatgaagggcaagatcaagaagatgagccacctcatgatgatggcaataatcaagggggagatgcaaatgatcaagaaaaggaggatgagcaagaaccaaggccgtcacacccaagagtccaccaagcaatacaacgagatcaccccgtcgacaccatcctcggcgacattcataagggggtaactactagatctcgtgttgcacatttttgtgaacattactcgtttgtttcctctattgagccacacagggtagaggaagcactacaagattcggattgggtggtggcgatgcaagaggagctcaacaacttcactagaaatgaggtatgacatttagttccacgtcctaatcaaaatgttgtaggaaccaaatgggttttccgcaacaagcaagatgagcatggtgtggtgacaaggaacaaagcacgacttgtggccaagggatactcccaagtcgaaggtttggatttcggtgaaacctatgcacccgtagctaggcttgagtcaattcgcatattattggcctatgctacttaccatggctttaagctttatcaaatggacgtgaaaagtgctttcctcaatggaccaatcaaggaagaggtctatgttgagcaacctcccggctttgaagatagtgagtaccctaaccatgtctataagctctctaaggcgctttatgggctcaagcaagccccaagagcatggtatgaatgccttagagatttccttattgctaatggcttcaaagtcgaaaaggccgatcctacgctctttaccaaaacacttgagaatgatttgtttgtatgtcaaatctatgttgatgatattatatttgggtctactaacgaatctacttgtgaagagtttagtaggatcatgacacaaaagttcgagatgtctatgatgggggagttgaagtactttctaggatttcaagtgaaacaactccaagagggcaccttcctaagccaaaccaagtacactcaagatattctaagcaagtttggaatgaaggatgccaaactcatcaagacacccatgggaaccaacgggcatctcgacctcgacacgggaggtaagtccgtggatcaacaggtataccggtcgatgattggatcattgctttatttatgtgcatctcgaccggacattatgctttccgtatgcatgtgtgcaagattccaagccgaccctaaggaagctcaccttacggccgtaaaacgaatcttgagatatttggcttatactcctaagtttgggctttggtatcctaggggatccacatttgatttgattggatattcggatgccgattgggcggggtgtaaaattaataggaagagcacatcggggacttgccagtttttggggagatcctttgtgtcttgggcttcaaagaagcaaaattcggtcgctctttccaccgccgaagccgagtacattgccgcaggtcattgttgcgcgcaactactttggatgaggcaaaccctgcgggactacggttacaaattaaccaaagaccctttgctatgtgataatgagagtgcaatcaaaatggccgacaatcccgtcgagcatagccgcactaagcacatagtcattcggtatcattttcttagggatcaccaacaaaagggggatatcaagatttcatacattaatactaaatatcaattagccgatatctttaccaagccactctccatctttgggggagagagcaaaaggacttcatctttggtataatcttaactcatttgtttataaccaaaggggaagaaattacttcgagggctctaatggttccgtttttggcgattcatgccaaagggggagagattatgagcccaaagcaaaaggaccgcactcccaccaatttcaaaaccttagtcttttcaaagaatatttttcaattggtatcccattatgttcaaaaggggaagaaagtagtatttcaaaaatgatatatcaaaaccctcttgaacactaagaggaggatctcatttaggggagttttgtttagtcaaaggaaaagcatttaaaacagggggagaaaatttcaaatcttgaaaatgctttgcaaaatcttactcatttacccttgactatttgcaaaagaactttgaaaaggatttacaaaagaatttgcaaaaacaaaacatgtggtgcaagcgtggtccaaaatgtcaaaaatgaaagaaacaatccatgcatatcttgtaagtatttatattggctcaattccaagcaacctttgcacttacattatgcaaactagttcaaatatgcacttctatatttgctttggtttgtgttggcatcaatcaccaaaaagggggagattgaaagggaattaggcttacacctagttcctaaataattttggttgttgaattgcccaacacaaataattggactaactagtttgctctagtgtataagttatacaggtgctaaaggttcacacttagccaataaaaagaccaagagttgggttcaacaaaagagcaaagggccaaccgaaggcacctctggtctggcacaccggactgtccggtgtgccaccggacagtgtccggtgcaccaccggacatgtccggtgcaccagaggactccaactcgaactcgccaccttcgagaatttccagaggcactcgcgctataattcaccggactgtccggtgtacaccggacagtgtccggtgcgccaaggaagagcggcctcaggaactcgccagcttcgggaatctccaacggctagtccgctataattcaccggacatgtccggtgtgcaccggactgtccggtgcaactccggagcaacggctatcaccgcgccaacggctacctgcggcgcattaaatgcgcgcgcagcgcgcgcagaagtcaggcgtgcccatactggcacaccggacagtaaacagtacttgtccggtgtgcaccggacatccaggcaggcccacaagtcagaagctccaacggtcggaatccaacggaactggtgacgtggctggggcaccggacatgtccggtgtgcaccggacatgtccggtgtgcaccggactgtccggtgcgccatcaaacagacagcctccaccaacggtcaagtttggtggttggggctataaatactccaaccaccccaccattcattgcatccaagttttccacttctcaaccacttacaagagctaggcattcaattctagacacaccaaagagatcaaatcctctccaattccacataaggctttaagtgattagcgagagagatttgccgtattcttttgagctcttgcgcttggattgcttctttttctttctcacttgttcttgtgatcatcactcaattgtaatcaaggcaagaggcaccaattgtgtggtggcccttgcggggaagttttgtttcccggctttgatttgagaagagaagctcattcggtcggagggaccgtttgagagagggaagggttgaaagagacccagcctttgtggcctcctcaacggggagtaggtttgcgagaaccgaacctcggtaaaacaaatccgtgtgtcacactcttcatttgcttgcgatttgttttgcgccctctctcgcggactcgtttatatttctaacgctaacccggcttgtagttgtgtttatatttgtaaaatttcagtttcgccctattcacccccccccccccctctaggcgactatcagctgcagtagacagtctccgtcagagtgccatggaggaaggcattcttgacattgagctgatggatcgcccagtcgcgggagagggcgagggaaaggacggcgcaaacagtggcgaacttgacgacaaggctgaaggtctcgtcgtagtccactccgaggcgctgggtgaagccccgaaggacccaacgggccttgtagcggtcgagggagccgtccgaggtcagcttgtggcgaaatagccacttgccagtgaccacgttggtgcctggtggacgcggcaccaggtcctaggtgtggttggccaggagggccgcgtactcctcctccatagcacgacgccaatgtgggtcggcgagggcagtgcgaacggaggagggcaccggggaagcgtcgggtggagtgctagacgtagcagctgccaggattagccggtcgacggggcggagaacgccagcagcgcgccgagtcaccatcgggtggacgtgcccggggtcgcggtggatggcgaccgggtggtaaacggacgactcggagcgaaccgccggaacgtcgggagcggctggtggggccggctcgcggcggtgatagacgacggcggggtcggcgaaccgggccgcgttcgtcgacgggcccgagtcggggggcgctgaggtagtggcgtggccgcggcgatggtagacgagtgcggggttggcgaagcgagccggagtcgacggggccgcgcgtggcgcaggcggtgtcgacggggccgcgcgtggcgcaggcggtgtcgacggggccgcgcgtggcgcaggcggggtcgacggggccgcgcgtggcgcaggcagaatcgacggggccgcgcgtggcgcaggcggggtcgacggggccgtgcgaggcgcggaagaggtcgtagtggccgcacgaggagcaggtaacggcgcaagacggggagccggaggtggggaaggaatcggatcggactcgaggagggagtcaagatcggtgggtggggtggagccagcaaggggaaacacatcttcgtcgaagatgacatgacgagagatgatgatgcggtgggaggtgaggtccagacaccggtaccccttgtggtcaggggagtagccaaggaatagacagcgggtggagcgaggagaaagcttatgtggagcggtagcggaagtgttagggtagcaggcacagccgaacacgcgaaggtggtcataggaaggggctgtgccgtatagggcgaagtggggggtagggtggcgcaccgccttcgagggaagacggttgaggaggtgggtggcagtgtgcagggcctctgcccagtagctggcagggagagacgcctggaagaggaggcagcggagcatattagtggtggtgcggatcatgcgttcgacgcggccgttctgtgcagaggtgtatgggcacgagagacgcaactggatgccatgagtgaggaagaaagagcgagaggcgttgttatcgaactcgcgtccattgtcacactgcagggcgcggaccgggcgacgaaactgagtggatacctaggtgaagaagtgtgtgagggtggtgaatgtgtccgacttcaaccgaagcgggaaggtccagagaaaatgggaaaaatcatccaaaatcaccaaatagtatttataaccagaaagactgagtacaggggaggtccaaagatcacagtgaaccaggtcaaaagcctgctcagcccgagaagaagaagtagtaaatgggagacgagtatgtcggcctaactgacaagcatgacagagaccctcaaaatgtcccctactacatgaaggatctagactactggtaatcttggtcatgacgtctggtccaggatggccgagacgacgatgccatgtggtggaggaggtggtggagaccaggacagggggtggagacacgccggcggtggagggctggagcgtgtagagcggccccgagctgtcacagcgggcgagaagggtcctggtggccagatccttcacagaaaaaccaggggggtcaaactcaatggaacaagagttgttagtggtgaatcgacgaacggaaagaagattgtgagtgatgtggggagctatgagaacatcgttgaggtaaaacggcccagggagaaccgaggcacctactgaggtgactggcagagtggaaccgtttccaacgacgatcgaggatgggtgagaggggagggggggatgagagcgagagagcgtgcctgtcgtgggagtggtgtggtacgaggcaccggagtcgatcacccagtcggaggggggtggggtcattgccatggtgctgaaggcaacagcgagggaggcgttgtcccaaccaccggccgtcggggaccaaggcgtcgaggtgtgggtccccgggggcaggagtgcgggcggggcctggggcacgacggggacaccgtaaggaggcgcgccgtagggaggtgcagtcaggagggccggcgccggaggacgggaggcacgcggtgcctggcccggccacatggcgatggtcccggtccaggggttgtagaatgacggccacgcgtggccgccaccccggccggagggaccaccacgggaggagccgccactcccacggccgcccttgcgggagcgacgacccccgtcggtcgtggaagtcggacgaggggccgccgggaaggcgggtggagggcgggtgggggccccggtcgacggaggacgggtggcctggccccctgaaggtggcagaccgctggtaggagtgctgtagagggccgaggcaggagtgggtgcctcattcgccatggtgagctcctcaaggagaagctcgttccgcacggcgtggaaggtggggaagggcacgctccgcttgatgagagccttcaggtggccgtagcgagggctgaggccacgcaggaggttcagcaccagggtacgatcggcaacaggctcgccgagatcgcggagagagtcagccaggcccttcatctggcggcagtattcgcccacggagaggtccccctgagagaacaggtggaactgggcgtcgaggtggagcgcccgcgcatcccgattcccgaggaactgatcctcgagagcgagccacgcctggcgcgcagtgtccgcctggtcgcggatgatgtcctggagctcaacggtgatggtgccgtggagccacgagaggacaacgctgtccatgaggcaccaggagcgaggcggcggagcgtcgtggtcgatgaggacgtggtcgtcgaggacgaacctccgcagcgtgagaaggacctgtcctcgccaacgggggtagtggggagacgccggatccaacaccacggacacgagagcccggatgttgtgcagaccagcggcttgagcgtggagagcagcgatgaggtcggcgtcgaggtcagaggcgagggggtcctccgggggttccacagaggcgaccggcgggcggccgaggaggcgctgcgtggtggccatctgggtggtcagagcggcacccagggcacgctcacgctccagggcgagggaggcggcgcgctcacgctcacgctcccgcgaggccatcacagccgcctggatcgtagcgagggtgtcgccgagagtggagtcggtgccggggggtgccgcgagggcagggaaccctggtggagagcctcgacggtgggccggggaagagacgtcacggaggggccggaggccgacgatgtagggagcctcgacatctgccacggagcggccggggcccatggggtgggtctggccggcagcagggaggcccagggaggcgacgccggcggccagggaggcggtggccgcgcccaggcccgcggtcaggggcgggtgcgccaggccggtggtgtgcgcgtccggggggaggtccgccatgggcagagggcgcggcggcgggcagcagagggctgctggcggcgatggcgaagggggaggagggcgcgcaggctggggcgcgaccggcaggggaggagaggcggctggacgccggccgagggagaaggggaagaagcgagccggggcggatccggcggcgctggcgcggaaggagacaagccgcgcgcggcaccggcggttggaggagacggcgcaggtgcgcggtccggtgggagcaaagggagaaggcgcggagttgcgtcggggcgcgggcctgaggcggccgggcgcgcgggaaggagggccgccggcggctggctctggcagggcgcgcgcggatacggcgggtggtgcacgccggagatgggggggcgcggccgggaagaggtgggaagcagagaggaccggcggcggggcagggagggagggggaggagaggccggcggctggggggctaggcggcggcgcaggggagctccggcggctgggcagggaggccggcggcggctgcaggactgggagaagcccctggcggctgtagctgacaggacctaaacctaaacctaatttgataccatgttggaacacgaacccatacccctaaccaggggatggggagtagtattaataggcttagtaactgggtcaggcccattacagtgaggggtgagacggtaattacatggggaacaccccaaaccctagaatcctagacgggtagtctaacaaccctggtgactagcacggtgtattcttggcatgtcgattcatgggtttgtgcctgcaatttctgttgatatgccggtgtcggttcatgggcctatagatgttgtttagcctaagtgtagggctcgggccctagtggccataggcctagatccgcctttggtaatgtgtgtgtgtattcttggcatgtcgattcatgggtttgtgcctgcagtttccgttgatatgccggtgtcggttcatgggcctatagatgttgtttagcctaagtgtagggctcgggccctagtggccataggcctagatccgcctttggtaatgtgtgtaccttattggtataggtagggcaaaacagtgtttgtggtgtacagatggtgggccggcctatataacagagaccagattactagcccaaaacaggcataactagtcgatcataacccctagtcggacgactaatcgcgattagtcggtgactaggacgactaatcgcttcctagtcgctctagtcgagtcgaagaccctaatcgagctcgcattagggataaggctgactaatcgcgattagtcggacgactttaaaaccttgccgccacctgaaggtgttgttgctgacgtccgctgcaccctgtgcgccctctctctctccctccgcgccgagtgtgccctccttcctcgacgtgtacagacgcttctccgcgccgtgagcccgcgtcgtccgtgttgctcctctcctttcgcgctgccctctccctccgtgccgccctctctccacgcttctgtttgctagcagccggttgcgtcacccaacagtcgactcctcccatcatatctgcctctgttttcgtaagctactgacgttttggtatttaacttcatgttattgtctgaaattataatatattggtatttttactatgttgtttaaaactacatttaaacttcgtttatcgtttaaatgtttaaaagtcaaaacttcacccatgagcgtttcaacgtttatcgttttaataaccttgccaagtatgacccccattgtcccaaaaggtgcagtttgatttatctccagaaacctgttttttctacctagcccttttagattgacgtgatgtagtgatgtgtaaattgtaaccatacgacattggaacgagacttgacaattcacatgcagatatgagtccaatgtgcaggcttgagcatttgctcagctgcacaccatccttgtaacaatttcttttcttttcctttttcacagcaaatagcgagagggtaagacttgtgcggttgact

SEQ ID NO: 543 - DNA, 12598 bp, Zea mays
  Intron number 9 from transcript GRMZM2G079754_T01 (locus G RMZM2G079754) derived from phytozome v7.0 (chr-ID 6; pos 1 63323895 to 163336492)
gccaacacagccacttccgtcaccagcggtacgttcctgaatttaatgctagttgacacttatgtgcttggttcgtgattaatgttgtacttcaaatcattagatatatgtcagttatattcagaatgctcactttttctactctttcacatcatgatagttcaaatttactctttctacgaatattattgtcaaaaagttccactttgtaaacgtgtctatgtccaaagtgacttgcatttgacatatatatgagaaccaaccatgctgatgtgggtagctactcaatcagcttgtggttgctaaacaaacactctaaagttgatacatgtgccagattctctcttatgggtgtgtgttgtttttttgggaccttattaattagtgttgttggcaggtagggtgctgatatctagttttagttggcatttattttagttagccttttgttttgggctactgaagctgattggattatattcgttcaggtgggtggtgggtgttggaacagtactgttttgtcataagtacatactatgcagtgtattgccaaagcgtggttgatgcttgaagtattctcaaagcacagcatatatattcatattttgtaggtagcatagctgtctgttgtctggcatataagcataatttaccacgtggctgattgggtgctgcgtcttgaaatgaagtttgttttcactctcatgttcatgttcatgcacaaatatggaagccacattttgtgtttatcatgctttcctatatctttgtgtacatgtgatttaatgtcagttgtgtatttatgagaattttggtttattttgtaggattccggctctcatcaagtgactcctccccctcacgttgactttgcggacagatgtctcaattctagtggtggagctacgaacaacaatccgatgtcctgatcgagagcgatggagctaatgtttgaacttgtgtgtttgaacttgtgaactatggatgtgaacctgtgtgaatttgtgaacttatgtatttggacttatgtgaatttgcaaacttatatatttggacttaattatgtgaatttgtgatatgaacatatatcaatgtgtttgaaatttgtattgtatgtgatatattgtgttgcatgtgatattatgtgtatataattttacatttctgtattttttattttttctagaaaagggttaagaacgtgggtacccacgttcttaaggttaagaacgtgggtaccgtcgaacttaaatggggcagccctcgccgacccacgcacgacccataagttcgacgaccacgtggccacgtcgaacttaaggttaagaacgtgggtgccgtcgaacttatgggaaaacattcgacggcccccgtcgaacttaaaaacccacgttcttaaccttaagttcgacggtacccacgttcttaatgttaagttcgatggtacccacgttcttaaccttaagaacgtgggggtcgtcgaacttacttctttaagttcgtccaaaaatcggcgtcggctatattcgtgggtaaacccacgttcttatggtaagttcgatggcctattacattaagttcgacggtttttcacccacgttctttaaccagtttcttgtagtggagcaaatttaaatttttcattttcaagttcattctcgacaattttagcatctaattttgctatatgatcattttgttgtttaattaaagccatatgatcatgaatagcatcaatgtcaacatctctacatctagtgcaaatagaaacatgctcaacggtagatgtagagggtttgcaagtttttagttcaacaatcttagcatgtaaaatatcattttcacttctaagatcggaaatggaagcattgcaaacatctaattctttagccttagcaatcaatttttcattttcacatctaaggctagtaagagaggcattcaatttttcaatcttagcaatagaaatatcatgatcatttctaagattgacatatgaatcatcacaaatatttgaatcaaccttagcaattaatttagcattttcatttctaaggttggcaataacatcatggcaagtgcttagctcactagataatttttcacatttttccctttctagagcgtaagcattcttaaccttaacatgcttcttattttccttaattaggaagtcctcttgactatccaagagttcatccttatcatgaatagcgctaatcaattcatttaacttttctttttgttccatgttaaggttggcaaaaagagtaagcaaattatcctcctcattactagaattatcttcatcactagaggatgcatatttagtggaggatttagatttaaccttcttccttttgccgtcttttgccatgaggcacttgtggccgatgttggggaagagaagtcccttgttgacggcaatgttggcggcgtcctcgtcggaggaggagtcggtggagctctcgtcgaagtcccactcgcggcacacatgggcatcgccgcccttcttcttgtgatatctattcttcatctttcttctccccttcttgtcatcgcccctgtcactgtcactagaaataggacattttgcaataaagtgaccgggcttaccacacttgtagcaaaccttcttggagcggggcttgtagtccttccccctcctttgcttgaggatttgtcgaaagcttttgatgattaaagccatctcctcattgtcgagctttgaggcgccgatagggagcctagttggtgtagactcttccttcttctcctctgttgccttgaatgcgacgggttgtgcctcgggcgtggaggtgccttgctcgatgattttctttgagcctttaatcattagctcaaagctcacaaattttcctataacctcctcgggagacattagcttgtatctaggatcacctcgaattaattgaacttgcgtagggttaagaaaaacgagagatctaagaataaccttgaccatcccatggtcatcccactttgtgctcccgaggttgcgcacttggttcaccaaggtcttcaagcggttgtacatagcttgcggatcctccccttggtgaagcatgaagcgaccgagctccccctcgatcgtctcccgcttggtgatctttgtcacctcgtctccttcgtgtgcggtcttgagtacgtcccaaatttccttcgcactttttaacccttgcaccttattatactcctctcgacttagagaggcgaggagtatagtggtggcttaggagttaaagtggtggatttgggccacttcgtcaaagtcgtagacttcatcccctacggatggtacctgtacaccaaactcaacaacattccaaatgcttgtgtgggagtgagggttagatgatgcctcattttgtcactccacatattataatattcaccgtcaaaaccggtggtttgcctaatggaacagagagtaaaggagtacgttttgaaatacaaggatagcgtaggggaatcttactatacttcttgcgctcatggcgcttagaagtaatggacggcgcgtcggagccggaggtggatggcgatgaagaatcggtctcgtagtagaccactttcctcatcttctttttcttgtccccactccgatgcgacttgtgggaagagaattccttcttctttcctttgttgcgggactcttccgatgaagccttcccgtggcttgtagcgggcttgtcgctggtctccatctccttcttggcgtgatctcccgacatcacttcgagcggttaggctctaatgaagcaccgggctttgataccaattgaaagtcgcctagagggggggtgaataggtcaaaacggaaatttacaaagttaatcacaactacaagccgggttagcgttagaaatataatcaagtccgagagaggggcgaaaaaacaaatcgcaagcaaataaggaatgagacacaaggatttgttttatagaggttcggttcttgcaaacctactccccgttgaggtggtcacaaagaccgggtctctttcaaccctttccctctctcaaacggtcacttagatcgagtgagcttctcttctcaatcacacgggacactaagtccccacaaggaccaccacacaattggtgtctcttgccttggttacaattgagtttgatcacaagaagaatgagaaaaaaagaagcaattcaagcgcaagagctcaaatgaacacaacaaatctctctctaatcactaaatcttttgtgtggagttgggagaggatttgatctctttggtgtgtcttgtattgaatgttatagctcttgtaaggtgtagaagtgtagaaccttggatgccattgaatgtggggtggttggggtatttatagcaccaaccaccaaaatgtggctgttggaagtctgctgtcgcatggcgcaacggacagtccggtgcgccaccggacactgtccggtgcgtcagccacgtcagccagccgttggggttcgatcgttgaagctctaacttgtgggcccgcctggctgtctggtggtgcaccggacaagtcctgtagactgtccagtgtgccacccgcgcgtgctctatcctctgcgcgcgcagacgcgcatttaatgcgttggagtcgaccgttgcgcgcgaagtagccgttgctccggtgaattatagcggagcggatttccgaagctggcgagttcagagttgcttctccctggggcaccggacactgtccggtggtacaccagacagtccggtgaattatagtggagtgcctctgagaatttcccgaaggcgaagagttgagcttggagttccctggtgcaccggacactgtccggtggtgcaccagacactatccggtggcacaccggacagtccggtgcgccagaccagggtgcctttgggttatctttagctctctttatttgaacccatctttggtctttttattggcttgttgtgaacctttggcacctgtaaaacttatagactagagcaaactagttagtccaaatatttgtgttgggcaattcaaccaccaaaatctatttagtaaaaaggtgtaagcctatttccctttcaaataccaaattaattgctaaggttgaaaaatccaatgtttgtgatgattctattgttaatcttagaaatgataatgctagtttaattgctaagattgacatgttgaatgaatctcttgctagccttaaaattgaaaatgaaaaattgattgctaaggctaaagatttaaatgtttgcaatgatgctattaccaatcttagagatgagaatgctattttacatgctaggattgttgaattaaatgattgcaaaccctctacatctagtgttgatcatgtttctatttgtactagatgtagagacattaatgttgatgctattcatgatcaccttgctatgattaaacaacaaaatgatcatatagctaaactagatgcaaaaattgtcgagcatgaattagaaaatgaaaaatttaaatttgctcgaagtatgctctatagtgggagacgccctggcattaaggatggcattggcttccaacagggagacaatgccaagcttaatgcccctcctaaaagattgtctaattttgttaagggcaaggctcccatgcctcaggataacgagggctatattctatatcctgctggttatcctgaggataagattaggagaattcatgcaaagaagattcattctgtctctcaccatgcttttatttataagaatgaggcttctagctctaggcgttctacccatgttaaaatgcctaagaagaaatctcctattgcatcaaatgatcataacatttcatttaagacttttgataattcatatgtgctcactaacaaactaggcaaagtagttgccaaatatgttgggggcaaacacaagggatcaaagacttgtgtttgggtacccaaggtgcttgtttccaatgttaaaggacccaagaccgtttgggtacctaagaacaaggcctaaatttgttttgtaggtttatgcatccgggggctcaagttggatcattgatagcgggtgcacaaaccacatggctggggagaaaaggatgttctcctcctatgagaaaaaccaagatccccaaagagctatcacattcggggatggaaatcaaggtttggtcaaagggcttggtaaaattgctatatctcctgaccattctatttccaatgtttttcttgtagattctttatattacaacttgctttctgtttctcaattatgtaaaatgggctacaattgtctttttactgatataggtgttactgtctttagaagaagtgatgattcaatagcatttaagggagtgttagagggtcagctatacttagttgatttcaatagagctgaactcgacacttgcttaattgctaagactaatatgagttggctctggcatcgccgactagcccacgttggaatgaagaatcttcacaagcttctaaagggagaacacattttgggactaacaaatgttcattttgagaaagacaggatttgtagcgcatgtcaagcagggaagcaagttggtgttcatcatccacacaagaacatcatgacgactgacaggccactggagctactccacatggatttatttggcccgatagcttacataagcatcggcgggagtaagtactgtctagttattatggatgattattcttgcttcacttgggtattctttttgcaggataaatctcaaacccaagagattttgaaaggattcttgagacgggctcaaaatgagttcggcttgaggatcaagaaaataagaagcgacaacggaatggagtttaagaactctcaaattgaaggcttccttgaggaggaggtcatcaagcatgagttctcctctccctacacgccaaaacaaaatggtgtagtggagaagaagaatagaactctattggacatggcaaggaccatgcttgatgagtacaagacttcggatcggttttgggccgaggcggtcaacaccgcctgctacgccaacaaccggttatatcttcaccgaatcctcaagaaaacatcatatgaactcctcaccggtaaaaagcccaatgtttcatattttagagtctttggtagcaaatgctttatccttgttaagagaggtagaaaatctaaatttgctcctaaggctgtagaaggctttttacttggttatgactcaaacacaagggcatatagagtctttaacaagtccactggactagttgaagtttcttgtgacattgtgtttgatgagactaatggctctcaagtagagcaagttgatcttgatgagctagatgatgaagaggctccatgcgttgcgctaagaacatgtccattggggatgtgtgtcctaaagaatccgaagagcctccccaagcacaagatcaaccatcatcttccacacaagcatctccaccaacccaagatgaggatcaagctcaagatgatgaaaatgaagatcaagaagatgagccacctcaagaggaggacaatgatcaagggggagatgccaatgttcaagacaaggaagatgaacaagatcaaaggccgccacacccaagagtccaccaagcaatccaacgagatcaccctgtgaacaccatcctcggcgatattcataagggggtaaccactcgatctcatgttgctcatttttgtgaacattactcttttgtttcttctattgagccacacagggtagaggaagcacttcaagattcggattgggtgctggcgatgcaagaggagctcaacaacttcacgaggaatgaggtatgacatttagttccacgtcctaaccaaaatgttgtaggaaccaagtgggtcttccgtaacaaacaagatgagcatggtgtggtgacaaggaacaaagcacgacttgtggccaagggttatccacaagtcgaaggtttggattttggtgaaacctatgcacccgtagctaggcttgagtcaattcgtatattacttgcctatgctacttaccatggctttaagctttatcaaatggacgtgaagagtgctttcctcaatggaccaatcaaggaagaggtctatgttgagcaacctcccggctttgaagatagtgagtatcctaaccatgtttataaactctctaagacgctttatgggctcaagcaagccccaagagcatggtatgaatgcctaagagattttcttattactaatggcttcaaagtcggcaagcccgatcctactctctttactaaaacaattgcaaatgatttgtttgtatgccaaatctatgttgatgatatcatatttgggtctactaacaaatctatttgtgaagagtttagtaggatcatggtacaaaaattcgagatgtctgtgatgggggagttgaagtattttctaggatttcaagtcaagcaactccaagagggcaccttcatcagccaaacgaagtacattcaagatatactcactaagtttggaatgaaggatgccaaacccatcaagacactcatgggaaccaatgggcatctcaacctcgacacgggaggtaaatccgtagatcaaaaggtataccggtcgatgataggatctttactctatttatgtgcatctcgaccggatattatgctttccgtatgcatgtgtgcaagatttcaagccgatcctaaggaggttcaccttagggccgtgaagagaatcttgagatatttagttcatacacctaagtttggtctttggtaccctaagggatcctcttttgatttattaggatattccgatgctgattgggcagggtgtaaaattgataggaagagcacatcagggacttgtcagtttctagggagatccctggtgtcttgggcttcaaagaaacaaaactcagtagctctttctaccgccgaagccgagtacattgccgcaggccattgttgcgcgcaattgctttggatgaggcaaactcttagggactatggctacaaatttagcaaagtccctctcctatataataatgagagtgcaatctgcatggcgaataatcccgttgaacacagccgcactaagcacatagccattctgtatcactttttgagagatcaccaacaaagggggatatcgagatagcctatattaacaccaaagatcaattagccgatatctttaccaagccactagatgagaaaacctttaccaaacttaggaatgagttaaacattcttgattctcggaattttaattgatacgttgcacacatcgctcatttatatacctttgatcatatctctttaatgtctatgactaatgtgttttcaagtgtattctcatgcttagtcatagaattgaaagggaaatggagtattcagcaaagacgacgcttccactcaactccatcggtattattcactctttgtcggtattccgtatagttctccactttggtataatcttcactcatattttttgtttaccattgggggaaagtttagggcttatatttcactcacaagtacccgttttttgcgattcatgccaaaggggagaaagtattagcccaaagcaaaaggaccgcaccaccaccaaattttaaaatgaagttttcaaattgatatttttatgtgttttcaaaaggagagaaagtactagtaccttcaaaaagtcgtaaaaccctcttgaacactaagaggagattttcattgagggagagttttgtttaagtcaaaggaaaagcatttaaaacaggggagaaaattttaaatcttgaaaatgcttctttcaatcttattcatgtacctttgactatttgcaaaaaggattttgaaaagaatttacaaaagaatttgcaaaaacaaaactcgtggtgcaaatgtggtccaaaattttagataagaagaaaaccatccatgcatatctagtagaaataattatattggtttcactccaagcaacctttgcacttaccttatgcaaactagttcaattctgcacttctatatttgctttcgtttgtgttggcatcaatcaccaaaaaggggaagattgaaagggaaatagggtcaaaccttttcctaaatgaattttggtggttgaattgcccaacacaaacaattggactaactagtttactctagattatgagttctacaggtgccaaaggttcaacacaaaccaataaaaagtccaagaaagggttcaaataaaagagcaaaagacaaccgaaggttgtcctggtctggcgcaccggactgtccggtgtgccaccggacagtgtccggtgcaccagggtggatcaactctgaactcgccagcttcaggtttccaggggagccgctccgctataattcaccggactaacagcggagcaacggctatctgcgctaacggtcgtctgcaaaaggtgaacagtgaacgtgaacagtgtgcgcctgcgcgcgcagaagttagagcagcgccagaaggcgcaccggacagtgaacagtgactgtccggtgcaccaccggactgtccggtggccccacttgtcagagctccaccggtcgaaccctaacagttgggtgacgtggctggcgcaccggacaatgtccggtggcacaccggactgtccggtgcgccatacgacaatagccccttcccaacgacacttttggggtgggttggggctataaatacccccaaccaccaacacttcaaggcatacaagttttcagccactgcattcaatacaagagctctagacttcactccaagacacaaacaaagagatcaaatcctctgtaaagtccaaagatcattccaatcaaatagtgactagtgagagagtgatatttgtgttcttttgagttcttgcacttggaacgctttcttccttcctcatttcttgttctcaagtgttctgtaaccaaggtaagagacaccaagtgtgtggtgatctttgcgggtctaagtgacccatgaaataaggagaaagctcactcggtctaagtgaccgtttgagagagggaaagggttgaaagagacccggtctttgtgaccacctcaacggggagtaggtttgcaagaaccgaacctcggtaaaacaaatcaccgtgtcatccgctctatttctttggttgatttgttttcgccctctcttttgaacccgattatatttctaacgctaatcccggcttgtagttgtgcttaagtttataattttcagattccgcctatttacccccttctaggcgactttcagcagctgccagctcatatggtatgccagcacgacacgaccatagcctgttgaaaaactactgtgatgtcagcgctacctatggttcccgttttgctaagtataatgttatctagattatctatcttattctttattttaaacttttctatgtaaacaatgtcaaacaatattatctacggttttacgttttatgtcccatatttttcgcacaccaccggagacagtctaatattatctttgcaatggcacggttacttgctccttaactgtttctatgcattgtatgaccggatcaaagtcatacaccattagcctagaagatgtcggtatagtctgaaatcagttgataatctctgctcaaaaaacgtaagggacatgtttagtttttagggactaatttttagtctatctattttattttattttagtctctatactatcaaatatggaactaaaattctcactacacgacggttgatctttagcgacccttattaggtaccaactgttggttgctaaaggttagggaccaacggtcagtcgctaaatccttttgtagcaacggtcggttggtcgctaaaagtctagaaatttaacaacttatggttgatcgctatagatgtcgtcggggactagcggtgggtcgctatagagcaaggatcactatcaaatcttatagcctgaacgtacctgtagatattagtgactaaaaattaattaaaacaagtaaacattgatcgctaaattgtagtaaataaaaaaagaattgtagaaaagaaaaaaagaattatggaaaagaaaattgtaacactataaaaatcataaaataaaaataatgcatttagttattaatgatatttatggtaatcaattttattttaagtgtttgttatgtatttgcatttggaataatttttttattgcgcatgattgatttttggttattgaataacatttgttcttaaatgaaaatcctagtaaataaaaatataataagtattagcccacaaaataatattctatttataaataattttggtttaattactatgaattttagggttatttaaaaatgaatttcaaatttagaaaaagaaataaaaaagaaaaaaaacaaaacctaaccaaatcggcccattaaggcccagccgcacctaaccctaatcagccgccacccttgcccgccagcctctccctcgctcctctcgctcgctcggctcactccctctccaaagcggcagcctcacgcagtcagccgccacccttgatccgattgctggtcgagccccgccctcgctgccgcgcttcgctccggctgtgcagcggcgtgagcaccgagcacactcgcga

SEQ ID NO: 544 - DNA, 1287 bp, Zea mays
  Intron number 4 from transcript GRMZM2G015361_T04 (locus G RMZM2G015361) derived from phytozome v7.0 (chr-ID 8; pos 4 234312 to 4235598)
ctgaacgaggtatatcaactatgttcatgtttttttgttatatatttattgcatgtcaatatgtgctgtcatttttaattttcttgggacttctgaatttcagacccttctcttccaactatgttcagaatgatgctttgatctattaaatgcttctagagtagctatatgcatcaccacttcaccggtgactttgaacatgccaaatcctgtgtataatgaattaagttaaagtttgcgatgcgagaattcctaagagtctagataattgcatggtatctataccacagcatggaatcaagttttctcagactgacttatgggaaacaatgaaggacaggcatagtacagtggtgaggagcctttgcactgagccaaaagatcctgggttagatgcaacctctctgcaaaatggagggggttaaagtttgcctcggttattccatccccagagctcacttatgtgggagccgccagcactgggtttgtcatttttgacttatgggaaacaataatacattttgatgccagaattacatctgaagttttattataaaaaaaagtttgtcacagttggctggttaatatctaagtttgcaatgacatataacatgagtatacatatggacttgttggtacctctgcaatatttaggcacctgggttatcttgagcttgagttatggccgtcatgggcagctgtaggttagtaggtacactcaacctgaaatggctagttatactggaagtatgtatgaaggcagcaaatacatgtcttcagtttttttttggagggggggggggggaccactgttttagtacaacctgttgatcattcatccacatgacactggcaggatgaattgagggatgctgtcttgctcgttttcgcaaacaagcaagatctaccaaatgcaatgaacgctgctgagatcaccgataagcttggtctccattccctgcgccaacgccactggtgagaccactatccatttgtccgggcaaccatcttactaaagtggtattatggttgcattttccatcttattctctgcatatttcattttaatttgccagtttcgtactactcttgatattcttctgtataaaaacttctcataactaaatgtatttctttatgtacgttagtatattctttgcgaccaagtgtgtttatatgcatacttgcagtaaaaagccatactatatatcatcgtaaaacccttttaatgtgatttctttgtgagttgtaggtatatccagagcacttgtgctaccacaggagaag

SEQ ID NO: 545 - DNA, 575 bp, Zea mays
  Intron number 6 from transcript GRMZM2G318849_T05 (locus G RMZM2G318849) derived from phytozome v7.0 (chr-ID 7; pos 1 45385855 to 145386429)
agaggaagcaagcaaatttttttgatttgttgcaggtaactgtcatgctttgagttgtgaagatatcgtcaatttgatttgtgtctatatttacctaattatgagttgtatatatatatatatatatatatatatatatatatatatatatatatatatatatatatatatatatatcgatcaatgtggtaatagtgtaagttataatgcaaggctaataactccagctatatggatgcataataccatttcaaattagttgcagttcttcattgtgcactttatgttcttatgctagcatacaatattgttaagcttcttggttatttatgatctgttgtcctattttgacatgttgctttcctcaagctctccacttgccaatttaagtaaaaatggcagtgcttattgatagtaaggatgattgtcataaaattctgccaagttttacctttccactgcatcatgtaggaaaatctgtgcaccatctacaaattcatatgaagagaccatgtatgtaaagaagtgaatttatatattttttctcaaatgatcccccctcattgtaggaattt

SEQ ID NO: 546 - DNA, 36030 bp, Zea mays
  Intron number 2 from transcript GRMZM5G889778_T01 (locus G RMZM5G889778) derived from phytozome v7.0 (chr-ID 6; pos 1 6621151 to 16657180)
ttggccattagtattcctttttgtactagttgttggtccttgttctcggatgctatacatcaagaacaaaacaacacaattgttaacgattagagaacttcatccttcgaagcattatcttccttaggatataatgatctccaaacgaaggtcatgaagggcataccttcatcatttcagtgaacaaaatgtaaatagagacatatgaaacacaaaagaatgtagacaatcatcacaaatcattagattatttatattcttattttacaaacatgaataaacatcaatgatatctatattacatttataccctcggcttgatagaaggtggaaaagcgagagtgacgcaagagtgattacaattcagcgtgaacagtacagtgttactgttcatctatttataggcacaggacacagcctggtcaaaattacattcaggtccctgacatttactgttaaccatgaagcaaactatcaaggattaggtagtcttttcttctttaagtcggttccatctctcaccatcgttttcatgctaagccgaaggtccttcagccatagcttcggcgctcattcgccctttcttcaaatcacaccttcatattacgcccatcttcatctcaaggccgaagcctcctgtaacagtctgttatactgagaaacatattagttaagtttttgagtaccttcggaaaagttaggcccccaacagtagcccctcgcagtattaatttgtttttgcatttaactaattcagactgcgacatgaacgaaggcctttagccgatggtccgaaaaacaccttcccttcgcgagaatagcgaaagtcaatgacatgtagggccaaccgagttgcaatgcactgggggtataaataggaacccgcagcgatagcatttgatgcgccatctcaatcgcttgtgctattttttcaagcttgaattctcttgctccgtcagattttgcttaaactaaaatcttcggcattttcacaagtgctcaccaaatggcttaagagaagaaggttgttgaccctgctctagctggtttttacaaggctatggagaagacaaacacagagaagattacaaatgaaatgctagctggtttgtctaaagattctgatgatagcgaaaattttgatgtggaaagtgggaacgaagatgccgaagatcggccctggaggtattttcgtgatatgtccactgtgggaacgaagatgccgaagacaaacacactatcttcggaaagtcattcatcaaacagagtcagattgatgcgatgaaaggaaggtattttcgtgatatgtccattgtgagagctggaggggacagtgccgcccctgcacccgaggtggacaaagtagttgtttacaggagcttcatgaaggccgggcttcggtttccattgagtaaatttctagttgaagtgctaaagacctttgagatttttcttcatcagattacccccgaagctataatcaggatgtggattttcatttgggccgtgaggagccaaggactagagcctagtgcaaaatgcttctgcaacatgcacgagctattgtatgagacgtaggctactggcaaggagcagtatcataataattttggttgttatggcttcgtgccgttctgatgtaagttatccagttccaacgtttcggaaaaggtggccatgggcctagatgaaggaatggttttacgtaaagaataacttagctaaaagggaagatataaaggggattatccaacgtcctatttggtctcgcttcggcatcaaaaggccagctactgctcttggaaacgatattgaagcatgccagaaggctttcaacaatgtatgtacctttattggcacaagggacctagtccaggagcacatagcctatagagtgtggcctcttgtgaatgactgggaaatgccaaaggagactactgctgggtccagtcaagggggtttggtttatctgaaatacaccttcagatacaaagatcagtttgacgagctgagtgatgactggctgaactttgttgatgcggctagcgatgagttgcttggggcttacacgagagccgaacatgatgccatgaccttagccttcggaaggcgaggcaagaaaagactaaacagagttttcgatgttactggttttgtatacccagattatagctatccctcacgaaagcagggaaaaagagaaaaactgctacttcggccatttctgctgcgccaaagggcaaaaagatcaaggtgttgacacactggcctagatacattgaaacggccatggtgtcgaagcttgttgaagggacaccttccaccactgagccaggacagcatgctcctaccgtctccaaggaagaatcgactgaagtgccggaaataatagggcaagagaaaatcgaatcggccggagcgccgaagcattctaccgaagccacagaaaaaacgcccgaagtgccagagctaggagaatcagcaggattgcaaaaaatcctgagcccaccaccagagccggagttgccaaaggtgcctagagttcctgtaataactcccaagaggaggaggatggctagtgtgttggacgccgttttagagtcgacaagggtgtcaactcctgctcctggaaaggatactgctgaagctgctacagttcgcgttgaagccgaagttgggcccttagtgcccattgaaacagagcctgctggaactgggcagagtattgaacaaggaccttcagacgccggtctggttctggagaaagaagacacacccgagaaggttgaatctcctactcccgaagcacctatggaagagcttgactttattatttgacatgcttcgggtaaaaagttgtctgaagaggaaattgcggaagttaaacactacgcccgggaactgaagtatccgaagggggccttggtgtatagtggcaccaacgaagatgactttctatactgcctcccagacaacaaggaaatatatgtttgctaggagatggcaaaaaacataggatttccgaagcttgaggttggcctttctgctatgtcgaaagatgacctcgcagacagcctcgcttacaatagtctgaaggtacaggagttatggacttataagcagattatttttgtcttttattcttgtgctgatcctttgtctcccccttttttgtagggcttaattctgagcaatgctttgagagcacaaaagaatgctgaggatgagaactgctagatagcccttggtaaccttcggtcggaggttatcaaactgaggaatgagaccgcagagaaggataaaattctactttccttggtagagagtgtaaagattaatgaagccaatcttgttgtacaatccgaagctcatagagctgaaattgaggatttaaagaaaaagcttgcagaaaagaacgaggattttgaagtcgctaaagcaaaacaagaaataagtgaatggactagcgcaagactacacaagaatttagatgagcttcgggaatcaaaggaaagatattacgaaaaatccttggattgtgccaagaagctgaaagatagttttgcaaaggtgggtgcttactcatccgagcaaaaatttattagaggcgatgccgaaggaatcatcgaatggattggtgaagaagctgaagcttctgaggagatccttagtgaccgtggtgatttctgcacctttgctggtgccagaggggttgcagcaattttggaaaaatctggctgcgaacatgttaaagctgcaacccagacggaggctatcttcactgtggagaacacgaaggatccttcggctgaggcaactctgatgggtggaaaattttactccaatgttcggatgaaaggcggccgagaactagccgacgaagctataaagaagaatgggaaagaaacccatgaagcccaggaggaagctaagcgagccgaagagccttccgagcacgcaaggcgcgtaggtattttaattatttcatagctttagtattttttggcttcggattaacaacttattacttttattgtagctgaactttcaccgccacctgagccatatgatctcgaagctgatccagccatgaaggcggcgctagaaactataagaattgctgaagaagctgttgacaaagctgtcaacaaacttctgaacgaagctgctgagaaaaatttgaaggaagactagattttttgtgtagctaagaaatataacatttgtgtgatgtaatatccgtacaagttaaacattgtatattgtgacagaacctcccaagtcattaggcccacctacagttgtccttgtccaacggacctcggacaaccccgtagacgcacctgatcacttgacaagttcagtatctgtattctttacctttcccaagagtgtttcaccacggataagcggaagcaattatagtaacttaatttacattaaaatatagggagagtattgtcattacagaccggtaatttataggagtgcaagagtaatattattacaaacacaggaggcaaaaccccctcccgcataacattaaagtgtttttttaaaaaaaaagaggacaacatcctcccacgacttcattcttgagcttcttccttcggcaccaccttagagcaaaagcaacaaaagtttgctccttcctcacctacaacaacatgggttcgaaaaccctgagtatgaagtgtactttcgcaagtcttacccatcaaaataaaagactctcaaggatatgctggcttgagggagtcaagataaggcttaatcaataatcaagactctgtttgcaaaaatgcttactaatagtggatccttaaaaatctagttttattaacaagttaagtcattacctgaatctagggttctttctaccctagttcaagaacttggccgataatagccatcttgttatcaacccttcttgttcactggaaagctacgtatagggcagtgaccaagtcttcatgtccgagaaggaatggcgatccgaatcgattaatacccaactggggatctccaatcacacgacatatgtagcacttaacccttgcatatgtcaacacgccaccggggttcttaagaccagatcaggttcacgctaactgagagcacaaatacaccaccgtctagccacttgccacggagggtacacgctactctcgccatctctccactcccattgcgtgttatcttattctggtattagtctgcccgaggcaaagcttacccatgatgaggcatgtgaccggttaaaaggtcctcgatcagcaagcctacatcgagacggtccttaatcgactcagacagagacactacatcgagactctcttctcgtgcaagtcacctgcccggtctcagctttattatttcaaacccaaagtttggtacctggcagaggtacatctttttcgatgttgaacccatcacggccatgatggatccaccatctagttttatttttgaaaacatcccatcccacttgaagcatcatcttttgtcaaaacaagacatttagtttttctagagcaggactaagcataagaaaaacctttttataaaacaagtgaccaaatctttcaaggaaggaaatgcagcaagtgtttagcacacaactcctatcacctaatgcatcaagcaagtgagaaagattttaaattgcaaggaggtggcaatgcaccggggcttgccttgttttataggagagtcgagctctgctccacaaatatcaaaataaaagcagttcccggcaggtgggtcttcaggtggtggtgtagatcttccttcttcaacttctacttcttcgttttctatatatatcatatataaccatgaatgctcatgtaatgcttatgaaaatgcaaagataataaaggtacatcatattaggtcttgaatacaattttccttcacggtactccaggaaactagggtttttgaagtcagtattgtagttcatagggcaggcactacttagaagtttagggttttggggtttaggtatcaaacattgtacacatcatgtctaacttcacccaaggtttctaaatatcatttaaagcttatccaaaaagtttggtgatttttggagttactagataatttctaaaattctagaggtgtaggtttaagcccttttaaatattacataattccttgtttatactaaaaatcataaaattatttttattaactactatagaaatttaggagcctaatacaattggactcatgtttttagcatttttctagagtttcttatggatttctaaagcttcttagagaaagaaaacgaaaaactactaatagtgttgggccaaaactggcccaaccagcctaggtctaggtggaatttgggggcgcgcccgcggccgcatagtaggtttttcacaaaggtcctcgccagagccaaaattagaaatgaagttttcaaccaaatcccgtgagtcactgacactttatttctagccccctctaagcttcttgtctttcaaaattgagtccctgacgtcgtccgtcggcgcggacgagttctccccgtgacactacggcggaggagagcccgggcagtcattggatagcggccagatcaaatctcaacctaatccgagcaattatgggcatggatttggctcacaaactcatagagcgacttgaccgagcctacaacgggatcttggttccacggcgcctgtccacatgacacaaataccggatgattcaattttaagggcataggaggcattagtagggcacaaacggtgcgatgctcacatgaatcggtaacagactaaccgagtcttggtgggttgacaccggagcagttcatgtggcgtcgagcccatgttccgaccaaactatgaccgtaaagactaaacggatacctcggtgatcttcaccagcctataaggacactagaacattgattcatatgcgtcgattcatgccgcagtcgtctggccacgtaagggtgaggcgtcagcaatgaggtcaccaggtacgttgagtttcttgaccaaggagtttaggcgcgtccacagtatagttttgggaagcgaaagcaatacaactaactgaagctacacacggtgatcaaagacttaggtaaggatctctcctttgctcctgctcccttccccccggttgctctttaaataggcagtgaaaagatcaagggggctggattcttgaatttgcagcaaggataactatgagcatgagatgtagtcgtggcttactcaagaagatccacgcaggttcacagagcacactcatgtagggtttagtttatccatggcaaagggaggaggtaaggataggatggcactgtagtagatatttgtactggtgatatttcagtgatgcgcaagtctgaatatccctgctaccacctcatctcaatcttcatcctatcccaaagttggacacggcaaggagagtgaatatcaagggtagatatttcagttcttttgaatcttcaacacatgactgatcccccccttcagtcagccttttctccatattttggttaagaacaggtcagtcaccattaacagaacttgttcccaaatcaagggtctataaagttactataagtttcttggacctaatcctcatagattacaagttatggtgcccaaaaatcagttgcaattcactggtaccatttcaattttttgaacttcagtcttcagttttcatcagatttcttcctttttgacagggacagtttgggcacctttacctcttaaatttatatgacatcaggccagagtctcctaataaaacttgctcatgaatactagctttcccggtttgcttagatcaacctggcaccaagtcgcataggacagcctctgcaaggtctcaaagttgctcagacagacagaaattcaaagcagatctgcctgattagaacccatgaacctgatagcccaactttgagcatcattttccttgatttttggcacaggatcaagcccatgtttcttaagaacatttaatccccttctaatggtctctaatttatctacacaactcatagactttaaccctctagattggtcacaaaaagactccaaacctagctcgatacactacattagaggttttagattactatattctgtctgaaaattcacagttctgttggctctgttttggggtaggttttcatgagatttcatagggttttagagttgggtttctcaatcgaacttataccgctatagtagttctaccattttgatgtattaatctacgacagaatcctcatgagtgaagagatatacaactccaaagatggtccccatttactagaattcagacttagtcatatggttttcatgggtctttttacaaagaggtccaaatctcactattcaacttgcaaattcttcaatatgaaagttagtgggtttgaggtgctcttttactttgatatttgcactttggcccaaaagtgcaccaattttacacttaaccccctagggttccaatttagggtttctaggttttgtttcaagggttttggacacattagggttttggtgtcacttaagtccattaaatgtgacatcttatgattatttctcttgagttttgaagttttctgatgcttgggctttattatcactcctaagcctggtttagggttaagtaccctaccatagggttacacacatatccagtcacaccagtacaacttgtttgaaattttgcctagtgaatgatctctaagtgtaacaaacacatgatatgctaatgctcatgatgttatgctcatgttttattgacagtaacactaggagtgttacatccttccccccataaaagaatctcgtcccgagatttaaaagtcctagggcaagtagtggaatgggaaacacgacatatttttatttccttatttcttgtacaaggcaggggtggtatggggggtctattcctctattacaacaattgtacatatctcacaatttacatgaagctaaaaagcctgtaaattcttttctagaaagtcttgagtttcccatgtagcttcatcttctgtatgttggttccattgtatcttataaaatttgagagttcttcttcgggtaaccctgtccttttgatccaggactcgaataggatgttctgaatatgtcaagtctggttccaaggtgacatccttcacttcaatggttcgatctggaacccgaagacacttcttcaattgggacacatggaacacattgtgcattgcagacaatgtttcaggtagttggagtcggtacgccactggtccacatctttcaaggataggaaaaggaccaatgtaccggggtgcaagttttccttttacaccgaaacgagatacacccttcattggtgatactttcaggtagacataatcttcagcttgaaagtacaggggttgtcgtcgtttgtctgcataactcttttgtcgagcttgggcttctttcaaattatgtataattcattgaactttttcctccatctccttaaccatatcaggcctgaaaaaccatctccctcctggtttagaccaatttaatggagtacggcaccgtcgtccatacaaggcttcaaaaggtgccatcttgatactttcttgataactgttgttatatgaaaactccgccaatggtaaatagtcatcccatttctgtgggaattccagaacacatgctcgtaacatgccctcgagtatttgatttactctttctgtctgcccactggtttgaggatgataggccgaactgtgaagcaacttagtacccaaagatttgtggagttcttcccagaatttggatacaaattgtggtccacgatccgacactattgtcttcggaacaccatgcagactgagaatacgagcaacatataattccgcatatgtggccactgtatactttaccttgactgggagatagtgggcgatctttgtaagtcaatcaatgataacccagatggaatcaaacccttttgctgtcctgggtaatcccacaatgaagttcatgctaatgtcctcccatttccaagtcgggatacgtaaagattataatggaccagcaattttcatgtgtatggctttgacacgtctacaagtgtcgcatcttgccacatagcgtgcaatttcgatcttcatttttgtccaccaaaaatgttgctttaaatcatgatacatcttagtgcttccgggatgaatagaatagcgatgtcggcttttcgagaccggggggtccctgggctgacgagtgaaatgtcgccgcgtgccccagcctagatgggtcggcgcgaggccgagcgcgaaggggggaaggaagggcagccggagacgggcgtgagagaggtggaaatcccgcggccttcatgttcgtcccgcgcccgggtcgggtgcgcttgcagtaggggtttacaagcgtccacgtgggagggggagcgagcggcctcacgtgagcgcctgtcccgtcctcttccccgcgcggccaaacctctgtaagagggccctggtccttccttttataggcataaggagaggatccaggtgtataatggggggtgtagcagagtgctatgtgtctagcataggagagctagcgccctaagtacacgccgtcgtggcagccggagaggttttggcacccggttcgtgtggtgtcgtggccgtcggaggagcgctggagcctggcggaaggacagctgtcggggctgtcgagtccttgctgacgtcctcttgcttccgtaagggggctgagagccgccgtcgtcacagagcatgcggggcgccatcattgcctatctggcggagcgagccagatgggacgccggtcttgttccccgtagcccgagtcagcttagggtagggtaatgatggcgcctcctgtcgacgtggtcggtccgcgccctaggttgggtgatatagaggctccttcgaggtcgaggtcgagtctgtcttccatggccgtggtcgagtccgagccctggggtcgggcgaagcggagttcatcgtcgtctggggctgagcccaagtccgagccctgggtcgggcggagcggagttcgccgtcttctgtggctgagcccaagtccgagccctaggtcgagtggagcggagttcgccgtcttctagggctgagcccaagtccgagccctgggtcgggcggagcggagttcgccgtcttccggggctgagcccgagtccgagccctgggtcgggcggagcggagttcgccgtcttctggggctgagcccgagtccgagccctgggtcgggcggagcggagttcgtcgtcttccggggctgagcccgagtccgagccttgggtcgggcgaagcggagcttcctatggtgcctgaggtcgggcctgactacatgtcagcctcactctgtcgagtggcacagcagtcggagcggcgcaggcggcgctgtccttctatcaggccggtcagtggagcggcgaagtgactgcggtcacttcggctttgtcgactggaggacgcgtttcaggataaaggtgtcaggccacctttgcattaaatgcccctgcgatctggtcggttggcgcggcgatttggtcagggttgcttcttggtgaagacagggcctcgggcgagccgtaagcatgttcgtcgctggaggggggcctcgggcgagacggaaatcctccagggtcggctgcccttgtccgaggctaggctcgggcgaggcgtgatcgagtccctcgaatggaacgatccctgactaaatcgcacccatcaggcctttgcagctttatgctgatgggggttaccagctgagaattaggagacttgagggtacccctaattatggtccccgacagtagcccccgagcctcgaagggagtgttagcactcgcttggaggctttcgtcgcacttttttgcaaggggaccagcctttcttggttgcgttttgttccggtgggtgcacgcgagcgcacccgccaggtgtagcccctgaggcctcggaggtgtggtttgactcctccgaggtcttaatgcctcgcgtaatgcttcggctggtctggtcgttccctcatgcgagctggccgtagcccgggtgcacggtcgggttccaagttctcgggctggtatgttgacgctgtcaacggtttggccgcagccgggtttgcgagagcagcccccgagactctgcacagggcgagaggacgatcagggatagactcgacttttttacatacgcccctgcgtcgcctttccgcaaggaggagggggggaaagcgccatgttgccctcggtgggtgccgaacatggtgtctccggtgagctgctggcgggtaatccgagcggacgtccgtgccccatttgttaggggtcggctagaggcccagaggcgcgcccaaaagtacctgcaggtgatcttccggaccaggtcccctgtcgacggggtccgagggctcgatgcctccctctgatgggattctgttacaagatcgttcccgctggtctcggaaatgtcctagggtacctcgggagcgtagcccgagccttggttatgtatcaaacgtacccatggtcatccctcgctctgtgtctgaggtggttgtgaacccttcgagggccagcctacgaacccctgatcagtagtgggcgcggagcccgagtggcctgaggcagccgttgaacccttccgaggggccggccttcgaacctctgaccagtagtgggtgtggagcccacgtgctctgaggcggctgttgaacccctccgaggggccagccttcgaacctctgatcagtagggaggctcggagcctgtttccttcacggagaagggtccttttcggggtatccccctttcccggtccctgttgtaagagagagaaagaggaaaaggacacgaaatcgaatgacgtggcgtaccttttttgacgcggtcattatggcgaaggcgaagcgtcgctcgcttctcctgccagaggcgccgcctatcccgccacggagttaatgcgacggggcgagcggtttgcggggcggtcgttgcgcgtgcgcgagccgttcgaggaatggaacacgggtgcgtcgtcttcacgccgtgagagagggctctctcactgccccaggatgggacgtaaggttggctgacgacgtgcccgccactcccgcccgcctgccaccgccatcactgccggcccgtttttggccgcattgaccgtcacgcctggctggcactgctgggtcgtacgcagggttgcctcgagtcgcggtactggttccgcagtcgaggaggcgtggcagtggtgcgagtggcggtgcagttgcttgcacatagcgaccggcgcaccggttgcacgtcgcgtgggcgtgggcttccatgctgggcgcgttggaagtcggagaggtgcgcccacttggtgcggttgcatgccgcctgcatggctgcccgccctttcgcccgctggtctgggcaaaagtggagaactgcttgtaactgctgggcggttgcatgcaccgcgcgtggcggtttggcttcttctgccctgggccggcttgcaggacgtgtgggacccagcccccgcgccgtagggggggaccttggagcgtgttggagaagactcagcccacgacggctggggacacaagtagggagggtcgcctttaaaaggagggtgacccccttgaaaggcgaccatgtcttcgcgctcccttatgcatcgtgtctttccaccttccaagcccccggatgggggatgcccgcagtcctttcgccttgtcgttggaggaacacaactctgtgggagtcggtacctttcagccatcgttcggcttcaaggattttcatcagtcagcccggctgcatcccctcgcaaaaggtcacccaagacggtgaccaccagcccctgggtggggagaagcaagtcgggctgcgatcttggtcccaccctcagcttcaaggatgttcatcatcctcgctggggtgggggccgggctgagccggagctctacctcccgcgcggtttcgtgggtcagcctctccttcatcgttcgagggagagggcgctcactggccctgcgagaggggcggacttcgacaacatggggctggtcgacggcgggcgtcgttagcctcagcgcgttggactcgccggcttggctcctagtgccccctcctgccgcgaaggcggttgtcgcgccgtgcgcacgggaggaccgcccatgatgtcgcagcgctgccagggcggtgttcgtgttctggagcggtcctgcctttgcaccggtacggcgcctccacgcggaggtcggtgccccactcgtccgggaggatctgagtggggatctgccggagggctgacggcccctgtcgtcggtgccgaggtggaggcggctcgagaagtccccgttgccgacgggatcaccgccaccatccgcgcttcgggcctccggctctttgtacttgtcctcgcccctcgagcgtcggcgtaggcaagggcaaggttgcagcagcgtccgccctgaggccatcgctgctgcagttcggccacccggagcgggggtcgttgttgttgctgccggagtgggcgacggcaagccgcccgtcggtcttctgttgctccgcaggcccccccagcgagtggggttgttcgtacccgcggaggtggaaccggagttccgtttgtaatggcactttgaatgccggtgtttttgttcattgtggctgtcgaggcctgaacatgtatgtatttttggcacggagccgtgttttttcctcattttcgagcaataagactcgcctgttggttgtctgaaccgcttcaccaagcgtgagttgccccgtgcaaaggtgacgagtgaggtatccgtatcccggaggcgtaggagtccctcggctcggtcagccttgctgtccgaggcttctcttgcttagttaaaggaacccctcggccgctcttcgatgagccgaagccaggggtagcggtgtcagcatggaaagaggcagagttggctcgaaaagaagacttggtcggccggagcctggccgggtcgtccgttagcgggaccgacgccggagttgatctgccgaggcctcgggccgggctgatgtctttgggggacagctggccgaggcctcggggtgactagccgagccgcctgctcgagccaaattcttggaggagacccgggcggcgatggcccgggcgtgatgatgaagtcgtccttcagagtggagaccctcggatcgtgtcgccgtcggaggctaggtcggacctcgccgaaggtgtagttgacaccgagggtgttgctgctcccttcaaccgtcaagatccgagcctgcaggatcggattatcttgtagcgtgtgttttctgcggccgccgaggcccaaacacaccctcgccgtgttgtaaagctacgtttcttttcctcttatttcgagtatctggactttttcgtcggtaacagaattgtctgtgcgagcgagagttgcttctcacggaaggtgatgagtgaggtatctgtatcccggaggcgtaggaatccctcggctcggtcggccttgccgcttacgctcactcttacccgtccatagggttctgtcactgacgcagtcgagaaggctcgaagaatcgcttcggcagaggagctttcgaacgtgaagacttgttcggtccgcggaatcacttatccgaacgtgagttacttatcgcagaaggtgatgagtgaggtatccgtatcccggaggcgtaggagtccctcggctcggtcagccttggctgcttacgtgtactccgtcgttttcaggatccactttcgaagtagtcgaaaagcacgaaagacattttggcagaaaggatcttttttcgaggaaaatttcgatgcagagggggttccccccttttagcccccgagggagggtcgggctttgccgaggcaaggatgacccttccttgatgactaaactttgcatggaagcgaggtatatgaacaacttgaaaacatcttaagggtagaagcgacgtagctgttggatgttccaagcgttgctgtagacctcgccttgactgttggctagcttgtacgttccgggcttcagaactttggcgatgacaaacggcccttcccagggaggcgtgagcttgtgccgccctcgggcgtcctgtcgtagccgaagcaccaggtcacccacctggaggtctcgggaccggacccctcgggcgtggtagcatcgcagggactgctggtaccgcgccgagtgtagtaaggccttgtcccgagcctcttccagctagtccagcgagtcttctcgatcagcttggttgctttggtcagcataggccctcgtcctcggggaaccgtattctaagtctgtgggcaagatggcctcgaccccatagactagaaagaacggcgtgaagcccgtggggagttccttcatccatcgcttgccgaacttgttgaggtcgttgtagatccgaggcttgagtccttgtagaatcatgccgttggcgcgctctacttgcccattcgtcatggggtgagccacggtggcccagtccacccggatgtggtgatcctcgcagaagtccaggaacttcctaccggtgaactaggtgccgttgtcggtgatgatggagttcaggaccccgaagcgatggatgatgttggtgaagaacgccaccgcctgctcggacctgatgctgtttaggggtcggacctcgatccacttggagaatttgtcgatggcgaccaacaggtgcgtgtagcccccgggtgccttctgcaaggggccgacgaggtccagaccccacacagcaaaaggccatgtgatgggtatggtctgcagtgcctgagcaggcaggtgggtctgccttgcgtagaactaacacccttcgcaggtgcggacaattctagtggcgtcggccaccgccgtcggccagtagaaaccttgccggaaagcatttccgacaagggctcgaggtgctacgtggtggccgcaagcccccgagtgtatttctcgtaggagttcctgaccttcggcgatggaaatgcatcgctggaggatgcccaaggggctgcggtggtagagctccttcccatctcccagcaagacgaacgacttggcgcgtcgcgccaaccgccgagcctcggctcggtcgaggggtagctctcctcggtggagatatttcaggtacggggtctgccagttttgattaggcgtgaccccacttcgctcctcctcgacgcgcagtgcctcgccctcgggggccgagggtacctcgggctgaaccgaggatgcctcggaccgagccgagggtgtctcggactgagccaagggtacctcgggctaggccgagggtgcctcgggcgtgtcgttgatcttgacggagggttgatgcaggtctcgagagaagacgtcctggggaaccgttgttcgccccgaggctattttagccagctcgtcggcagtctcgttgtagcgccgagcgatgtggttaagctcgagctcgtagaacttgtcatccaggcggcgaacctcatcgcagtaggcctccatcttcgggtcgtggcagtgggagttcttcatgacttggtcgatgacgagctgcgagtcaccgcgagtgtcgaggcgtcggacccctaactcgatggcgatgcgcaacccgttgaccagggcctcgtactcagccacattgttggacgccgggaagtggaggcgtagcacgtagcgtagatgctttccgaggggcgagatgaagagcaggcctgcgcccgctcctgtcttcatcagtgacccgtcgaagaacatggtccagagttccggttggatcagatctattgggagctgggtgtcgacccattcagccacgaagtccgccaagacctgggacttgatggccttccgaggggcgaacgagattgtttcgcccataatttccagcgcccacttcgcgatcctacccgaggcctctcggcactggatgatctcccccagggggaaggatgacaccacagttaccggatgagactcgaagtagtgtcgcaacttccgccgcgtcaggatcaccgcgtacagcagcttctggacttgtgggtagcggatcttggtttcggacagtacctcgctgatgaagtagactggcctctgaacgggcaatgcatgcccctcttctcgtctctcgaccacaatcgtggcgctaaccacctgagtggtcgcggcgacgtagatcaagagggcttctccggcagcgaggggcaccaaaatgggcgcgttcgtgaggagcgccttcaggttcccgagggcttcctcggcctcaggggtccaagtgaagcactcggccttccttaagaggcggtacagaggcaggcctctttcgccgaggcgcgagatgaagcggctcagagccgcaagacatcccatgactcgctgtacgcctttcaagtccttgatgggccccatgctggtgatggctacgattttctccgggttggcttcgatgccccgctcggagacgatgaaccctaagagcatgcctcggggcaccccgaagacacacttttcgggattgagcttcacgcctttcgccttgagacaccagaatgtcacttcaaggtcggaaaggaggtcggaggctttccttgtcttgactacgatgtcatcgacgtaggcctcgatcgtccggccaatgtgttcgccgaacacatggttcatgcaccgctggtacgtcgcgcccgcattcctcaagccgaacggcatggtgacatagcagtacatgccgaagggtgtgatgaaagaagtcacgagctggtcggactctttcgtcctgatttggtgataccctgaataggcatcgaggaaagacagggtttcgcacccagcagtggaatccacgatttgatcgatgcgaggcagagggtagggaaccttcagacatgctttgtttagaccagtgtagtctacacacatccgccatttccctcctttctttctcacaagcacagggttggcaagccattcaggatggaatacctctttgatgaaccctgccaccattagcttgtggatctcctcgcctatggctctgcacttttcttcgtcgaatcggcgcagagcctgcttgacgggtcgggctccggctcggatatccagcgagtgctcggcgacatccctcggtatgtcgggcatgtccgagggactccatgcaaaaacgtcggcgtttgcgcggagaaagtcgacgagcactgcttcctatttgggatcgagctcggagtcgatccggatctgcctggaggcgtcgctgctgggatcgagggggacggacttaaccgtctccgctggctcgaagttgccggcgtgacgcttcacttctggcacctttttagagaggctttctaggtcggcgatgagggcctcggactcggcgagggcctcggcgtactccacgtcgcattggaacgcgtgtttgtacgtggggccgacggtgatgaccccgttggggcccggcatcttgagcttgaggtaggtgtagttggggacgaccatgaacttcgcgtagcatggcctccccagtatcgcgtggtaggttcctcggaacccgaccacctcaaacgtaagggtctcccttcggaagttggagggcgttccgaagcagacgggaaggtcgatttgtccgaggggctggacacgcttcccggggatgatcccgtggaaaggcacagcgcctgcccggaccgaggacagatcgacacgcaggagcccgagggtctcggcgtagatgatgttgaggctgctgcctccgtccatgaggaccttggtgagcctgacgtcgccgatgacggggtcgacaacgagcgggtatttccccgggctcggcacgtgatcggggtggtcggcttggtcgaaggtgatgggcttgtcggaccagtctaggtagactggcgccgccaccttcaccgaacagacctcccgacgctcttgcttgcggtgccgagccgaggcgttcgccgcttgcccaccgtatatcatgaagcagtcgcggacctcggggaactctcctgcctggtgatctcccttcttgtcgtcgttgcgagccctgccaccctccgcgggtggcccggccatgtggaagtggcgccgaagcatagcacactcctcaagggtgtgcttgacgggcccctgatgataggggcacggctccttgagcatcttgtcgaagaggttggcacctccggggggtttccgagggttcttgtactcggcggcggcgacaaggtccgcgtcagcggcgtcgcgtttcatttgcgacttcttcttgcccttcttcttggcgccgtgctgagttgacgcctcgggggcatcttccggtgggcggccctggggctgcttgtccttccggaagatggcctcaaccgcctcctggccagaggcaaacttggtggcgatgtccatcagctcgctcgccctggtgggggtcttgtgacccagcttgctcaccaggtcacggcaggtggtgccggcgaggaacgcgccgatgacatctgaatcggtgatgttgggcagctcggtgtgctgcttcgagaatcgccggatgtagtcccggagagactctcccagctgctgtcggcaacttcggaggtcccaggagtttccagggcgtacgtacgtgccctagaaattgccggcgaaggcttggaccaggtcgtcccagttggagatctgccccggaggcaggtgctccaaccaggcgcgagcggtgtcggagaggaacatggggaggttgcagatgatgagattgtcgtcgtttgttccacccagttggcaggccagccggtagtccgcgagccatagttccggtctcatctcccccgagtactttgtgatagtagtcgggggtcggaaccgggtcgggaaaggcacctgtcgtatggcacggctgaaggcctacggaccgggtggtttgggcgagggactccgatcctccctgctgtcgtagtgtcctccacgtctggggtggtagcctcggcgcagcctctcgtcgaggtgggcccgacggtcgcggtgatggtgctcgttgccgaggcgacccggggccgcaggcgctgtgttgcgcgtgcgcccggtgtggaccgaggcttcccgcatgaatcgggaagtcgcggcacgatgttccgatgggtacccctgcctgcgggaggcggagctctcggcccgtcgggccacggcgccctccaggagattcttgagctctccctggattcgccgccccttggtggttgatggctctggcatcgcgcggagaagcattgccgctgcagccaggttctggccgaccccactggaagcgggcggcggccttaccctgacatcgtcggcgatgcggtgctggataccctagggtagatgacgcatttctccggccggacgttggcccacccattcctgcccgacgtcccggcggatcggctcaagtgctcctgctccctcgtcgagcctggcctgcaccccgcggatttgctcgagctgtgggtcatgaccccccgccggaacggggaccacaactagctcccgtaggatgtcaacgtgtggcacaggcctagggagatcaccgttctccggcataacgagatggttgccttcggaaggaccccctagatcgacttggaaacattcacgacttgggccgcagtcctcgtcgccgaggctacggctaccgtcggaacaatcggaaaggcagtagtcgcatgcggtcatgaagtcccgcatggcactggggttgccaagtccagagaaatcccaacacaagtcgggctcgtcatcttcctcggaccccgagggcccgtaggtcgagacgtccgtcagccggtcccagggtgaccgcatatgataccccagagggtttggactcgcctctacgagagcgtccgcccaagcgaagccacttggcgggtcgaggctgaatccaaggggtgcgagatgggaatcggtcggtacctcttgctcgacgggcggtgacggagtcacgtcaaggactgactgcaccgtcgtctcaggtacgagggtgacgcccagcaagcctttcgcgagcgtgctggcgtcgtccgtttgctcggaattggcgtgtcgcggggacacgacgctcgtctttgtctcaaacgcgaggtcgatgcccgacgcgccccctgttggggcgccggcgctgtcgacttgctcgacagccgacggggggccgcctcctgcttggccttggttgccccgcctcctcctccgtcggcgggggagagggcgaggtgagcttgaatgttgttcttccgccacgcggggaagacgtcgtcgattccgccaccggcgggcgggctgtcggtcgccattgtcgctgtcgcacgacggaggaaggagtatcatgtcgtagctgccgtcgagggacatgaactcaagactcccgagacggagcaccgtcctgggctggaaaggttgctggagactgcccatctggagcttgatgggaagctgttcgtcaacacacagcaggcccctacctggcgcgccaactgtcggcgtttcgagaccggggggtccctgggccgatgagtgaaatgtcgccgtgtgccccagcccagatgggtcggcgcgaggccgagcgcgaaggggggaaggaagggcagccggagacgggcgtgagaggtggaaatcccgcggccttcgtgttcgtcctgcgcccaggtcgggtgcgcttgcagtagggggttacaagcatccacgcgggagggggagcgagcggcctcacgcgagcgcctgtcccgtcctcttccccacgcggccaaacctctgtaagagggccctggtccttccttttataagcgtaaggagaggatccaggtgtacaatgggggtgtagtagagtgctacgtgtctagcggaggagagctagcgccctaagtacacgccgtcgtggcagccggagaggttttggcacccggttcgtgtggtgtcatggccatcggaggagcactggagcctggcggaaggacaactatcggggctgtcgagtccttgctgacgtcctcttgctttcgtaagggggctgagagccgccgtcgtcacagagcgtgcggggcgccatcattgcctatctggcggagcgagccagatgggacgccggtcttgttccccgtagcctgagccagcttggggtagggtaatgatggcgcctcctgtcgacgtggtcggtatgcgccctaggttgggcgatgtagaggctcctccgaggtcgaggtcgagtctgtcttccgtggccgtggttgagtccgagccctagggtcgggcgaagcggagttcgtcgtcgtctggggctgagcccaagtccgagccctgggtcgggcggagcggagttcgccgtcttctggggctgagcccatgtccgagccctgggtcgggcggagcggagttcgccgtcttctggggctgagcccaagtccgagccctgggtcgggtggagcggagttcgccgtcttccggggctgagcccgagtacgagccctgggtcgggcggagcggagttcgccgtcttccggggctgagcccgagtccgagccctgggttgggcggagcggagttcgtcgtcttccggggctgagcctgagtccgagccctgggtcaggcgaagcggagcttcctatggtgcctgaggtcgggcctgactacctgtcagcctcactctgttgagtggcacagcagtcggagtggcgcaggcggcgctgtccttctgtcaggccggtcagtggagcggcgaagtgactgcggtcacttcggctctgtcgactggaggatgcgtgtcaggataaaggtgtcaggccacctttgcattaaatgctcctacgatctggtcggttggcgcggcgatttggtcagggttgcttcttggcgaagacagggcctcgggccagccgtaagcatgttcgtcgctggaggggggcctcgggcgagacggaaatcctccgggggtcggctgcccttgttcgaggctaggctcgggcgaggcgtgatcgagtccctcgaatggaccgatccctgactaaatcgcacccatcaggcatttgcagctttatgctgatgggggttaccagttgagaattaggagacttgagggtacccctaattatggtccccgacaagcgactaagatatgcttcatctaaaatttgctggcggacatcatcattcttgggcacaactatgcggttattaaacaatactataccttgatcatccattgtaaaacagtttgctttaccgacctttattttctcattaatgtgtttcataccctcatcacttctctatgcatcaattaatctttgtagaagaaccgactcaagcttcaattgatttaatgtttcatgctgaatcattcccaggtttaatttctccatttcttggcataatgtgatgttagaagtcttcatcataagacaatgataggaagccttgtgacttagtgcatctgccaccacgttggccttgcctaggtgatagtgaatttccaattcattatccttaatcagctcaagccatctcctctgcctcatatttagttctgaatggataaaaatgtacatcaagcttttatgatctgtatatatatgacagatatttcccagcagataatgatgccatattctgagggcatgaaccacagcagctaattctaagtcatgagttggataatgttcttcatgctggcgcaactgtcttgaggcatatgctataagtcggcccttttgcatcaggacacatccgaggccactgcctgatgcgtcacaatacacatcaaaaggcttttcaatgtccggttgagccaataccggagcagtggttaataataccttcagctgctcgaaggcttcgttgcatcttgaggaccagttgaattttgtatcattctttaatagacttgtgattggcttcacaagtttagagaaatccgggataaatcgacggtaatatccaaccagtccaaggaaacttcgaacttgatgcacagtggttggtggtttccactctagaatatccttgaccttgatgggatcaaccacaatccccttggcagacaatacgtgtcccagaaattggatttcctccagccaaaacgcgcacttgctgaatttagcatatagctgatgttcccttaagcgcgttaatacgatccgtagatgctgggcatgctcctccttattcttggaataaatcaagatatcatcaatgaagaccactagaaatttgtccaactcgggcataaataccgagttcatgagatatgtgaagtgggcaggagcattcgttaatccgaaagacatcaccaaatatttgaataatccgtaccgcgtagtaaatgcggtcttgggtatatcttcgggacggatacggatctgatgatagcccgacctgaggtcaattttggaaaatacctgagctccggtaagctgatcaaacaaaatatcaatccggggaagagggtacttgtttttgattgtgacctcattaaggggtctgtagtccacgcacatccgaagcgtttgatcattcttcttgacaaagattgctggacaaccccaaggtgacgaactaggtcggatgaatcccttctccagtagatcttgtaattgcgccttgagctctgccaactcatttggaggcattcggtacgaccttctagaaataggagccgtaccaggcttcaattcaatcacaaactctacatctctttctggaggtaatccaggcagatcgtcaggaaagacgtccggaaactcacatactaccgaaatatcttggatttctaggaggatagcttcatagactctaccaaatggtttagctgggatagctacagggatggacaagagaacctcttcatggtcatagctcaacctgatggttctcaaatcaatgttgaggatagctttgtgctgggctaaccaattcatgcccaaaattacatctatatcttggcctttcagaacaatcatatttgtgggaaagtcccgttcagccaatgttacgggcacatggaaagccacttctttagtgaatatttgtcccccaagcgaatgaataataaaccattcccttgattagatgcaaggaatgcaatatttctccacaaacttcttccttatgaatgtatgtgaagcacaagaatcaaagagaataactgctgggtgattggccacaagaaatgtacccattataatcggctctccctccggtgtagtggccacttgtgtgtagtatattcgcccagtcttctttatattcttgcccgccgcattatttgtcgtatttcccttgccttgatttgagctccctgagctctactgattgttggatttgttctgcctcggatatgggcagtctttgataaaatatccagacttcccacaattgaagcagctagttgaggagctagggagggcggggaaacgagcaccaggggcactcggctgacttgttgaagtggggcagtggcagggcggatgaagacaggctatttgaaggggtaggagggtggacgaggtgaagaacggttttgattgaaaggtcggattaccaacctttgtcacttttcaggcccctgattggacttgtcacctctgaatcccttcgattttcctgagcctgtatgattggattcaactgctagcgctgtgctgacagccctgctgtaggagagatcgaggtaggtgaccatctttctttgaagccggtcattaaggcctctcatgaaacaattcctctttttcaggtcagtattaacttgatcaattgcatacttggacaaatgaatgaatttgttgagatactacatgacagtatctcctccttgcttgagtcgcatgaattcttcctgcttcatgtgcagcactccttctggaatatagtgctcacgaaacgccaatttaaattcgtcccatgtaacctgatgtccggcaggctgaatggccacataatttccccactaggtactggtagggcctcttaactgttgggccacgaacaacggcttctgggtctccgtgcagcggataagtccaaatttctgctcaatgacccgtacccattcgtcggcttcgagagggtctttgacttcgacgaaaagtgggggacgcgtttccgagaaatccaggtacgtagtttcacgaggcccctgtggataggcccttccgccttgttgctgaaattgatttcccaccatttcacgtagaaagcgggtgttgtcggcggtcgcattgaccaaggcagcgatagcctcggccaacgttggcggtacaggcggtggattgggtgtgtcttcccgaccacgggaagtaccggcactgtaatgtgcatgagtcctcgatggcatcttaagcaaagaaatatttggaaaaattataacatgctgacatatacgattattctacattaccaagatgtaatgatacagactcaaatgtacaacatgacttcattacctatcttacatcagtattatacctaaactatactactgtagtatatatcgtctttagttgcttcactgtctgttgtaggggaccgttcatcagccaggttcattgaaggaggggcttgaaaaggtccaattccccaccaagtgcttcacctgttgttccagaaggtctggctcccattctgacaaggtcggtaggtacgtcttggtgcagtcgtgaatacagttcatgaacttcctcatgtaatgtattgcaatacacctgcaagttgtcaacggccgtgctaagctcctccacacgggctcgagctttggcttcccggtcccaagcaattgaacgtgaattgatagcccaatcgattgccaaatcccgttcagcaagctcatcttgcagatgtcggacgtcagctcttaactcatttatacgctaaccatcttctacccacaccgtgtttctgtgacgtagctccgttcgaagctgctccacttgggcttttaggtctccgatggggtcattactgccgctgctgctctcttcatgccttggaggcagctgatgccgaggcacgccaatcggtccaatggacttacgtgcggttttcctcgtgcgtggcggcatatctccataaggggggaaactttattagtatagtttttgacatgatgcatgcataattacagaatcaacttttgttgattcacaatctcctatacattgcactctactacctagtcttataagatgagtacttcagaaagtagtaagataaaaatgaaagaaattttctttagataagtctttgaaaattctttttgaaatgtctaataatatctgaagagatgggaatcgctccgataccagctgtgacagaacctcccaagttattaggcccacctacagttgtccttgtccaacagaccttggacaaccccgtagatggacctaatcacttgacaagttcggtatctgtattctttacctttcccaagagcgtttcacccgtcacgcagatattacaacacatcggaggaacgaataagcggaagcaattacagtaacataatttacattaaaatatagggagagtattgttattatagaccggtaaattataggagtgcaggagtaatattattacaaacacgggaggcaaaaacccctcccgcataacagtaaagtgtttttttaaaaagaggacaacatcctcccgcgacttcagtcttgagcttcttccttcggcaccaccttagagcaaaagcaacaaaagtttgctgctcctcacctacaacaacatgggttcgaaaaccctgagtacgaagtgtacttgtgcaaggcttacccatcaaaataaaagactctcaaggatatgttggcttgagggagtcaaggtaaggcttaatcaagaatcaagactctgtttgcaaaaatgcttaccaatagcggatccttaaaaatccagtttaattaacaagttaagtcattacctgaatctagggttctttctaccctagttcaagaacttggcctatactagccatcttgttatcaacctttcttgttcactggaaagctacgtgtagggcaatgaccaagtcttcatgtccgagacgtaacggcgatccgaatcgattaatacccacctggggatctccaatcacacgacatatgtagcacgtaacccttgcatatgtcaactcgccaccggggttcttaagaccagatcaggtacacgccaaccgagagcacaaatacaccaccgtccagcctctttccacagcgggtacacactactctcgccatctctccactcccattgcatgttatcttattctggtattagtctgcccgaggcaaagcttacccatgatgaggcatgtgaccggttaaaaggtcctcgattagcaagcctacatcgagacggtccttaatcgactcagacggagacactacaacgagactctcttctcgtgcaagtcacccgcccggtctcagctttattatttcaaacccaaagtttggtacctggcagaggtacatcttttccgatgttgaacccatcacgaccatcatggatccaccaaccagttttatttttgaaaacatcccatcccacttgaagcatcatcttttgtcaaaacaagacattttgtttttctagagcaggactaagcataagaaaaaccttttttataaaacaggtgaccaaggaaaggtaatcaatctttcaaggaaggaaatgcagcaagtgtttagcacacaactcctatcacctaatgcatcaagcaagtgagaaagattttaaatagcaagtaggtggcaatgcaccggggcttgccttgttttataggagagtcgggctctgttccacaaatatcgaaataaaagcagttcccggtaggtgggtcttcaggtggtggtgtagctcttccttcttcaacttctacttcttcttcgttttctatatatatcatatataaccatgaatgctcatgtaatgcttatgaaaatgcaaagataataaaggtacatcatattaggtcttgaatacaattttccttcacggtactctaggaaactagggtttttgaagtctgtatattagttcatagggcaggcactacttagaagtttagggttttggggtttaggtatcaaacattgtccacatcatgtctaacttcacccaaggtttctaaatatcatttaaagcttatccaaaaagtttggtgatttttggagttactagataatttctaaaattccaaaggtgtaggttttagcccttttaaatattacataatttcttgtttatactaaaaatcataaatttatttttattaaatactatagaaatttaggaggctaataaaattggcctcatatttttagcttttttctatagtttcttatggatttctaaagcttctcggaaaaagaaaacaaaaaactactaacagtgttgggccaaaactggcccaaccagccctggtctaggtggaatttgggggcgcgcccatggccgcgcagtaggtttttcacaaaggtcctcgccagagccaaaattagaaatgaagttttcaaccaaatctcgtgagtcaccgacacttcacttctagccccctctaagcttcttgtctttcaaaattgagtccctgacgctgtccggcagcgcggacgagttctccccgcgacactacggcggaggagagcccgggctgtcattggatagcagccagatcaaatcttaacctaatccgtgtggttatgggcatggatttggctcacaaactcacagagcgacttgatcgcgcctacgacgggatcccggttccgcagcgcctgtccacatgacacaagtaccgaaggcattagtagggcacaaatggtgcgatgctcacatgaatcggtaacagactaaccgagtcttggtgggttgacaccggagtagttcatgtggcgtcgagcccatgttccgaccaaaatatgaccgtaaagactaaacggatacctcgatgatcttcaccagcctataaggacactagaacattgattcatatgtgtcgattcatatcgtagtcgtctagccacgtaagggtgaggcatcagcgatgaggtcaccgggtacattgagtttcttgactaaggagtctaggcgcgtccatggtatagttttgggaagggaaagcaatacaactaactgaagttacacacggtgatcaaagacttaggtaaggatctctcctttgctcctgctcccttcccccccccccccgttgctctttaaataagtagtgaaaagatcaagggggctggattcttgaatttgcagcaaggataactatgagcatgagatgtagtcgtggcttactcaagaagatccacgcaggttcacagagcgcagtcatgtagggtgaagtttatccatggcaaagggaggaggtaaggataggatggcactgtagtagatatttgtactggtgatatttcagtgatgcgcaagtctgaatatccctgctaccacctcatctcaatcttcatcctatcccaaagttggacacggcaaggagagtaaatatcaagggtagatatttcagttcgtttgaatcttcaacacatgactgatcccccccttcagtcagccttttctccatattttggttaagaacaggtcagtcaccattaacagaacttgttcccaaatcaagggtctataaagttactataagtttcttggacctaatccccatagattacaagttatggtgcccaaaaatcagctgcaattcactggtaccatttcaattttctgaacttcagtcttcagttttcatccgatttcttcctttttgacagggatagtttgggcacctttacctcctaaatctatatgacatcaggccagagtctcctaataaaacttgctcatgaatactagctttccagctttccttagatcaacctggcaccaagtcgcataggacagcctctgcaaggtctcaaagttgcttagacagatagaaattcatagcagatttgcgtgattagaacccatgaacctgatagcccaactttgagcatcattttccttgatttttggcacaagatcaagcccacgtttcttaagaacatttaatccccttctaatggtctctaatttatctacacaactcatagactttaaccctctagattggtcacaaaagactccaaacctagctcaatacactacattagaggtttcagattactatattcagtctgaaaattcatagttctgttggctctgttttggggtaggttttcatgagatttcatagggttttagagttgggtttctcaatcgaacttatacccctatagtagttctaccattttgatgtattaatctaggatagaatcctcatgaatgaagagatatacaactccaaagatggtccccatttactagaattcagacttagtcatatggttttcatgggtctttttacaaagaggtccaaatctcactattcaacttgcaaattcttcaatatgaaagttagtgggtttgaggtgcttttttactttgatatttgcactttggcccaaaagtgcaccaattttacacttaaccccctagggttccaatttagggtttctagggtttgtttctaggattttggacacattagggttttggtgtcacttaagtccattaaatgtgatatcttatgattatttctcatgagttttgaagttttctcatgcctgggctttattatcactcctaagcctagtttagagttaagtaccctaccctagggttacacacatatcaagtcacaccaatacaacttgtttgaaatttttgcctagtgaatgcactctaagtgtaacaaacacatgatatgctaatgctcatgatgttatgctcaagttttagtgacagtaacactaggattgttacatatatctatgtgtatattagtgtaatatatttctttgcgatgcatgaaattttgcgtaggtacgattttgagccttcggcgaaaaaacaccttcccttcttttcatgcttcgtaaagaaaaaacccttctatagcacaactgttgcatgatattgttgtcgacaaattttttttcctggcgtataagattgtaattgccaaagggttgctttgtgctctagcacattgttgcattcatcatatattttgaaagaaacaactttccttcttctcaattttgttgctgatgcgacatgatgtatgatgtaatgctatgctgaatgatgcgatgatatgatgcagcatgatgtttatgccaaagacatgtccacacagaaataccctaactctgcatccccttagggacgtcttttgagtctcttcaccttatattttggtgatatttaagctctgcatccccttaggaacgactttggagcttcttcaccttctatttcggtggcatttaagctctgcatccccttagggacgactttggagcttcatcaccttctatttcggtggtattttggctctacattcccttaggaacgacttttgagcttcataatttactctgcgctcccttaggaacgacttttgtagcttcggaacatactctgcgctcgcttaggaacaacttttgtagcttcgaaacttactctgcgctcccttaggaacgacttttgtagctccgaaacttactctgcgctcccttaggaatgacttttgtagcttcaaaacttactctacgctcccttaggaacgacttttgtagcttcgtaatcttgttaagaggtagcatcccactcaatgatatgagtacaatattattacatgaaatgggatttatccttcgtgaattgttttcatacaaatggtagataacaatatgctagagtggtggtggtgggagctaggcccaggaagcttgagagtggcttgccgaagcgatagaggccgtaggttgttgattacctacatactctaggacgtagggagaatagcatgaagcagtatgtaggacttgctttggctgattctgtcgtgcttcagctttgacaatctctttctgcttctgaatcgtgacttggcacgttcttgtggtgtggcctttgtattcgccgcagaacaaacaaaacagtctcctgggttgatctctgtatcttcctctaaagcttttgccccctctacctcttggagctggtggcctgaaggaacttgttgaggccctgatgattgggagatgtgctgttatctttggggttggcttcccctatcatcacttgggctaccattatggattgacttgacatgcctggggtggaatcttcgtccgaagcccctggccatctcagagtatctataagcttgttcccttctttgccggaaatcattatcagctctgatgtattcatccattttctggagaagcttctcgaaggtttgtggtggcttccttgcaaaatattgtgccattggtcctggtctgagccccttgatcatggcctcaatgacaatctcattggacactgtaggtgcctgggctctcaatcgcaggaaccttcagacatacgcctggagatactcttcctgatcctgtgtgcactggaacagagcttgagcggtgactggcttcgtttgaaagccttggaagctagtgaacagcatgtactttagcttttgccaagacgtaattgtccctggtcgaggagaagagtaccaagtttgctacgcttttgactgccatgacgaaaggatttcaccatgactgcagtattgcccccatatgaagatatggttgctttgtagctcatcagtaactgcttcgggtctgagtgcccatcatacataggaagctgaggtggcttgtacgatgggggccatggggtagcctggaattctgctgccaagggagaagtatcatcaaaagcaaaatttccatgatgaaagtcacagtaccattcatcatcattgtatgaattttcttgatgaagttccctgtgctggggctttcggtcttggtcatcctgggtgaggtgacacatttctttggcgacttcatcaatcttcctctggagatcggtgagccgaagcattttctctctcttcttttggacatgttgatggatagcttccagatccctgatttcttggtccagttcctcctcctgaggtgttgggctggtagcctttctcttctggctcctagcttcatgtagcgtctcctgattaacgtccagtggctgcaatgcagcccctggcgctgctgtcttcttcggcggcatgacgaaggtcgttgcttaccgaaggtggtcgaatgagttcaccggaggtgggcgccaattttggtccttgttctcggatgctatacatcaagaacaaagcaacacaattgttaacgattagagaccttcgtcattcgaagcattatctccctgggatataatgatcttcagatgaaggtcatgaagggcataccttcatcatttcagtgaacaaaatgtaaatagagacatatgaaacacaaaagaatatagacaatcatcacaaatcattagattatttatattcttattttacaaacatgaataaacatcaatgatatctatattacatttatacctttggcttgatagaaggtggaaaagcgagagtgatgcaagagtgattacaattcagtgtgaacagtacggtgttactgttcatctatttataggcacaggacgcagcctggtcaaaattacattcatgtccctaatatttactgttaaccatgaagcaaactatcaatgattaggtagtattttctttaagtcggttccatctctcaccatcgttatcatgctaagtcgaaggtccttcagccatagcttcggtgctcgttcgccctttcttcaaaccgcaccttcatattacgcccaccttcatctcaaggccgaagcctcctctaacagtctgttatactgagaaacatgttagttaagtttttgaggacctttggaaaaggaaggcccccaacactagtgttcaagcaaaacaatcacttag

SEQ ID NO: 547 - DNA, 4585 bp, Zea mays
  Intron number 3 from transcript GRMZM2G124281_T01 (locus G RMZM2G124281) derived from phytozome v7.0 (chr-ID 1; pos 2 12059982 to 212064566 reverse strand)
caactggtatctgggacttgtagtattaataactagtaagtgtttctctgctgttttcacttttcagtattgctgaattcatgtcatgtttactctatccttcataatatagtatatgaagttcatatatactatatatttactatatagtataatagtatatattatatagtatatacataggtcctggtctcctggatgaacaggacgaccagtaaacgaccaggtcgaccagagctcgattagtcggacctagtcgacgactaatcgagattagtcgctggtcggtctcccagttcgactagctggtcgagcgaccagaaaacataggtcgacgtggcacctgcgcctgatgcgcgatcatctgtccaagggcgtcgggtaggcctgcttcctctcctctcaatctcccttgcttctttctttccctcgatctcacctgattcttctcaatcagtcttgctacctcttgatctctactaggttgtagagatagcacaatggcatctccaattgtaactataacttatgttggtagtgactatgatcccaagactgtcgttgatccagggtggaagtatggatttttggccagacctttaaaacaaatataagatggaaatggaatgcatcttgtgtggtcaagtcgttagtggagggataaaaaggttgaagcaacatttggcaggagcctacagagatgcaaagttgttccaaggcaatcggtaaattagagatgacaagttatttggaggcaaacaagaggaaaagaccaatcttcctagataaatatgaagatgatgatgaagtggttgaggtggcagcaataatagatggggagaataatgcttctgttgtggtggagtctcaagcgtccaaggtgcagcataagccctgttcaagtacaatagccaaaaaaagacaatccaccttgcaatttaaggcaagtagtaaagcataacaaaaaacaaccaactctatagttgagatgttgcagagaacacaagaagtgatggatgagagacatttaggctcgtaccagcccacaatcttggatagtgcaaaaagtaaggaagacaagcaatatgtggacatacaatgggctttgttcttctatgagtttgatgtacctttcaatacaacaacaactaggcaattttagattgcagttgaggcaacaacacaatttgcttcaggatataagactccaacaccttatcaacttggtgagccaatgagccattgcttcgagaggctatgaagcaataaagacaacgaaggaggaacatgagcgtgtatagaaacactatgggcctgtttggttcggcttttttctgaggagcttttttgaaaagctggctgtggtgaaaagctggctgtggtgagaagctatctgagaagaatgtgagtgtttggttcgactactatgagcagaagctgatgattagaatccgggtgtttggatacgcagattctgaaattgtagatatagagtaaaaaaagtacaaacaggaaaagacataataatcaacacttgactacaattagacagatatgtccattacaccataactatgcattggttcacataagtaactacgacactaacacattagcaatttctagtgtttagatggttagattttttaaagaacagattctaacaataaatatgataaaatgtaaattgtcgtaataatgagcacctaattggaaattgtcccatgtgttatccattacaacatatatgttaatcatcattttttaataactagtcattggtttttgaataaaacggagcatgctacctcacaataagtacgacaaagagtacaagacttaccagtttctgcaactgtaccaacacgctgataaaatcaaccggccaaataattttacgagaactcagctcaaatgtcatgcaatagttcatctacagttaagaaaaaacaagggggccccagtgagtatggggtaaagctgagctagaatcatgcggcttgtcccagccgtgcgccctcgaccgcttctgcgttgccgttgaaactcagattatgggcgaagcacttctccaagaagccacggtagaagctgagcgtttggaccccaaaagcagcttctggccactggaatcggtaaataagcggatccaaacggggcctatagctgcacactcatgtccgatggatggtctaataggaggggacgtcatctgattaacttagtgaatagagagtacttttaggagtccattgatgcatcaagtaaagtacatgatgcaagcatgcttgctgatttgctacagaaaaacattgatggcattaagagagacaaggtggttcaagttgtcagttgtcactgataatggtgccaattacaagtcagcagggaagcttctaatggcgaggtcctacattattgtagagtccatgtactgtacattgcttggacctcaggttggagaacatatgaaacttgaaggaattcaagaaaccaattgaatgtacaaggcatgtgacaactttcatatatggacatgggagaatccttgttgccatgagagagaactggtggggctgatcttttgaggcccactaccactcgttttgctacttattttttcacattgaagagcatgtacaagcacaaagatcctttgaagtctttttttactagtggataatgccattggagcaccagaagcacttcgtggctgaaactttctaataagagcccatgaaactttttaacaagagcccatgaaactttcaagacactacaagaaaccggggaaacattggttttgttaagtacgtcggggccgacgttcttataggcattaagcacgtcggtttattccaaccgatgtagttacctttttaagtttgtcggctgagtgcggggccgacatacttaagtttaagttcgtcggctgtaggggccaccaacgtacttaagctttaagtacgttgattatactggccgactttcttaatttcttaatgttaagtacgtcggccccaacgtacgaacttgacgaagtacgtcgaattaagcgcaacggttaaatacgtcggttaaccaacggtctattagagtaagaacgtcggttcctagccgacgttctttaatggttttttcgtagtgagaagaaattatgctgctgcatacaatgtggcagagactgaaggtgaagaggaagaaaatgatccacatgatgttgcagaaatcacagattgtgatggtgaggaaagggaagcactcgatatcctaggagagtttgatgatgtcttttgagagatgggagagttcagaaatcagaactagctagtagctacttctagaatgctttgctagttcacatatttgctgcattagcagctagttattattaattatgccgttagaaagtactttgtgactatttcagatttggtattgtgctgttttatattttgtgacttgtttataagatgagtgttcaaaactcgttattatgccattagtgactacggctatttcagatccactattgcgatgatttatattctatgatttatgcagagtttatagctgcagtatatattggttggtttgtattgcgtcgcctaggcgatcgcctaggcgtccgggcggtggctgagtccctagtgccctagtctgtcttacctcctttaaaaccatgtatatatgaataaaatagtggatagttgcatgcagaggaaacatataaagaaaataggagccggaaagaatttgatttagaaaaaagaatcttactgatagactagaatattctctctacagtagatatttggaaaaataaaatactgagaatagtctttagggtgttggtatggcactcaccttgctattgattaaaatgtgccacgtgctctatttttagtgaactaacgacggtgtgagcatatgggtcattcatgaaataggtgaagtacttgaggacaggaatggttagaatccatttcctttcccaattcatgtatacagaaaaatgacaaatgtgattgcattttgtttacaaaaggaaatggtgtgaattctctgtacccaaatacttctatacctagacaagtgcctgtctaggtacatggccaaaaggtacagtaaaaaaaacctttggggcagatggagtgtgtacattataaaatgactagtgttaacttgttaggcacaacgaagatttatctcaagttatgttcgttacagcagttatgtacgacagactgactaatgtaaaacctagccgtttggttcacatgttggtaacataatgagtaactgataacattaaatgatgtttgttgaagtccaaccgtaatcgaataccacaatagaaatggataccaacctattcaaatttgttaccgccggtactcaagtgtgaatcattaccattaccatttacgttacaaaatgtaaacgaaacagcaccctagttcattccattttgatacacttgctttttattgccaagaaatgagcttcattcatgctgatacgagacttcctttttttgggagcatgtagactaatttgtttgttctggtgaacagtgagttgg

SEQ ID NO: 548 - DNA, 5393 bp, Zea mays
  Intron number 4 from transcript GRMZM5G868062_T01 (locus G RMZM5G868062) derived from phytozome v7.0 (chr-ID 1; pos 3 2526867 to 32532259)
gtagccagctgaaacaacagatacagggtctcaaggtacttaatgttctgtcatgtagcacttgttaatactttatattttagtgtttttatatatgaatattatgattgtgtaatatttatacgctgtttaatagccttatcgtcatgttcttgtatacatctgtgtagattaatcaaatttaatgaaattacaggactcgattgagaagcttctcatctgatttacctaagatctttcagtgtgatgggcctcggcgacacatttttcagaggcttggactggtgatggtgtcttgtttacattacgctttccaaactatatttgaacactgctaagtcaatcatatttgaattgtgcttcactttatatttgtgattgtcatgtatcctcaagatgcctctgtatcgtggtggctggtttctgttctggatccgaccacatcattgtgatggctgattgctatgtttttgagtattggatcgttcccatcgattaacttctgtgatgacgaatcagcgcaaataaagtcacttatatgtgatcacgagcagcgcaaataaagttgtatgtgggggcataaataactgaactgaagaattggttcattagaacagccccagatcgcaggtaacaaaaacattctggttcctacactcggataacttggtagggaaccaaactggatacaaagcagcctggcctgggcggttgattgcttggctgtatacttttggtcctggcatagttcgccagttgcaaaatgctctgtagtgttcgttcggttagtctggattggattggagggcaggaaccattccagctacaatgtaatacaaatgtgtgaaccattctaaccctaaactattctaggcactggttccggagcaatcaagcggggccttcggcagcctaggaactactgttccaggccgagattcagtgcatccgggtgtgtcactctttccaggcagagaactgttccaggccgggatttaaaggcctgttcggcaggctaggattgaagaaggctgttttataaacacagaacatatttgaacaatctgacactgctgctttataaacgcagtgaataatcaaccaatctgacagtccatcattctttctaccataggatagcatgctgccgagacaatctggcagtcttgctaccaaaataagacaatcaagaaacatagaacaatcttgatagactgacatcttcaacacatgcgctaagaagaaacagaacatatgtgttgcgaagaaacatcactttagaactaagcatatcatttcaaaataagaaacctcaacatatgctaagcatcaccgattaatcacccaaacctgtccaaacaaatggaacaatcagattggaagataaaggcccaagtgaatatggttaagtggaaggtaaagacataaatattatactctttccgtttttttatttgtcgccatttagtttaaaaatgaactagggacgataaatattcgagaacggatgttgtacaatgctaaaccatctcatttcatagcagaggcaatcaacatctgtagctggtggctcaggacctcgtatgcacctcaacctggccatgtatccatttctactgtgcagtgcagtaagaaacataaagaggcagaattccgttgccattgtcatggctaaaggcttaaagtaagacacttcatctaaatgcaaaggcagctagcagggcatattgtaaaaccagtaacggtgaccagtgtttggcgtccgccttagcattggggggagagataaacgtgtcactgaatctgaatctatgcctgtttttctcatgaacaatgctactactactactgctgttgcactactgcatcaatgaagcagttcagtaaacaatgctacggccgtgacgagaagcgccgccagaacatacacaggtgcctgaaaacacgtaatccacggagcagatggtttcttgaatccaatactctgcagcaccaagatttgtcttcttctacagatcaatactctgcatacacagctggctgcagcttaacgcaaagagatgcaaactggcgcaaacactcttttacttccaattggttttggaatatgagctccaagcaaactcatccctcaagcttactcacctacaaaaaaaattcaaagtacaccgttgcaattacacaaaatgatgagtaattcagggtcatcttgctacaaaaaagcaaaactagcaacatagagcacgcacactactgatttaccctttcctttttaattttttgactgtacttcaaactgatggtcccttgatttttttgtatcttttcctggtgctactgtcttcttggttatcgtctctgtcctactacctacctatctctgttgatgcatctctatgtcactatgtgattctaacaaccaagatgcacacgtgccctctgttcaatacaccacaaaaagttgagtcaatcctatttttccctggtaagaaggtgcacttgcaatctcagaaatgacggtacaaaacctcacataataaaattccgtttatttttcttctcatttgcagacacagacacaccttgaaccaatgcttcagcttttccttgctccaaaactatcagtacctcttacataaaatcacatgcttcactgtcaatgcaacaaattaaaggcctatttgaatcccatgaactaatttagccactttgtgagctaaaaatccaaacataaagagctaaaagtaactaaaatggtaaaagatattcttttagtcatttttaactctttctgtttcaatatttagcttctagagtgacgaaacttgctctagctcaagggatccaaacatgccctaagtagttgtgttctcagcttttagtgcaacgtggttagatttgtcaggattatatcttcttcttcaaatagaacaatcttatacacattatttacatcaatgtgtatacaaattacaatcatttctatccatgatgtagcgcaggtaaatgggttgatcccagatcccacattgatagtcttcttagtataaactcatgtatgcggactggcccaactcagacaagagcgcggcaacaccgcgcatatacatggaatgagaagggctcagctacagccaagcgaataaatatactgtgaattaaccctaacctaaccgaagcgtccgcctcccacacacgggactccggccgcgagaacccgcgactaagccaggacgcgggacgccacagccaccggcctcagcatccgcctaggacgaataacccttctaggctgccgccgccgccgtccttagctcatattgttgccggcgaagagcgccccaggtattcccagccccttctctttcctgtccgctgcgcaaaactgaattctcgaactctcaacctcaagttatttggctacttctaactttttgcaaaaaattatcgggtccctttactagatccgcccctgctatggagtcggcggtgaacccgaaggcgtacccgctggctgatgcgcagctgacgataggtatcatcgatatcatccagcaggccgccaactacaagcagctcaagaagggagctaacgaaggtaccgtgccaatcccttgtgcacgtctcctgacctgtactctgttaattctgggcctttcttactcaactcgagtcttttgtgtttggcgtagcgacgaagaccctgaacagggggatatcggagttcgtagtgatggcggcggacacggagccgctcgagatcctcctccacctccccttgctagctgaggataaggtgcttataatttgccctttgtttcacgtacactagtgctgtgtgtgattattgttttgtttttgccctttgttgtattgttagtgagaatgaacggtcctttgttaactgcttaagttatagaggatttcttagttgcttcgaatgcaatgaagccaatcttttgagttatggatgcttgcaacattgttgtcagatactcattgtgtgtgactctgacaaaaaaataattacttcaactgtgtttcttagttaatttcttatttaattaactgtaaatggtactccctgcgtttgaaaatatattgctcaatttgcattcccttcaatcaacaatttttccattagtatataattcttgtgctgcaaggttggtatcattagattcatattcaaaacctctttcttatgtttatactttttgacaacacaataatatatttatagagtaattgctggttaaattctgccataacaaaatgaaacataccttttttttaaaaaaatgagaggggtatgaaccctcaatgcctaggagttgaatttcttgtgaatttagcgctagcaggttatatttcgttatgtaacagacatgtagtgacaattcagcctggcagtgcactcctgttagctgatttagcttgtgttttatttagttctacgtccttttttttgtgctctctttattctgcttggttgatgacatgaaccacctgtatacatcacttctgttagtagacttctcaatgaatatggcaacattcaccattttttttcgaacacgcaggagaactgtgtatcattatattaagaagaaagaaaggtctaatatagactgattacaagcgcctcaaaaggcagccacacataaccatacttcccaagctacacccacaaccttctaagagcagaagctccagaaataccccataagctagcatccccatgaatcttctgcaaaagagcgttgatgttaggggaggatgcatcaaacacacaagcatttctatgttttcaaatccttcaggcaacatcaccattggctaataaatttattctatgctatttgcagaacgtgccatatgtatttgttccatcgaaacaagctcttggccgtgcttgtggtgtgacaaggcctgtcattgcttgctcagtgaccagcaatgagggtagccagctgaaacaacagatacagggtctcaaggtacttagggtgcgtttggttgcaatgacaggacgggatgagacgagacgattcctcaaatagggttgtttggttcagggtcaggggttgggacaggactatcccagtgttgtccccagttatccctcaaaattggagggacgagagagaacgccaggggacgtccctgtcctggctgtcccgcaaccaaacacacccttaatgtcctgtcttgtagtagttgttaatacttgatatgttgctatttttatatatgaatattatgattctgtaatatttatatgctgtttaatagtcagtcttatcatgttcttgtatgcatatctctgtggattaaacaaatttaatgaaattgcaggactcgattgagaagcttctcatctgatttaccaa

SEQ ID NO: 549 - DNA, 41113 bp, Zea mays
  Intron number 2 from transcript GRMZM2G701750_T01 (locus G RMZM2G701750) derived from phytozome v7.0 (chr-ID 5; pos 1 02699118 to 102740230 reverse strand)
gattttcttgaggcaacctcctgcatactatacatgtaccttgcaatttttctctacccttttaatgcacttgtgacataaagatttgaataagactgttgttggggacttgttctcaaatactaagagtcaagaacaaggcaacacaaagtgttaaaggttaatgcccttcgtccttcgaagcattatttcccttgggatataacgatcttcggacgaaggtcatgaaggacataccttcatcatcatagttataagatatttgaaagatgaaatgtataaagtatgaaagataaacacaaataagcatatgacaacatcattcgcatgttatcatcatacaaacttggatatttaaatacgatatttaatcacatttataccttcgactttgcagaaggcaaaaattcaagtgttgcgcgcaagcgattacaagatagcgtgaacagtacaggggtattgttcatctatttatagacacagggcgcagcctgtgtgaaattacatttataccctttacaatcgattacaatcatgacacaaattatcatgggtctaatggtcatttcatctttaagtcggttcactccttcgtcttgagacatgtcaccttgccgaagctttatgagtgctagctttggagctgctttagagaaaatctgccgaaggtgtttcttctcttaggatcttcggctatgaagcatacccccaacagtagccccttcgcggtactagatcgtttttcgtaacgagcttgatccgtgaaaaagtctcctaggcttcgggatgccgaagatccgaaaaacaccttcactgagctcgttgctgagaaacgattaaaataatctgagcgcaaggtggccctaccatgcagcggtaacgtgcgtcctggtgtaacacccaaaagtcttaacttgagatttaaggaaaatcctttggagaaaaataataagaataataataatcatcaaactaagtaaccttatacataattgaacttcaaaactcaccctttctaagaaaatggtcataataaaatatcattagtaaaacaaaccttaataaaagtttagcaattggaaaaatattttctaacaaaaccaaagaatatgaactcgtgaatatacctttaaattaattacacactcgaactaatatgttatggaaataaatgtggtaagtaatccatgctgaaagcatttcctaaaataaaataatgataataaataaggcaactaaataggttaataaaactatcccacattatgttggggttccattagacttgaactcacatttggaataggtttgaattcaaagttgaatggaaaagagaataaaaaaataaaagaaaagaaaaactcacatgttgccgtttgggccgaaatacggcctggtcggcccaatcagccacgctggtcacattcgctgacacgtatggcccactagccagtttcccccacctcacccgcacgtgctggcacacttgtgtgtttagtcactgccgtgtgggaccaagcgtcggtcgtcttcttcccaatccgaatcaacgcctacaaccgattgccaacaaatcccgccgattcggcctcaacccgagcttctcggcaacagattttctcgctcactcggatatataaacagacatcgtatgcccttgtcccataggctcggcgctcggccacggcaagaaatcaaagaacggggaggaagggaggacacagagagccatcgcaattgagaacgttgacgaccgcgccacctgagccatcgctctacacctcggtcggcaccgatcgggcttcttcatcaagggatcttcaagctattggcgtcgcgaccggttcgtacagggtgccagcaccggtgagaccctctcctaaagactcgatctctccatcaccaacgccgcgcttccctgactccctctcccggaaccataaatagccggccctagcgcctcctattgaatccagccattagcagccccaagttagccacgcaagaagaaagagagaaagagggaaagaaaaccatcactggttgtgcctcggtcgtgtggttctctgcggtgcggtctgggaggtcggccaaacaccgtgaataaatcgaagtgtgggctggggggttgaccttgaagccgctgccatcgttgttcgcctcgccttgctgtggtgtgttcggtgggaatgctgccgtcgctgggttctggggggcatcgagggggattgccggacttcattaggtatgggcgcgtcgtctgcgggcgattgagagccaggcacagggatttccgtactggtgcctgggcatcgccgggtgcggccaccttgggtgctcacgccgctcgggaggatggggctcggccctatgcgacttggctgccgccttggggaagaagatcttgtgaccgttgatttgctaatcagacgtgcgtgattgggagaagggtaccggttcggaccaggggatcgcagccgttgatccgtttatccacgatcaggaactgatctccagtattttaaaatcaccacagttggtctctgatccaaggctcggcgtggcataccccccccccttgagcttataatcgtggccggtgatcatagatctaacggctatgatcgtcggataccccttcgtcgtgcatcttttacataaaacccccgtggaaactatgaatcaacccaccatcctgtgcggtgttcactgagtctggggagaattgcgtgttagcccccgagttttcggaaaatagtggccgccgtcctgagttttcggaaaataaaatctaaaatgattttcaggataaaaaaataaatatgataaacttagaaaattcataactttatgaatttaactccaaattgatccgttccagtttctataattttgtaatattattgtttatcatttagtaccattgttttgacatgaatatcacaataatatttgtatcctatttaatcttgtacaaagcacataaaacctttagaaattcataacttaaaatctataactccaaaattaataattcttgttcttgtgatcttatttcaatatgtagattattaatatgtattttgcatatatgtttggtgtgatgttaaattttgcatataaactgtttgtttgtattgctacgactagcgcgaggtcacgagtcatctgaagagcaagttggtacctggaatctcaagtgtcaggcaagttgtgcccttgatcacttcgtttacctagtcatgttctgattaatcataatgatctgcataggttaattttgatgggacccaataggttaccctagtttgattatctttataccttgactccactaaactttttgggtagtacctgctattgctttatgtggttttgggtatgaagattacactattcatgattatacttttgttatcagttgttatttattgttcatgttaagatcattatgttaattggaacatggagaaccacccgggaaaacagtgctaccacaagggtttatggacgcccttggctaattaactaggaaagctagtggatgattaccttacccgaaaggggcaagggcagtaggggagtggtcagtgtagggaggtccttggttgattttgctgcgatggcggtcagtcgagggactcctgcactggagcttcctataaactgtagcgggttttctgaagctagtggaactttgtaaaggcctcatagtgttaccctgcctcgcctcctcggtagaggtgtatgggattggccgtctcttggcagatgggtaacatgacttgtgggtaaagatgcgcaacctctgcagagtgtaaaactggtatacttgaaagggaaatgtgcacttgggccatttctaagtattttggtgatttagtgtccaacacaagtgcctaagtgttaaatggtggacaaagtacaaatcaagtataaaggtatgtttctcaaacttagtacattgttttagagactaatgtattgtgtctaagtgctggaaacaggaaaaatcaagttgaaattaaagatggctttgttcagccaaagtcagctctgtctgggtgcaccggacagtgtccggtggtgcaccggacagtgtccggtgcgccaggctagctcaggcgaacttgctgctctcgagaagtgattaacggcgtacggctataattcaccagactgtccggtgtgcactggactgtccggtgagccaacggtcggccgcgcgatccacgcgagacaagtggctgagccaacgatcggaagggggcaccggacagtgtccggtgcgccaacggctcaaaagcgccaacggtcggctttgccaaataaggaaggagattcgcaccggactgtccggtgcgctaggcgacagaaggcaagaattgccttcctaaaatactctcaacggctcctagctgccttggggctataaaagagacccctaggcgcatggaggagaacaccaagcattctctaagcactcctaagcatcaagacttcgattccgcgcatttgattctttgcgatagcaattagagctccatttgagttgtgaactcgctaagttgtgttgtgagctcttgttgcgacttgtgtgcgtgttggtactctgatttcgtgtcttctgtgtgttgctcattcctcccttactctgtgcttctttgtgaacaactttgtaagggtgagagactccaggttgtggagatttctcgcaagcgggatatagaaaagcaaagcaaaacaccatggtattcaagtgggtctttggaccgcttgaaatgggttgattgcaatcctcgtccattgggacgccacaacgtggagtaggcaagtgttggacttggccgaaccacgggataaaccaccgtgccatctctatgttgatatctttgtggttatcgtgtcttgcaaagactcttctctagccacttggctttattgtgctaactcctaatcaagtttttgtagcattaaagtttaagttttacaggatcacctattcaccccccgcctctaggtgctctcaattggtatcagagccgttttcttcaagaaagggactaaccgcccgaagagatggatcctaggggcaaggggatggtggtcaacgacaaggagaaggagtccttcgtcaacgagcctaaagatgacaagcctaccgactcgggctcgggccacaaacgaagagatgggaagaagaagaagacgaggcgcatcaaggagatcgtctactacgacgacagcgacgagtcctcttcttcccaaaaggacgacgacaacgtctacaagaataagaaggtggttaattcaaacttctcttttgattattcttgtattcctcaaagtaccaatgctcatttactctccattccacttggttaacctcctcattttgatggagaggactacggattttggagtcacaaaatgcgtagtcacttgttctctctccatcctagtatatgggagacagtagagagtggaatgaaatttgatatctcggatagtcctttgtttatcaatgaacagattcataaaaatgcacaagctactactgtgttgttagcctcattgtgcagggacgagtatcataaggtgagcggcttggacaatgccaagcagatctggtacaccctcaagatctcacatgagggaaacgacgtcaccatgctcaccaagatggagttagtggaaggcgaactcgagagattcgcgatgataagaggggaggagccaacccagacatacaacaggctcaaaaccctcatcaacaagataaggagctatggaagcacgcgatggatggaccacgacgttgtccgcctaatgctaaggtcttttaccgtccttgatccacatcttgtgaacaatattcgtgagaatcctaggtacacgaagatgacgccagaggagatccttggaaagttcgtaagcgagcagatgatgatcaaggaggctagatacgtcgacgatgcattaaatggtccaatccaagagcctcaaactattgctctcaaggcaacaaggagcaaggaggcactaccttgcaaggtggcgcaagttgaggcggtcgggcttaatgatgaagagatggccctcatcatcaagcggttcaagacggcgctaaagggtcgcaaggagcaccccaacaagaacaagacgaaggggaagcgctcctgcttcaaatgtggtaagattggtcattttatcgcaaattgtcccgataatgatagtgaccaggaaaagaagagtggaaagtgggaaaagaagaactacaagaaggtgaagggcgaggcacatcttggaaaggagtgggattcggattgctcctcgtccgactccgacaacgaaggactcgtcgccaccgccttcaacaagtcatccctcttccccaacgagcatcacacatgcctcatggcaaaggagaagaaggtatgtactcgaaacaatactacttatgcttcttcaagcgaggatgagtctagtgatgatgatgaaatagactattcatgcttattcaagggcttagatagaactaagattgataagattaatgaattgattgatgctttgaatgataagaatagattactagaaaaacaagaggaccttttatatgaagagcatgataaatttgttagtgcacaaaattctcttgctctagaagttaaaaggcatgaaatgctttcttgtgaactatctacttgtcatgaaaccatttctactttaaaaagtgttaatgatgatttaaatgctaaactagaagtagcaagtaaatctaactcttgtgtagaacatgttatgatttgcaataggtgcaaatattttaatgttgatgcttgtagtgaacacctagtttgcatttctaaattaaaggctagtcttaatgcccaacttaagactagcaagagtgaatttgacaagctaaaatttgcaagggatgcctacacgattggtagacacccctcaattaaggatggtcttggcttcaagagggaagtcaagaacttaacaagccaaaaggcttccatcttcgccaaggagaaagggaaggcccctatggctagaagtgctcaaaagaaccatgccttcatgtatcattataggagacagtctagaaatggctatagaagttataatgcttttgattcgcatgccatggttgcttctagttcttctattatgcatgatagaaatctagctaggagaaatgttagtaatcacatgcctagaagaaatgttgttcatgtttctaggaaaataataaatgaaccttctacaatttatcatgcttgcaatgcttcatttgcaatttgtataaaggataggaaagtgattgctaggaaactaggggcaaaatgcaatggtgataaaacttgcatttgggtccctaaggatattgtcactaaccttgtaggacccaacaagagttgggtacctaagacccaagcctaaatttgccttgcaggtttatgcatccgggggatcaagctggattatcgacagcggatggacaaaccacatgacgggggagaagaagatgttcacctcctacgtcaagaataatgattcccaagattcaatcatattcggtgacgggaatcaaggcaaggttaaaggcctaggcaagattgaaatttcaaatgagcactctatttctaatgtattcttagttgagtcgcttggatataatttgttatccgtaagtcaattatgtaatatgggatataattgtctattcacaaatgtagatgtgtctgtctttagaagaagtgatggttcactagcttttaagggtgtattagacgacaaactctatttagttgattttgcaaaagaggaggccggtctagatgcatgcttaattgctaagactagcatgggctggctgtggcatcgccgcttagcacatgtggggatgaagaaccttcacaagcttctaaagggagaacacgtgataggtctaacaaatgttactttcgaaaaagatagaccttgtgcagcttgtcaagcagggaaacaggtgggaagctctcatcatgccaaaaatgtgatgacaacatcaagacccctggagttacttcatatggacctcttcggacccgtcgcctatctaagcatatgaggaagtaagtatggctttgtttatagttgatgatttttcccgcttcacttgggtattctttttgcaggataaatctgaaacccaagggaccctcaagcgcttactaaggagagctcaaaacgagtttgagctcaaggtgaagaagataaggagcgacaatgggtccgaattcaagaaccttcaagtggaggagtatcttgaggaaggaatcaagcacgagttctccgctccctacacaccacaacaaaatggtgtggtagagaggaagaacaggacgcttatagacatggcgaggacgatgcttggagagttcaagacccccgagtgcttctggtcggaagctgtgaacacggcttgccacgccatcaaccgggtctaccttcatcgcctcctcaagaagacttcgtatgagctactaaccggtaacaaacccaatgtttcgtatttccgagtttttgggagtaaatgctacattctagtgaagaagggtaggaattccaaatttgctcccaaagccgtagaagggtttttgttaggttatgactcaaatacaaaggcgtatagggtcttcaacaaatcatcgggtttggttgaagtctctagcgacgttgtatttgatgagactaatggctctccaagagagcaagttgtggatcttgatgatgtagatgaagaagacgttccaacggccgcaatgcgcaccatggcgattggagatgtgaggccaatggaacaaaaagagcaagatcaaccttcttcctcaacaatggtgcattccccaactcaagaagatgaacatgttcatcaagaggaggcgtgtgatcaagggggagcacaagatgatcaagtaatggagaaagaagcacgaccgacacctccaactcaagtccgagcgatgattcaaagggatcatcccgtcgaccaaattttgggtgacattagcaagggagtaactactcgatctcgattagttaatttttgtgagcattactcctttgtctcttctattgagcctttcagggtagaggaggccttgctagatccggactgggtgttggccatgcaagaggagctcaataacttcaagagaaatgaagtttggacactggtgcctcgtcccaaacaaaatgttgtgggaaccaagtgggtgtttcgcaacaaacaagacgacacggggtggtgacaaggaacaaggctagacttgtggcaaaaggttatgcccaagtcgcaggtttggactttgaggagacttttgctcctgtggctaggctagagtcaattcgcattttgctagcatatgccactcaccattctttcaggttgttccaaatgaatgtgaagagcgctttcctcaacgggccaatcaaggaggaggtgtacgtggagcaaccccctggcttcgaggatgaacggtaccccgaccacgcctgtaagctctctaaggcgctctatggacttaagcaagccccaagagcatgttatgaatgccttagagactttttaattgctaatgctttcaaggttgggaaagccgatccaactctttttactaagacatgtgatggtgatctttttgtgtgccaaatttatgtcgatgacataatatttggttctactaaccaaaagtcttgtgaagagtttagcagggtgatgactcaaaagtttgagatgtcgatgatgggcgagttaagctatttccttgggttccaagtgaagcaactcaaggatgggaccttcatctcccaaacgaagtacacgcaagacttgatcaagcggtttgggatgaaggacgtcaagcctgcaaagactccaatgggaaccgacggacacaccaacctcaacaaaggaggtaagtccgttgatcaaaaggcataccggtctatgatagggtctttactttatttatgtgctagtagaccggatattatgcttagtgtatgcatgtgtgctagatttcaattcgatccaagggaatgtcacttagtggcagtgaagcgaattcttagatatttagtcgctacgccttgcttcgggatctggtatccaaaggggtctacctttgacttgattggatattcagactccgactatgctggatgtaaagtcgataggaatagtacatcggggacgtgccaattcttaggaaggtccctggtgttgtggagttctaagaaacaaacctccgttgccctatccaccgctgaggccgagtacgttgccgcaggacagtgttgcgcgcaactactttggatgaggcaaaccctcagggactttggctacaatctgagcaaagtcccactcctatgtgataatgagagtgctatccgcatggcggataatcctgttgaacacagccgcacaaagcacatagacatccggcatcactttttgagagaccaccagcaaaagggggatatcgcagtgtttcatgttagctccgagaaccagctagccgatatctttaccaagcctttagatgagcagactttttgcaagttgcgtagtgagctaaatgtcttagattcgcggaacttggattgatttgtagcatacatgtgcttatgcctttgatcatgttccatatgcaatttgttgtttatttatggtgctcaagttgtataagcactccccggacctcacaagtccatttgcaaatgatgcaaaaatttagggggagatatgctacaagttgaccctttgggactaaccatgtgcttgagtttgcttgatttagtctcaaaggtaaattgaaagggaaaaggtggacttggaccatgcaagacttccactgcactccgatgaaagagttacttattccaagttcatctctatgctcttattgcctttttaatcttagttgaagattttggtgaggcaatggggttaaatggccaaaaattgatcccgttttggtgcttgatgccaaagggggagaaaatgaggccaaagcaagaaatggatcagctaccacttgtgaattaacacttgtgaattttgaaaatagtagagttagagtttttgtttgtcaaaatacttttgtttgcctcttattgtcaaaaattggtctcttgtggggagaaggcttaattatgggaaaaagggggagttttttaatccttgatcaatttctcgtgaaatatctctctttatgtttcaacaagtgtgtttgacttagagataggaaattgagtttgatttacaaaaacaaaccaagtggtggcaaagaatgatccatatatgtcaaatttgaatcaaaacaatcttgagttcttatttgaagtgattctgcacttgttctacttgctttatgttgtgttggcataaatcaccaaaaagggggagattgaaagggaaatgtgcccttgggccatttctaagtattttggtgatttagtgtccaacacaagtgcctaagtgttaaatggtggacaaagtacaaatcaagtataaaggtatgtttctcagacttagtacattattttagagactaatgtattgtgtctaagtgctggaaacaggaaaaatcaagttgaaattaaagatggctttgttcaaccaaagtcagctctgtctgggtgcaccggactgtccggtggtgcactggacagtgtccggtgcgccaggctggctcaggcgaacttgctgctctcgggaagtgattaacggcgtacgactataattcaccggactgtccggtgtgcaccggactgtccggtgagccaacggtcggccgggccaacggtcggccgcgcgatccacgcgagacacatggccgagccaacggtcggaagggggcaccggactgtccggtgtgcaccggacagtgtccggtgcgccaacggctctaaagcgccaacggtcggcttcgccaaataaggaaggagatccgcaccggacagtgtccggtggtgcaccggactgtccggtgcgccaggcgacagaaggcaagaattgccttcctgaaatgctctcaacggctcctagctgccttggggctataaaagggacccctaggcacatggtggagaacaccaagcattctctaagcactcctaagcatcaagacttcaattccgcgcatttgattctttgcgatagcaattagagctccatttgagttgtgaactcgctaagttgtgttgtgagctcttgttgcgacttgtgtgcatgttggtactctgatttcgtgtcttgtgtgtgttgctcattcctcccttactccgtgcttctttgtgaacaactttgtaagggcgagagactccaggttgtggagattcctcgcaagcgggatatagaaaagcaatgcaaaatactgtggtattcaagtgggtctttggaccgcttgaaaggggttgattgcaatcctcatccattgggacgccacaacgtggagtaggcaagtgttggacttggccgaaccacgggataaaccaccgtgccatctctgtgttgatatctttgtggttatcatgtcttgcaaagactcttctctagccacttggctttattgtgctaactcctaatcaagtttttgtagcattaaagtttaagttttacaggatcacctattcaccccccctctaggtgctctcaatactagccgtgctcacggtcatgagcagctcggatactcacatgattaacttatggaactaaattcaatttgtcatatgcattgcatcgcaggtgatgttgttacttttgttctactacttaattgggttggtatttacttatacttagtaattgctaataaaattttgaccaactttaaaagcaatgctcagctctaaccatcctctttggtaagccttacacttcacgtgagctcccacctttggcgagttcatgcacattattccccacaacttgttgagcgttgaacgtatgtgagctcactcttgctgtctcacaccccccataggtcaagaacaggtaccacaggatgaggcgaatggaggatgctgtgacgagttcgtgagagatctaggccgtcgtctcccagtcaactttggtttgctagaccgttgtctccttataatgtaattatttattttgtaaagaactcttattatatagtaaagatgtgacattcgatcatgtgccatgattcatcatatgtgtgagacttggtcccagcacacctggtgattatgttcgcgcccgggtcttggtgccccgaaacccgggtgtgacagaagtggtatcagaggaatgttgactgtaggacgaaacctagatagaactggataaccattatctacttacctttgctactctgattctttctaaacttttcttgatcttttctcatctatttccgctctactctgattattcttaccttttccttctaaagacaattgtggaattcacactttgaaatcctgtgcctaaagtgactttaggaataggagacatactcttaggagcaaaaaaaactatttttataagtatctatgtgcttgaatgtttgttcttatgatacttgtctgattcggatctttgattgagtgtgatgggttgtggagtaatgtccacaattacatctacatatatataatgcttataaaactaactagatgaactagattatccctcattaaagtatctagcctaacaagatccatctcatctcaaaagatcctaacttatcctaattaaaatatatctagcttaataaatctatcttatcttacaagattctcgcttatcctaatagactcaacttatcttaaaagatttgtcttatcctaaccactttacttatctcatcctagagtaataaacatggtctaattcaaattaattagatcttatttagtcaaatctagttacgctaaactaatatagtttccatctaatctaaactaacctaatgtaactcaatcaaataggtgagttaatacttgtgaaatagattagaccctatctgcatgttttaacctagttcaccctacactaaataaagaatgacagaccaacccaaccaatagagttatgatggattgcataatctgcctatccccacctatcatcaaacaaacctttgacctacatcatgtagtctatctcatccatatctatcttaaccatattccccaaccgatgatatacactaaacatgaatcaatgagaccaagactagagaagaaaagatcaacctcgtcaaggaaggagagaagtcaaactcaatcttcaaatgcattaccacccaacacggagttcttcctcatcataaactttcttacccctaggtattcttacacaaacctatccatctcttatatcctacataataagtggctggatacctatgctctgcaaatcacccactattgactataaaaaatatgtgaccctgaattattgaaccaaatatagactaaaaacgaattacaaatcaatccttttgtatccctttttcttacaaatctcgaggacgagattattttaagggggtaggatttgtaacacccaaaagtcttaacttgagatttaaggaaaatcctttggagataaataataagaataataataatcatcaaactaagtacccttatacataattgaacttcaaaactcaccctttctaagaaaatggtcataacaaaatatcattagtaaaacaaaccttaataaaagtttggcaattggaaaaatattttctaacaaaaccaaagaatatgaactcgtgaatatacctttaaattaattacacactcgaactaatatgttatggaaataaatgtggtaagtaatccatgttgaaagcatttcctaaaataaaataatgataataaataaggcaactaaataggttaataaaactatcccacattatgttggggttccattagacttgaactcacatttggaataggtttgaattcaaagttgaatggaaaagagaataaaaaaataaaagaaaagaaaaactcacatgttgccgtttgggccgaaatacggcctggtcggcccaatcagccacgctggtcacattcactgacacgtatggcccactagccagttcccccacctcacccgcacgcgctggcacacttgtgtgtttagtcactgtcgtgtgggaccacgcgtcggtcgtcttcttcccaatccgaatcaacgcctacaaccgattgccaacaaatcccgtcgatactcactccgtcgcatcggccgattcggcctcaacccgagcttctcggcaacagattttctcgctcactcggatatataaacaggcatcgtatgccctcgtcccataggctcggcgctcgaccacgacaagaaatcaaagaacggggaggaagggaggacacagagagccatcgccgctgagaacgttgacgaccgcgccacctgagccatcgctctgcacctcggtcggcaccggtcgggcttcttcatcaagggatcttcaagctattggcgtcgcgaccggttcgtacagggtgccagcaccggtgagaccctctcctaaagactcgatctctctgatgcggacatcaacaccaacacgagcacatctacaccagcagcaccttctccagcccaggcgccaccccttccacctgggccagtgactcgggcccgtgcaagagaattgaactacatcatgttgttaaagaacgaaggcccggaagaatagacgaccaacccaattgcggcccataatggacgacctagggttggccgccctaggggctgcgccccctctctatttattcaggagctgcgcctcctttatttcctgagttttgttttacgttagccttagctactctcgaacacgcgcaaatctgcgttgtcttcgtgtattcagaactccaccctcgagtaatagattagattgctcgcctctttttcttgttcgttcttcgattgcgcacaggaaacgatcttcgtgatcaggccgatctcgcatcagcaaggtcggtaaccacagggagttggttcagcgattgcattggcgcctcgggcttgctcgtcgtagtcggatcgcaagggtcatcttccgacaaatcggaattatctctactcgccgaaagatcgggcacctcagcttcatcaattggtatcagatttccaggttgatcggtgagtttatcgagcgttttttttttcctacagtccacaaaaccacataaaaattcaggttagatcttatcccagcacccttttgagcctcgcactttctttcaataatctgcattgttgaatttgtgtgctttcgcgtcatttgttgctggttgcattgtgttctttcaccattcaaaccctagcgccgccaccatctcccgtttgatcacgccacaaaccgagtcaacattgtttccttgtttttctccttcggttacgtcaaaaaaaaaacagaaaaaacaaaccgagtcaacggccgtttccttgattttctccttcggttacgaaaaaaaaacagaaaaaaaaacaaaccgagtcaacatcgtttccttgtttttctccttcggttacgtcaaaaaaaaaacagaaacaaaaaaaaacaacgaaggagaaaggatacggttgtttcatcccggtcgtttgaaaatataacttgagataccttccttaaaccgggcataacttttcgctcgggtgtccaaaaaatctgaaatttttacaggagctagttgacaccattctgagcccggccaaactaaccttcggtctgtttggtttcgacaaaattgtcaaaaaaattcaggaaaataaagaaaaaaattcatcaaagttctcgcacgcttttcagagaacttcctgattttctatagaccacatctgatatctgttttaggtgaaaacttcgtgtagctcctatcttgttgcttcttgtgctgagaaaaatatcaaaaaaatcatacaaaaaagaaaaacaaaatcacctgtgatttctactagtgcctttttttggcatcactagtacaatatttacggtactgccattctgctagttccatccatcctttgcacctgtggccagcaatatagtttcgtgttttgcactataattcaactttgcattattgttttgatcgtgctaatccttgacttgagtgcagcctacccacaactccacatatttctacgacgagcaggtttctgtttctccacgcaatcgctcatccaatctttcaccggttccacctgttggttgcagttcaccactgtggcttggtaagaacggataagaacttgataacagcactagtgtgagcgccttgtgagcagtacacccctgtttttgtcgttggtttttctccttttggtgttttggtgtttgcgctaactatggcaggagcacacgacatggtggatgcccagttgcaggaagtaaggggacaagttgatggacttgctgctgacattaggacgatgcatgaacgacttgattcaacgatcacttcgacgaccgagcgtttcaaccaacttgaccttgctcaaacggcgactcgcaccacactcgacaccatcctggcacgccttaatgcattgaccacaaagatggagcaggaatacggcggtgacactgagcaggacgatggagatcgccgtggtcgtgcacgtcgtgtggttcgtcatccccctaatgacttattttctaagattaaatttaagattccatcttttaatggtaaatatgatcctgctgcatatcttgattgggaattagaggtagaacagaaattttcatgccatgatattcctgctaatagccaagtgaaggctgccattagtgaatttactgattttgctttaatttggtggcgtgagtataaacaaaaacttcccattaacagtgtccttacttggacccaattaaaaactgccatgcgccacagatttgttccttcctattatgctcgtgatttgcttaacaaaatgcagcgttttcaacaaggttcacaatctgttgaggaatattaccaggagttgcaaaagggtatgcttcgttgtggtttggttgagtcagatgacgctgctatggcgcgttttcgtggtggtttgaacagggaaattcaggatatacttgattataaggattattttgatataaccacattgtttgaatatgcttgcaaagctgaacgtgaagtgcagggacgacgatcaaagacatatactaactcttttgcaggccggggtccaacacacagctcaactccttccagccctgcacctcctacgcctagcactacatcgcgcacagggccgaccaagccagtggtgccccctgccaaaggcgccgcttcttccacaggacgtacacgggatattcagtgccatcgttgcagagggtttgggcacatgattcgggactgcccaaacaagcgtaccttgcttatacgtgacaatggtgagtactcttcagccagtgattctgaggaaactagtcatgctatgattgccactaaccatgcagaaaatgaggaagtccacgttgatcccatcgacgccgataggtatgagagtcttgttgtgcagcgtgttctcagcacacaggttgcccaggccgaaaaaaatcagcgacacactctattccataccaagggcgtcgtgcacgaacggtcgattcgcatcatcatcgatagtggcagctgcaacaatttggcaagtacagcgttggtagagaaattatccttgcccactcgcacacatccacatccgtatcacattcaatggcttaatgatggtggtaaaataaaggtaacacgttcggtacgtgtccccttttcgctgggttcttattctgattatgctgattgcgatgttattcctatggaagcatgctctttgttattaggtcgaccttggcaatatgatactgatagtttacatcatggtcgttcaaatcattattctttcatgtttaaaggacagaaaataattatacatccaatgaccccagaccaaattttgaaagatgatcttactagggctgctaaaactgcacaacaagccaaatcaacatcagccgcacctattaaatctgaaatcaagttgcactctcctgttttacttgctacacgtgctgattttgatgatctccatgaagctcatatgccctgttatgcacttgtatgctcgcgaatgcttgttccgtttgatgatgcaccgtctttggatataccccctgctgttgttaaccttttgcaggagtatgctgatgtttatcctacggacttaccaccgggtcttcctcccctccgtggcattgagcatcagatcgatctcatccccggcgcttctcttccgaaccgcgccccgtaccgtacaaatccagatgagacgaaggagatccagcgccaggtgcagacgctgcttgataagggttacattcgtgagtctcttagcccttgctcggttcctgttttactcgtcccaaagaaagatgggtcttggcgtatgtgcgtagattgtcgtgctattaataacatcacagttcgttatcgatatcctattccacgccttgatgatatgctagatgagcttagtggtgccgttattttctctaaggttgatttgcgtagcggttaccatcagattagaatgaaactcggtgatgaatggaaaacggcttttaaaacgaaatttggtttatatgaatggttggttatgccatttggattgactaatgctcccagcacctttatgcgtttaatgaacgaagttctacgggccttcataggtttgtttgttgttgtttatttcgatgatatccttatttacagcaagtctatagaggagcatttagaacatttgcgtgctgtttttgacgctttgcgtgctgctcgcttgtttggtaacatggaaaagtgcacattttgcacgcaacgtgtctcgtttcttggttatatggttactccgcagggcattgaggtggatagcagcaagattgctgccattcgggagtggcctacaccgacgacggtcacacaaattcggagctttcttggacttgccggtttctaccgcagatttgttcgtgattttagctccattgcagcgcctctacatgagcttacaaagaaagatgtgccgtttgcttggagtgattcgcaggaggtagcgttcagcactttgaaagataagttaacccaagctcccctcttgcaattgcctgattttaataaagtgtttgagcttgaatgcgatgctagcggtattgggctaggtgctgttttgttacaagaaggaaaaccagttgcttattttagtgaaaaattaagcggtgctagtctgaaatattctacttatgataaggagctttacgctttagtacgcactttgcatacatggcagcactatctttggcatcgtgagtttataatccattctgatcatgaggctttaaaacatattcgtacccaaacaaatctaaatcgtcgtcatgctaaatgggtagaattcattgagtcctttccttacattattaaacacaagaacgggaaggacaatgttattgctgatgctttgtctcgtcgctataccatgctgtcacagttagattttaaaatctttggtttggacactgtgaaggatcaatatgttgacgatgctgattttaaagatgctttcggccattgtattaatgggaaaccatggggcaaatttcacatacaggatgggttcctgtttcgcgctaacaagctgtgtgttccagctagctcggttcgtcttttgttgttacaggaagcgcatggaggcggtctcatggggcattttggcgtctacaagacaaatgaggtgttggctgcccacttcttttggcctcggatgcgcgctgatgtggagcgccttgttgcacgctgcactacttgtcagaaagctaagtcacggttgaacaaccatggtttgtatatgcctttgcctgtcccttcttctccttggcttgatatctctatggactttgttttgggcttgcctagaactaagaaggggagggatagtatttttgtggttgttgatagattctctaaaatggctcactttataccttgtcataaaactgatgatgctagcattgttgctgaattgttctttagagaaattattcgtttacatggtattccaaaaacaatagtctctgatcgcgatgctaagtttctaagccatttttggagatctctttggaataaattgggaactaaattgttgtttagcactacttgtcaccctcagactgatggacaaactgaggtagtaaatagaactttatctaccatgcttagggctgttttagacaagaatttgagacgttgggaggattgcttgcctcatgttgaatttgcttacaatcatgccacgcattcttctacaaagatgtgccctttccagattgtttatggttacattcctagggcacctattgatttgatttcacttaatgctgcgaacgccccacatgtagatgcttctgcacatgttgaacaaatgattaccatacatgaacaaacgaaacagaacattgctgctactaatacaaaaaatcaggttgctggtagtaaaggaagaaaacatgttacttttgaacctggtgatatggtttggttgcatttgagaaaggatcgttttcctactttgcgccgttctaaattgatgcctcgtgctgctggtccttttaagatactaaccaagattaatgataatgcttataccctcgacctacctgcggagtttggtgtttccactagttttaatgttgcagatttgaaaccgtatgcgggagaagatgaggagttgccgtcgaggacgacttcagttcaagaaggggaggatgatgcggacatcaacaccaacacgagcacatctacaccagcagcaccttctccagcccaggcgccaccccttccacctgggccagtgactcgggcccgtgcaagagaattgaactacatcatgttgttaaagaacgaaggcccggaagaatagacgaccaacccaattgcggcccataatggacgacctagggttggccgccctaggggctgcgccccctctctatttattcaggagctgcgcctcctttatttcctgagttttgttttacgttagccttagctactctcgaacacgcgcaaatctgcgttgtcttcgtgtattcagaactccaccctcgagtaatagattagattgctcgcctctttttcttgttcgttcttcgattgcgcacaggaaacgatcttcgtgatcaggccgatctcgcatcagcaaggtcggtaaccacagggagttggttcagcgattgcattggcgcctcgggcttgctcgtcgtagtcggatcgcaagggtcatcttccgacaaatcggaattatctctactcgccgaaagatcgggcacctcagcttcatcactctccatcaccaacgccgcgcttccctgactccctctcccggaaccataaatagccggccctagcgcctcctattgaatccaaccattagcagccccaagttagccacgcaagaagaaagagagagggaaagaaaaccatcactggtgttgcctcggtcgtgtggttctctgcggtgcggtctgggaggtcggccaaacaccgtgaataaatcaaagtgtgggctggggggttgaccttgaagccgctgccatcgttgttcgcctcgccttgctgtggtgcgttcggtggggatgctgccgtcgctgggttctggggggcatcgagggggattgccggacttcatgaggtatgggtgtgtcgtctgcgggcgattgagaaccaggcacagggatttctgtaccggtgcctgggcatcgccgggcgcggccaccttgggtgctcacgccgctcgggaggatggggctcggccctatgcaacctggctgtcgccttggggaagaagatcttgtgaccgttgatttgctaatcagacgtgcgtgattgggagaagggtaccggttcggaccaggggatcgcagccgttgatccgtttatccacgatcaggaactgatctccagtattttaaaatcaccaccgttattctctgatccaaggctcggcgtggcataccccccccttgagcttataatcgtggccggtgatcatagatctaacagctaggatcgtcggataccccttcgtcgcgcatcttttttcataaaacccccgtggaaactgtgaatcaacccaccatcctgcgcggtgttcactgagtctggggagaattgcgtgttagcccccgagttttcggaaaatagtggccgccgtccagagtctgggaatttcagaaaataaaatctaaaatgattttcaggataaaaaaataaatatgataaacttagaaaattcataactttatgaatttaactccaaattgatccgttccagtttctataattttgtaatattattgtttatcatttagtaccattgttttgacatgaatattacaataaaatttatatcctatttaatcttgtacaaagcacataaaacctttagaaattcataacttaaaatctataactccaaaattaataattcttgttcctgtgatcttatttcaatatgtagattattaatatgtattttgcatatatgtttggtgtgatgttaaattttgcctatacactgtttgtttgtattgctacgactagcgcgaggtcacgagtcatctgaagagcaagttggtacctggaatctcaagtgccagggaagttgtgcccttgatcacttcctttacctagtcatgttctgattaatcataatgatctgcataggttaattttgatgggaccgaacaggttaccctagtttgattatctttataccttgactccactaaactttttgggtagtacctgctattgctttatgtggttttgggtatgaagattacactattcatgattatacttttgttatcagttgttatttattgttcatgttaagatcattatgttaattggaacatggagaaccacccgggaaaatagtgctaccacaagggtttatggacgcccttggctaattaactaggaaagctagtggatgattaccttacccgaaaggggcaagggcagtaggggagtggtcagtgtagggaggtccttggttgattttgatgcgatggcggtcagtcgagggactcctgcactggagcttcctttaaactgtagcgggttttctgaagctagtggaactttgtaaaggcctcgtagtgttaccctgcctcgcctcctcggtagaggtgtatgggattggccgtctcttggcagatgggtaacatgacttgtgggtaaagatgagcaacctctgcagagtgtaaaactggtatactagtcgtgctcacggtcatgaggagctcggatactcacatgattaacttatggaactaaattcaatttgtcatatgcattgcatcacaggtgatgttgttacttttgttctactacttaattgggttggtattaacttatacttagtaattgctaataaaattttgaccaactttaaaagcaatgctcagctctaaccatcctctttggtaagccttacacttcacgtgagctcccacctttggcgagttcatgcacattattccccacaacttgttgagcgatgaacgtatgtgagctcactcttgctgtctcacaccccccccacaggtcaagaacaggtaccacaggatgaggcgtatgaaggatgctgtgacgagtttgtgagagatctaggtcgtcgtctcccagtcaactttggtttgctggaccgttgtctccttataatgtaattatttattttgtacagaactcctattatatagtaaagatgtgacattcgatcatgtgccatgattcatcatatgtgtgagacttggtcccagcacacctggtgattatgttcgcgcccgggtcatggtgccccgaaacccgggtgtgacaccttgcgatccatctgctcgggctttgtggcccaccatttagtgggtgcgggcgactgtttatctggtgcggaagacttgtcattttaccttccctcctgtggcactatataaacagacgggtagttgtgaagttaccacagcattcattgctattgcactgttttgctgccaaaaatttgaccatagccgaagcttgcttactgcatcgtcaaccgaagctattcactttgctcaagcttcataacaagaaagagcttcagcaaagtttttaaaaaatttcaacttcatcaaaaaacaagaaattcaatcatcaaatggctagggtacgctcaacagctagggttactcgcgatggagaggaagccgaaggtgccaaaactgctccaatctctgaagtgatgcaacggtcagggctagtagtatcggagaatgcacctgccgctgaagctgagcaggtagatgctgaggaaactgaatctgaggatgattacagtgacgtgtcgtctaaacccagccacctggagtttgggaaatccaccgttaccgaaggtgatatgtctaagctgatgaagttgggttatttcagtgaggcaaaaaaggtgtaataaacccaaaaaaatgttgaccaaaagttaatctctggtgcgtggatgaggtaaagggttgtgggccattggatgcaaagatagaagtcatctgatgcgtcgtttctttctcccacaaaaaccctaggtggccacccctttttttcccttcaccccccctcttggccgccaccccctttttctcccccttggctggacgccccctccccctatggcagccatcctccattgcttcctcccccaagatctccccctacgcagcaaggatcgagaaaggaggggcacgttgaattgaagaggaagagaggctcaaggagatgttcttccccatctcctcttgaagatttcttggggaaaccctaggtatggatgagatccttgttcctccctgtaattataggcttttggaggttgtggatcatgggaattaaaggattagaggttggatttgatgtggggttaggttttgatctcgaatttagttttctgcagaatggcagattcgacagtttctgttcatgccagttttccatggtcttagtggcctcaaaaaaataaaaagtctatgtatgagtcgtagataatttgtagatctttccgtggccgcgaagaacacctcaatcggacatccgaccagaaagttattgcagttttactatagcagtttttcagtctcataattctgtgcagaatctgttctcttaagatttaggcaattttttcaacagaattaaactgtgggttggtcaaagaagttgtagataattttataagctttccagattgttaaagagtgcattcatatgatttgtgaaactccagttatgtttgttttactgtggctgttcctgtttacctgacaaaaatgagtgggtctgttcactggtgggtttcatctaataaatggccgaattggctcttccaactatggagacttttgtagagggataaaagttcttatttacagcagaatttcataatttttggttgagcagttttggagatatcgaattttaaagttaaccatactgctgtctaaaacagattcagtcagttatcttgtcagatgttttagaacttgtagatggcagaatttaattatctattgaatactgaagttgtagagtattttgtgtagatactcctagagtatttgtttgatatcaccgctgttttaattttaaagatacaaaattaacaaacagcgttgctgctgtatggcatgtggttcagggtgggagtctttccactgggtcttggtttcaagtgtaagagtgttttgttgattgatggcaaatgtttgtgaaatatttgtactaagttttatgcccactagcaggtggctacactccagatcatgtctagtacatttcttcttcttcgatgaaggcaagtgaatgtagcagtggttgcttccgttctgacttgttatttctatcgcccacactctaatattcagaagtatcagattctttcataattggactctatggtgatgctttacttgcttgcattatactgatgctcaatcatatattgatgatgattatgatttgagtatgactcatgagattaattcacacccctgaaggtaaatgaagtattatttgaggttggtattgtatctgaaggtaaatgaagtattatttgaggtttgtgttgtatctgaaggaagtgaagtttattgataaatgtagcatgccatatacattgcatgactcatttgcatatgaagttttgtcgtgacctatggtccgaccgtaccggtacaacttagcatcgtacgttgcccgagaaggggtacgatgcggcttcatacccttagaggtatgaaggcagaggacatatgcattgcattcatatgcattcattgaagtgatatttgcagatgatgtggttttatacccccagaggtatgaagatagagtacctacacattgcattcctatgcatacattgaagtgatatttgcaggtattgttgacgcagggaagtgttatagaacctattgtggttgttcgaggaaatgagatggtattggttatagtgggactactgagttctatatctacaagcatttctgatttttaattgtgactcttttaaaatgttgatgaattcaatttgtggtttaaatatctcgtcagaacaattagcttgctgagatgtttcatctcactcttgcattactcaatgcaggtgcttgttgctcatcaaggggagtgggaagtagcagcacatccaccttcattctcataataatgctgcccagacgcagccatgatttaattagaaacttcttgtcaaaggatgtttgtttttaactagtcgtgcgcactgtttaattcagttcatgttgttatggttgtcttcccattgctagcagattattaatgtcttatatgttttcttatcatgatatctatttatactttgttgcttcccccatttatgcaattttcaaagcagatgctgtcgaaattttatatatgaatattagatgtgtagtttagtagcattctggggtgtttgtggatcccggggtgttacagttggtatcaaacataggctttagattcttggcaatttgaagataaatttgacacacttgcacatataggaagggtatgggttcaaatatctttgatatatattaatgtctttggagtgcagatgacaatagtttcacccctccctattcctttacggtgatgtggtaagttgtttatggcttaatgcttgatataatttattttctgaaattttgatattgttttattaatgcggtagatatcgctggtcattggtgagaatgaagttgttattatgcttgtgatatacaagtatgcctatgttgttttcaccatgtttttcatggttgagttttattacaataatattgttatatatgcttgattgtggatgtttctaagaggagtgtgaattgcgtgttttggggtacaaggtaatcatcaatttgaatttaagttgttgagcggttggtggatagctccaactatcattgcaaagaatgattgtttatgttgagaaaccagttttgaaagaaatgaatattggtactttatatggatttttgggggaagtcttttcatagccagaatggcttacatgtctctctcatattgtgtgttttagttgccacaaagcctagatgtggtttaaagtggttgcctgttagtcatactaattgtagaataaatctttgattctcttgatccattgattatgtattgatacattgaggagctgatggttcccttttcgatgcatgcttgtggagccatttttttagaccacctatctattggtttgaaggaagtccttgcctagcctagagttggttgggtgtggctagtcacctattcctagatcatgtggtgtttacatcagcttaatatgtttgtcaaatgtgtgaaggattaggggttattattattgactttgtatgtctggtactttgagtgcatcgtatgatagaatgaaatgtaagtttctaaactacagtagatgaagacttatattatgtgtaggttatccttactagttggatatttttcttagttgagatgttgaatgaagtatagtgacatgggttaagcaagtattgtgttgttgttgggctatcagtgctctatgtagagtttttggcatttcttcgatgaactatgccgcacaagatgttattggcttcttttggctttattgatccattagttctatagattttctcccttttggtggggtgcaaggaatgttagattacatgattatcttttcatgatggcaagaataaggtttaggaagattaggagttttgttccaatagaactacttgtttcatagtgctttaaggtgaggtgtttgatcttcttatacattcgtcgggtgtagatgtttcaccatttaattaaaattaatggttgaagttggtaagggttgtgcttggtgcatattaccccttcataaaagagtgttgtcttaagacattgatgttgatgtataactgcatccaaatttgatggtgtgaaattggagtgttgattgcaactatgacatgctttgagattcattacatgttgtttcatgcttgatgtcaggtcgtgtagtttccttagacaattagtccaagttagaagttcttgtgttaattaagaccaataatggacccatgttttgaattgtggtgctatatggggtaccttgggtgttttgcttggagtggccgaattcgaggtcgaattctttttaaggggggtagagtgtaatatcccaaaaaaatgttgaccaaaagttaatctctggtgcgtggatgaggtaaagggttgtgggccattggatgcaaagatagaagtcatctgaggcgtcgtttctttctcccacaaaaaccctaggtggccacccctttttttcccttcaccccccctcttggccgccaccccctttttctcccccttggctggacgccccctccccctatggcagccatcctccattgcttcctcccccaagatctccccctacgcagcaaggatcgagaaaaggaggggcacgttgaattgaagaggaagagaggatcaaggagatgttcttccccatctcctcttgaagatttcttggggaaaccctaggtatggatgagatccttgttcctccctgtaattataggcttttggaggttgtggatcatgggaattaaaggattagaggttggatttgatgtggggttaggttttgatctcgaatttagttttctacagaatggcagattcgacagtttctgttcatgccagttttccgtggtcttagtggcctcaaaaaaataaaaagtctatgtatgagtcgtagataatttgtagatctttccgtggccgcgaagaacacctcaatcggacatccgaccagaaagttattgcagtcttactatagcagtttttcagtctcataattctgtgcagaatctgttctcttaagatttaggcaattttatcaacagaattaaactgtgggttggtaaaagaagttgtagataattttataagctttccagattgttaaagagtgcattcatatgatttgtgaaactccagttatgtttgttttactgtggctgttcctgtttacctgacaaaaatgagtgggtttgttcactggtgggtttcatctagtaaatggccgaattggctcttccaactatggagacttttgtagagggataaaagttcttatttccagcagaatttcataatttttggttgagcagttttggagatatcgaattttaaagttaaccatactgctgtctaaaacagattcagtcagttatcttgtcagatgttttagaacttgtagatggcagaatttaattatctattgaatactgaagttgtagagtattttgtgtagatactcctagagtatttgtttgatatcaccgctgttttaattttaaagatacaaaattaacaaacagcgttgctgctgtatggcatgtggttcagggtgggagtctttccactgggtcttggtttcaagtgtaagagtgttttgttgattgatggcaaatgtttgtgaaatatttgtactaagttttatgcccactagcaggtggctacactccagatcatgtctagtacatttcttcttcttcgatgaaggcaagtgaatgtagcagtggttgcttccgttctgacttgttatttctatcgcctacactctaatattcagaagtatcagattctttcataattggactctatggtgatgctttacttgcttgcattatactgatgctcaatcatatattgatgatgattatgatttgagtatgactcatgagattaattcacacccctgaaggtaaatgaagtattatttgaggttggtattgtatctgaaggtaaatgaagtattatttgaggtttgtgttgtatctgaaggaagtgaagtttattgataaatgtagcatgccatatacattgcatgactcatttgcatatgaagttttgtcgtgacctatggtccgaccgtaccggtacaacttaccatcgtacgttgcccgagaaggggtacgatgcggcttcatacccttagaggtatgaaggcagaggacatatgcattgcattcatatgcattcattgaagtgatatttgtagatgatgtggttttatacccccagaggtatgaagatagagtacctacacattgcattcctatgcatacattgaagtgatatttgcaggtattgttgacgcagggaagtgttatagaacctattgtggttgttcgaggaaatgagatggtattggttatagtgggactactgagttctatatctacaagcatttctgatttttaattgtgactcttttaaaatgttgatgaattcaatttgtggtttaaatatctcgtcagaacaattagcttgctgagatgtttcatctcactcttgcattacttaatgcaggtgcttgttgctcatcaaggggagtgggaagtagcagcacatccaccttcattctcataataatgctgcccagacgcagccatgatttaattagaaacttcttgtcaaaggatgtttgtttttaactagtcgtgcgcactgattaattcagttcatgttgttatggttgtcttcccattgctagcagattattaatgtcttatatgttttcttatcatgatatctatttatactttgttgcttcccccatttatgcaattttcaaaggagatgctgtcgaaattttatatatgaatattagatgtgtagtttagtagcattctggggtgtttgtggatcccggggtgttacaaaaggagctggttcgttttggcggagaggaaattactccaaagccggaaaaggatgaagtggtagcgttcaaaagcttctttaaagcaggattaaggtttcctttgaatgggatgattgctgatgttttgaagaagtttgagatttatcttcatcaactaactcctaacgccatcgttaggcttagtgtctatatctgggccctccgaagccagggggtagaaccatttgccgaaggcttctgccgaatacacaagcttcattatcaaacaaaagccagagaagacgagctgcatgaaaacttcggctgttacaactttgcttatcgcaaaaatacaaagtttccagttatcagctatcgacccaagtggccagctggctggaagactaaatggttttacgttaaagttgatgaagagaaggagaagctggttcaaagtccactagaattaatcttcggggaaaccaggccctagtgcaacatgacaccgaatagtccaagccaaattgcactggacgaatttcgagttattgcggagcatattggcactagggatctggtgcaagaattcttagcttttagggtgttcccaactttaaaagagtgggacattccgaacctcaagggagaaaagaagggggaacttgttcggttaccctactattataaattcaagaaacatttcaaagtgccttgccaagaatggttagatacaatcgaagttatgtgcaacgacattcttggcaaatattctaagaaagaagatcaactaatgactgcagccttcagcacccggccgaagcaaaggctaaaccgggtgatggatgctctggactttgagtatcctgattatgagcgactggatcaaggcgccgaaggacaaaagagaaaaagagttgccagcatcttgaataaagatggtgaagaaaaactaaaaaagagaaaactgaaacctgagtcgaagacagatgcttcgattaaaagaaaggctgcggctccgaagtagagggcaactgatatagaagaagaaactgctgcaacgccttctgccaccgacgtggaggaaatcttaaaggtaatgattgaatctttgcctatcaagctaagtccactggggccgcatctgacgaagctttttgagaaggaaaaggagccctcaataatgaagaaggcaactgggccgaagaaacgaagaattgttactgtgacataagttattgaagggacaccaccgcaagcttcggctccgaaggcaccagttgttgagagcacaacagcgaccaaaattgcacgtgctgaagctgcagctgccgaagctgccacggctgaagatgtacatttagaaagcacaatttctaacattaataagatacttctggacatggccacagaagaagctgccgcagctaccgaagaagccgtggctacagtacctgagaaggggaagaaaatagctgaagatgcttcggaagaggaaattttcaacttccaaaacttagttggacaagagttaacgaaggatgaaagggaagaattaaaagaatatgccatatcctgcggatatcaaccaggggcactactctttggtggtgttgacgatgaaaagttaggctgcgtccgagatcaaaccggagcgaaggttatcagtactctatcaaggagtattggtttcccgaagcttgagaccgacataagccgctaccgacgacagcatcttgtcggtagcttattctattctaatttcaaggtaaaaacttttcttcgactttttattattttgaacaacgaaggtgttttctaacgaaggttgcttgtgcacagagtatgctgctgagtaaagctttgagaatgcaacaagatctcgaagataaaaaacatgaagttataattgagggtttagaaagtaaaataaaagatcaagcagctgctcttgaaaagaaggattttgagcttcagacaacagagggtttattggcagaagctgaagctaaaattgcaaagttaaatacagagcttctctcaaagtcagaaagcttcgaacaggagaagcagaagttaaatgccaaatttaagactgaggtcgagaaaagttcgaatctgcaaaaatcattgtcagatcttcaaaacaaatgtgtggagttcagtaacctatgtgtacaacggctgaagaagatcttcaattcggtgggagccagctacgaaaaatttagtgcttcggctgaagacttgccaggagccttcgaacatatcgagggtgaaattgatgaccttgatgaaattatagccggacatggtgatttctgtgccctggtagcttctcggggcacagttgtcgccttcctgaattctggttgtacacatgggaacattgttaataggcccaactttagtttgtcaccagtagatctagttgatattcccaatcttgcccgaagcataggaaacaggtttataaaagtaatatggacgaagggtggatgaagcatagctggtgacgaagctcaaagtcatcttaagctggtaacaaaagcgtaccttgtgcttacctttccctttaagcttgaataattcttacaatacttaaatatgtacaggatgacgaagctgaagagcgtgaagccgaagcttaatagacaatgatgaagcttgaatagatagctgtggaaaagactctaagaattcttgtaataacttttgtaaagaatattgtaactttagaattagattttactccacaaacattgtccataccttgtaatatatttttacctttccatcaacgtatgaagtgctttgatgtgaacaacacttgtacttgcattgacttgctttgctgtggacgaaactagcattttttgagccgaaggcgaaaaacacctttcattcttttcgtacacaacgaagcataaaactgcttctttttcttttttttctgaagctttatttttagagccaaagcatccgcctgtgtttgtatgttatgatgatgatgatcctatgtatgtctaaatgaatgtttatgaatgcaaatgtatgatgtaatgtgtcgtgcaaatgaatgtccaaacacacatacgaagccacaaccatagctttcatccccttgggaaggatcgaagtctctttgccgcttattttttggcttcaccgcttatttttcggtgtatcagcgctgacttttcgctataagttctgcatccccttaggaacgtcttttgaacttcttcgccttctatttcggaggtatcgcgttgacttttcatgctttgccttatatttcggcggaatcagcgttgacttttcgctgtaagctctgcattccttttggaatgacttttgagcaaaaaacttacgctgcgctcccttagaaacagctttttgtagcttcgtcgtgctctgcatccccttagggacgactttcaagcttctccctgttttttccttttctcctgcactcgatggtgcatgctgagcttttacatttacattttttgggagattttgctctcgtagagctgaataagaaaaagggaaattacatgctatggccccattaaaaacctttctcccccttcggaaaggaaaagggtgctataggaaaaataaaaagattacatcagttaaacataatatcgtccaagcccatccgcattccaagatctaggaatgtcgttgacgttcatatccttcaatctttaagaaccgggtcttgacgaagatactaccaaaaaaggtccttcccacttcaactgtagcttgcctactgtatctgggttggctactctccgaagtaacaagtgccctggcttaatgttctttagccgaacttttctgtcacgccactttattgtttcggcttgatatttattgatgttctccactgcctgaagcctgatcccttctatagcatcttttgccacagaacaatcaacttcgtcctctgccgaagccattgttcttattgatcctgccttagcttcttctggggttattgtttcgtcaccaaacagtaatttgaatggtgtaaagcctgttgaccttgatattgttgtgttgtggctccgcaccactttgatcaattcatctggccactttcctctgggctgattgaagattaacttcattgttcccgtcattataatgccattagctctttcaacaagtccatttgactccggatgtctgaccgatgcaaaatgaatcttcgtgccaatttgttcacagaattctttgaaagcttcagcatcgaattgtgtcccgttatccacagtaatagcctttggcactctgaagcgacaaacaatattttgctagaaaaatttctggacagtgactgaagttattgtggttaaaggcttcacctcaatccacttggaaaaatattctactgccaccacaacatactttagatttccatgtgctggtggaagtgggcctagtaaatcgaggccccatctttgcaacgaccaagtgggttgtattaattgagtgagagacaaaggttgcttctgatctcttgcacattttttacagccttcgcacttttggactaactctgccgcatccgaagctgccttcgtccaataaaatccttgtcgaaaaacttttcccgacaagggcctagatccaatgtgtgatccacacagacctgcatgtatctctttcattaattccataccttcggttcttgataaacatttgaggagtggtgagcacactccatgtttatacaattctccttctattatcacatatggtcttgttcttgcctccattcttttgttataagcttcgtcacttgaaagacaattatttcagttctccagtcttcactgtgtactggagaaatggtaagcactgctctctccataagctcaaccgaaggtgcttttattgcttcgaaatatacttcggagggtagggggagcccctgagccgctgatttggctagcaaatctgcatgctcattttcacctcttggaatatttttgacggaaaaaccttcgaaggaagcttccaaccttcggactgcatccagatacttttcaaacttcggatctcgtgccttgctgctcttatccacatggccagcaatgacttgagaatcagtctttaggatggctcttcttattcccattgcccttagtttctgaagcctcaaaagaagtgcttcgtactcagcaatattatttgtgcaactaaaatccagtttgactgcaaagcatgttttgacttttgaaggtgccactaggaccgcagctgctcctacaccgaaggttccccaagaaccatcgcagaacaccgtccaagcttcggtatctttgcttgtcccttcttcgtgagcccctggcgtccagtcagctatgaagtctgctagcgcttgagattgaattgaagatctgtgcacgtagtcaatggtgaattcattgagctccgcggcccactttccagcccttccagtagcttctctgttcctcataatatccttcagaggttgtgacgagggaacaattatacggtaagcctgaaactaatgccgaagcttcctggatgccattaacacagcatacaacactttctccaattttgtgtaatttttctttgataagcttaatacttcagagacaaaatatactggaacttgctttttagtttgtccttcaagtttctcctgtacaagtgccgcacttactgcagagtgcgaagctgccacatacaatagcagaggagcccctggcgtgggtggagttagcgttgttagatctatcaggtattgcttcagctctttgaaggctttctgctgagctgatccccattaaaagacttcggctgacttcagcacttcaaagaatggtaaatttctctttgctgatctagatataaatcgattcaaagatgccaatcttgctgccagccgttgagcccccttctttgtgcttggcggctccatccgaagaatagcttcgattttgttcggattagcttcgatccccttcgttgaaactagacaaacaaagaattttcctttctttactctgaaaacacatttttctggatttaatttaaggccagcttgcctaaaattagcaaatgtttcatgtagatcagcaatgtgattttcctgcttcgtgctcttcactataatgtcatcaacatatgttagcacatttctgccaatctgagagtgaaggaccttggctgtcatcctgctgaagcttcctccagcattcttgagcccctcaggcatccgaagataacaatatgtgccactgggggttatgaagctggtttttggctcatcttccttcttcatccaaatttggtggtagcctgaataacaatctagtagactcatgagctctgacgaagctgctgcatccactagtgaatctattcttggcaatgggaactcatcctttggacaagccttgttaagatcagtaaaatcaatgcacattctccacttgccattggccttcttcaccatgacagtgttggctagccattctgggtattttacttctctgattactccagcactgagaagtctttttacttcatttcgagcaccttcggctttgtcatcagacattttccgaagcctctgctttctgggtctgaaggatggatcgacattgagcgaatgttcaatggcatccctgttaacaccacagagatcgttggctgaccatgcgaagacatctttgttgttgaacaaaaaccttattagagttttctcctgttcctcagataattgagaacccagcaataccttctgctctgctatgtcttcacatagaagcatgggcttcggctgatcggccgaagcagccttctcccttctgtacttatactggtcacaagctttggctccatctatattgtggattgcttttgaatctgtccaatttccttcagcctttctggcagcttcctgacttccatgaatagcaataggcccttgatccaaaggtatcttcatgcatagatatgctggatgaagaattgcttcaaaggcattgagtgtcccacgaccaatgattgcattgtaggggtactccatgttgacaatatcaaacacaacttgctcagtccttgtattgttgaccaatccgaaggtcactggcatcgtgatcttgccaagtgctacaatctgccttcctccgaagccacaaagagggtgtgtagcatcatgaatcgtatcctctggctcttgcatctgcctgaaggccttggcaaatataatatccgctgcactgcctgtatcaaccagaacgttgtggaccagaaatcccttgatgacacaagaaatgaccatagcatcattgtgagggtaatccttgagctgaaggtcctcttgggagaaggtgattgggatgtgggaccattttgacatgatgaagggtccctgcaccccaacatgttgtacccttctctaagcttccttcttctgtttcttgttggctggctctgaacatgaatcgcatgttatcaggagcactagcttcgtagccgaagcagcttcagcttggttgttgaacgaagccatcagcttagaaagtggaagtgagttcgccgggggtgggcgccaatgttggggacttgttctcaaatactaagagtcaagaacaaggcaacacaaagtgttaaatgataatgcccttcgtccttcgaagcattatttcaattgggatataacgatcttcggacgaaggtcatgaaggacataccttcatcatcacaggtataagatatttgaaagatgaaatgtataaagtatgaaagataaacacaaataagcatatgacaacatcattcacatgttatcatcatacaaacttggatatttaaatacgatatttaatcacatttataccttcggctttgcagaaggcaaaaattcaagtgttgcgcgtgagcgattacaagatagcgtgaacagtacatgggtactgttcatctatttatagacacagagcgccgcctgtgtgaaattacatttataccctttacaattgattacaatcatgacacaaattatcatgggtctaatggtcatttcatctttaagtcggttcactccttcgtcttgagacatgtcaccttgcggaagctttatgagtgctagcttcggcgctgctttagagaaaatctgccgaaggtgtttcttctctcaggatcttcggctatgaagcataccaccaacaactgtaaactttgagtaaataatagatatgttacaacatattcatctttatgttgtgtctgctacttatgaaaattaatactatagcagatgtgtgcaaacactcaaggacattgatgcaaagtacagctcaattgtgatttaagagtggtcacatatcatagaaatctctgatggcttagtattatgttgaccagcaaaacctgctatgatgctacctgcattaggttaaacataataggttcttatgggattattgtctctgctttctcatcttttctgccttttgtaatcctgtaccgttgaagttttggtctagtgatttgaagcaactaaccttttaatagggatggtcagcctactattgtgcatcattttctttgcattactgcagtgtgtctgtgactgggaaaacagag

SEQ ID NO: 550 - DNA, 6259 bp, Zea mays; identical to SEQ ID NO: 359
  Intron number 3 from transcript GRMZM2G095348_T02 (locus G RMZM2G095348) derived from phytozome v7.0 (chr-ID 6; pos 7 2205617 to 72211875 reverse strand)

SEQ ID NO: 551 - DNA, 1719 bp, Zea mays
  Intron number 3 from transcript GRMZM2G134529_T04 (locus G RMZM2G134529) derived from phytozome v7.0 (chr-ID 3; pos 1 78446833 to 178448551)
ctttcacgagcaggagcaaaaggggttagtgacttataagttttcaaaaatagttttcaatgcatatgcctgcttcttacttgtacaattcagggggtgtagtaccacagtgaggcaaactgactttataaaatgttaaatctgtgatatgttccttatactgcagggatcatctggtcaatatatccgtgctactctaccttatattcgtcgaacttaccgtaagaacctaggggacaaactgcacttattaatgttagtgacaaaacctgaagcatctccaaaaatccacagaatttatggcttcaaacatccttgctctatttttaggcgtaccgtctagcattggcagcactaatcacctgagaacttcttcatgacattctttctttgtctcacttctagcggagtaacattctgctatgtttcttatgtaaaaaagccccctttttataacaggaatgattttttgtgttttagaaaatggtaaagaacaattggcttgtctgtcgtgtactggatacgtacttcgagatcagaattcacaaaaaacaacagtcaaatctgttacacatagttgtactcatcatggagatgtgaaggaaatcccttatatggtaggaaagatgcagactgtttaagaagattataggaatatatatagcaaaatcattatcttgattacccacttttattgattggctgattgctttttcaagatgcagatatttctcaattaagtttatatacaatgtagtatttttattttattttttgtagtgcgttggagaagacattgatgatttgcagtacacacctaaacccgaatttgaggggtattttagagttaagaatgttcaaactgaggtatcaggaactatcgttatattgtttagcataatatcaaccgtatgcatcatacttattttgctataacccctttatttttgttgtctatagttggatctacttaaagcatggttttctcacatgcaagaggttaagggggtgtttggtttctagggactaatgtttagtccctacattttattccatttttgttccaaaattgctaaatatagaaactaaatctttattttagtttctatatttagcaatttatatactaaaaaggaataaagtgaagggactaaacattagtccctagaaaccaaacaccccctaagcctgacatttatgttacatacaacgatgacttttttgactggccatttttagagaagagggctgcacaccatggaataaaaatgaatgaggtgcgttgttgatttaattcactttaggttttattaggaagaatgggtaatttggttattataatcttgtatcgtggaagcacttttagaaaaatatgatctcctttaagctaagctgcagcagtataaaaaaactcggttggggagggaatgaccgccctcccggtataataataagaaggacctgaaccactggtcccggccaagaacaccagcgaaccctagcccccaatcactaaccggccgattacaactgctcactctgcaaggaaaataaacaagggcaagctattctttagtactgttctatgtgaaacatgtttttgctctgcatttatttctcacctagagcagattgaataagacttagaaatggcaaagttgatgaccgtttcatatctacttcatttgtatttttattgtttcaggagattggtttcca

SEQ ID NO: 552 - DNA, 59628 bp, Zea mays
  Intron number 4 from transcript GRMZM2G083182_T02 (locus G RMZM2G083182) derived from phytozome v7.0 (chr-ID 1; pos 2 44913044 to 244972671)
tgttcgtctgtaagtgcaatcaaccccaagtgagggttttggtgatttaatgacaaaacaaataagggtactaacagtttttgttctcagtgtatgattagaaagaaacaggaacttaaggaagcaccaaggacttcatgcaacagacgtataaaatttatgtaaaatcttgtgttgcatgatgtaattcttccttttttttccgcacaggtaaaggtgtttgctatagctcaagtcaccaaattcaaaagctatttttgaaaaccaaaaatcactttaacattacttggttgaccatggttagggttgagaaacctagagtgttcttgctgaaaagcagctgaacttcttcaactgcagctgagctttccagctgaacttaacttcagctgtgatgagcttcttcagctgcagctgagcttttcagctgagctggacttcagctgagttgaactttcaactccagctgaacttcaacttcagctgtggacctctttgaccatacccagctgaacttgcccccgggcagctgagctggggttttctctccaaaactctctggtctagaccagctgaactggtcctggggggcagctcaactggtctctgaccctctgacttctgatctgcagtctgccagtcagactggcagtcaggtcgccaggggtgtcagggggcggttcaacctccctagggggcgattcaaccggtcctgacctgtctgacccgcctgcaggtcagtctgccagtcagtgtggcagtcagactggcagatagtctgctgacctgtcagggggcggttcaaccggttttctgcgtggtttctggtcaaacggctagtttttgagccgtgactataaatagaaccctctctctctcttcttcaatacggctggacacttactcatttattgctcacctaacttgagacaaagcactcatctctccatctctctcacacttaaatcttcctcaagattcaaccttgttggaggagctcttgggtgtgaggtttgtgcttgtgctcacgatttggtttttctctcccatctcttttacaaagacttgagcttgtgcaaacccctcttgtgctttcttggtgttcttgaaaccctaggtttcaagatcttttgaggttgcttgggagtctccaaatttgtggacgaccccaagaagtttgtatcacccgctctttgagctaagataagaagagattgccttgacctttgtggtcggttttggaggattagggttgaaaaagacccgaccctttgtgggctcctcaacggggagtaggacacctttgtggtgtggccgaacctcggattaaatcttgtgtcttgtgttcttgcttgttttaacttgagatatttttacttgcaagattgacataaagatttttccgtagagtttatctagaagtgaaatagcctttacatattcatcttttcatcctaacttagctatatcttacttctcacaagaactcgcgaaatacttttttgagtagattttagtctaaagtttataaaacagttggattggttcagagtggttcaacttgcgcacgtagctattgaaccggcctgcaccagtcgtactgtgtatttaacaatctttcgaagtttgttgtgaaaattttcagattagcctattcaccccccctctaggctactttcaattggtatcagaacttcgtacctcgttttacgcttaaccgcgtgaggaaacgatcatgtctactcaacgggaccatgtggatcctctcctcgaggaaatccccatcacatcttccggtgaggaagtggaccccaaggtcctcgacctcgccatgaaaattgccgagaagatgttcctcaaaatgaaagaggaagatgctaagaaaaaggccgaagaagaagaatcaagaagaaaggccgaagaagataaaggtaaaggaaaatttgattacaatgacgatctagtggatcttttggtgtcgaaggtgttgagcaaggtaagtctcaacaccgagggatcatctaccaaaagcaaaggtaacgaatttagtaaagttcaattcgattactctagaaattttatccccaacttctcttccgccccacttggaaagttaccaactcttagtgagttgaactatgacgagtgggccgacaagatgaagtcgcatttaatcggtgtgcatcctagttatcggggaccataattaggggtacccccaagactcctaatcttagcaggtaacccccatcagcacaaagctgcaaaggcctgatgggtgcgattaagtcaaggctcggtccactcaagggacacgacctcgcctcgcccgagcccagtctcgggcaagggcagccgaccccggaggattcacgtctcgcccgaagaccccctcaagtgacaaacacaccttcggctcgcccgaggcccagtcttcgccaagaagcaaccttggccagatcgccacgccaaccgaccgtatcgcaggagcatttaatgcaaaggtggcctgacaccttatcctgacgcgcgcccctcagtcgacagagccgaagtgaccgcagtcacttcgccgctccactgaccggcctgacaagaggacagcgccgcctgcgtcgctccgactgctgtgccgctcgacagagtgaggcggacagcagccaagtccggcctcgggcgccataggaagctccgcctcacccgaccccagggctcggacccggcctcggcctcggaagacgacgaactccgcctcgcccgaccccagggctcggactcggcctcgtccctggaagacgacgaactccgcctcgcccgaccccagggctcggacttggcctcgatcccggaagacgacgaactccgcctcgcccgaccccagggctcggactcggcctcggctccggaagacgacgaactccgcctcgcccgaccccagggctcggactcagccctggcctcagccgacggtctccgcctcgcccgacccggggctcagactcgacatcgacctcggaagacagactcgacctcgacctcggaggagcctccgcctcgcctgacccagggctcggaccgaccacgtcacaggggggggccatcattaccctacccctagctagctcaggctatggggaacaagaccggcgtcccatctggctcgccccggtaaacaaataatgatggcaccccgcgtgctccatgacgatgtcggctctcagccccttacggaagcaaggagacgtcagcaaggactcgacagccccaacaactgtccttccgcaaggctccaacgctcctccgacggccacgacatcacatgaatagggtgccaaaacctctagcccgggacggagctctgtttcgggaatcttgagttcatgtccctcgacggcagctacgacatgatactccttcctccgccgcgcgacagcgacaatggcggccgacaacccgcccgccggcggcggaatcgacgacgtcttccccacgtggcggaagaacaacattcgggtttgtcccgtcgcctcccccgccaacggaggaggaggcggggcaaccaaggccaagcaggaggcggcacctcgtcggctgtcgagcaaatcgacggcgccggtgccccaacgggggacacgtcgggcgtcgacctcacgtctgagacgaagatgagcgttgtttccccgcaacacgccaactccaagaggacggacgacgccagcacgctcgcaaagggcttgctgggcgtcaccctcgtacccgagacgacggtgcagtctgcccctgacgtgacttcgtcaccgcccgtcgaccaggaggtactgaccgattcccatctcgtgccttttagatccagctacgacccaccaagcgaccccgctttggtggatgctttaataaaggcatgttcaaaccctccggggtatcgtatgcggtcaccctgggaccggctgacggccgtctcgacctatggaccctcgggttccgaggaagatgacaagcccgacttttgttgggatttctccggactcggtaaccctagtgccatgcgggacttcatgaccgcatgcgactactgcctttccgactgttccgacggtagccgcagcttcggcgaagaggactgcggcccaagtcgtgaatgtttccacgtcgatctagggggtcccggcgaaggcaaccatcttggtataccggaaaacagtgatccccctaggcctgcgcctcgcgttgacatccttcgggagctagctgtggtcccagtccctacgggggtcaggacgcacaactcgagcaaatccgcgagatgcaggccaggctcgacgagggagcaggaacacttgagtcgttccgccgggacatcgggcaggaatgggcaggccaagctccggccggagaagcgcgtcatgtaccctaggacatccagcaccgcattgccgacgacatcagggcaaggccgccaccagcttctagtggggtcggccagaacctggctgcggcagcgatactactccgcgcggtgccggaaccatcaaccacccaagggcgacgtatccagggagagctcaagaatctcctggaagacgccgcggtccgacgggccgaaagctctgcctcccgaaggcagggatacccctcggagcatcgcgccgcgacttcccgattcatgcgggaagcctcggtccacaccgggcgcacgcgcaacacagcgcctgcggccccgggtcgcctcggcaacgagcaccaccaccgcaaccatcgaacccacctcgacgagagggtgcgccgaggctaccaccccaggcgtgggggacgctacgacagcggggaggatctgagtccctcgcccgaaccacccggtccgcaggctttcagccgggccatacgacgggcgccgttcccgacccggttccgaaccccgactactatcacgaagtactcgggggagacgaggccggaactgtggctcgcggactaccggctggcctgccacctgggtggaacggacgatgacaacctcatcatccgcaacctccccctgttcctctccgacaccgctcgagcctggctagagcacctgcctccggggcagatctccaactaggacgacctggtctaatccttcgccggtaacttccagggcacgtacgtgcgccctgggaactcctgggatctccgaagctgccgccagcagccgggagagtctctccgggactacatccggcgattctcgaagcagcgcaccgagctgcccaacgtcaccgactcggatgtcatcggcgcgttcctcgccggcaccacctgccgcgacctagtgagcaagctgggtcgcaagacccccaccagggcgagtgagctgatggacatcgccaccaagttcgcctctggccacgaggcggttgaggccatcttccggaaggacaagcagccccagggccgcccgccggaagatgtccccgaggcgtctactcagcgcggcaccaagaagaagggcaagaagaagtcgcaagcgaaacgcgaagccgccgacgcggaccttgtcgccgctgctgagtacaagaaccctcggaaacctcccggaggcgccaacctcttcgacaaaatgcccaaggagccgtgcccctatcatcaggggcccgtcaagcacacccttgaggagtgcgtcatgcttcggcaccactttcacaaggctgggccacctgcggaaggtggcagggcccacaacaacgacaagagggaggatcacaaggcagaggagttccccgaggtccacgactgcttcatgatctacggtgggcaagtggcgaacgcctcggctcggcaccgcaagcaagagcgttgggaggtctgttcggtaaaggtggcggcgccagtctatatagactggtccgacaagcccatcaccttcgaccagggcgaccaccccgaccgcgtgccgagcccggggaaatacccgctcgttgtcgaccccgtcatcggcaacgtcaggctcaccaaggtcctcatggacggaggcagcagcctcaacatcatctacgccgagaccctcgggctcctacggatcgatctatcctcggtccgggcgggcgcggcgcctttccacgggatcatccccgggaaacgcgtccagcccctcggacaactcgacctacccgtctactttgggactccctccaactttcgaaggtaaaccctcacgttcgaggtggtcgggttccaaggaacctaccacgcagtgctggggaggccatgctacaccaagttcatggtcgtccccaactacacctacctcaaactcaagatgccgggctccaacggggtcatcaccgtcggccccatgtaccgacacgcgtacgaatgcgacgtggagtgcgtggagtacaccgaggccctcgccgaatccgaggccctcatcgccgacctggagagcctctccaaggaggcgccagacgtgaagcgccatgccggcaacttcgagccagcggagacggttaagtccgtccctctcgatcccagcaacgacgcctccaagcagatccggatcggctccaagctcgaccccaaatagggagcagtgctcgtcgacttcctccgtgcaaacgccgacgttttcgcgtggagtccctcggacttgcccggcataccgagggatgtcgccgagcactcgctcgatatccgagctggagcccgacccgtgaagcagcctctgcgccgattcgacgaagaaaagcgcagagccataggcgaggagatccacaagctgatggctgcagggttcatcaaagaggtattccatcccgaatggcttgccaaccctgtgcttgtgaggaagaaaggagggaaatggcggatgtgtgtagactacactggtctaaacaaagcatgtccgaaggttccctaccctcttcctcgcatcaatcaaatcgtggattccactgctgggtgcgaaaccctgtctttcctcgatgcctactcagggtatcaccaaatcaggatgaaagagtccgaccagctcgcgacttctttcatcacaccttttggcatgtactgctacgttactatgtcatttggtctgaggaatgcgggtgcgacgtaccaaaggtgcatgaaccacgtgttcggcgaacacattggtcgaacagtcgaggcttacgtcgatgacatcgtagtcaagacgaggaaagcctccgacctcctttccgaccttgaaacgacattccggtgtctcaaggcgaaaggcataaaactcaaccccgagaagtgtgtcttcagagtaccccgaggcatgctcttggggttcatcgtctccgagcggggcatcgaggccaacccggagaaaatcgcggccatcaccagcatggtgcccatcaaggacttgaaaggcgtacagagggtcatgggatgccttgcggctccgagccgcttcatctcgcgcctcagcgaaagaggcctacctttgtaccgcctcttaaggaaggccgagtgcttcacatggacccctgaggccgaggaaaccctcggaaacctgaaggcgctcctcccgaacgcgcccatcttggtgcccccgctgccggagaagccctcttgacctacgtcgccgctaccactcaggtggtcagcgccgcgatcatggttgagagacgagaagaggggcatgcattgcccgtccagaggccagtctacttcatcagtgagttactgtccgagaccaagatccgctacccacaaattcagaagctgctgtacacggtgatcctaacgcggcggaagttgcgacactacttcgagtctcattcggtgattgtggtgtcatccttccccctgggggagatcatccagtgccgagaggcctcgggtaggattgcaaagtgggcggtggaaatcatgggcgagacaatctcgttcgcccctcggaaggccatcaagtcccaagtcttggcggactttgtggttgaatgggtcgacacccagcttccagcagctccgatccaaccggaactctggaccatgtttttcgacgggtcgctgatgaaaacaggggcaggcgcgggcctgctctttatctcgcccctcgggaagcacctacgctacgtgctacgcctccacttcccggcgtccaacaatgtggccgagtacgaggctctggtcaacgggttgcgcatcgccatcgagctaggggtccgacgcctcgatgctcgtggtgactcgcagctcgtcattgatcaagtcatgaagaactcccactgccgcgacccaaagatggaagcctactgcgatgaggttcggcgcctggaggacaagttctacgggctcgagctcaaccacatcgcccgacaatacaacgagactacggacgagctggctaagatagcctcggggcgaacaatggttcccccggacgtcttctcccgagacctacatcaaccctcagtcaagaccgacgacacgctcgagcccaagaaggcctcggcccagcccgaggcaccctcggcccccgagggtgaggcactgcgcgtcgaggaagagcggagcggggtcacgcctaatcgaaactggcagaccccgtacctgcaatatctccaccgaggagagctatccctcgaccgagccgaagctcggcgattggcgcggcgcgccaagtcgttcgtcttgctgggggacgggaaggagctctaccaccgcagcccctcaggcatcctccagcgatgcatatccatcgccgaaggccagcagctcttacaagaaatacactcgggggcttgcggtcatcacgcagcgcctcgagcccttgtcggaaacaccttccgataaggtttctactggccgaccgcggtggtcgacgccaccagaattgtccgcacctgccaagggtgtcaattctacgcaaggcagacccacctgcccgctcaggctctacagacaatacccatcacctggtcgtttgctgtgtggggactggacctcgtcggtcccttgcagaaggcacccgggggctacacgcacctactggtcgccatcgacaaattctccaagtggatcgaggtccagcccctaaacagcatcaagtccgaacaggcggtggcgttcttcaccaacatcatccatcgctttggggtcccgaactccatcataaccgacaacggcacccagttcacaggcaaaaagttcctggacttctgcgaggatcatcacatccgggtggactgggccgccgttgctcaccccatgacgaatgggcaagtagagcgtgccaacagcatgattctgcaaggactcaagccacggatctacaacgacctcaacaagttcggcaagcaatggatgaaggagctcccctcggtggtctggagtctgaggacaacgccgagccgagccactggcttcacaccgttctttctagtctatggggccgaggccatcttgcccacagacttagaatacggttccccgagggcgagggcctacgacgaccaaagcaatcgagctaaccgagaagactcactagaccagctggaagaggctcgggacatggccttactacactcggcgcggtatcagcagtccttgcgacgctaccacgcccgaggggttcggtcccaagacctccaggtgggcgacttggtgcttcggctgcgacaagacgcccgagggcggcacaagctcacgcgtccctgggaagggccgttcgtcatcgctaaggttctgaagcccgggacatacaagctggccaacagtcaaggcgaggtctacagcaacgcttggaacatccgacagctacgtcgcttctacccttaagatgctttcaagttgttcatacacctcgttcacacacaaagtctaaccatcaaggaagggtcagccttgcctcggcaaagcccgaccctccctcgggggctagaaggggggaaccccctatgcgtcaaaattttcctcgaaaaaagtcttccatcaaaaagtctttcgcgtctcccggctatatcagtaacaggaccccaagaaacgaataagggtgcatgtaagtggcaaggccaactgagccgagggactcctacgcctctgggatacggatacctcactcgtcgcctaccacaaaaaatgactcttacttgggcaagctaccctgctactgacgaacgggtccggatacgcaaaacggaaggaaaagaaacacaaccttatattacgataataaagtgttcgggcctcggcggccgcaaaagacacatatgcattcaaagaaaactgctctagcagaatcaggcgtcgcccggagaaggagtcgcgccctcggcttcgtctccaccctcggcaagatccgctgtaacacccctagtgttactgtaactaaaacttgagcatggcatcataagcattggcattgcatatgtttgatacacttagaatgcattcactaggtaaaaatttcaaacaagttgtgtgttatagcattttgcaaatatgaccctggatagggaacttaaccctaaatagggattaaaggggtaaaacctaacccaagttgagaaaacctaaaagctttaggagaaatagtataaaatgttcccaaaaatgaatttgaatcacatttatacccctgggatactagaaaccctaattggaaccctagaaaaccctaaatccaaaccctaggggcttatgtgcaaaattagtccacttttggactaaagtgcaaaaaccaagttaaataagtatattaagtcatttgggtcactcatatgtggatttacaagccaaaccctaagttttggcctcatttgcaaaaaggaccctagttgaggttttatactaagtctgaaaaacagtgttatgggctcaacttttgagccttgtaacttttaaatcatagggtttttgccctaggtcaccacatcaacattgtagcccaatcataggaggacaactttgcttaaggatgtgagcttagttgttaagagtaaattggagataattcagctgaaaatctggctgtcaggctggttccactctgaaagttagatgttcagtgtaacagagccatctttgggtgtgaattcaaccatgatctagtgatcaaatgagctcagtcactatagccgaaatataggtggtataaagctctccaactttgctgcagagtttgggttgtgttaccacaggaatctgggagaaaatcaagctccaacttggtctgtcagacaagctttttactgaatctggcgcactgttcaccgtcttcagaaatatcgcgccgtggataagggtcagcccctcaccggcgataagaacaccaccgcagcgtggatggtcgtcggtggccgtggtaaatatcctcggcatagtggcagaaggtcactaaggtggcaggctccggttaaacggcgacccccgtgccatcaccggaatccgccgcgcggaaagcttgccagcacatctgaaatccacacttcttctccaactccggtcgacggcctataaattgagctcggactctgcttcttctccacattacgcacctcagtgcttaagcaattgactcaattccgccagagaacttgcggagccccaaattccctcctcctccgttcttgcttcgccgcaagggactccatcgtggtcagcgcgcttcgggtcagtgtttatcaaattgcttcttgttctagttttcctttgatctcctattgctctccatgccaatcaattgaaattcggccgaagcccatcaccggaatgcacccttgctctgtaaaacgccgccgtgacccaccctcaccgacgacctgctcttcggctcgtattctgcccaaaccaaagtgtgtgcataactcctggtgaacccgtgaacccttcctcagcctcaattcggtcgtcctcgccgtcgtttgatcggaacgcgttcgcccctgtaaccatccgctcggtcgccgtggactgctcgattcaatgcccccttgatgaaattgatttaggggaagtgtttgatagaagtttaattatgtccctgtcgcacgggagctccagccatggcgtcagccggccggaattggctcgccggggtgcggcgagggctgttcctcgtcgtggaccttagtctgcaaagggatggaaggtggaggtcctctttgtaaaccgtcagtgactcatctcaatagtgcgttgaccttgcttcgggatattcaaaaggacagggatctcaatgcaaagttggcgcgggcgcaggcgcaagcgcgcttctgctcattattgggccgcctgtatcgaatttggcccaacactattcaccagtttttccttttctttttattccagagctaaaacaattatagaaaatggtagaaaaatcctaaaattgtgaaaccaattttcctagacttcttattttccctagaatttaataaaaatagttttatgatttttagaggaaataaggaattttaaggcattttaaatagtttaaagtcttagttctggatttttagaaaatagataataatcccaaaattgctcaaactttttacataagctctatacattatttagaagccttgggtaaatttgggttgatttggaccttgtttgatacttagaacctaaaacccccctgccctttgaattcctttactgactccggaaaccctaagttctcgaagttccgtgaaggaaagttatattcaagatttagataataaatctttattaactttgcactctcatgagcattacatggcattcattcttatatatatacctatatggttatatttagaaaacgaagaaaagattgaagtgaccgaagagaagacaccaccacctttggaatctcaggcagggacttggctctacttcgacatctgcgagtccgagcccgactcacctactaatgaaggcaagccccggtgcatttgccaccttccttgatgtttttaaaatctttctcacttgattgctgcattaggtgataggagttgaatgattaaacaattcctgcattaccttccttgaacttgattaccttccttgaaaccctgtttttacaaaaaggtttttatatgcttagtattgctctagaaaaacaaaaggatttgttttacaaaagatgtttggcaaagtgggagggttgttttcaaaaataaaaattgatggtggatccatcatggccgtgatgggttcaacatcggaaaagatgtacctctgccaggtaccaagtttttgggttgaaaatattaagctgagaccgggcgggtgacttgcacgagaagagagtctcggtgtagtgtctctgtctgagtcgattaaggaccttgtcgatgtaggcttgatgatcgaggaccctttaactggtcacatgcctcgtcatgggtaagccttgcctcgggcagactaaggccagaataagataacacgaaatgggcgtggagcggtggagagagtagtgtgtaccctccatggcaagaggctggacggtggtgtatctgtgctctcggtttgcgtgaacctgatctggtcttaagaaacccggtggcgggttgacatatgcaagggttaagtgctacatatgtcgtgtgattggagatcctcagctgagtataatcaattcggatcaccgtaccttcgcggttatgaagacttggtcactgccctacacgtagcaatccagtgaagatgaaggaagaattaagaacttggctagttcaggataagtgtttgaactaggttagagagaactctagagataggtaagattacttaacttgacaaataaaactggatttttaaggatccactttagtaagcatttctgcaaaacagagtctttgattattgagaagccttaccttgactcccttaaaccagcatacccttgagaatcttttctttagtcgggtaagacttgctgagtaattccatactcagggtttatcccttcgttgtttttaggtgaggaagcaacaaatttttgttgcttttgttccaaggtggttccccatgaggaaaagcaagagtgaagatgcgggaggacatggtcctccatatagaacttttgtttaaaaacttatcgggaggagtttttgcctccctcggttttgtaataatactactctgcactcgtttatatttctggtctgtaataaacaacttgagcttactttctaaataaatgtaagttatgtaatcgcttccgcatttcttcatctccgatgttctgtaatgtctgcaagatgggtgaaacgttcctggaaagggaagaaagaagataccgaacttgtcaagtagttcaggggcacctacagggttgtctaaggtccgttggacaaggacaactgtaggtgggcctaattacttgggaggttccatcacagctggtatcggagcgtagcccttctttgcagatattatgaggcatcttcaaaaggattttctaaaaatcttacctagaaactctcttcttttcttacctaagtattctgaagagtttatcttaaagaccaggtagtaagagtgcaacatatagaaggtgtgaatcaactaaggttgattcggtaattacacatgcatcatgctaagaactatactaaataaagttttcccccttagagaaatgatgtcgcgcaccagaaagaccgcgcgcaaatctgctagacccattggcataccccgccattaacttgccccaagacctgaagaaagtagcagtggtagcaacgatcctatcggggatctggaagcacaagtcgaactgcttcaatcagaactccgtcacaggaatgatctatgggtcgcggatgcagccatccactacttgcaagaccaactcacaaaacgagatctagcgctcgattggacggttaactctcgtccactcacctgggctaagggagccaaagctcgagcccgcgtggaggagcttagctcatccatgtataacttgcaggtctgttataatacactacatgaataagttcatgtgttgtattcacaactgcacccgaacgtccctgcggatcctgtcaggatggaagccggaccttctcatgtagcgggagaagcacttgatggtgaactggacctttttaggccccctccctctatgaagttggttgacgaatggtcttctacgcccgacagtaaagctaccaaaagtgaaaagaagtggcttaccaagtgcctgtaacattggccggataggacttttctgctaatatgattgttccaaaaggccaagacatagatgtcatcttaggcatgaactggttagcccacataaagcaattctcaaccttgatccgagaaccatcaggttgagtatggccaatagagagttggtgacttgattgcctaaacccaagattgggctatattcgtatttagtgaaccgtgatccgactcaaagttgaattttccgttatcactccatgaccatacccatacaagtaaatgcctagataatttccttgtcgaacctacaatgtacctggacttcaaacaaggatctcaagtcatgcctccttttagcaccactctcctgttcagctgatgcaggttgaggtctccattgtatttggcctctccttgcggatcgccatgttgttttattaacccaacctaggaaagacatgtccgaccattttctttaatttgatgcctttggtttcttcatatctatcgaaggcataccaacttaatccttgaccttgtgatctctatgatgggcatagaaatatgcttggggctgaattaacagtctcccatcatacttctttcatcaagtttagattatggccatgccttgggccatgatctatttggctctctacttgtaaccatttttacaggtggagcaattctttgtatatagtcacccttgctcaatccattggtgtcgcgtgagatttcttgttggttatgtctggtaatggttttattgtaacaccctgaatttggggtataaaaatttctttgctcgtattcacaaattcaggtgttacttctctcttcacatcttccccaacctcctccttctcttttctatagaagaagagtggttatttttttatttattgtaaatgtaattataatctagtgggttaaaccctaagggaacaatggtttttgcatcaagttagaaagcatttgtttttttgtttgatgaatggtttgcttgatctttcatctaatcatttatttgcacataatgtcaaactgaaataaatagagaagagaaagaaaagaaaagaaaagaaaaggagaaatagaattcagcccacctctcctccctggcccaactcggccggcccagccgccccccttccctctctcccctcccccccgctcggcccaccgcgtcgcggcccagctcgcagcgccgcgccagccttccccctcgtgggcccgcgcgcgtcgtgcggcccagctcgctcgcgcctgcgcggcccagcccccgcgccagccgccagcccagccgcgcgcgccagcccagctagcatcgtgccccagcccagcgccgcgcgaagcagcccagccgcgcgccccagcccaagccgcacgtccaggcgcgcgtagcgcgcacgcgaccgcgcccagcgcgtggagggcgcccaccgctgccgctgcccagcctgggcccgcgcgttagagaaccagcgcacactgtacatcttccccaagcgattcttgcgcagttttctcgcccacgacgtctccaaaatcgaacagcccacgattcttgcgcagtttctcgcccaccaccgcttctcctcgcctcggtctcgctcttcgcctcgccagcgccgccaccgtcgtcggactcgcgcgcgcagcgcctcacggtacttcgccgaggtgagctcgcccccattctctctctcttcccccgccgtgtaaattcaccatgtctctgcagtccctcgtcggcgcctagcgcagcgacaaccgcggcacctccggccagcgcgcagcccaactcccttgcgcgcggctggactccctgtcgtcgcggcccgcagcgcgcagcaagcccggtgccccggcgtgcagaccccgcgcgccctcgccctgctccttcgcgcagccgcgccgacgtagcagcagcatcccacttcgccggcgaatcatgccccactccgttacgaccgagtcactgcgcgctcgctgcgcgcccagccgctaaacgtgcctagtgcagcccctgcgcgcaaccctcgccgtgcctcgctactgctgcttagcgcgtcgcgtactcgtcaagtttcacgcgcgcggtttcgcacgtgatcacgggtattgtgcgcgccgccgttgttgtttgcatagtcctcgcgctgtttcgcgcgggtcgcgcgcgcaatctgcgcacattaattaatcacttcgctataatcgtttgtacgcgttagtcaattagttctcgtattaatcatcgattaattgataattcattttatctaaaatatcccacacaagtaatttatgttaactaagtcgaacctagaaaaaatatagtttttttcgcgtttaagcgtaatacaagttgtccgttcgtcacgtcattatttagccacagattgttaactatttgatgtgtcgtgcgtcgcgcgcactgttgtgtgcaatgtttcgcgcacacgcagcacgtcgtcagggtcccgacaacgttcgtctatccctatacgacgttcgtctacccctagacggcccccgtctacgtttgtctacccctcgtctaaacctcatgcgcgttcgtgtcgttcgccaccgcccgcgcgtcgcgcaataaatcgtcgcgtgctgttcgcgcgcgttgcgcgtgctgttcgcacgtgtcgtcgtgcgttctacgcacgttaataattcgcctcacctagaatagctcgcgctaattaaatagatatttaaaacaacggtttctcgagtagcaaattaaatcgggactaagtagtgattttacttagcatacgatttatatctgtcaatatgattaagccgaattaaatattttaattcatattcgcttagtgtaaacgtgatatccctcgaccgtagcgtcagtcgtctcggttccgttctcgcgtagtcgtagatgcgaattctatgtcgcgtgcatattcatttggtctatattgttgtatggtgtactgttttctaccatttcaagaatgttggatgtatgtttgcactcgcgtagatatcgggccgttcgtggagtctgagggaattgcaggagaagaccctgagcagcagcagcttggtgaaggcaagtgtcctctgtcccattatgtcctatttattttataatacactgtcccgcatactatgaacaacctaaggatttactagctttctatttaccttgtccttgatttaccttttgggttactatggttaactacatgctagcgctttactctaatcaacgaacatgatgagaattacttgatgatacgatgcttttattttggatacgatggtgatatacttgtggcattttaggggactcgagccgtttcccgagtacctctccgtaaggacctgttcgttgagagaccatccgggataacagtgcaaccatgagggtgaaatgggatgcccttagctaattaattagaggaactagaggtgtagttgcttcgccgtcgtgccgtcaatggggtccaggcacagtgcttgctctgccgaggctgagtgccgaggttctttcgttttgcttttgttagtcactctcctgcggggaggggtactttgtttatcaaactggagaaacctaacgggtggctatgacctctagggaatctttgtaaaagctacgtagtgataccctgtcggaccacctaggaagtgatcaatggggattagctctccccgggcagaaaggggatcgcgactcatgggtaaagtgtgcgacctcggcagagggtagtgaaactgatatatcagccgtgctcacggttaagagcagccttgggatcctctttgattagagatacagatggttcaagatacaatggttctactaatgtttttggttcgatgatgatcatgatgttttctcgatgagggaatggctcatgggatggttatgtgataaaacttgacttctacaaataataaatacctgaccaactaaaagcaactgctgagcctaaccccacataaaagctggtccacttcagccaaacggggcatttgctgagtacgttgatgtgtactcatccttgctttaccacaaaacaccagcttgtccacattgcaaccattgctcaggagaagatgaagtcgtggaaggagacttccaggagttccaagactacggcgagttttaggtgtgggttggcggcaacccccagtcagctgcctctgaaggccttatctttactgcgtttcgcttagcactttgatttatcagttaagttgatgactatgtggatgtctctgactctgtgatgtaataagttaatactcttttatgttattattcgagcactatgcgatgatgttcatttatgtaatcgctgtgtacgtgagttctgatcctggcacgtacatagttcgcattcggttggccttctgaaaccgggtgtgacagttatgactaaaatcggtgacaccgccctgaaacagagggcctcctgtgggtgcacacacatggttgcgctacttggcacgcgctagtatcacagttagtagtcataatctattataagactatattgatatgttatctctacacaaattataatcaccccatgagattcattatcgatgttagttttgtaatggtgtcgtggttaaggacttatagtactgcggcgaaactgagagcctcctgtaaatgtgcacacaggattttgctgcttggcgcatgtcggtatcaagccctctagtcatgatccattatggagttacactgatgtgttatcttccattgacctttcccttgaaacaatttctatgttgtttgtgaaagagatcaaacaacatttgtcatttccgttggatcaaaagggcataccacttccatgtgtggtcttatttcttttgatcttggtagtgactacccacacaagttccctttgcatcctttgtgtaaaggtgaagccttggagctttttagtgtaagaaaacaactgattagctctcaaaatagagatctgtttcccctgttgttgaaatgcaggagtttgttcattcgctctcttatttaatccatgtattccctaaccaagtggataattcatctcgcatgaggaaatggatgaacaacttgatcaaatagatttctacccaactacatgctcaactgttaagaagagtgaactcttaacccttggcttaccaatggtattgagaggatttgcttaatgtcaaaagtagttcaacaagttggttttgactaacttgtaactgcacaaggaacgaaggctgagtttagagatcgttttatcgagttgtctaaactcactttggttcaacccaccataaagaaagtacttaccaaaaatcaaattaagtcgaccagtaaccacctaattatcgctctagtcgcgcctcgactgcctcacgcgtgcttttcctgcatgtgtgatcatgccgattcacgactagtgctggataaaatggactggttgcaaagtccgcatttatagatccctccgctggtgattttcctgaatctatatcacctttcgtggacttggattccctggctaacacgagttgaccgtgatgttattcgacattcacacccgtctcgtgtgctatgaacttgctgtaaccacttgttggtagacctctttctgtgtgttttaccaagatggtacatctgattctgtttgggtaaagttgcataattgccacccgcccaacagactcagatagtacagtgtcatcagaagaagcaaattgcacatatggaaccttatgtgttcttctggctgacattgtctttattggtggacgaaaatgaagattgaaattgcacgttatgtggctagatgtgacacttgtaaacgtgtcaaggccatacacatgaagactgctggtccattacaatctttgccaatcccaacatggaaatgggaagacattagtatggacttctttgtgggattacccaggactacaaaagggtatgattctatctgggttataattgatcggctcacgaaaattgctcattttctaccagtcaagacagatcacccggttactgtctatacccaattgtacattgctcgtattcttagtctgcatggtgttccaaagaccatagtgtcggatcgtggacctcaattcgtatccaaactttgggaaaaacttcataaatccctgggtactaaattgctccacagttcgacctatcgtcctcaaaccagtaggcagactgagagagtaaatcagatactagaagatatgttgcgggcatatgttctagaatttccacaaaaatgggatgaatgtttgtcgttagtggagttctcatataataatagctatcaagaaaacatcaagatggcaccctttgaagctttatatggacgacgatgtcgtactccgctaaattggtctgaacccggtaaaaggtacttcttcaggcctgaaagagactgaagaaaaagttcgaagaatgattcataatttgaagaaagctcaagctcgttaaaagagttatgcagaccggcgacgacaacccttatgctttctcgtaggagattatgtctacttgaaagtttcaccaatgaagggtgtatcgcgtttcgggattaaaggaaagcttgcaccccggtatattggtccattccctatacttgagcaatgtggaccagtagcataccgactccaactacccgaaacattatctgttgtacataatgtgttccacgtgtcacaattgaagaagtgtcttcgggttcctgatcgaaccgttgaagtgacagatgttgtccttgaaccggacttgacatattctgagcaccctattcgagtcttggaccaaaaggacagggttacccggagaaaaactctcaagttctacaagatacagtggaaccggcattccgaagatgaggctacatgggaaactcaagactttttagataagaatttcccaggctttttagcctcttataatttgtaaagcatgtgtagacgtagtaataaaggagtaaattcccacaccaccccctgccttgtaccagaaataaggaaataaaaatgtgacacaattccttttccattacttaccctaggccttttaatctcgggacgagattcttttatggggggaaggatgtaacacccctggtgttactataactaaaacttgagcatggcatcataagcattggcattgcatatgtttgatacacttagaatgcattcactaggtaaaaatttcaaacaagttgtgtgttatagcattttgcaaataggaccctggatagggaacttaaccctaaatagggattaaaggggtaaaacctaacccaagttgagaaaacctaaaagctttaggagaaatagtataaaatgttcccaaaaatgaatttgaatcacatttatacccctgggatactagaaaccctaattggaaccctggaaaaccctaaatccaaaccctaggggcttatgtgcaaaattagtccacttttggactaaagtgcaaaaaccaagttaaataagtatcttaagtcatttgggtcactcatatgtggatttacaagccaaaccctaagttttggcctcatttgcaaaaaggaccctagtagaggttttatactaagtctgaaaacagtgttatgggctcaacttttgagccttgtaacttttaaatcatagggtttttgccctaggtcaccacatcaacattgtagcccaatcataggaggacagctttgcttaaggatgtgagcttagttgttaagagtaaattggagataattcagctcaaaatctggctgtcaggctagttccactctgaaagttagatgttcagtgtaacagagccatctttgggtgtgaattcaaccatgatctagtgatcaaatgagctcagtcactatagtcgaaatataggtggtatatagctctccaactttgctgcagagtttgggttgtgttaccataggaatctgggagaaaatcaagctccaacttggtctgtcagacaagctttttactgaatctggcgcactgttcatcgtcttcagaaatatcgcgccgtggataagggtcagcccctcgccggcgataagaacaccaacgcagcgtggatggtcgtcggtggccgcggtaaatatcctcggcatcgtggcagaaggtcactgaggtggcaggctccggttaaacggcgacccccgtgccatcaccggaatccgccgcgcggaaagcttgccagcacatctgaaatccgcacttcttctccaactccggtcgacggcctataaattgagctcggactccgcttcttctccacattacgcacctcagtgcttaagcaattgactcaattccgctagagaacttgcgcagccccaaattccctcctcctccattcttgctccgccgcaagggactccaccgtggtcagcgcgcttcgggttagtgtttatcaaattgcttcttgttctagttttcctttgatctcctattgctctccatgccaatcaattgaaattccgccgaagcccatcaccggaatgcacccttgctctgtaaaacgccgccgtgacccaccctcactgacgacctgctcttcggctcgtattctgcccaaaccaaagtgtgtgcataacttctggtgaacccgtgaacccttcctcagcctcaattcggtcgtcctcgccgtcgtttgatcggaacgcgttcgtccctgtaaccatccgctcggtcgccgtggactgctcgattcaatgcccccttgatgaaattgatttaggggaagtgtttgatagaagtttaattatgtccctgtcgcacgggagctccagccatggcgtcggccggccggaattggctcgccggggtgcggcgagggctgttcctcgtcgtggaccttagtctgcaaagggatggaaggtggatgtcctctttgtaaaccgtcagtgactcatctcaatagtgcgttgaccttgcttcaggatattcaaaaggacagggatctcaatgcaaagttggcgcgggcgcaggcgcaggcgcgcttctgctcattattgggccgcctgtatcgaatttggcccaacactattcactagtgtttccttttcttttattccagagctaaagcaattatagaaaatggtagaaaaatcctaaaattgtgaaaccaattttcctagacttcttattttccttagaatttaataaaaaatagttttatgatttttagaggaaataaggaatttttaaggcattttaaatagtttaaagtcttagttctggatttttagaaaatagataataatcccaaaattgctcaaactttttacataagctctatacattatttagaagccttgggtagaatttgggttgatttggaccttgtttgatacttagaacctaaaacccccctgccctttgaactcctttactgactccggaaaccctaagttgtcggagttccgtgaaggaaagttatattcaagatttagataataaatctttattacctttgcactctcatgagcattacatggcattcatccttatatatatatacctatatggttatatttagaaaacgaagaagagattgaagtgaccgaagagaagacaccaccacctttggaatctcaggcagggacttggctctacttcgacatctgcgagtccgagcctgactcacctactaacgaaggcaagccccgatgcatttgccaccttccttgatgtttttaaaatctttctcacttgattgctgcattaggtgataggagttgaatgattaaacaattcctgcattaccttccttgaacttgattaccttccttgaaaccctgtttttacaaaacggtttttatatgcttagtattgctctagaaaaacaaaaggatttgttttacaaaagatgtttggcaaagtgggagggttgttttcaaaaataaaaattgatggtggatccatcatggccgtgatgggttcaacatcggaaaagatgtacctctgccaggtaccaagtttttgggttgaaaagattaagctgagaccgggcgggtgacttgcacgagaagagagtctcggtgtagtgtctccgtctgagtcgattaaggaccttgtcgatgtaggcttgatgatcgaggaccctttaactggtcacatgcctcgtcatgggtaagccttgcctcgggcagactaaggccagaataagataacacgaaatgggcgtggagcggtggcgagagtagcgtgtaccctccgtggcaagaggctggacggtggtgtatctgtgctctcggtttgcgtgaacctgatctggtcttaagaaacccggtggcgggttgacatatgcaagggttaagtgctacatatgtcgtgtgattagagatcctcagctgagtataatcgattcggatcgccgtaccttcgcggttatgaagacttggtcactaccctacacgtagcaatccagtgaagatgaaggaagaattaagaacttggctagttcaggataagtgtttgaactaggttagagagaactctagagataggtaagattacttaacttgacaaataaaactggatttctaaggatccactttagtaagcatttctgcaaaacagagtctttgattattgagaagccttaccttgactcccttaaaccagcatacccttgagagtcttttctttagtcgggtaagacttgctgagtaattccatactcagggtttatcccttcgttgtttttaggaaaggaagcaacaaatttttgttgcttttgttccaaggtggttccccatgaggaaaagcaagagtgaagatgcgggaggacatggtcctccatatagaacttttgtttaaaaacttatcgggaggagtttttgcctccctcggttatgtaataatactactctgcactcgtttatatttctggtttgtaataaacaacttgagcttactttctaaataaatgtaagttatgtaatcgctttcgcatttcttcatctccgatgttctgtaatgtctgtaagacgagtgaaacgttcgtggaaagggaagaaagaagataccgaacttgtcaagtagttcaggggcacctacagggttgtctgaggtccgttggacaaggacaactgtaggtgggcctaattacttgggaggttccgtcacatccgccccggcctcggatgacggcgcaagcgggaggatctctgcctcgaaggtggttgacagcaccgcgcttgggcccacggcggccgcgtcgagcctctggacttcggccagggcggcttcatctttgtcggggaggcaatacccctcgctgacccgctccagatccacgtcatagtgggaagcgagcacggcgaaggcccgcctaacgccgtgatgcagcgcctcgcggagtctgccacgcgcatggtcacccaaggcctgcaggcaactttgaggggagcttcctgaggggacgtcgtcgaagccaaagacccggcagaaggccgagatggcctcggacatggccgcgtggtcggcctccctctgctcggccgcctgagcaagcgccttggtggacttatcaagggcagactcgagctctgcgaacagccaaagcggaagacctcaaacacgagttgaggaaccaagctaaaacaaaatcttaaaacagccaagacataccttcggctcgggcacgctgctccgaggatgcggcttgggccacggctaggtctgctgcaagggctccagcccgagcagacacctcggctaactggactccaagagcctcagcccggctttcggcctcgtcggcctggccccgagattggtaccgctcgtcggtgacctggtcaagctccgactgccgccgctgcgcctctgcgcgtgccgctgccgcctctgctcccagatcaacacagagcaactgaaggtccgccacctcggcgctctgttgggaaaggcgcgcggtagccctggcaagcgaggtcctcagggaccgcagcgaaccccagacatcgacctcgcggtggatgaacgacgacttggcggcgctcagatccgtcagatcctgagggaaggaagcggggcgtcacaaagaatgccttaatcacgagaaaggtatgcctgaaatcattacctggaggatcttgggaacgtccctgcaaaggacctccaaggtcgaccggagcgaccccaccgttgcctcggcacactcacgaagctcgtcccaagactgctcctcccgctcatcgtcaagaacgaagaggggatccgaggccccacgggtccggaaccgaagcaactggcgccgcccctcggaactgcgccgcgcggggataaggctgccgctcgacgggacgggtcgcggttccgcgccccctcctccgaggcaccaagtagcgacgcctcagccatctcagcatcggcggcgacgggtggctccacggccagaacggcaacggcctcggcagcagccggcgccagcgccggcagcatgtctggtgagcccgaggccacggccacgccagcagcctcccccagcgcgacggccgcctcgacagaggagtcagcctcgggagctcgccccacggcaactggtgccgcctgagccccccgctgtggggcgtcttgcaaggaggtcagctggccggcgaggcccggcgcggcattagctgcggaagccgacgctgtcttgaggaccttccggggagccagaccagtcgaaccgtgcctccgcttgctagggagaaaaggaaaatcagggccgggacatacgaagaaggagccaggacgaagatatcctaagatacttacccactctgggcaatgatcaatcatgcctgtggggaggtctctcgaacctcgatccaagaaggtaccaccgaggtctgccccgctgccggctttggtgccatcctcgccttgggcgccctaggcacccgaggggcggactgcccagacgcagccacgacgacctgaggaccgccctcctgcgcagtcggcacgggcaacggttctcggggaacaggcagctcggcctgactccccggggtcacctcaaccacctcgtccgaggggtcaagtacccccttggtctgcccccgctcttcggaccgggaccccgacgtcccggccccagataccgacggcaccagcccgctcgggggctggcttgatgatccctggcccaacttgagatccgggctgaggccgaggcgggcagccatgtcgtcgtcttcatcatcgtcttcatcgtcgtcgtcgtcgtcaggcatctccggcgatggctccctcgggagtccatccctctcctgccgacgacggagcctttccaaggcgtctcgtgcacgcgtccgctcgcgggccctagccttcttcgtgtccttcttctccttcctcttctccgcggcgaccctccgcgcagctcggtccaccgcgtcctccgggaccggtggcgggaaaggcttgtgagcccctacctcctggagacggacgaagagtctcgactatgaggaccaaaggcaatccgacacaagaagaagaaggagtgggcactcaccagggacacacacccgtgatcaggacgcatcaagagctgggagagggcgccggcgtccggcttccccaacgtgctggctacccgcctgtggaggtcgtagacgggaaggggatctgaggacatccgcaaatcctccaagtcgacccccggcgtcatctcccaaagcggcagccgccgctccgtcaaagggagcaccctccggcgatgaatggcggcaaccacccccgcgatggtgagccctcctttctgcagctcctccagggccttcagaaggggctggagattcttctgtctgtcgcgcggggtcctgtagcgccagttatcggcggcggcggtcaccactcgctgagaaaacgacgggagcctcccgtcgtcatttcggagatagaaccaccggcgctgccaccctttgttcgaagacgcgaggacggcggggatgtactgcagcgcccgtgcctgcctcagctggaggatgcagccaccggcccgcaccgccatgcggacccttctttccctcgtcgacgaggcaaaaagctccgcggagaagagatgggtccacaggtcctagtgagggtcaatccccaagtatccttcacaaatcgccgcaaagatggcggcttgcaagatggagttgggactgaggttgtgcagctccaccccgtagacgtgcagaattgcccgcataaaacggcttgccggcactccgaacccccgctcgtgaaaggagatgaagctcacgacataccccggcggcggggacggggcggctcctctcgaaggggccatccactccggctgcgagtcaccggagagagggcgaagcaaaccatcagcaacaagggcctccaggtcatccgccgtaactgtggagaaaggccacggatcgtgcggaggaacaatggtcacccggtcggccatcaccaagcagaagaggtggcggcgggaggaactgggtgcacggtttcctttttgtggctattccctcgggttgcgaaaacctaagtgggaggcgagcagctgagtaaagaagcgtcactagcccctctcccgaatatataaaggcccaagcgagacgcattcaacacttcgcccgaacccgccgcaagattcaaaactcaaagcgagacgcctgttcctcgaacggctcgcgcatgcgcaacggccgccccgtgaaccactcgtcccgtcgcattaactctgcggcaggacgggcggcacctttggcgggtgaagcaggcgacgcttcacctccgccataatgaccgcgtcaaaaaaggtacgccacgtcattcgatttcgtatccctttccacttcctctttctctctcttgccacagggaccgagaaaggggataccccgaaagggatccttctccgcgaaggaagcgggccccgagccccctactgatcagaggttcgaaggctggcccctcggaagggttcaacagccgcctcaaagcactcgggctccgcgcccactactcgtcagaggttcgaaggccggcccatcgaaagggttcaacggccgcctcaggccactcgggctccgtgcccactactgatcaggggttcgtaggctggcccccgaagggttcgacagccgcctcagacgcagagcgagggatgaccctgggtacgttcgatacataaccaaggctcgggctacgctcccgaggtaccctaggacatttccgagaccaacgggaacgatcttgtaacggaatcccaccagagggaggcattgagccctcggaccccgtcaaaaggggaccgggtctggcaaatcacccgcaggtacttttggagcgcgcctccgggccactagccgacccctaacgaatggggcacgggcgtccactcggattacccgttagcagctcactggagacaccatgttcggcgccctccaagggcaacatggcgcttttcccccctcctccttgcggaaaggcgacgcaggggcgtatgtaaaaaagtcgagtctgtccttgaccgtcctctcgctctgtgcggaggctcgggggctgctctcgcaaacccggctccggccaaaccgttgacagcgtcaacatacctgtcggcgtttcgaaacccggggggtccctggaccgacaagtaaattatcgccacgtgccccagcccagatgggtcggcgcgagacggagcgcgaaggggggtggaagccagagggagatgggcgtgagaggtggaatcccgcggccttcgtgtttgtcccgcgcccaggtcgggtgcgcttgcagtagggggttacaagcgtccacgcgggagggagcgagtggcctcacgcgagcgctgtcccgtccttccccgcgcggccaaccctctgtaagagggccctggtccttccttgtataggcgcaaggagaggatccaggtgtacaatggggggtgtagcagtgtgctaacgtgtctagcggaggagagctagcgccctaagtacatgccatcgtggcagccggagaggttttggcacccggttcgtgtggtgtcatggccgttagaggagcgctggagcctggcggaaggacagcggtcggggctgtcgagtccttgttgacgtcctcttgcttccgtaagggggctgagagccgtcgtcgtcatagagcgagcggggcgccatcattacttgtctggcggagcgagccagatgggacgttggtcttgttcctcgtagcctgagtcagcttggggcaggtaatgatggcgcctcctgttgacgtggttggtccgagcccttggttgggcgaggtggaggctcctccgaggtcgaggtcgagtctatcttctgaggccgaggtcgagtccgagcccctaggtcaggcgaggcggagaccgtcggctgaggccagggctgagtccgagccctggggtcgggcgaagcggagttcgtcgtcttctggggctgagcccgagtccgagccctggggtcgggcgaagcggagttcgtcgtcttccggggctgagcccgagtccgagccctggggtcgggcgaagcggagttcgtcgtcttccggggctgagcccgagtccgagccctggggtcgggcgaagcggagttcgtcgtcttccggggttaagcctgagtccgagccctggggtcgggcgaagcggagttcgtcgtcttctggggctgaacccgagtccgagccctggggtcgggcgaagcggagttcgtcgtcttccggggctgagctcgagtccgagccctggggtcgggcgaagcggagtttcctatggcgcctgaggccggacttggctgctgtcagcctcactctgtcgagtggcacagcagtcggagcggcgcaggcggcgctgtcctcttgtcagaccggtcagtggagcggcgaagtgactacggtcacttcggctctgtcgactggagggcgtgcgtcaggataaaggtgtcaggccacctttgcattaaatgcccctgcgatttggtcagttggcgtggcgatttggccaaggttgcttcttggtgaagactgggcctcgggcgagccgaaggtgtgttcgttgctggagggggtcctcgggcgagacgtagatccttcggggtcggctgcccttgcccgatgctgggctcgggcgaggcgtgatcgcgtcccttgaatgaaccgatccttgacttaatcgcacccatcaggcctttgcagctttgtgctgatgggggttaccagctgagatttaggagccttgagggtacccctaattatggtccccgacagtagcccccgagcctcgaagggagtgttaatactcgcttggaggcttttgtcgcacttttttgcaaggggaccagcctttctcggttgcattttgttccggtgggtgcgcgcgagcgcacccgccgggtgtagcccccgaggcctcggaggagtggtttgactccttcgaggtcttaatgcatttcgcaacacttcggctggtctggttgttccctcatgcgagctggccgtagcccgggtgcacggttgggtcccaagttctcgggctggtatgttgacgctgtcaacggttgggccggagccgggtttgcgagagcagccctcgagcctctgcacagggcgagaggacggtcagggacagactcgacttttttacatacgcccctgcgtcgcctttccgcaaggaggaggggggaaagcgccatgttgcccttggagggcgtcgaacatggtgtttccagcgagctgctgacgggtaatccgagtggacgcccgtgccccatttgttaggggtcggctagaggcccggaggcgcgctccaaaagtacctgcgggtgatctgccggacccggtcccctttcgacggggtctgagggctcgatgcttccctctgatgggattccgttacaagatcgttcccgctggtctcggaaatgtcctagggtacctcgggagcgtagcccgagccttggttatgtatcgaacgtacccagggtcatcccttgctctgtgtctgaggtggctgtgaacccttcgagggccagcctacgaacccctgatcagtagtgggcgcggagcccgagtggcctgaggcggctgttgaacccttctgaggggccggcctttgaacctttgaccagtagtgggcgcggaacctatctaggcgctctgaggcggctgttgaacccctccgaggggccagcctttgaacctctgatcagtagggaggctcggggcctgtttccttcacggagaaggatccttttcggggtatccccctttcccggtccctattgtaagagagagaaagaggaaaaggaaaaggatacgaaatcgaatgacgtggcgtaccttttttgatgcggtcattatggcgaaggcgaagcgtcgctcgcttctcctgccagaggcgccgcctatctcgccgcggagttaatgcgacggggcgagtggttcgcggggcagccgttgcgcgtgcgcgggccgttcgaggaacggaacacgggtgcatcgtcttcacgccgtgagagagggttctctcgctgtcccatgaggtgacgtgagcttggctgacgacgtgaccgctgcttctgcccgcctgccaccgccatcactgccggcccatttttggccgcatcgatcgtcgcgccttctcccacggctgaccggcccgtgatcgatgcgcctggctggcactgttggggcatacgcagggttgcctcgagacgtggtactggttccgcagtcgaggaggcacggtagtggtgcgagtggcggtgtagttgctcgcacgtagcaaccggcgcgccggttgcatgacgtatgggcctgggcctccatgctgggtgcgttggaagtcggaggggcgcgcccacttggcgcggttgcctgccgcctgcatggttgttcgccctttcacccactggtctgggcgaaagtggaggaatgcttgtaaccgctgggcggttgcatgcaccgcgcgcggtgttttggcttcttctgccctgggccagtttgcatgaagcgtgggacccagcccccgcgtcgtagggggaggaccttggagcgtgttggagaagactcagcccacgacggctggggacgcaagtagggagagtcgcctttaaaaggagggtgatccccttgaaaggcgaccatgtcttcgcgctcccttatgcatcgcgtctttccacctttcgagcccccggatggggaacaccagcaatccttccgccttgtcgttggaggaatgcaactttgtggaagttggtacctttcagccaccgttcggcttcaaggattttcatcatgcagcccggccgcatcccctcgccggcggtcacccaagacggtgacctccagttcgatggcggggaaaagcgagccgggctgcggcctctgcccctccctcagcttcaaggattttcatcatcagtgctggggaggggagtgcgccgagttggggtcggtccctgcgcgggcggcggcccgctccttccctaagtgatcggggggaagggcgttcgccgttcgtggcgctggcagctgtcgcgtgcccggctttctggcccgagtggcttcggagccgctcccggcgccgccttccgccacggcagccggaagaggtttctccgccgacgagatagccggtgccgcccacggactgactcccaactctacggccttctgcccatccttgcttctcgagtgagggcatgggcgagggcctcatggcagcagcatccgccctgaggtcatcgctgctgctgttcggccccccggagcagaagtcgtcgtcgtcgctgatgctggagcgggcgacggcgagccgttcgtcggtcttttgttgctccgcaggccccccaattgtgtggggttgttcgtaccggggttccatttgtaatggcaccttgaatgccggtcttttgttcattgtggctgtcgaggcctgaacatgtatgtattttcggcgcggagccgtgttttttcctcattttcgagcactaagactcgcccgttggttatctagaccgcttcaccaagcgtgagtcgcttcgtgtgaaggtgacgagtgaggtatccgtatcccggaggcgtaggagtccctcggctcggtcggccttgctgtccgaggcttctcttgcttagttaaaggaacccctcggccgctcttcgatgagccgaagccgggggtagcggggtcagctcgaacagaggcagagttggcttcgaaaagaagacttggtcggccggagcctggccgggtcgtccgctggcgggaccgacgtcggagttgagttgccgaggccacgggtcgggctcatgtcttcgggggacagccgaccgaggcctcggggtggccggccgagccgtctgctcgagccggattcctggagaagaccctggcggcgatggcccaggtgtggtgctgatgtcgtccttcagagtggagatcctccgaccgcgtcgccgtccgaggctaggtcggacctcgccgaaggtctagttgacgccgagggtgctgctgctcccttcaactgtcaagatccgagcctgcaggatcggattatcttgtagtgtgtgtatgttttctgcgaccgccgaggcccaaacataccatcgtcgtgttgtaaagctgtgtttcttttcctcttgtttcgagtatccagacttatttgtcggtaacagaattgtttgtgcgggcgagagttgcttttcacggaaggtgatgagtgaggtatccgtatcccggaggtgtaggaatccctcggctcggtcggccttgccgcttatgcgcgctcttacttgtccatagggttctgtcaccgacgcagtcgagaaggcccaaaaaatcatttcggcagaggagctttcgagcatgaagacttgttcggtccgcggaatcacttaccgagcacgagttacttatcgcagaaggtgatgagtgaggtatccgtatcccggaggcgtaggagtccctcggctcggtcagccttggctgcttacgtgtactccgtcgttttcaggatccactttcgaagtagtcgaaaaacacgaaagacattctggcagaaaagatctttttccgaggaaaattttggcgcagagggggttccccccttttagcccccgagggagggtcgggctttgccgaggcaaggctgacccttccttgacgactaaactttgcgtgggaacgaggcatacgaacgacttgaaagcatctttaagggtagaagcgacgtagctgttggatgttccaagcgttgttgtagaccttgccttgactattggctagcttgtacgtcccgggcttcagaaccttggcagcgacgaacggcccttcccagggaggcgtgagcttgtgccgccctcgggcgtcttgtcgcagccgaagcaccaggtcgcccacctggaggtctcaggaccgaacccctcgggcgtggtagcgtcgcagggactgctggtaccgcgccgagtgtagtaaggccatgtcccgagcctcttccagctggtccagtgagtcttctcggttggtctgattgctttggtcagcgtaggccctcgccctcggggaaccgtattctaagtctgtgggaaagatggcctcggccccatagactagaaagaacggcgtgaagcccgtggctcggctcggcgtcgtcctcagactccagaccaccgaggggagttccttcatccaccgcttgccgaacttgttgaggtcgttgtagatccgaggcttgagtccttgtagaatcatgccgttggcacgctctacttgcccattcgtcatggggtgagccacggcggcccagtctacccggatgtggtgatcctcgcagaagtccaggaactttctgccggtgaactgggtgccgttgtcggtgatgatggagttcaggaccccaaagcgatggatgatgttggtgaagaacgccaccgcctgttcggacctgatgctgtttaggggtcggacctcgatccacttggagaatttgtcgatggcgaccaacaggtgcgtgtagcccccgggtgccttctgcaaggggccgactaggtccagaccccacacagcaaacggccaggtgatgggtatggtctgcagggcctgagcaggcaggtgggtctgccttgcgtagaactgacacccttcgcaggtgcggacaattctagtggtgtcggccaccgccgtcggccagtagaaaccttgtcggaaggcgtttccaacaagggtttgaggtgctgcgtgatggccgcaagcccccgagtgtatctcttgtaggagctcctgaccttcggcatggaaatgcatcgctggaggatgcccgaggggctgcggtggtagagctccttcccatctcccagcaagacgaacgacttggcacgccgcgccaaccgccgagcttcggcttggtcgaggggtagctctcctcggtggagatattgcaggtacggggtctgccagtttcgattaggcgtgaccccgctccgctcctcctcgatgcgcagtgcctcaccctcgggggccgagggtacctcgggccgagccgagggtgcctcaggttgagccgagggtgcctcgggccgagccgagggtgcctcggactgtgccaagggtacctcggactgagccgagggtgcctcgggctaggccgaggccttctcgggctcgagcgtgtcgtcggtcttgacggagggttgatgtaggtcacgggagaagacgttcgtgggaaccgttgttcgccccgaggctatcttagccagctcgtccgcagtctcgttgtagcgtcgggcgatgtggttgagctcgagctcatagaacttgtcttccaggcaccgaacctcatcgcagtatgcttccatcttcgggtcgtggcagtgggagttcttcatgacttggttgatgacgagctgtgagtcaccacgagcgtcgaggcgtcggacccctagctcgatggcgatgcgcaaaccgttgaccagagcctcatactcagccacattgttggacaccgggaagtggaggcgtagcatatagcgtaggtgcttcccgaggggcgagatgaagagcaggcatgcgcctgcacctgtcttcatcagcgacccgtcgaagaacatggtctagagttccggttggatcggagctgtggggagctgggtgtcgacccattcagccacgaagtccgccaagacctgggacttgatggccttccgaggggcgaacgagatcgcctcgcccatgatttccaccgcccactttgcaattctacccgaggcctctcggcactggatgatctcccccaggggggaggatgacaccacagttaccggatgagactcgaagtagtgtcgcaacttccgccgcgtcaggatcaccgcgtatagcagcttctgaatttgtgggtagcggatcttggtctcggacagtacctcgctgatgaagtagactggcctctggacgggcaatgcatacccctcttctcgtctctcaaccacaatcgcggcgctaaccacctgagtggtcgcggcgacgtagatcaagagggcttctccggcagcgggggccaccaagatgggcgcgtttgtaaggagcgccttcaggttcccgagggcttcctcggcctcaggggtccaagtgaagcactcgaccttccttaagaggcggtacagaggcaggcctctttcgccgaggcgcgagatgaagcggctcagagccgcaaggcatcccatgactctctgtacgcctttcaagtccttgatgggccccatgctggtgatggctgcgatcttctctgggttggcctcgatgccccgctcggagacgatgaaccccaagagcatgcctcggggaaccccgaagacacacttctcgggattgagcttcacgcctttcgccttgagacatcggaatgtcacttcaaggtcggaaaggaggtcggaggctttcctcgtcttgactacgatgtcatcgacgtaggcctcgaccgttcggccaatgtgttcgccgaacacatggttcatgcaccgttggtacgttgcacccgcattcctcaaaccgaacggcatggtaacatagcagtacatgccgaagggtgtgatgaaagaggtcgcgagttggtcggactctttcatcctgatctggtgatacccggagtaggcatcgaggaaagacagggtttcgcacccagtagtggaatccacgatttgatcgatgcgaggcagagggtagggaattttcggacatgctttgtttagaccagtgtagtctacacacatccgccatttccctcctttctttctcacaagcacagggttggtaagccattcgggatggaatacctctttgatgaacccggccgccattagcttgtggatctcctcgcctatggccctgcgcttttcttcgtcaaatcggcgcagaggctgcttcatgggtcgggctccagctcggatatccagcgagtgctcggcgacattctggtacccgggcatgtccgaaagatccacgcgaaaacgttggcgtttgcgcggagaaagtcgacgagcactgcttcctatttgggatcgagctcggagccgatccagatctgcttggaggcgtcgctgctaggggtgagggggacggattttaaccgtctccgctggctcgaaatttgccagcgaggcgctttcacgtctgggcacctccttagagagactctctaggtcggtgatgaagggcctcggattcggcgagggcctcggcgtactccacgcactccacgtcgcattcgtacggtggggtcggtacgtggggccgacggtgatgaccccgttggggcccggcatcttgagcttgaggtaggtgtagttggggacggccatgaacttggcgtagcatggtctccccagcactgcgtggtaggttcctcagaacccgaccacctcgaacgtgagggtctcccttcggaagttggagggcgtcccaaagcagacgggtagttcgacttgtccgaggggctggacgcgtttcccggggattatcccgtggaaaggcgcagcgcctgcccggactgaggacaaatcgacccgcaggagcccgagggtctcggcgtagatgatgttgaggctgttgcccccgtccatgaggaccttggtgagcctgacgtcgccgatgacggggttgacaacgagcgggtatttccccgggctcggcacgcggtcggggtggtcgtctcggtcgaaggtgattggcttatcggaccagtctaggtcgactggcgctgccacctttaccgaacagacctcccgacgctcttgcttgcggtgccgagccgaggcattcgccacttgcccaccgtagatcatgaagcagtcgcgaacctcggggaactctcctgcctagtgatcttccttcttatcgtcgccgcgagccctgccaccctccgcgggtggcccggccttgtgaaagtggcgccgaagtatggcgcactcctcaagggtgtgcttgacgggctgctgatgataggggcacgactccttgagcatcttgtcgaagaggttgtgtcacacccggttttagaaggcaaaccgaatgcgaaccatgtacgtgccaggatcagttattcacgtacacagcagttacataacatggacatcatcacacagtgctcaaaatagtattaagaaggaaaataatagtcgattacatcatacatctgagacgtccatatagtccttacaataaatcaaagtgcggaaaagaaacatagataatcgcggccttcacaggcagccgactgggggttgccgctaacccacgcctagaactcgtcgtagtcttggaactcctggaagtctccttccacagcttcatcttcgcctgagcagtggttgcaatgctgacaacctggggatggggggggtttggtgtgtagagcaagggtgagtacacatcaacatactcagcaagtatcctgtttggctgtagtggactagctttatgtggggataagtcaagcagttgcttttagttggtcagattattatttactaatagaaagccaggttttagctttaacccaagttattaacccgatgtaccctttccaaacggaaagaataccacttaccagcaccatagtcataaccaaaaccatcaatctcatagccacctgtaccaaagtatctctgatcaagtaccactaatcactggagctcccttggccgctcataaccgcgagcacggctgatatattagttttcaaacactctgcagaggttgtgcactttacccacaagccgtgattcccattctgcccggagagagctactccccattgaccactacctaggtggcctagcagggcatcactacgtagcctttacaaagattccccggggctgtagccacccgttaggtttcctaaatgcaccgcactcctccccaaggggcgaacccaaacttggcagagcgagccgcatacacctagccccattgacggcacgacggctaagtgaactacaccccggatcctccaattattcagctaagggcatcccattccaccctcatggttgcactgttttcccgggcggtcatccatagaacaggtccttacggagaggcactcgagaaaccgctcgagcccccttaaagccacaagtacaacatcataataagagaagggaaaacagcgtatcatagataatctcatcatgttcattgattagagttgagcaatagcataaagctaaacaataataatccaacccaaataggtaaacaaggacatggataacaaaagctagtcaatccttaggcataaatgtgtaaagcgggaggtgaattaaataatgaataggacagagataggtcaagggacacttgcctccaccaaccgactgctgctcaggggcttctcctgcgagttcctcgggttctccgaccggatcgttctctatgcgagcgcaaacatacatacatccacatatttaatacaaaagaacagtacaccatacaatagaatgcaataagtaaacagacgttccacgcgggctcgcgagtacggttaagagagaaagaggaaaagacagtcgagaaacgatcacgttacatgattataaattaaccactcgcctaatggaaggaaatttaatgtagacactatgtttagcgtaaagtaaagtcatgtttcatgtctaatcattataagcaggtggagataaataaaaggatggtcgcgcggcgagacgcgcgacaaagctctctaaaacaaattaagaagttacgactcgtcgcgcgatcgagcacgcagcgagacacttcgcctgacttgtgaggtcacgctcaggcacgcgcagcgagacgccccgacgcgcatgcgtcgaagaggactgagaccgaaatagagcataatgtgagtggacgcgagctcacgcccactgtcacaacttcaaacataaatgtatcctcacgctacgacgcccccgacacagcgcaggataggatctgaaattaagcatgttgcgcgcgagagcgaagcgagagagacagaggggagggtcagcatgggtcgttgcgaggctaggcgagcgcggaccggggcgggccgggccgggctgggctgggctaggttgggccgggccacttcgcggatcgaaaacccacgacgtgcacgaccactaaacggaattaaatcgcgaaccgaaatccggaacggaacgagacgaacactcaacatcagacaaagaaatgtgcttcggcatgatgcaacacccatgacacttaggttttggtttatacatgacacgaatacctgccgctatactggtttgaaattgggaagaaggagcaaacgggggaaagagaaaagagagtaacgcccgaatttggtgagagaaaagaagaaaaaattctacccccaaattcagggcgttacaggttggcacctccaggaggtttccgagggttcttgtactcggcggcggtgacaaggtccatgtcggcggcgtcgtgtttcgcttgcgacttcttcttgcctttcttcttggcgccgtcctgagttgacgcctcggggacatcttccgatgggcggctctggggctgcttgtccttccggaagatggcctcaaccgcctcctggccggaggcgaacttggtggcgatgtccatcagctcgctcgccctgatgggggtcttgcagcccagcttgctcaccaggtcgcggcaggtggtgccggcgaggaacgcgccgatgacatctgaatcggtgatgttgggcagctcggtgcgctgcttcgagaatcgtcggatgtagtcccggagagactctcccggctgctgtcggcagcttcagagatcccaggagtttccagggcgcacgtatgtgccctggaaattgccggcgaaggcttggaccaggtcgtcccagttggagatctgccccggaggcaggtgttccagccaggcacgagcggtgtcggataggaacagggggaggttgtggatgatgaggttgtcatcgtccgttccacccagttggcaggccaaccggtagtccgtgagccacagttccggtctcgtctcccccgagtactttgtgatagtagtcagggttcggaaccgggtcgggaacggcgcccgtcgtatggcgcggctgaaagcctgcggaccgggtggttcaagcgagggactccgatcctccccgctgtcgtagcgtcccccacgcctggggtggtagcctcggcgcaccctctcgtcgaggtgggcccgacggttgcggtgatggtgcttgttgccgaggcgacccagggccgcaggcgctgtgttgcgcgtgcgcccggtgtggaccgaggcttcgcgcatgaatcgggaagtcgcggcgcgatgttccgaggggtgcccctgccttcgggaggtggagctttcggctcgtcggaccgcggcgtcctccaggagattcttgagctctccctggatacgccgcccctcggtggttgatggctccggcatcgcgcggagaagcattgccgctgcagccaggttctgaccgactccactggaagtcggtggcggccttgccctgacatcgtcggcgatgcggtgcgagataccctggggtagatgacgcacttctccggccggaggttggcccgcccattcctgcccgatgtcccggcggattggctcaagtgttcctgccccctcgtcgagcctggcctgcatctcacggatttgctcgagctgtgggtcatgaccccccgccgggacggggaccacaggtagctcccgtaggatgtcaacgcgaggcacaggcctagggagatcactgttctccggcataccaagatggttgccttcgttgggaccccctagatcgacgtggaaacattcacgacttgggtcgtagtcctcgtcgccgaagctgcggctaccgtcagaacagtcgaaaaggcagtagtcgcacgcgttcataaagatccgcatggcactggggttaccaagtttggagaaatcccaacataagtcaggctcgtcatcttcctcggaccccgaaggcccgtaggtcgagacgtctgtcagccggtcccagggtgaccgcatacgataccccagagggtttggactcgcctctatgagagcgtccaccaaagcgaagtcgcttggtgggttgaggctggatccaaaaggcgtgagatgggaatcggtgggtacctcttggtcgacgggcggtgacgaaatcacgtcaggggctgactgcgccgtcgtctcaggtacgagggtgacgcccagcaagtccttcgcgagcgtgctggcatcatccatttgcttgggattggcgtgttgcagggagacggcgctcgtcttcgtctcagacgcgaggtcgatgcccgacgtgccccccgttggggcgccggcgccgtcgactcgctcgacagccgacgaggtgccgcctcctgcttggcctcggttgccccgcctcttcctccgtcggcgggggaggggacggggtgagctcgaatgtcgttcttccaccacgtggggaagacatcgtcgattccgccatcggcgggcgggttgtcggccgccattgtcgctgtcgcgcggcgggggaaggagtatcatgtcgtagctgtcgtcaagggacatgaactcaagactcccgaaacggagtagcgtcccgggtgggaaaggttgctgaagactgcccatctggagcttgacgggaagctgttcgtcaacacgcagcaggcccctacctggcgcaccaattgtcggcgtttcgaaaacccgggggggtccctggaccgacgagtaaattatcaccgcgtgccccagcccagatgggtcggcgcgagacggagcgcgaaggggggaggaagccggaggaagacgggcgtgagaggtggaatcccgcggccttcgtgtttgtcccgcgcccaggtcgggtgcgcttgtagtagggggttacaagcgtccacgcgggagggagcgagcggcctcacgcgagcgccatcccgtccttccccgcgcggccaaccctctgtaagagggccctggtccttccttttataggcgcaaggagaggatccaggtgtacaatgggggtgtagcagtgtgctaacgtgtctagcggaggagagctagcgccctaagtacatgccatcgtggcagccagagaggttttggcacccggttcgtgtggtgtcgtggccgtcggaggagcgctggagcctggcggaaggacaacggtcggggctgtcgagtccttgctgacgtcctcttgcttccgtaagggggctgagagccgccgtcgtcatagagcgtgcggggcaccatcattacttgtctggcggagcgagccagatgggacgccggtcttgttccccgtagcctgagtcagcttggggcagggtaatgatggcgcctcctgttgacgtggtcggtccgagcccttggttgggcgaggtggaggctcctccaaggtcgagatcgagtctgtcttccgaggccgaggtcgagtccgagcccctgggtcgggcgaggcggagaccgtcggctgaggccagggctgagtccgagccctggggtggggcgaagcagagttcgtcgtcttccggggctgagcccgagtccgagccctggggttgggcgaagcggagttcgtcgtcttccggggctgagcccgagtcggagccctagggtcgggcgaagcggagttcgtcgtcttccggggctgagcccgagtccgagccctggggtcgggcgaagcggagttcgtcgtcttccggggctgagcccgagtccgagccctggggtcgggcgaagcggagttcgtcatcttccggggctgagcccgagtccgagccctggggtcggacgaagcggagtttcctatggcgcctgaggccggacttagctgctgtcagcctcactctgtcgagtggcacagcagtcggagcggcgcaggcggcgctgtcctcttgtcagaccggtcagtggagcggcgaagtgactacggtcatttcagctctgtcgactggagggcgtgcgtcaggataaaggtgtcaggccacctttgcattaaatgcccctgcgatttggtcggttggcgtggcgatttggccaaggttgcttcttggtgaagactgggcctcgggcgagccgaaggtgtgtccgttgctggagggggtcctcgggcgagacgtagatcctccggggtcggctgcccttgcccgaggctaggctcgggcgaggcatgatcgcgtcccttgaatggaccgatccttgacttaatcgcacccatcaggcctttgcagctttgtgctgatgggggttaccagctgagatttaggagccttgagggtacccctaattatggtccccgacaataccagcccgagaacttgggactcgactgtgcacccgggctacggccagttcgcatgagggaacaaccagaccggccgaagcatcacgaaacgcattaagacctcgaaggagtcacaccactcctccgaggcctctggggctacacccggcgggtgcgctcgcgcgcacccaccggaacaaaacgcaaccgagaaaggccagtccccatacaaaaaagtgcgacaaaagcctccaagcaagtattaacactcccttcgaggctcgggggctactgtcggggaccataattaggggtacccccaacactcctaatctcagttggtaacccccatcagcacaaagctgcaaaggcctgatgggtgcgattaagtcaaggctcggtccactcaagggacacgacctcgcctcgcccgagcccagtctcgggcaagggcagccgaccccggaggattcacgtctcacccgaagaccccctcaagcgacagacacaccttcggctcgcccgaggcccagtcttcgccaagaagcaactttggccagatcgccacgccaaccgaccgtatcgcagaagcatttaattcaaaggtggcctgacaccttatcctgacgcgcgcccctcagtcgacagagccgaagtgaccgcagtcacttcgccgctccactaaccggcctgacaagaggacagcgccgcctgcgtcgctccgactgctgtgccgctcgacagagtgaggcggacaacagccaagtccggcctcgggcgccataggaagctccgcctcgcccgaccccagggctcggacccggcctcggccccggaagacgacgaactccgcctcgcccgaccccagggctcggactcggcctcggccccggaagacgacgaactccgcctcgcctgaccccagggctcggactcggcctcggccccggaagacgacgaactccgcctcgcccgaccccagggctcggactcggcctcagctccggaagacgatgaactctgcctcgcccgaccccagggctcggactcagccctagcctcagccgacggtctccgcctcgcccgacccggggctcggactcgacatcgacctcggaagacagactcgagctcgacctcggaggagcctccgcctcgcccgacccagggctcggaccgaccacgtcacaggggggccatcattaccctacccctagctagctcaggctacggggaacaagaccggcgtcccatctggctcaccgcagtaaacaaataacgatggcgccctgcgtgctccatgacgacggcggctctcagccccttacggaagcaaggagacgtcagcaaggactcgacagccccaacaggtgtctttccgcaaggctccaacgctcctccgatggccacgacatcacatgaacagggtgccaaaacctctctagctgccacgacggcatgtacttagggcgctagctcctctctgctagacacgttagcacattgctacactccccattgtacacttggaccctctccttacgcctataaaaggaaggtccagggctcccttacgggggggttggccgcgcggaagaggacgggacggcgcgtgcacgcctctcactccctccacgcggacgcttgtaaccccctactgcaagcgcacccgacctgggcgcgggacaacacgaaggccgtgggtttccccttttacacctgtctccctctagcttccccccttcgtgctccgtctcgcgccgacccatctgggctggggcacgcggcgacagtttactcgtcggtccagggaccccccggggtcgaaacgccgacactagtctttgggagattgttaatgtaggtatgtataagcccgaccaaggagaagagatgactccggaaatgatgcaagaggttcatcgcaatgctcaagcagtgagcattattaaaggaaaactttgtccggaagaataccggaaagttcaaggaagagaagatgcctgtgacatttggaatattcttaaaatgtcacatgaaggagatcccaaagctaagagacatagagttgaagctttggagagtgagcttgcaagatatgattggacaaagggtgagtcgcttcaatcactctttgatcggttgatggtgttagtaaacaaaataagagtgcttgggagtgaagattggagtgactccaaggtcacaagattattcatgagagcatataaagaaaaggataagagtcttgcaaggatgataagggatcgtgatgactatgaggatatgacgcctcatcaattatttgcaaagattcaacaacacgagtccgaagaagcccctatcaagacaagatactctcatgccttgatcactaatgaacaagacaacccccagaagaacaaagatcacaaagcaaagaaagtggtcgagacctcaagtgatgaagatagctcaagtgatgaagacacagctatgttcatcaaaacattcaagaaatttgtaagaaaaaatgacaagttccaaaggaaaggaaagaagagggcatgctatgaatgtggccaaaccggtcatttcatagcggattgtcctaacaagaaggaacaagaagccaagaacgaatacaagaaggacaagctcaaaaagggaggcaagaccaagggatacttcaagaagaagaaatatggtcaagctcatattggtgaagaatggaactccgatgaagagagttctagctccgaggaagaggaagtggtggcaaacgtggccatccaatctacatcaagatcgcaactcttcaccaacctacaagacgactcctacactccaacttgcctcatggcaaaaggagataaggtaaccttatttagtaatgattttccaaatgatcatgatgatgatcaaattgccatgaaaaataaaatgattaaagaatttggcttgaatggatacaatgttatcaccaaattaatggagaagctagataaaagaaaagcaactcttgatgctcaagaagacttgcttatccttgaaaaggaaagaaacctagagcttcaaaaattgcttcacaataaagatgaaatgctagatgtcttgactaaggaagtatctttagtcaagataactatagagaataaagataaagaagtaattaatatgaaaacttctatagctaatcttgcaaatgaaaagaatgcacttgaaacaagcatgttaagcttgaatgttcaaaatcaagaacttcaagtgcaacttgaaaattgcaagaacatcaatgcctcatctttagtgattgaatctaagtctagctccttaaatgataatttttgcaaacattgtgccaaatatcatgcttcttgttgtctaactaaccatgcaaagaagaatagcccacaggtgaaagtcaaaggaattttgaaaagatgctctagcaatgatgggttaaagaaagttgaacccaagtacaagtccctaaagcccaacaatggaagaagggggcttgggttcaactcatccaaggaaaaccctagcacagtgcataaggggtggagatcccccaagttcatagagggaaccaccctatatgatgccttggggaggattcactcctcaaatgacaagtcacctcaagtaaaggtaaacttgagttccacaaagagtaagatgaaggaagtgggatcctcaagtggacaaaaatttaatgctcccatttctcactcttatctttgtgattatatgttgacttgggatttagggaaattggttgtcaaatatgtgggtgcctacactaaaagaaaagtcatgaaaagaagtgtgtgggtacccaaggctataactaacactgtaggacccaattcaatttgggtacctaaaagtatagcctaaatttgttttgcaggtttactcctctggtgggtcaagttgggtgcttgacagtggatgtacaaatcacatgaccggggagaaagacatgtttcattcattgcaactaactcaagaagtacaagaaattgtgtttggagatagtggcaagagtaaggtgattggtattggtaaaattcctatctctgaccaacaatcactttcaaatgttttattggtagattctttaagctacaatttattgtccgtttcacaactttgtggaatgggttataattgtttattttctgatgtggatgtgaagatccttagaacggaggactcctcagttgcctttacgggtcgcttgaagggcaagctttatcttgttgatttcacaacaagtaaagtgacgcctgagacttgtttagtggcaaagtccgacaagggttggctatggcatcgccggctagcccatgtcggtatgaggaatttggccaaacttcaaaaggataatcacatcattggactaacaaatgttgtatttgagaaagatagggtctgtggcacatgccaagcaggaaagcaacatggagtcccacatcaatcaaagaatgtggtcacaacaaagaggccattggagcttcttcacatggacctcttcggacctgtggcttacattagcattggtggtagtaagtatggtttagtcattgttgatgatttttctcgattcacctgggttttctttttgagtgataaaggtgaaactcaagaaatattaaagaaattcatgagaagagctcaaaatgagtttgagctcaagatcaagaaagtgagaagtgataatgggacggaattcaagaacacaggtgtcgaagaatttttaggcgaagaaggaatcaagcatgagttctcggttccttacactccacaacaaaatggtgttgtggaaagaaagaaccgaactttaattgaagcagctagaaccatgttggatgagtacaagacacctaacaatttttgggcagaggcggtcaacaccgcctgtcatgcaatcaaccgtctctatcttcacaagatctacaaaaagactgcttatgagcttctcactggtaacaaacctaaagttgattattttagagtatttggttgtaagtgttttattcttaacaagaaagtcaagagctcaaagtttgctcctagagtggacgagggtttcttgcttggttatgcatcaaatgcgcatggatatcgcgttttcaacaataccaccggtcttgttgaaatagcgatagacgtgacatttgatgagtctaatggctcgcaagggcatgtttctaatggcactgcaggaaatgaagaactaccttgtgaggccataaagaaacttgcaataggtgaagtgagacctcaagaaaaggatgatgaggaaggaactttgtgaatgaccaatgaggttgttgatgtgggtgcaaaggtggtgggtgacaaatcctccacccaagcaaacccatcaacctcaagtcatccaagtcttgaagaaaatcatcaattccaaaggatgtcaactgtggtagaagatgaacacgaaagtgttaatggcgaagtacctcttgattaagtgagtaatgaggaggagcaagtacaaagacaaccatcagtgcctcatcctagagtccatcataccattcaaagggaccatccggtggacaacatcctgggtagcatcaggagaggggtaacaactcgatctcgtttagctaatttttgtgaattttactcgtttgtttcctctcttgagccacttaaggttgaagaagcattgggtgatccggattggataatcgccatgcaagaggagttgaacaacttctcccggaatgaagtttggtccttagtccaaagacccaaacaaaatgtgattgggacaaaatgggtctttaggaacaaacaagatgaacatggcgtggttacaagaaacaaagcacggttggttgcccaaggctacactcaagtggaaggacttgattttggtgaaacatatgcgccggtagcaaggttagagtcaattagaatattaattgcctatgctactaaccatgatttcaagctatatcaaatggatgtcaagagcgcatttctaaatggaccactacaagagagggtctatgtggagcaaccaccgggctttgaagatccaaagaagccaaatcatgtttacctacttcacaaggcactctacgggcttaaacaagcccctagagcttggtatgattgccttaaggatttcttgcttaaaaatggttttgaaataggaaaagtagactctactttattcactcgcaaagttgataatcaattatttgtttgtcaaatatatgtcgacgacattatatttggcagtactgatgaaactttttgtgaggaatttagtagggttatgacaaataggtttgagatgtccatgatgggtgagctcaagtacttcctgggttttcaagttaaacaactcaatgaaggaacctttctgtgccaaaccaagtacacacaagacatgctcaaaaagtttggcatggaaaaggcaaagcacgccaagacaccaatggcttcaagcggtcatctcgacttaaatgaagaaggtaaatctgtagatcaaaagctttatagatcaatgataggatctctactatatttgtgtgcatctaggccggatatcatgcttagtgtgtgcatgtgtgcccgttttcaagctaacccaaaagagtgtcacttagtggtcgttaagagaattttgagatatctagttcacacccaaaatctaggtctctggtatcctaagggctcctttttcgatttatttggctactctgattcagactatgccggctgtaaagtagatcgaaaaagcacctcggggacttgccaattccttgggcggtccctggtgtcttggagctctaagaagcaaaactgtgttgcacattccactgccgaggccgaatacatagctgcttgtgcttgttgtgctcagttgctatggatgaagcaaactttgagagattttggctgtgagtttaaaagaatcccactactttgtgacaatgagagcgccattaaactagccaacaatcatgtgcaacattctagaaccaaacacatagatataagacaccattttctgagggaccacgaagcaaaaggagatatcgaattatgtcatgtaaacacagaaaatcaactagccgatatcttcacaaaacccctcgatgagactagatttggctttcttaggagtgaattaaatatcttggattctcgtaacttaacttgaaagcggacacacagattgtttgattcactatttttgattgatagttttaaagctttgtgatgatctttcaaaacttggtggaaatgttaaaattcgaatgaattttagtgctaagattttttaaaattttcacttgtagctcaactggcttggccagctgaactttctagttcagctggagaaggccagctgaagttcagctcagctccttttaaccagattttaccaggaccatcctggccaaaaccggttgaaccggtgttgaagaccggttgaaccggtctctgaccggtcagcacaggtctgtccacgcaggtctgtccgcgcaggcctgtccgcgcaggtctgtcagctgcacctttttcagtcgcgcagtattttttttgccgcgcagcaagccatgcagagtcttttttttgggccgtccggtcacagccgcgctgaagtgtcagggcgcgcagatttttgggatgactggtcgcatccactcagctgcagggcgcgcagatttttttatgggttgtccggtcacagctgagcagctgtgtcagcccgcgcagcaacattttcttttgctgtccagtcgcctccgcgcaaaaatgtcagggcgtgcagaaatcttttcaggctgtccggtcgcatccttgcagtgcagcaaatttttttttgctgtccggtcgcatccgcgcagcagcctgctcgcgcagaaattttttttggccgcgcagttttttcttttgccgtccggtctcatctgcgcagaaccttttgactttttgtggcgcatggaatctctgcagtacaccttttcagaatcctgcgcagtactttttcagcttttactgtttgaagaatctgttttttactgcgcagtcgcgtcagaaatttgaatttttttggcgttttccctctgccatttctggctctctgaccgcactggtcagaagtagttgaaccggcccatggggggcggttgaaccggtcctgaggaccagctcaactgcctatatatatttgtcgctccccttctcttccctcactccaccccttctcgccttagtctcttcgcagcatttagagcctcatctctcactcacctcaaacggtttccagttccaaaacctctccaatcatggtgcgtcgtcgcaacccttccgtgattgagtttagcaacgactcggacgagattcaggaggaatctcccgtcccctctcctccgcctcgtcgctccctctctaagagaggacgtggctccggtaggatggatgaagagggttcttccatgccctcgcagccgactcgcgggagacgccataaggttggcgccactcgtcctcgtcgtagcacgtcctcctctgggtatgctccctgccaggagaaggatggggcttttgacgacttcatcgaccttccggcgccagatgcactctacgtcaccggtctgcacatgcatccggcgaacgtcacccacggtccacatgaacctcctgtcgacttctctctgaagggagtagacacccttcagcgcctgaggttcaccaatcctactctcactcctcgtcatcctggtgtccaggaccctcggttctagaatcttttccaggctgacttctacaattctgtcattttatccaagaaacacccagtcgtcaggcataggtttatatactgggagggatgtgagaacatgggagatgctgacatgacgtcagccctccaaaacttagagagaaaggggttaagaaacattatgaccacggaatacccctggaacgacgaggtggtagctcggttctatgccaccctctggataaagaaagtagatgacgaagacgatgggtatgattacccaatcatgtatttcttcatctagggtaactggcacaaagtcagttatcgtcgttttgcctatattctgggcttctctgatgcagatattcagggcagcaacatgcgagtgcataacattaggctgcccatgcgggaagacacggaatttattcatgtctctaatgagcgggagttctggacgaccgctaacatgcataggtactacaggtaccttaattctttgtccaggatgaccgttctcccgaagggcggaaatcaaatgaacgtccttagggagagtcgagtcttccttctcctccttgctcccaacagtctcgcccgcatcaatgtgtttgacatgatctgggaagagatcgttcgtgcttcctggtctcctctcagagggtgtcttcatgcaccctttatcatgaagatgatcgaagtggtcacccagacccacttcgaaaaaccagtcaaacactcccgctacgtaccctactgggttgattcctccaacccagctgctcgtacgaagcgggctccctcagggtctggagaccctgcctcctccactgagccacctccccagcctccccatcatccatcttcctctcgccctgtcgctgcctcgcgtccctctcctggccgcggatctcccatgccacgtgctcgtggtcgtggtcgaggtcgtggccgagggatgggtgctcgcttggtccacgggtttgcggcgtttttctctatgtgccgcaacatttctgctgatgtacatgaggtggcaaggcatcagcgggagactgacgacaatcttcgtcgtcaagcttccaccatgggtatgccatttgcccctcgctcgcctgacgtgcctctccatcctcctcccccggagatcaatgagtggcaccagcaggcctacggggtgccatttatgtcagcaaacgacgaagaagaagaagaagcctatgttgatgatcacgagcagtttgccccgcctccctaccatggggatccgggtcaatcatcctctcaccctctgcctccctacccgggtccgggacccattcctggtgaccctaggccatccggctctggttaccatcaccaccctccacctcctcctgatcatcgtacatcttcggcctctgttttttctgtggctgatgagccacctagggactccacattcgaggaggacgtgatgaggaccctcttccctgactacacttcataccctccatcatatcctccgtcctatcctcctcctggaggatattgattcatgtatccatgtctctctctttgtttttggtacttgttgccaaaaagggggagaaaatccaacctctagtttgtggttctttcggttttcttttggattatttttgttttggccactgttgtggcttgtatcctcttatcattgtatgaaataaaactgctgggttattattcaaagtgatatgatggtcttctggacatcatcttttgtcctatcagtttgaaatgattactttgctatgaagtaaaaatgatgtgtatttagagatagtcatgtgcatcacaactcctgttatgacactcttgcacccccagatggttgtattcagtatggtttttgtcactatctctaaatgtgttgctcacatgacatattatgtcaaaacattggattcacaatcgtgcacacatttagggggagccatctacatacaatcattcaaaagaaattttctattgcaaatgtatatctttttgaccttaattgttttggcatcaatcaccaaaaagggggagattgtaagtgcaatcaaccccaagtgagggttttggtgatttaatgacaaaacaaataagggtactaacagtttttgttctcagtgtatgattagaaagaaacaggaacttaaggaaccaccaaggacttcatgcaatggacgtataaaatttatgtaaaatcttgtgttgcatgatgtaattcttccttatttttttccgcacaggtaaaggtgtttgctatagctcaagtccccaaattcaaaagctatttttgaaaaccaaaaatcactttaacattatttggttgaccatggttagggttgagaaacctagagtgttcttgctgaaaagcagctggacttcttcaactgcagctgagctttccagctgaacttaacttcagctgtgatgagcttcttcagctgcagctgagcttttcagctgagctggacttcagctgagttgaactttcaactccagctgaacttcaacttcagctgtggacctctttgaccatacccagctgaacttgcccccgggcagctgagctggggttttctctccaaaactctctggtctagaccagctgaactggtcctgggggggggggcagctcaactggtctctgaccctctgacttcttatctgcagtctgccagtcagactggcagtcaggtcgccaggggtgtcagggggcggttcaaccggtcctaacctgtctgatccgcctgcaggtcaatctgccagtcagtctggcagtcagactggcagacagtctgctgacctgtcagggggcagttcaaccggttttctgcgtggtttctggtcaaacggctagtttttgagccgtgactataaatagaaccctctctctctcttcttcaatacggctggacacttactcatttattgctcacctaacttgagacaaagcactcatctctccatctctctcacacttaaatcttcctcaagattcaaccttgttggaggagctcttgggtgtgaggtttgtgcttgtgctcacgatttggttttcctctcccatctcttttacaaagacttgagcttgtgcaaacccctcttgtgctttcttggtgttcttgaaaccctaggtttcaagatcttttgaggttgcttgggagtctccaaatttgtggacgaccccaagaagtttgtatcacccgctctttgagctaagataagaagagattgccttgacctttgtggtcggcttttggaggattagggttgaaaaagactcggccctttgtgggctcctcaacggggagtaggacacctttgtggtgtggccgaacctcggattaaatcttgtgtcttgtgttcttgcttgttttaacttgagatatttttacttgcaagattgacataaagattttttcgtagagtttatctagaagtgaaatagcctttacatattcatcttttcatcctaacttagctatatcttacttctcacaagaactcgcgaaatactttttcgagtagattttagtctaaagtttataaaacagttggattggttcagagtggttcaacttgcgcacgtagctattgaatcggcctgcaccagtcgaactgtgtatttaacaatctttcgaagtttgttgtgaaaattttcagattagcctattcaccccccccccctctaggctactttcatcgtcaatgaccagtcctatggtactgtatgtctaaacctcactgctacccataaaaaaatttgcatctcgtggtttactgatggaacatttctgtagagttcttcaacaacaggcaccgtat

SEQ ID NO: 553 - DNA, 1045 bp, Zea mays
  Intron number 1 from transcript GRMZM2G328780_T02 (locus G RMZM2G328780) derived from phytozome v7.0 (chr-ID 3; pos 1 16514680 to 116515724)
gctgttcgtcgttcggtaaaaaaatatactatctatttattttattattagttatattatttacttttatttgcaattttattatatattatttgtctttatatacatatataattgctttattataattagttcaaatatatagaatatagatttgagtaatcattgtgatgaccgacgaaatgcataaatgatcagctcatgttttacatgaggacaaactttttcccttttccttcttttataatttatctccgaataatgcaaaatgataaagcataatactatcattatatactacctacaatgtttggtcttagtttgcatccattgaactcatgtattttgtggctaactagttcttcatcttatcaaatatgttaaccatgcttttatttttcaagtaaaaatatacatgacttggcatgccaataaatatcatgtgcttgattttttcatgtaataataacacatgaaaaatagaataggagtcctacgtatttggttaacaacactagcacttttatatcgtggatgaccgaaccgtcaccaatataactctttaaaccaggctatctataaattattgttgtctctctatttttacaatactggaatatgatgtacaaatcaaaactaaagctacttccatgtcatcaattagctcaacatgctttgtgaagttcgagtagaacaaggttagcttatgtgtttgtccctcaaacttattattttttatctttttgcgaaatgtctttttaatttgtatccatgttgtaccaaacaaaacaagggtggtttcaagtatttgcctgtaagcttacctttatttttcctgtttactaaatgtatttttaatttgtatctacgttgtataagcaaaccaaaacaaagccacttaaaatttgccgctttcatttttattttagagtatcttaacggatgttgattttttttcaattgattgtagttgccattagcacacactattagctcttattttgatctataaaatttgcaggggcacgtacttccaagagaggtc

SEQ ID NO: 554 - DNA, 3673 bp, Zea mays
  Intron number 3 from transcript GRMZM2G126170_T03 (locus G RMZM2G126170) derived from phytozome v7.0 (chr-ID 7; pos 8 5714704 to 85718376 reverse strand)
gtgcgtaccaaaatattatcatatctcatacttttttattgttccctctttagtgacatgttattgcatgttaactttttgataaagatgttattcacttgctgagtgattacccaagttactacattatctttattatgtatgctgtaacttgaagagtctgcccaatgccccaagttaaataaaatctgaaagtaactagggggtcctttgaagggcaggcctgatgcagtggctagagctgtctcactgagtcatcaggtcgcaggttcgaagtagcctctccttatctgcgtggggaaggcttgtctcgtttatcccttcctcagatcccactgggcttgggcttaccaactagggggtccctcatgcataaactttttttgaaagcattggagaaagttatattatattcatagcaaaatatttgaagagaagaagtggaagggatgacaattttaaggaatgcttgtctaaagttattatttacatgtggtgtgtgacctgtgtgacccattagtggcacacttagagaaccataaatgtatctttgaattcattcactgtaagtttataagcactttcattggcaacgtaattggtttcctgctctatgcccttggaattctcttttgtttctattttcattttgatttaaactatttatattcttacatgcatgccaaccttatatgttgcaggtatgatgttgctgcctttctgtcacataggttgtttgaatccggtgacccggtaatgacctcggaatttcattgaatattgttgaagataaagacatttcaagtagtacttgaaaaggcagtattcttgtagcaaagttatatatggttcggttgttggctctctttttacaatgagattcaaggttattaaaacgataaaacgttaaaactttcatgcgtgaagttttaacttttaaacgtttaaacaaagttcaaacctagttattgttattaaaacgacgtttaaacgttgtttaaaactataaaacactattagagtggtgaaatgatgtaacattttatgatttggtgtaaaacgtcgttttctgacgtttaaacaccacattggcatttaaacactatatgcagtaaaacaccacgtttctagtgttttagccctagcgcccacatgtgaaatttggcccagtccagtttagccctatcagtcattcagcctaggttgcagcctctctttctctctctctctcaagtcgtcaggtgttccccccgtgcggctgcgggcactctaggctggtcgccaccactcagtccagccaccgctagtttgcccgtccgtcggccgtccaccactccagtcctgcgttgtcaacccatccatcagcagcaactctcgcccgggctgacgatcctgcgctgtctgcccgtccactggccgccactctcgcccagcctgacggtgcgcgtctgcgctatccgcgtcgtcggccgtcgactcgtctgctcctcctctggtccattgctcctctgccgtcgatgtctgctgctcctctgtcgacgtcattcgatcctttgtccacgctagctctcgtctgctactctgctctacatctagccatctgccacttgtcttgattgctctcagcctggacagtgggcaacacaatcctctgcattggactggtaatccggtatgtgcttgaacttgaacatatgctctgcaattctctgcactggacagtggacaacacaatcatgaatcatgttgctcgcttgctattagttgaacttgtgttattgtggtaattgtagttgtggagtgtggacatgtcattttgaacattgttattatgtgaacttatgttggttgtttggtatttaacttattgttattgtctgaaattatgataattgaaattttgctatgttgtttaaagcgtttaaaagtcaaaatccactcatgagcgtttcaacattttgacgttttaatagccatgaacttagttttaaacaacataaaaaatatcaatatatcataatttcaataccatcaagtcaaatatcaaacaactaacataagttcacataataatattgtgcacaatgacgtgtgcacaaccacaataacacaagttcaactaagagcaagtcgacgttgtggaccggacgatgtcggcagaggagcagcggatgacgttggcagagtagtgatgggcgacaacgtggattggcgcggacagcgcagtgtcaggtgagagtggcggccagcagacaacgcagtgtcaggcgagcccagcgctggaggatgggtcataggggaggagcctgagccgacgacacggtcgaccgccagcgaacagcgagaggcgacgacctggagtggcggcggctggcctggagtgcctgcagccgcacgggggaggagtgcctgatgaccatggtttttaaagcggtaaggcggtccacggcgttggagcaccgcctggacgcctaggcgaggtaggcgggcaaggggcctaggcgttagaccaccgtctggacgcctaggcgacgccttaagaacaaagctgatgacttagcgagagtgaggggctgagggcagggctgaatgcctgatagggataaaactggactaggctgaatttcacaggtgggcactagggctaaaacgttagaaacgtgacgttttactgcatatagcgtttaaacgctaaaatgtggcgtttaaacgccagaaaacgatgtttaacgccaaatcacaaaaggttgcagtgtttcgccaccctaatagcgttttgtcatttaaacgacgttttaataacaatgatgagattgaattttaaaggagatctgcagtaagttcttgtgaattagtgatggtttgcttcaatatgtctattgtattgtgttcaaacatgtcaacattatggtctcctaattgattgcagaactgaaatccaatgcttactagagatgtttcatgtttgggatagtatctggacgctgttaaggatagatgctgtaggatgtggtaggaccaggaggccacagggcagtaaccttaggcaaggcagcacaaggatggagtcaatccatagggttaatcttgggtacaaaattatttggagtttataggagtcttctgttggggataaatccaatcactacaaaatggagttgatagtaccattttttaatgttttgccaattgcaaatctcttttctaccccggtaattcaagcttttaaacatgactccaacttgatggaaactattttgtcctctagtgaaccatctctatcatctagcaagcaaaatcatatgccacaatatttgaactccagctaacattaatctgtatgctggataggtgtgcatactctttaatttttcacaaaaattattctgctttagtactgatatttgtaaaatttgactgtgccaccttgtctatttgaaacttctggaaatgtgcaaaatttatgcttccttatatataaaagtgtgcattcctgattctgtgtttttgacatgtcatcattttttctgaaatgtcatatgtttttgcaaagttttactgttacattacattggtgttgctgcacatgaaaaatacgatcttggcttaatttatgcatcatttttcttatgcttcaggaagtgcgggttcgtttttctggatttggggcaga

SEQ ID NO: 555 - DNA, 3412 bp, Zea mays
  Intron number 1 from transcript GRMZM2G018619_T01 (locus G RMZM2G018619) derived from phytozome v7.0 (chr-ID 9; pos 7 6756138 to 76759549)
aaggcccagatttgggacaccgccggccaggaacggtacgtttcgtttcagctcgctccagctcgtctcgcctctcttctctccccgccgctgccgcggcagctggtagtagatctgatttgcgtctcggttcggctgctgctagcgtgcgtatcctcgttgtcaccgttaagattgggctctcgctttggatctcgctgccgaattgcgttgcgtgctgctgttgattaccatttgtagggtttggtgcattttcatttcaggatccgatactggaacacgcgaatcagcatgcaggcatcctattgttgactagagttgtaggatgacgatgataggatattcttctattgcacaaacgtttttttatactgcctggagcttggtttcgagtacgcagcagtgcagcaggtggcgtggactgaataagactttctgaaggttagtaggtttctttgttttgactcacgttgatcatttagcctgggaggagcagatcggccatttttcctttctcttgtttgcatgcagacttcctgcccagttcagttaatttagtagtcaaaaccgtaaaatgcacacaatgcaatatatagctatattttgtacacttattgttttctaaaatttaatcgtcttggaccctgctataaataggtatttatgtcaaaaacaggtttatcgaacatggtcacctcaaattagaactgatgcttatgaaattgatttttgcactcttacacttagcccataagtttggctattcgtcttgttctactgcactgaatttctgaggagtgaagagtcttcactccatttttcttttcttcattccaccattttgtaaacttcttgttagcttgttctgccagttatttagatggacatgtctatgattgggaccaatcattgtgattgggattttttgtcatttgtttacatacttgcagtgattctttgttttatatgctgatcatgtatccatgtcatctatattactgtctcaattgtttacaaaaaatgatgcttcaagatgtgatgcaccagcaccttgtattatcgataaattttcttcttcaagagtgttaaggaaatgacctgccacaatttgtattaactagtgcttgttagtgacataattatttaagacaaaactccaatagaaaaggctgccaaaataacacctaatctttgaagaatggctgaattgattaaggcaaaacaaagatatactaattgcttaaactaatggactttacaataatgtctgagcacctttctaggtttttgttgtatttatgtgccatggaactagatttttcaagcttgggtgtgatggggattctaaggggcaggtgggttctgtgtaagaagtctagacaactttgtagagcaattttggtggcattttgttaatgcaacaaaaactaattagcacaaatgaggagtccatgcaaagtacatcgaagtgatttgacacttgtgatcatggaagaactagggctagaaatcaagccaacacaagtggaggcttgttttgctgacaaatgctagctcattcgagctaacgagctagctcgttaacaaatcgagctgagatgctagctcaactagtgacaaaattgaaatgagccgagccgaccacgagccgagcgagctgacgagccacgagtattttgtccagccctagacgcctgtggttaacattgtgcactgctgcatgtgacttgttcatattgaagcactagagtcttgggttggttccagcccttctgggttatctatcggcacatcagctatcgaccaatctataccgaccattgttcgcccttatctaccactctatggcaacatcctttaccatcaatctacatccacctcatcgccacatcaacttttcttctatagttttttagttgaaatgaaacattgtgatttactctagttcaaatacatttgtttacataattaagtaaatgaaataacataatttgagacaacaatttaaaattacatggctcaagcataataataatagatacatgaaactacataacttaaacattaaaacaaaaaatcataaatacaatctaattatagattaaatttcaagtttttttcaattcaaatggttaaaaaatagctagctgacttgacgcaggcatatatcaatcagaacacaccatgttactaaaggcggacgttaccgagtaccgaccggttcggtcccaacacaggtaccaacttgttaaggtggatggcagcaccaccgaccagacggtccaaccgacccgcactggaaccgtggtggtcggtagcgtccgtgtgtcaggggttggtagtgccctgggctggaacccgccttagcacgaattgtacaggatctgacaggtgcacatagaaagtctgcagctttgcatgtagcaatgaaaacaagggtctattcaaacaacaatggctaatcgtagtcaagaattgtattactacctccgttctcgaatatttgtcgccggctagttcatttttgaactaaaacgcgacaaataaaaaagaacggagggaatatttaacagtggttggtacttcctgattagtgattttatatgagactagggcttattgactataataacctgcatgtagttgtctgctgtcttaactcttatgctgttccttccaccaatatcccactacaacacaagcaatttgatgcaatgaattccatttaacaacatgatgacctagtggatggtcgatgagctagtaatgctttttgttgagtgctacatctatcactattgttttttttttgtaagaaagttgacttattgttttttttgttagcattctgtataataaagtgacagtgatctaatggtatccttgtgcttaagtggagttcgttattactttttgttttggctgtaccgctgtagcactgttgttgctgttaggagtgaattctatacttcccatctcaagtggagtaattgccattgtctcattggtgcttgattattttaatatatcatttagcaaattatcctaagttcttttcaattatttacacagcttgggttccctgtccaccatgcgtccaaaataaagggaatctgtcgcccagacctttagataaggaaaacaccagcactctctctgaacagacaacctgagtacctgaccaaagtttaggacaagactgttgcagatgagcaaagttttgaataatgcggtagggtgcacatatttgtttgttgacttgcttggtcagttgtcttaatgttcttttatcagcgttaatggaactgaatttccttgcaattcagaattctctccatttggtttacttatctcactgcagttcaatatcactgcagataccgtgcaatcactagtgcgtattaccgaggcg

SEQ ID NO: 556 - DNA, 6047 bp, Zea mays
  Intron number 10 from transcript GRMZM2G017654_T02 (locus GRMZM2G017654) derived from phytozome v7.0 (chr-ID 2; pos 3789990 to 3796036)
ttgcctgcttcccttcggcaacctactccattaaggtattaatgggagtttcccgtgatagcgaatagtttggttaacctatatacagtctagaaaagtacagacacattaacttttcacttttgcttcataggccctgtttggaatggctgaaacttttaaaaaagctggcttatagctggctgatcagaaaagctacttctcaaataagctgctgcctgaataagctaagtgtttggcatcctgacttttcaaaggccagagagatgctgagacactgttgtaaactgtgaaatgactaaaatacccatgagtgttgtaaactgggtcttctatagacctttgtttcactcttcttagtataattttaggcgcagttctcctgcacttttcgaggaaaaagtgttatgagcgttaataacaactagtatcagacattttcatggctatataatatatattagatgtatggtttatgcatcgccttccaactgacattcttgcatacactggccaaagtagctgcaaactaaactattgtccagctaaagcagacactatcatctcttagctcacccatgcccccgtcatccatgacatctccttcgttgtcctcatgttgcacggtcctatcaccatgtctcgtctgactcaatttcatcaaaatgggcttcacatatttgactgtctctaatgaaattgtgcaacgccatacaagcaattatgatttttcttttgcttctccatcgggtagctcggaacgtttaaaagaatgcgccatttcatcttaagaacaccaaatgagcgttcaattacattctgaagagaagaatgagcatgattgaatattttaacccaattgcccgtccactattttggaattcagatatgtggtacctttgccctttgtatgatgctagataaccttttctattaggatatccagagtcaacatggtagtatttacctacaaaagcattaattatcattagaactagaacatacttaattatctgttagagaaaggatactaatttaaaaataaatataccttcaggggtgtgtgggaagtagtccttgtacttgattagagaatccaagaaaatgcgaatatcatgagcggatcccggccgtccagccacaacaaaagtaaatctcatgtcaaagttgcatactgccataacattttgactaggatatccatggctcccaatatgcacaggttgttttgtggatggtacagttactggtatatgtgtgccatcaatggccccaaggcaatttctgaaatgaggccaaaatcttggctcttgaagttttctacgaaccatactaaaggtaggatctttgggttttataacgtcagcagccagtttgtacacagactccagaacatcagtaaacctcctaggcccctacagatagtttctccagaatgggaaaatttctccttagcttgccttgattgatagtttgtaccagaggaagaagtccctgctctgatcgtttgtactggtgcgggattttcgaccgatcagtcttgttcatagtttcactaagattgtgagtttgtgactaaactgttggctaacagactggcaagactgctgcaggaattggtttccctcaaccaagtgttctatcctcgataacttcatgcttgttcagcagacagccaggttcttgcatcgtcaaaaacatgcccgtatcctgctcaaactggacatctcaaaggctttcgactcggtttcatgggcttttcttttagaaattctgagaaaactaggctttgggcagttttggtgcgacataatcagtgggttgttgacttcctcctctaccaggattctcttgagggcttgttcggttattttcaatccatacggattggaggggattgatacggattgacagagattttgacttactagagattgaaaccccctcaatccatatggattggggtagaaccgaacaagccctgaatggtttgtggggggattgtatttggcatcacagaggattaaggcaaggtgatcctttatcgcctatactatttattttggtaatggatattctaaatctgatggtgcagcgagcatctgaggagggtcttcttcaacctttatcggcaaggactatgcagcaccgcatatcgttatatgctgatgatgttgtagtctttttaaggcctgttgcttcggacattaatgtggttctggatattcttaatctctttggttcggcttcaggcccaagtactaatattcagaaaagcagtgttttcccaatccattgtggggaagaactgaattgtatccaagagctgcttctttgtactttttcagattatccttgtaagtatctcggattgcctctatctaccaagaagctcacaaggaatcaaatccaatccattgtggaccaggtggctgccctgttgcctggctggaaagctgagcttatgtctagggctagaatggccatctatgttcagttcgttatgtcggctaaaatggtttatgcttgtacggctctggaaatcccttcttgggccatcaaagcggttgataagctgcggaagggctttctttagaggggaaggaaggaggccattgtctgttggcttggtttaaggccactcgacctaaggagctggggggacttgggattagcgacttaaggaaccatagctgggctttgagggctcggtggccttggttgcagaaaacggatcgaaacagaccttgggtcgatttcccaatccatgtatatgatgtggttcagaagttgatggctgtggctgttatcactgagattggagatggcgccaataccttgttctggaaggataggtggctgggggagagatgcgttaaagacttaggtcctgcagtgcttgatttggtgcctaatcgtctagtgaacaagaggacagttaaagatgcacttcccaacttcgattgcaaggggctgtgtcagttagagtttttgccgaaattctggacctttgtgaagttcttgaggctgttgtgcttcagtctggtgtgcaagatcgacatctatggaaattcagtacttcaggtgtttattcggctaaatcagcctatagtgccctcttctttggggctgttcagtacttcagtttgaaccagcaaaaagggtgtggaaatcttggtcgcctgggaagtgtaagttctttatttggttggtggagcacgataggtgttggacagctgacagactggaaaagagggggctgaaccatcctgagtgttgcccattgtgtgaccaagaggctgaaactatcaaccatcttttggtcagatgtgtttttgccagacagttttggtttcatctcctaaagatgctggggctggaagagttgtgtcccaccctcgaggttttctcttttgattcttggtgggcttttggcaactctcgggtggcaaatcgagtgagaaaaggtttcaactcattggtgatccttggcgcctggaccatttggaagcatagaaataaatgtgtttttgatggttgtaaattgtaatcctagcttggcctctgcccttaccccttagggctgccaaggatgaggtgctcttttggtctaaggctggggccaaaaatctatccgccctctgggcggaggatctgctggttctgccagtttaggttgatctgtgtgtgtgtgccggtcgtgtgttttgctatttttttctggtgagatctttgggtggctttggcttgggtgggtggctgtgttgtacgggggtcttacccctctctctttcttctattaatgcaatgatatgcagtcctcctagaaaaaaaactgaaatatactcactgaatacctttgttttttctgtccaccattcctcacttgcagcaatagacccagttttaggatctcttcctaaccctgaggcatggattttttaatgtctttcaagttgtgtaatcacttttaagtgcatcccatctgtttttcatttgtttatgatcatactccctgccagtccattctttgaacttagcaacaaggttagcatatcttatgctattcaaaaccccttgtggtctgttatgggcagcaatttcttctaaaactatttctatccatgccctgtgagcaatggcatcccatctggcacttgctttctttttcttctctccttgattcatctaatatttgtagacaaatatattggaaaaatgcatatacacacagccatataaatacaatagatatgcaagccgaagtaaattaacaccatccaaaccatggggtatttaatattatagcttcaaccattgggtgaataaactaacatatctagttttgaaagtattggggggcatttttttttctcgaacgcgcaggagaactgtgtatcattgtattaagaaggaaaagaaggtctagaaaagaccaattacaatgtgctaaagaggcagccaattacaaggtgcctatagaggcacctaaagatggaaattcagggggggaaagaaaaaacaaaaaaaaacacccaagattaaaacactaggccatactaatgccacaaacttctaagggcagttgccccagctaggccccataaaatggcctcttcttggatggactgtgtgattgtgttgacgtttgcacaagcatttacgtgcttccaaatttgccaagctaccaaactcacaaaggagttaaagccttttttctttggtttaggcactctcttctctgcctttcccaccattcctggaacacagttgtatcagccctgggagctagatgttgcaacctcatcctgctcaagattctgaaccacacatccctttcaaagacacaagccaccaaaatgtgttgtactttctcatcctgttggtcacaaaggggacatctttccgggtggtccattcctcgacgagctaggcgatcagccgtccaacatcatttgagagatgccaaccaaatgaagaatttacaacgtggaggtgcccaagtcttccatattcttttggctggctcaagtttttgcaccagcatggaaacaatcatacgtagattttgccgaatattgccccgaggaagaaggcagacacaggtgttgatcagcaacatttggcctgagctgtactccttggattatatccaagaccatgaggaactcaaacatcacctgtgttggcaaacttccagagagatcttgcacctatccatttgtttaaggcttcttggactgttttcttaagttctcttggagacacggcttgtcaaagctggagcaatctggagcaaagactggtcatgcagccatctgtctgtccaaattttagagctccaatttttctttacctgaacctggtgttgtttggcagcaggaacagccgaacaaacgtcttgttcatacagcaggaacgctgtcttcttgcagcgggaacgatgtcgtgtggcggcagcaacaggggtcttgttccaggcagcaggaagcaggaactggtgtcgcctggtccagcatgtgtgtccacccgctggccggaaaagaagaagaggacgccggagatggtggatagccgcaggccggagatggtggaaaggaggcagacggatggcagatggtcgaaccctaactagccgccgactgcatttgtgcgtcacgagttggaagaaaaatgaggagcgaagaggacgagagactcgatcccggtattatgtaatggcagatgcgggtaaatatggtgatgttttaggggcactattgtttctgggccgcgcataagccagattaagctgcaacccgcacgcttactcaaaacgcagctctcacgtttattttagagaagcgcttaacgtaaaagcaacacaaaaagcttggtgtttggtagagttagaacttctctgtgatgggaagctggtaaaaaagccattccaaacagggccataatatgtcattagattggatgttcattgattatttgaaccttctttccattgagaagacacttaaatttttctcctgtcggtacaatcaggaatatcgacgggg

SEQ ID NO: 557 - DNA, 2611 bp, Zea mays
  Intron number 1 from transcript GRMZM2G020594_T02 (locus G RMZM2G020594) derived from phytozome v7.0 (chr-ID 8; pos 1 65168523 to 165171133 reverse strand)
ggactacgttggtgaggctttgctcttaacttgtagtatttcagttgagtcctggcagattcagctttatgctccttgagtcttaatgtgagtgtctctttaaacaagaataagtaggctagctaacgtttagtctctgtatgtgtatattgatataactttttgtcatttgccgtttataattctctgctgtaaaagctgatttccataacatgtggaattttgtagacatcccgatgaagatttcatgctaacatcattaaattcataaagctagagttactagaagagctgtatgcaaatccctggtgagtaccaatgcattagagctcatgaaggttctttttactcagcttatcatctttttcagaagcgcaagctgcattaatagccacctttcagatttattcacggagtgaaattcttattgtcctttcctttgagagagaagaattttcatggttagaatgtgtaacttatctatcaattgtcatatctctcttttatttttttaactacgatgtacccaactttgatctgtagtagctcctctgttgggacatagataaaaatcaaatatattgataaaaccatgttaaatttattgtcctacatgcaatattcaacttgttagctgataaaacaagattgtcctggttccgcaacttcgttctgtgagaactatttgtacatataggtattagttttatagtaataaacataattgtcggtgtacgaaacccgggtccctagggccacaagtcagtagaggattgatgccaggttcatccaccacgagttaaataaagctccaccccgcgggacaatccctcgaagttgggcaaggcggaaacttgcggaggggggtcaggcgaaccagcgaaaacccactcgagtggatttcacgtatctgaactgaccacaccgacaactttacgtacgtctcattaactacgccagccggcggagcgcgatgcaggtagtgttggtctttccccaccactcatgacctacaagacctaggcctgagttcctagaaggtctacgaccccgtaggagataagggaccggcggataggctacaaaggagggtcggcgtagggagagatgtggacaaaatccagtaatgatggcactctgacttttgtcgccaacacggatcgcaccctactcaggaaatctcggagatatgccagaagacctatgggaaagggcactgacacacgacaagatttaccgagggtgaatcccttttttacctcacattacgctcccttctgggagaaggcattgtgagaaggtatgtcccagtttccaatacccatatatgttggaaacaatgtagactagtttcatctctatttaactcattttaccctatgaaactttgatcatctctctcttcattgatattgtgccatgtccggatatttggtagttttgtagcttattcaatgctcatgaaacttatgaaacctccactaagactggcccgagaaacacaaactttgaccaagataggtggtgacctctgctatcattaagagaaaggtttcccttgtatccaagtggctttgaataaagagaaaatttgaacaagtaatcccatgcaagtgttacatcataaaaaaatacattatctttactttagctggggaaatgagcagcaaggatgttcgtttccaggtagaaagctgtgtgtgagcctgtgacatgttatgagatttaaacaatatgagtttttgttactgtttattgtccgcatctcatttgggagttttataaggcatgattggttgtccgctcgcgttcatccacgctctccgcatgcgttgaccaagtgacggacaatgtttggtttcctgtatacatgaggtcagagactgcacccgtaactgcagcgtaaactagaaataactcttctaactgtatgcacagatacgcacagaaatcccgttttccggcgggccaagcgcacatgagccacactacgcttatccagctagccaatcaggcgcatagtgatggcctcgggacactatagaatatatggcgaacacttaccatcattttttgtactgaaaacgagccatacattcttctgacatgttcagaaatgcatttgtattgcttattcttcaaactgctaaaccaggagttagtttaagggaaatgtcacaggcactgcatccactaggtatccttcattcttgtgaataaaaatgttatagaatttgttgcataaagctacttttttttgttgctagaattcgtttccttttcttttaacccctataggcacagtgtatcaatttggttattgatatgctcgtgatttcagctggccattaaggtagatatgtggacatgtatatagtagattggtgtagctgttttagcttttttttttgttagtggcaaatcgatggatcaagtaaagttcacttcatatggaccaagttgtgaatattttctattgttctcttctcttttcttttctttattttttgcttagtctagttctacaaaaaaaattcatcatacagattttgttattggcttggtctattcggcagaaaaagaaggaaaaaaaactggtggagcaaggaag

SEQ ID NO: 558 - DNA, 2120 bp, Zea mays
  Intron number 2 from transcript GRMZM2G057522_T01 (locus G RMZM2G057522) derived from phytozome v7.0 (chr-ID 1; pos 1 21656401 to 121658520 reverse strand)
cctggtaattttgcttcccctgtctcacgtattggatgtacataataattagtagattctgggtatagatatctgtttctttgagttcctgaagtcccatatgtttagcttaaatttgtatttggtagctaaactgtgtaggcccgtaagtcgactagtgtaggggcttgagattccgtagaattgcttgaatgctgagtagtgaccaaggttttccccccttttgtttcgatcttggaattttagtattatagatctctcaaatatgccatacaatttctttgagggatacccgttgatgcttactggtttgccagagtaattgacataacttagattgattttttactttgagtcagaagcgcagaacgctttgaaatctcaaatattggcctgcagatatttgtagttataatcatttatcagatgacatcattaatttaaaatggtcttagcaaaatttttcagcgctgaagttagccatgtttaacatcaatattggaaaagggccaccaaggcaccagtatatgatttccactagaatgagaagtattaacgccactctcggtagaaatgaaatttcccaggatttccattagttcattaccatgactttttcctggatgccccccctctaaattcttgcaggaaatcttagtgccaaccaggaaggccttttggccatccaatattccaatttgacatagatgtctcatttttcattagcactgactactgattgacatagtaagtattatggcaattggagccattaggataaggaaataataagttagattgatttggttacttaggataagggaagagataaattagatcgattttggttagttaggataagggtcgcttgcttaggggtcaagtaagtctctctatataaggagaggagacctatcaatctagtcaggcaagaattaagaaggaaaacccatagttattaaggcgtcctcaaggcgacgcttaagcgtcgcctaggcggtaaagcgcttggccgagacaaggcgtccgcctcgccttaccccagcgcctaaggcgagcggaatgcgagtgggagagagggctctgcccgttggcacccgcgttagggagggaaaggtggtcgtgagggggcgcctgagtggccgcgccggttgctggcagccggtggcctggaaggcgcctggtgcctgcccagagtagatctagcgacgagatagaggggggggggaagaggagagggggcgagcatgcacagagcagtgctggcggcgatgagctcagtgctgggctgttggcggcgggggggcgggggaagagcctggcagctaggaatgggagggaagggaaagaagtggctggcaggtgtggggtgggtaacctaattttgacgggctaagttggctgctgggctggtttatgagctgcttggactgacttgaccctatttgctagtgtaatacatctatgagactatatttctatatattttatttctattatctatttttatatattattaaggcgtcgcctcgccttatgccttatcgcttaaaagttaaaaagggggttggtcgccttaattcgccttgccgccttaataactatggcctatgggaaacccttccctcttgctcggcccgtcggccgtgggcaagccaccgccaacatgtacataacagcatgaaagatccttttgttattcaacctttgccctgccatccacttaaggatatggctattattctgcctcaacatgcagtgcacagacattattgtttgtcttctcttaatttaatcttggttactgtcatatatatagtcagcctaaagattctctcaaattgtttactatcatttgtttgacagtacaaaatatttgtgacaatatgatatatttgtaacatttggtgtacacattttttcctgagtgtttgtccaataaagctttgagaagttgaatagtattagcatgatcattatttcgataaatcccatattttctgctatttgatgcaaaatttggctttttttgtggaccatccatatactatcttagtattttgcttttcaaacaaaaagttctgctgtgttgctaattttgtattctctccagaacctgg

SEQ ID NO: 559 - DNA, 3742 bp, Zea mays
  Intron number 7 from transcript GRMZM2G027546_T02 (locus G RMZM2G027546) derived from phytozome v7.0 (chr-ID 8; pos 6 7381293 to 67385034 reverse strand)
ttgtattctcttcgaaatccaccaaaggtatatgcccatgttattgttctagttatgggggaaatactacttgcttttcgaagcccaatataacaatggcaaactgggggcagctgcttgcttaacatggggctatagttatactgctggaaccagtggcggagctatataaaattaacgtcccgggccactccataaaatttgaaggttacttcaaacagcccataatatattatgcggctaaatataccgctaaaacaaaatataccacaaacatagactaagatagtatttacttcaattcagcatctaaaagtacaataaacttgataaaaaatttaaaagtacctaattagagatgatttggtccttccccgcctctaataacttcatcaacattagcacgtgaatttgaacctacacattgcaaattaaatatttgtataaaatgagagatacaacatgacaatataactaatgaatgcaaaaatgtctaagtgagcacaaaaatataccacttgaactttgcggaggtagctttttcatacgactcttcaattcttgaaaatgatataaaatatcatcactttgaattcttgcaaagatatctctttctatatagcataccattctatgatttaaccaatcatttcccatcttatttctcaattctgtcttgatgattttcatagctgagaaggctctttcaaccgtggcagttgcaacaggcaaaattaaggctaattcaatgagacgataaaccaatgcaaaaactaggtgtctctcggtttgcaccaccttaatagccagattaccaaggtcttcacaatttgcaaaatcagaattacccctcacatcaacaataaatatatcgagttggtctctaaggatcaagatgtcatattgagtgaagtctgcagaataaatcttagccaattctatcagctgagctttatcatagctggcaaatgaatttcttggatctagacacgaaatgcatctcaataattgagtagatctttcagtgaaacgattgtttaattccacaataacttgatcatacacaacaataaatatctcatttttgaaatgatgatagtaagtcactaattgacctccacgcccccttgagcgacctcggacagtaattgtatcatccatctttggtaaaataatgttgtgttggttacaaaaggtctttacctcctcaaacaattcttcccatccactatcacgtacttcactaatattccgcaatgtggctccaatcaatccaacagcaaggacaatattctgatcttttctttgcaaacattgtgacaaatcattagtcttgcctaataacctcatcatgagatgcagaataagcacaaattcaaagctctccatttgtttcaacaaaccagaagccatatatttcttatccccattagagccatcatcagccacaatctctagtacctctagaatagcatcccacatgagaacaatacgacataaagttttatgatgtgaaccccatcgagtatccccaggtcgtgctaggttggtttcttgatttttccctctacctgaaaaaatttcccccctttccaacatgttcacaagtttggcatggtgttgttgagccaattgatcccttctcttacaagaagcattaacactattcacaatcaagttgcacgtttggaagaaatcaaatacagaagcgcaacacttagcaactgaaacaaccactaattgcaattggtgtgcaaagcaatgtatgtaaaaagcatatggactctcatctaatattcttctttgcaacccatgaaattcacctctcatgtttgatgccccatcataaccttgtcctcgtaatctatccattgacaatccatagaaagaaaacataccatccaaagcaacttttagagcggatgatgtagtgtcgggtacctcttgtaacccaataaatctctcaatcacttcacctcgttcgttgacatacctaaagaaaagaatagatgcatggttaaaaatttggcattgacaaaaaaatagcaaccattcaattatatactaacctcaaaacaaccgccatttgctccttgatagaagcatctcgagcctcatcaacaagaatggaaaagtttctattcccaatatccgaaataatagctttggtggtttgctctgcacaagctctacaaatgtctttttggatatcaggtgaagtcatctgattagtacgaagcaaatttgctacatttttatccttgtctttgtaccactgtagcaactctaaaaagtttcccttattgcttgaggtagaagattcatcatgtccacgaaaagcaagtgcttgcaataaaaggtatcttacaactcccaatatgacaagcaaacggcctttatattcctcctccatctttttaccccctcgattcatcacatgagacacactttgcctctgatttttgtagtcctcataggaccttctagacttattgtgatctatgccattaccatgagctccaatggtttcacgtccatctttccatcgacgaaacccaacaaccgtgaaggcatcaacaccataattttcagctcttggttgtttaaaaaggtagcaataaaaacaaaaggccgcatccttagcaatgctatactccaaccatggattatttacataccattcatcatgaaaagacctattgcgattgcctatcattcttttaggatacttatgaccttttggttggcatggacccttcgcaatatatgctcttctgacagcatccctaatgtttgcatcaatttgctcaattggcatgcgaagaccaggatcggctataacttgatcgacattattgatattgctatctcttaaacccaccgattcatttgcattgctaccttctgtctctaatgatgcttgtccctcctcaacacctaatgtttctgattctataacaggttcttgggaaggttggtttggtgttgatgaatcagttcgtatcaaaggtgtaggagccggacaataaaacgatctcaatgtttttgtcctcttcattctttgattttggattttaatttcaatctactatctgtcacagaaacatttaagtatttaacaatctagtatttagctggctgtttaattattaaaaaatctgagaagatgagacgcacgacgcacctgggaggatgggacctggcaagctagccgctggcgcgcagtaccgccctggcgtcctatgccctgcgcctgcaggcctgcagctgcactgctgcagtgctgtctagtggccgctgggcatgggcagctccctggctggccggcgtgcttgctggttgctgcagttgcagacttgcagtcgcacagagctcacgtgccgacgtgcggtgcggcgtgctactgatgctctacgcggctactgctctcgcgggtcgcggcgcgtgacggctgggcacacacggatgaactgttagggttttttttccccaaaatctctactatatatattaaaaaaaattgggctacgacccgggccacggcccaggtggcccaggcccaatatccgcccctggctggaacatggccggcttaatttgtagtatagtacctgttgtgataaaactaccgttctgtttgtagctgtctatgctttcatatacagcctcggcacatgcaggtctaacgtggatgtaactgcctgcagaacttcgaggatttcgttgctggccatttccgcca

SEQ ID NO: 560 - DNA, 1809 bp, Zea mays
  Intron number 1 from transcript GRMZM2G081075_T01 (locus G RMZM2G081075) derived from phytozome v7.0 (chr-ID 5; pos 1 30359469 to 130361277)
tacccgcctatccaccaggtgcgccccgctccgattcctttagtgccttcgtttcgggatcttggcatgttagccctaccaaggctgaggttgcgtgatctgttgctacttccaatatagggttaggatctttgttgcttgtgctcgcggttcttggtcatggggagacctggccgcttaattccccgcgatctttctgtcccaggcatgcgtaatcggtacatttgataggggaataactttcctttcttcatctatcgcaaatgcgtcttgcccatcctctgcatcctgcaaaccaccgatatagcgggacattcgatttttgccacttactgtagcactcatttaatttgtgtcatgacatcatagtcactgatttggtaaaaaatttgccacccacctttaaatagtggaaaatagttaaattttccatatagctaactgtgtgataattgcagtttagatacagagaatctaagatattgtaattgtctcgaattatcgatgttgtcaatctagtttccttccatatttgtttgtagtaatggattgtgtttctgttcctcagtggtctctagtcttcgaatgaaatcagtgtgccgcaaggagtagcacctcgtttgagtttatgcttgtcagcttgtgcctggaatcagaatgtggggcagagcattaatagatgaggattgaattagcctcgtcattcatgtcattcgtccattcaatgcttgaagtgaatttaacactgggaagcaagaatgagggttagggcagatgtttatgaagtgacgtgttcctttggaagcaacatctatgcccttctatatctaataaaaaaatcccaacagtttccttttctagtttatttgtgtttttatggatgctgtgtgtgcgtgctttcatgcccgtacccaagaggaagatacaatgtttgcaaactagagaagtagagatgtccttttggtttaatcaggtcaattgttctttaagttactgccatgtattttagattcctctgagcctgccaaattctttgtggattactgctattgcagtattgcgtagttcccacagccaattttgtctctccaaaattgaacattttaataattgacaattgatttacttgacgctctccttatatattcctcaccagagtgcgtttcaataaccttatgtattgataagattttattaatgtcttatgatactttcctgaatagcatacaacgattccaactgtgtctttttgcagacacaaatagcacaggattcattctaccatgggatgctctaatgctttcatgtttgattctgaactgaccagtaaaaatcttgaccaataagtttcctgttgcttgataacttatgcagttccctttagtagtttgggtgctgattatgcatcttcaaaatttgtttttgaggtccttttcttgttagtctatatataaaattcccatttggaagtgaagaggaaaaaatttctatctactttgtgaaaatgatctgcttgactgaccaatagcatttactagaaggggcaatctttcatatccgttgtagtagtataatcctattttgctctactacattgaacaatatatatttgttgatatatctattttctgttccctgttattcttctcttctggaaaccatgtaatgagaaaatacatcctagttttagcatttattatatgaaactttgaattttctaggtttagcatttgaatcccatggttcaacaatcgacataaaaattagcctgttacaaactgaaatgtttccctatgttacagtgccaaa

SEQ ID NO: 561 - DNA, 643 bp, Zea mays
  Intron number 1 from transcript GRMZM2G136139_T01 (locus G RMZM2G136139) derived from phytozome v7.0 (chr-ID 4; pos 1 63446421 to 163447063)
accactcctccggcgaagtgctcaactacgaccaggtagcatgatataaaacgacaacggcatgctgctgccttgctcggacacactttcttgctctgtgtctgcgtcgttgttgcttcttgggttgtcagactctgttactaccttgatcgagattcgatcttttttggaaagtaaggggattatggtgatcaagatagacatttcagactatatggttacttggaagaacgggcaagtggttagtccaagagtagtatggtgtacaccacatgttccctctcataaaaaaatacttgtgattgattggtatagtttcttgtagaatacatatttgttaaaattcatcaaatttatgagattatgtaggtgcatttgaatacaaatgtacacacataagttatatgtttccaaacaaactaaataatctttttttatgtttgtagtttttaaggtttaacaaaacactatcctaaatgatatgttctctgaccagagggagtattatttgaaattatgcagaataaggccgcaaacgtcaagcgtaatattcatttgtttgattgtcccgtgacctgttcaattcaattgtgcgcgcgctcgtgcaggtgttcgttagggacttcgtcccgagcgcgttggc

SEQ ID NO: 562 - DNA, 2541 bp, Zea mays
  Intron number 3 from transcript GRMZM2G017351_T01 (locus G RMZM2G017351) derived from phytozome v7.0 (chr-ID 2; pos 2 09921852 to 209924392)
gagcaccggagctgtgtggatcatttttctcaaaggttagtggtcttctgaacatatttaaatttgatgtcaatcatgagacaagaaagatgttcatcatttcttttcatttttgctgttccaatagtctaatttaatgtggttagtactccatccgttctcaaatatttgtcatggttcactttttcccacaactcccgccatttgtcttattccaaaaaccctgtaaattactccatttcaaaatatagaccatttgattttttgaccctaatattttttgtctttattttgatatagtttatcatataatatattttaagcatgacttgaatgtttctatatatttgcaattttttaataagacgggtgagtcaaacttggtgtcgaaaaagtcagatgacctatagtttggaacggagggagtatcactcattttattgtgatttgctctatcatttaaaggcagtggcaaatgtttaaagttttgggaaaaagtcaacagtggcaaatatttaagaacagagagagtagttactttccaagaatgcttcagttctgaccaggaaaacaaacatccatacatttcttcagttgaactatcagctataaaagattggcatccagatattagttagtttatattcaaccagtactagaccgacaactgaagacaagttccttcaccgttcatagttattgagattgctgcacttagcttcggatcattcactgttcaaatgaaacattagactgttcattgttttaatggtgcttcaatgccattctgtattaaagactacctagctctgtatctggtgcctactttctttcttggctcattggctgaaagctgaaacgatagttgagtttgatgaacctaaagattaaacagccatagaaaacaaagagggtataatcctttcatgtctaggatgtataagtccaacatattaattcaacacaattttgtacatggttcttaaggtggtaagacaaggcacgtcgagcgccaccttctggacgcctacaaacaccaaaatggataacgccacaaaaaattcagaagcaaacagtacctattggcagttcttagcattcaattccataataataagttgagtgctactagagcactagcgcccaacacaaaatagcaaaataacaaatatgaaatgtttcatctctcaatagatagaaactagtctctaatgacataatatggcatcaaacaacaggcaagagattgtgtcctctgtttttatgcaacccaaataaacaaagcatgtccatctttaaaaagcagaggaagtgggaggcgagaggaccagaggcatatccggttggaggtttgctgagagcctaggaggaatcggttgtgaccctggcaaagttgtgtaacaagttggtgggaactcactgcctggtggggaaggggccgcgtggggacatgtcggtggggaagggtttgcaccgcccaatgaagaaggcgcagtggcttgcgtccaggtctcctcttgctttcttttcccctttccctccgcagtcgtctaattctgcttgcgtcctctctcggctgcagaaggcatgttcgtggcttatttcctctctcagggccaatctgatgcgtgaagtgtttgctggatgccaaacaggacaaggcggatacccaggacgtcaaaggcagacaccatatgggatcaagtcatggtgaccttgatgaccagactttgggtttgtttggttcaactttttttctgacgagcttttatgagaatccagattcttggagaatttggctgtggggagaatctgaacatcgtgggggcttacgtgcagaggaagatgaataggtctatagggtttataatctaggaagtgacagattcctcccattgcgacgactcggtggattatgggactgtttggttcgctgcctaatttaccacattttgccacacttttgtgcctaaggttagttcttcaattcgatcgactaacctgaggcaaagtgtggcatagttagccacaaaccaaacaggccctatgtattcatgttgatttggaggattttcaccaaagcgattcttatagaagcggactgagaagcgaaacgtttggctgctagaaaccaattctgacggttagaatctgattttaagatgaaacaaacaccccattttttcgtcgccaggacgccttggtgatgccttaagaaccatgattttgtagttggacataaccaccttgattgaccaccttataatccaaacttttcccagaaaagaaaaacaaaattcattgttagtgacacacgcgttcatgaatcgggactgaactttcactcttgtgtcattcttagtttacacatttcatcacctgatgagttaatatcgtgtggttttagatctcgtactatagcatgctcttttgttcataagaagcttcactcttgtataattgccttgtatagtttgttcgatatctgaggaatactgttgaacattgtgtttttttacagtatacaccagcgatagatat

SEQ ID NO: 563 - DNA, 7539 bp, Zea mays
  Intron number 1 from transcript GRMZM2G167138_T01 (locus G RMZM2G167138) derived from phytozome v7.0 (chr-ID 1; pos 3 1489610 to 31497148 reverse strand)
ggcaaaacctgctggtgcgcgcgacggagcctgaggtagttcaccaccatttctgcatggagattttgttccttttcctgaacttttggtgcaccaggattcagaatccgtaggggattcttttctaatcccctttagcttattcttttggttaagttccgcttgatcgcaaatgcttaaattggtcagaatcggaagagaaatgaggaaactacacttcgattgctcagttcctgggattcttggcattgcgtggcctttgaattgattagcgtgtgcttctgtaattgctggattgcaaatttaatagtcacggggaaggaaaataccaatgaaaaagggggacgctgtacaacaaatgaaaaataaatacgaaatacgtatcttggaataatgtattggatgtagtaggttgctacacgcaacagttttgaggactataggtcgattgacttgtaaacgttacttatggaatgctcccaaaaaataccttttttgctcttaaaaagtacttatggaaatgagccaaatcagttttcgtgaaattcatttatttttgtaagtacaagatacactgatgttgctttgattgagagctttgatgtctaattttattggtagtgggcaacttctctaaggacttgattgaaacagttggagtggaatgggttacacatgtttgacggaaacgtgaatgctttagactttttcatctattgttgtcataggcattaggttatgggttactcaatttctaatccaccctagttataaaaaaatctctgtttttttccaatcaaaatagtgtttttcaaagatttagaaaaattcttcagtattctatttcttgttaatagtaattatacagccagtattcaaatgtggtgtagttccctactagtttatgctcttagaaaaacaaagtttagctgcaacaaaactttaggaacaggaaaagaggatatctgctatacttagctgttcagcatgaccattttttttatttggaacaatacaagtgaagtgagatgaacaaagaggggaactgaaatttagataatagatttagcatcattgctaaaatatcccaggtgaggccatagcaattctcctggacatgtgatgttttttcccttgtggactggatactctctctgctccaaaataatttaattcctagaatcacctaaagtcaaattatgttacatttgatcaactttataggaaagagtaacgacatctatgacaccaaataaattcattatgaaaatatatttcatgatgtatgtagtgatactaatttggtctcataaatataaatggttttttatattggtcaaatttaaaatggtttggcttaggacaactgtagaagttaatttattttggcatggagggagtatataaagagatctaagctctccaatcatgtcagaacatccattttgaagtaatggtgatttttttctttctagttctagtttatattcatgttgtctttctaaaaccactcttgatacatatcttgtcatttgataagagatgtttgtcctcgtttttcctggagtaattctcctaaaatgccacactaatgggattatctactaatcaagtaatgaacaattaatgacttttttggtggggctgagaagtgtatatggacaccgtatggtgatcacagggtcatgtacacctaccgttgaaagcatcttgtgttgattctgacttccgagaaatgacatgctccttagattctctattcaatatcatgtaaaactggtttaggattgatcatagttggcaggtatagaagatcaaggtttatgcctgtgccattaaatagaatgccacttcttacaaattataatatcatgttcctggtggacaaagtcaggccaccctgcccttctagcaggttccgttcctggtggagtcaggctgctgcatctctcgacaaagatctgagaaaaggtttcaataccttggtcatcttagtcacctggattttgtggaaacacaggaacgcctgcgtgtttgatagtgtccaacctcaagcacaggcggttctttctcaggtggccgccgaaggtcacatgtggtgtctagctggggctgcaggtctgcataaactcctcttgaggagggagcccccttagctgctaggtagttggtcgtggtgtcttgttcgttgttttcaaagtgagttggtgtcttgtgtttggtgttcggggagttttcctccatgtgtacttgatttttctatcttccttaatgaaatgacacgtagttctcctgcatcgttcgaaaaaaaattaaatagaatgccacttcttacaaattataatataataactgttaggcaatagaatatgccatctgtggatatcctagctgctatagatagcagatgtaaatcagggatagaatcctagctgctatagatagcagatgtaaatcagggattagttgctagatatagcagatgtaaatcagggataaatcaggggaattatccctgccttgtaaagcaggccagccagctctatataatagaaggtgccccctctcattgaggtgtgaccaattgccctcaaccctgtttctctacatggtatcagaggcccaggcatcgatctaatttcccaacccccccctcaccttctctcctccagccgcgccgccttaaccagaccgcgccgtctgccctctccttccccttccctgcgccatgagcaccatctccgatgctgccgattctgctcctgtcctctgcccctttgccaccatcaacatcaagctccacgtccccatgaccctggagttgaaaccttccaactacaccaagtggtcgacgacgtttcaggccacgtgtgggaaatttgggctgctgcatcacctctccacttcgcgccccaccgatgcggcatgggcacaggctgacttctgcgtccgcggatggatgtacagcaccacctccgacgccgtcctcaacctcgccatgaccgacagcacccagacggcgagcgccctttggaaggccatcggcgaggtgttccaggcaaacaaagctccccgcgccatcttcctgaatcacgagtttcactcgatgactcagggggacctgtccattgacgcctactgcgttcgcatgaaggagaaggccgacgaactacgcgacgttgggcagcccgtatctgagcccaacctcgtcctcaacctgctgcgtggacttaacgaggtctactccggcgtcgccgacaacatcgccggacagcaacccctcaccctcgccaccgcacgccatcagctactcctcaaagagctgcggctgcagaacgacgagaagacgcgtgctgctgctgccctcctagctaatgttggtggttcgcagcagcagcactagcagggcggccggcgccctaataccaaaaaaggcggccaccagcccttctacaacacctctggtagcttctccaacaactccggcaacaacagcaccaacaaacgtgttccctggggctttaatccctggactggcgaacgtgtggcccctggagagcgcgtcacccctcctggacagcgccgccagggaggttctagtgcccaggctgggcgcaccctgggcattctcgggtcttccccgcaggcccacaccgccttcgctccactccaggcgtcctccagcagctccaacacctccaccagcacctgggatgcagcaggcctcatcgctgccctgcaaaacatgcaacttcagggcaactcgccctgggttgttgactccggcgcctctacgcacatgacgtcctcggatggtatgcttactcagcgccttcccccctccatctcctcaataacagtaggtaatggcactagtatacctgttatgtctagaggtcattccgtccttcctacacctacaacaaattttgctcttaataatatccttgtcgccccatccatagtccgcaacctgttatccgttcgtcaattcactcgcgacaacaattgttcctttgaatttgacgcccatggtttctctattaaggatctcaggacggaacgcgtgattctccgttgtaactgcgacggggacctatacaccatgcctgcctccacacctggcgctccacctcatgctctcctggctacatcgtcaactctctggcatcaacgtctcggtcaccccgcccccgccgttttagagcgtctcaataaacttcatgttatttcctgtaataaagtacaacactccctatgtcactcatgtcaactaggcaagcatacgcgtctaccttttagttcttcgcattccataactcatgcaccctttgaactcgttcactgtgatgtatggacttcacccatcaatagtttgtctggtttttcatattacttggtctgtttggatgattacactcactactgttgggtttttccgctccgaaaaaaatctgatgtccaccaacacttagtcgagcttgctgcctctgcccaaacacaattcagcctccccgtcaaatgctttcagactgataacggcactgaattcgtaaacactgccaccatcaaattcctcgctgctcaaggcactcaccttcgcctctcctgtccctacacatctccccaaaatggcaaggctgaacgtatcatccgcacactcaacaattcaattcgcaccatgcttctacatgcttccctaccacccacatattgggccgagggactcctgacagcctgctacctccataataggcgcccatcctcctctattcagcatgaaattccctatactcgtctgcataatcaaccaccaacttatagccatctgcgtgtttttgggtctctctgttaccccaacatgcaagcaacctctaaacataagctcgcccctcgctccacggcatgcatcttcctaggatatcctagctcacacaaaggttaccgctgtctcgacctatcaacccgtcgcatcatcatctctcgccatgtcacattcgacgagaccacctttccctttgcagccacctcagacgtctcgtcctctgcttccctagaattcctcctcgacgacgatatggtttcggtgccctgtcctactgttgttgcaggtgggactccatcctcgacgcccgtggttgctccatcccactcggatgttgagcaaccgcccccagacgttgcagcctcacatgactcgccttctgcgacaccgggcgggcgtggtcccgtgcccccgcctggacccgacgtggttcccttcccacgagtctacgtccgtcgttcccgtacaacgtctacgtccgagccggcagctgtcccagcagcccctatgacttcatcgcctccgccgtcgccgcgcgtcactcgcaccatgacgggtgccattcctcgtgtctgctatgaggggctggcggccacgacgtcatcctcaccatcgccgcttccgacaaactaccgcagcgcgctggctgacgccaactggcgtgccgcgatgatggatgaatatcaggccctcgtcgacaacaacacctgggagcttgttccgcggccccccggagccaacgtcgtaacagggaagtggatcttccggcacaagttccatgccgatgggtcccttgctcgccacaaggctcgctgggttgtccgtggcttctcccagcgcgagggcgttgactacgacgagaccttcagcccggttgtcaaaccggctaccatacggtctgtactcagcatcgctgcatcccgcgcctggcccattcatcaactggacgtgaagaacgcctttcttcacggccacctcgaggagaccgtctactgccaacagccgccaggattcgtcgaccctggcgctccagatcacgtctgccatctgcagaagtccttgtatggcctgaagcaggctccgcgagcatggtaccagcgcttcgccaccttcgtccggcacctcggcttcgtcgcctccatctccgacacgtctcttttcgttctacgagaggggacaagtctcgcctacctactgttgtacgtcgacgacatcatcctcaccgcctcgtcgtcggccctgctacaacgcattatgactcggttgagctccgagttttccatgacggatcttggcgccctccaccacttcctcggcatcgctgtcacacgctcctccgatggtctcttcctctcccagcgacagtacgcggtcgagcttcttcagcgcgcaggcatggctgagtgtcatccgacatcgacacctgttgacactcacgccaagctatctgcgaccgacggggatctactgtcagagaaggatgcatcagagtacaggagcttagcgggggctctccagtacctgacgttgactcgtcctgatctggcatatgctgttcagcaggtgtgcctcttcatgcacgccccgcgcgagcctcaccgtgcgctggtcaagcgcatcttacgcttcgtccaggggactctctcctcgggtcttcacattggcaccgggtctgtcaccaagctgactgcctactctgacgccgactgggcaggctgcccagactctcgacgatccacctctggcttctgtgtctatctcggcgacaatctagtttcatggtcctccaagcgccagaccacggtgtcccgctctagcgccgaggccgagtatcgggctgtggctcacgttgtggctgagtgctgctggcttcgacagttactccaggagctacacatccagctgccgtctgccacagttgtcttctgcgacaatgtcagcgccgtctacatgacggccaaccccgtccaccacaagcgaacgaatcacatcgagatcgacattcacttcgtccgcgaaaaggtggcccttggtgaaattcgggttctccatgtgccctcctctcaccagttcgccgacatcatgactaaagggcttccgacagcactctttcgagaatttcgatccagtctttgcgtccgggagcctcccgctgcgactgcgggcgggtgttaggcaatagaatatgccatctgtggatatcctagctgctatagatagcagatgtaaatcagggatagaatcctagctgctatagatagcagatgtaaatcagggattagttgctagatatagcagatgtaaatcagggataaatcaggggaattatccctgccttgtaaagcaggccagccagctctatataatagaaggtgccccctctcattgaggtgtggccaattgccctcaaccctgtttctctacaataacaacaaagtcttttagtcccaagggtaggcaaagttgaaacccaacaaaaatcataagtcaatgttcattgttcaggcacatggatgactgttttgcatgcaacttcctacaaattatatctcccatttttccttttgtttctttcaatagtattttttctatgtgccctatactttgcttatgattttgatgctgtcctaggaagcacatacctgttgaatagtttgcagataaattataaacaattttacattgtggacaggatcttgccaggtacacaggtg

SEQ ID NO: 564 - DNA, 4085 bp, Zea mays
  Intron number 1 from transcript GRMZM5G870139_T01 (locus G RMZM5G870139) derived from phytozome v7.0 (chr-ID 7; pos 1 09048186 to 109052270)
tgacgaactgcaataacaaaggacaacacacgttagtcggcagctacaaaactgtcatagatagattatactgcaagaaaattggtaaaacatcaaatgatatagcaagggtattgtactcgagcttcccatacagcactcaataagttctattaggggtggtagatgaatatccagtgtcactgaaacaccagcaccacctgatatagtcacccgctgtactcacaaagaccaaacaatacacaatatgcactgccatgaagaccactgtgtacaggctacaaagcccagacaaacaggttctgctgatggatccctgtgtcagcaaccaaggttgttaatgtttctgactcaatggttcaccaatcctacctccgttgcaaattatagttcactttggttttgtcctaaatcaaaattatctaactttgaaatatgcaataacatctaaaacaccaatttagttttattaaattatccaaaatgtatgttctctctctcaaatatgcagtagatccatggaataaagtttgataacatatttatttggacttgtagacgtcaatatatttttccatttttttttagaaagcgcacgagaactacacatctttatagataatagaaagaacaagacttacaaaaaaagagaaaaaccaacaaacaaaaaccccacggatacacacacaacgcactacaaccaccagagactacccaggtgccaagggggtgtcagctaaagcaagactacctagctgcttagctccaagcctccaaccatcacccaacaagagagctcatcaaggaagtttctcagcaccgagctaatagagggggatatcttatcaaaaaccactctattccactgcaaccagagacaccaggcgccaagcatgatgacgctgttgatacccttcttgtctttgtggaccttagagcatacctcaccccaccaattagtaaaggaggaatcatccgaacccagaatgagatgccctaacccgaagggagacaagatgctgaatcaaaaatgtcgagcaaagacacacgaagtcaagagatggtgaattgtctcatcttcctgatcacacagagggcatgtttcagggtgcggcagaccattcttgtgcagcctatctgcagtccaacatttgtccctcatggccaaccaaagaaacatcttgcattttggaggtgcccacgatttccataatctcttccatggctcaaacgtgatggagcccataaataagatcttatagcaggattgcaggaagcaggagagaaacagccagaggcctcatgcctccattcgtgtttatcctcatcgtcattcagagctacctcctccaaaaaatcccacaaaactagatattgctgaataccaacaagagagagtggcgacctgatgtcccttacccaagatctgtcctcaagagcctctgcaacagttcgggatttaatagctcttttgtcaactttataaaacacttccggggccagaatcgaaatagaattctcattcagccacctatcagtccagaatcttgtattgttgccatttccctctagtgataaccgagcaatcaaacaagaccttgatctgtgactggatggggaggtccaggccgcaccgccgcaccacggtctatgctgatctgttttctgaagccacagccacatttgcaacgcccaacccttataaattaagttggggatccctagaccccccagactcaggggcctagtgaccttctcccaagacactacaattacctccattcacctcctttctgcccttccaaagaaaagccctttgaatcttatcaatagatttgattacccacttggggacatgcaaggcaatgagaagataaactgggatggcagaaaggacaaaccggactagagcagttctcccagcaaggttaagaagggaagccttccaactaggtaaccggtctgcaatcttttcaacccaaaaccagagatcagtcctcctcagttttttgttggaaattggcagccctagataagtacaagggaatgaagcagcattacaatgcagcagctacaacaatctcgcaccaaagaatcttcacaataaatggggatgacacaacttttttgcatgttggtcttcaacccactagcttctccaaaacagtctaggatcaatttggcacatctcaagtcctcctcttgtggtttgataaagaacaccacatcatcagcatatagcgagagccttgaccttagattagcaacccctagatcgtcgtggcatcaaactacttccaaatcttggtcaaagttaaagtagtttgacttaggacaaacccccaattacaatttggaacagagggagtattaactggatgaatttgataagttggtccaccaatattttcatctcccataaccatatcggtagaaacccaaagaatgtggtcatccaccaatcttataggatgatgccatgttggaccaatctagcataggatgaaacaatccctcaaaccaaacaccagagttattatctggatctccttccgcaaataaatgtcattttagagttcacagtttccacttccaggatacaaccaaacctggtaatggtttgattaaaaccagattgactggttcagtttcttaattgggcctttatttatggtttgggtagaaatggactggagggcctaatgggctcgttcagtttgggtaatagctaattagctatgatggactggttgggtttggaattggtttgagatgttcgggttagaaacagtttgaaaccatagttcgactagaacgtttgatatagtggaaaagttttccctcgaccccttgatgcctcaacagcccatagtccaaccacaccgccatcagggcctcgcggtcacgtcttcattgttcgccctcgaccccaactgctcagcaccaccctcaagatcagtgcaggtggatgtttcttgaaggacatacagtttcatgcaaggtcagcttcttatctcctctattgcttattaaatcattttaatgcttatgctctaatctgttgataacatttgtggataattttggcgcattcctattcctatctgagatttgggattcatttggatatatgtttcttgagttattgatgcggatcagactagaactctgagtttagtcttcccatccactcttgagtattgaatcatgtttatctgcctttgtgtcaaaaacaaatccttcagaaagtttgtgcatttaatctgtccttgtttatctgtctttgttattgcggcaaggctgttgcattcaatcatgacacctaaatggaacattcttctaagacattttgtccttcagaaaacatgttgagtggttcggagtatactgattcattgttttttttcttattatactaaaaatacttctttattctgagcctcttgttttgataatgattgaatgctaataccatacagtggaaccttttgcggtttttcctattgattgataatgactgagctcgtggtatggctctctgtctgttcataaggacagacatgttgtgctagtgttaaaaatctgatcaacctgaacccacttgataggattaaaatagttctatattcgagcacaagttgttcgatcataagattacccagaaccagccatgcgtttagataccaacactgaatagaacttgctgttactgctacaactagcagttatgttttccaacttctttcgagcactctttagttttaagtttctctcataagtaatttatttcaaataatctatagctgacttagctctttattaatttatctccgttgcagtactgagtgtgtaaagagtgaaaattgtcagttaaataatgtaattgtcaccaagaatataatatcaacaaagtctatatcaaaacaatatggataccagaaaatgaagtatattcaaatgccaccaagaatggaacatcagcatattctgaatcaagaaaataatgctaccgaaaagcacgacaaattttggaagaaacaagcatggtacctcatacagcgaaccggtggcctcccctggtagga

SEQ ID NO: 565 - DNA, 13599 bp, Zea mays
  Intron number 3 from transcript AC205615.4_FGT002 (locus A C205615.4_FG002) derived from phytozome v7.0 (chr-ID 4; po s 74754417 to 74768015 reverse strand)
agccaaggaggtaaatcactaagcttaatctgcatttagtattcaaggtcataagatgatactaatacaacttgtatccccatttttataggtgctctagccaaagcgagtgttctactctacccaaaaactttaggtggttgtgctatctttaatggttcagttcctataagtaaatcattcgctcaaaaggtgccatctgaatctagaaaggtgataacacaaagatatatgtgcttatgtttagaacttgatattcttactcttatataaacctaagtatgaactcttatttcagactagtattatggtttcatggaatggtagatggtttggtcttattgaagtagactggtcttattgaagtagactaagtggtggaatccgcgggttggtagatggaatagcagatcatccacagactagaattgtgaggtgggccatgccatcggataagcaaccggtcttgtttttgctttgtcgtgcagctgcctcctaacgctagatctgcgcttcttgtagtttggtggtggtgggaggatcgtccccgcgagtgccccgcgtgcgaagcgacctttggtgctttccgtttactccacctgttggggacttgttcttaactgctacgaattaagaacaaggcaacacagaaattgttaaatgttatagtccttcgtccttcgaagcattatttcccttaggatataatggactccggacgaaggttatgaaggtcataccttcataagcaatcaaataatgaagaaggattcatataaaatatgaataataatttaaacacatgattattattattatttcatttctatttcattataaaaataatgacaaattacaaatgtaccttcaacttgaaggaaagtaaaaataccagcgtgaagcaaaagcaaatgcccaatgcgtgattacaggaacgcgtgaacagtacaggggtactgttcacctatttataggcacaaggcgcagcctgtgtataattacatttttgccctttacaatgaactacaataatgacacagaatatcatgggtctttgagtcatttcatctttaagtcggttcaccccttcgtcttgagacatgttgtcacacccggttccagggggtagaaccgagcacatagcatatgtgtgccaggatccatttccacacatatgttgacgtcacaagtgtagtatatcaaaagacaatgcaataaaggcgtaaagagagtataatactttattacatcatctgaaacattgtatctttaacaagtatcacatcaaagtaaggcggaaataaacaactgggcaatctcccacaggaagatgaccggcgcatcgttagacttagaaatcatcgtcgtcgataaaatctccatcaaagtctccagcatcaccctctgatcaaaattaagcaagggtgagctcacttatggtcggggctcagcaagtgggggaaaactaatgcaggtataacaaggtgaggctaaggttgagctttaagcattctagttggtcaacattttattaacaattatcccatttaaacaaagggaatatgaatataacaaaaacacttaagtaaaaccacttaagcaaattattggcagatcatcgggatctcaatttaattccatcttcaagttcaattatcatgtgaggagtccaggtcgctcataaccgggagcacggctgatatatcagttttacactctgtagaggtggtacaactttacccacaagccatgtatcccatctagcccgggttgatcggacccttagacactgccgaggtgaatggctagggatccattatgaggcttttacaaaacacacttaatacgaagcaacccgctaaggtttctaaagacgatggtggtggccccctgggtgaggtaccttagccaagaatacgtccccatgttaacatgggctgccagcacctaccgctccccctcttgcctgtatttcaggtaaggttgctaggcactaagcatatagagctaattaccaaagccctccatgatagcactcgtggttgcactgttatcctgggtggtcactccatgttccaattaatttgaaataatgttatcttaaccatcgggttaatgtcataattgccaattaaatctttggaacattaaaaccaattaatgagtgacattaagaaatcatcaagttgagcggtggcacaaattttgcacagcttaataattttcccaggttaaacaaggaatacaggtagtaaatctagaaaatccttaattaggtaaacccatcaaattatgcaacatatcaaaaagtaaacattattatatgcaatgagtaggtacaaacagaatatgcagagggagaatccacttgccttgctcaagcgagtcctgcggattgtcctcgaacgagttcggttcgtctaccgcacagtcggcttctaatagagtcgcatagcgcacatacaaaaataaaacatacacaaataaataaacatgcaccattacataaacatacaccaatacattattaaacacacatcgcactaatcacatcataaattacgtactaatcgcgtaaatacttattaatttaattatagctattattgtgagtcctaatggtgaatttatgagtgggtgcaataaatacagttttaactagtattaatttattttaacatcatcaatgaaattaatgacaattatcgtcttttaatagtaataaataaattaataccttttattatttctaactcaaatttagtatagcaaaaatgaatttaacattctaaaaatccttataaactgctaattggacattttccaacataagcgaggttattttgacataaactagtactctaacaattttagtgctaaatttatgaacatgtttatttgactagcaaaaatctattttccatcccactaatgatattttctcctttctttataaaaagaaaatgttaataaaatagttaactaaatcatctagaattcctatattattcatatgacatgagttctataccattttctaaatccattaaaattgcacctataattctccaaatagtttctaagtttattgcgaccaaatctacctacaataattcctatctattgtttttatcaccaacgtgtgactactaaattttgtcatctctttctaatccaaaaatcaacgcatcgatgaattatcacagtaccaataatcgcatgaatctaccaaacaattttataacgcatatacacataaattgcgaatcacacgtgttcatattacaacaaataaaatatacaactcatgaatcaaatcaaaaagtacttttataaaatacacaaaataatttgggtcgtcatcaaccttgggttcgcacgtgcgacggggagagttcgacggggttcggccgggtggagaaaagcaggggctcgactacggacggcgaatgcgtggctccggtgaactccggcgacgaacggcacactccggtgaactccacgggctccggcgacgaacgacaacgaacgacggcgtcgagcagtgtactggcgagctagagagatggagtgagcttgggtaggcaggagaaaggagagggtctctgctgcctttttatggagcgcaggaggggagaagaaaggtctgccagagagagcttcaatggggcgctggttgtccttcatggccatcaatggcattgcagtttcttctcggcatcaatggtgtgaggaatggaggaggagaaacggagggattaaagctccataacacgcgagacgaatggacggcttgtcgcgcggggtcacaggtgtcgcactcgggctcgcggcgtgggcgtcgggcgctcggacgtccgctcggctgcgtgggcgtcgggcgctcggaatggcgcgacagaggcgcggctcggtcgactcggccggcctgcgcagggcggggcgcgcggcttgcgtgcgagcggcgcagagcaggggcgctcgggcgtccctggcggcgcgggctggagcgaggcgagtggagagagagaagcgagtggggagagagagaatagaggagagagagaagagagataggggagggacacaggcggcggcggctgggaaattcccaggggcgcgcgcgcggtgtgcgttaggctagggtttcgtgtcttgggcccctagtgggccggttagtgtaggatttgtttttttttctaattctgagatgtatttttaaagagctcggaaaatcataaaaattcaccaaaaatatttataaataaaatactagtttttagactaataattactatattacttaattattattttaattactaggatttctttttaaaaggaagttaataacaatcatccgataatcaatcaagcgcatacaaagaaaatgatcaaaatgcaaataaataactaaacacttaaaataaaattattattaccatattttactaattttattatttttagttgatgggttttgtggtgttacacatgtcactgtgccgaagcttcatagtcgatagcttcggcgctgctttggagagaatctgccgaaggtgtttatttcttaaggatcttcggctacgaagcatacccccaacagtagccccttcgcggtgctagatcgtttttcgtaacgagcttgatccgtgaaaaatcttttaggcttcgggatgtcgaagatccaaaaaacaccttcactgagctcgttggcgagaaacgattaaaataatcgtcgcacgcgcgacccattttgcaccaattacacgctcgccagcgattcaccttctcgaattgtgtggtccaccgttcagcgagtgcgggtgactgtttattcggtgctcgagaccttgccgattcaccttcccacctgcagcactatataaacagacgggtagttgtgaagttaccacagcattcattgctattgtactgttttgctgccaaatttttagtcatagccgaagcttgatcattgtactcagatgagacctcgcttgtgaatttgcttcggcacaagtgtaagagcttcgggaaagacaaaaaagccaacaccaaaaatttcaaataagtcataatcaaatggccagagttcgctctactgcaagagtcgatcgtgagggagacgagactgaagctgttgaaactgttcctatttcagaagcaatgaagcgatctgggttggtaacactggaagatgcccctgctgctgaaacagagcaagctggtattgaagagaccgattctgaagatgattacaacatcgcagtgccgagcaaagcctagccacctggacttcggaaagtccaccatctccgaagctgattttcctaagatggtgaagctgggctattttagcgaagataagaaagagctgattcgcttcggtggagaagaaactactccgaagccagaaaaagatgaaatagtagttttcaagagtttcctcaaagctggtttgagattccctttaaataggatgattgccgatgtgctaaagaagtttgggatccactttcctcaactaactcctaacgctatcgttaggcttagtgtttatatttgggctctccgaagccagggggtggaaccgtttgccgaaggtttctgccgggtgcatgagctacattaccaaaccaaggccagaaaggatggattacatgaaaattttggttgttataattttgcttaccggaagactacaaaatttcatgtgataagctaccgaagcaagtggccggcaggctggaaatcggaatggttctacgtcaaaattgacgatgacaaggagaagctggtgcagagtccgctagaattgattttcggagaaaccagaccccaatgcaatatgacactagaaggtccaacccaaactgcgctggctgaattcagcattatcgcagagcatattggcactagggacttagtgcaggaatttttggctttcaaaatacttccaactatgaaggaatgggctatgccgaagcttaaatgagagaaaaaagaaggggaacttgtccgactgccctaccactacaagtttaagaaatatttcaaagcaccttgccaagaatgactggaaacaatcgaagtaatgtgcactgaaattcttgggaattattctaaaaaagaagatcaattgatgacagcagccttcggcacccgtccgaaacgaaggccaaacagagtgctggatgctataggctttgaatatcctgattatgaacgactcgacaagggtgccgaagggcagaaaagaaaaagggtggttggtactttgaacaaagacgacgaagatcaatcaaagaagaaacaaaagcctaaagcaaaagtattagcttcgaagaaaagaaaggactcgatcccagagcaaaaatcaattgatgaagaagagaaggtttctgcaacatcttctgatgctaaaatagaggaaattctaaaggtaatgactgaaactttgcctgtcaaactaagtccattggggcttcatctgacgaagctttttcatatgaaaaaggagcctacaaagacaaaggcatctaggccaaaaaggcaaaggattgttaccgtgacagaagtgattgaaacaacaccaccaagagctccaactccgaaggtgttgacgattgaaggaacaacagctaccaaagttgtaccttcggaagttgccacaaaagaagctagagccgaagatgccaactacgaagatattaatttagagagcatagcttctgatatagataaaatgctgctaaacatggccgctgaagaaactgctgcggccaccgaagagaccacagccacgaaacccgagaaagaaggaatgaccgaagatatttcggaagatgaaacttttgacttctgaaacttaattggccagaagctaacagaaactgaaaaaagaggaattaaaagagtatgctatatcttgcgggtaccagccgggggcgcttctcttcggtggtattgatgatgaagggttaggctgcatacgagatcaaaccggtgcgaaagttgtcggtactctatcaaagagtatcggcttcccgaagctcgaagcggatataagccgctatcgacgacagcacattgtcggcagcttgttctattctaattttaaggtaaacatcttgtgtctaactcttattatttgtggtaacaaaaatattttctaacgaaggttatttgcccacagagtatacttttgagcaaggcactaaaaatgcagcaagacttagaggataaaaggcaagaagttataattgaaaatttagaaaacaaaataaaggagcaatctgctgctatcgagaagaaggacctcgagctacaaacagctgaaggcttactagtggatgctgaagcaaaaataacagaattaaattcgaagcttctttcccaaacagaaaattttgaataagaaaagctgaagcttgatgcaaagcttgaagccgaagctcaaagaaactcggaactgaaagaatctttgaaaaatcttcagaataagtgtttggagttcagcactcgatgcattcaccagttaaagcaagtgtttcattttgttggagccagtagtgaagaatttactccttcggctgaagacctgcctgatgccttcgagcacattgaaggtgaaattaatgatcttgacgaagttatagctgggcatagcgacttctgtgccctggcagcttcccggggcacagctgttgcctttttgaagtctggctgtgaacacggcaagattgttaatagacccaacttcagcctgtcaccagcagacctagataatgttcccaatctggctcggagtattgcaaatagatttataaagttagtatggacaaagcgtggtcggagcaaagctggtgacgaagctcggagccacctcaagctgataacaaaatcataccttatgcttaccttttcctttgaatttttgaatttagcttataataccttcgtgcagattgaccaagctgaagctgaagctgtagagtagaagaacgaagctccagagatagtatcgaagcttgaataatctgtaaaagtagctcaaaaagcttctgtagtaacttgtataaagtatgatgtaatatgagtcttactctgtaatataatcttacttttccgtccatgtatgaaatgctttggtgtggacaaaattaatacttttgagccataggcgaaaaacaccttcccttctttgcgtacacagcgaagcataaaattgccttcctttcggaactgaagcaagtttgtatgttatgctgatgatgatcctatgcatgtctaagtgaatgtttatgaatgcaaatgtcatgatgtaatgtatcgtgcaaatgaatgttcaaatacatattcgaagccatattcccttaggaatgactcaaatcttctttgtcgcttatttttcggcttcaccgtttatttttcggtgtatcagcgctgactttttgctgtaagcctcccttaggagcttcttcgccttttacttcggtggaatcagcgttgacttttcgctgtaagcctcccttaggagcttcttcgccttttacttcggcggaatcagcgttgacttttcgctgtaagcctcccttaggagcttcttcgccttttacttcggcggaatcagcgttgacttttcgctgtaagctctgcattcccttgggaacgacttttgagcttctccgtgattccttttcttttttctttgcactcgatggtgcgttctcagcttttacatttacatctttgggggattttgctcttatagagctgaaaaaagagaaattacatgctatggccccattaaaaacctttctccccctttagaaaggaaaagggtgccatgaaaaagaatataaaaaattacatcaagctagacataatatcgttgaagctaatccgcattccatgatctaggaatctcgttgccgtccatatccttcaatttgtaagaaccgggtcttgacgaagatactaccagaaaaggtccttcccacttcagctgtagcttgcctactgtgtttgggttggcgactctccgaagtaccaaatgtccaggcttaatattttttagccgaacctttctgtcacgccattttattgtttcggcttgatatttgttgatattctctacagcttgaagcctgatcccttctatagcatcttttgccacagaataatcagcttcggcttctgccgaagccattgtacttattgatcccgctttagcttcttctggggttattgcttcgtcaccaaacagcagtttgaatggtgtaaaacctgttgatcttgatattgttgtgttgtgactccacaccactttaattaattcatccggccacttccccttgggctggttgaagattaacttcattattcctgtcattatgatgccattagccctttcaacaagtccatttgactccggatgccgaactgatgcaaaatggatcttcatgccaatttgttcacaaaattctctaaaagcttcggaatcaaactgcgttccattgtccacggtaatggccttcggcactccgaaacgacagacaatattttgccagaaaaacttttgaacagtaaccgaagttattgtggctaaaggttttgcctcgatccatttagaaaaatattccacttccactacgacatatttttaagttcccttgtgctggtggtagcggacctaacaaatcaaggccccaccttcgcaatggccaagtgggttgtattaactgagttaaagacgaaggttgtttttgatctcttgcacatttctgacagccttcgcacttttggactaattccgctgcatccaaagctgcttttggccaataaaatcctgacgaaaaacttttcccagcaaaggcctagatccaatgtgagatccacacaggcctacgtgtatttcctttcatcaattctataccttcggctctggataagcatttgagtagtggagaacagactccatgcttgtacagctccccttctattataacatatggtcgagctcttgcgtctattctcttgttataagcttcgtcatctgaaagaaaattaccctgaaggaaagagatgatttcagttctccagtcttcactataaataggagatatattgaggaccgctctctcaagaagttcaaccgaaggtgcttttattgtttcaaaaaatacttccgaaggcaagggcagcccctgtgctgctgacttggctagcaaatcagcatgttcattttctcctcgaggaatatttttgacagaaaacccttcaaaggaagcttcaattcttcggaccgtgtctaaatatttctcaagcttcgggtctcttgctttacaactcttgtcaatatgaccagaaataacctgggaatcagttttaagaaccgcccttctaattcccattgcctttaacttccgaaggcccaaaagcaaagcttcgtactcagcaatgttatttgtgcagctaaaatcaagtcttgctgcgtagcaagttttaactttggagggtgcaactaacacagcgactgctcctgccccgaaggctccccaagaaccatcgcagaatactgtccaagcttcggaaactttactcgcttcttcttcttcctgagcccctggcgtccagtcagcaatgaagtctgctaacgcctgggactgaatcgaagacctatgcacataatcaatgcaaaactcattgagttctgcagcccattttccaacccttccagtagcttctctatttctcataatatccttcaatggttgtgaagaagggacaattatattgtatgcctgaaaatagtgtcgaagcttcctagaggccatcaaaacagcatacagcaccttctccaattctgtataatttttctttgataaactaaggacctcggagacgaagtatattggggcttgctttttgacttgcccctcaagcttctcttggacaagtgccgcacttaccgctgagtgcgaagctgccacatataacaacataggagcccctggcgttggtggagttaatgtcgttaagtctatcaaatactgcttcagctcgtcgaaggctttctgctgaactggcccccattgaaaaacttcggctgacttcaacacttcaaaaaatggcagatttctctctgctgatctagatatgaatcggtttagagatgcatgtcttcccgtcaatcgttgagcccctttctttgtgctaggtggttccattcgaagaatagcttcgattttatttggattagcctcaatcccttttgttgaaactaggcagccaaggaacttccccttctttactccgaaaacacacttttctggattcagttttagaccagcctgtctaaaatttgcgaaagtctcctgcagatcagcaatgtggttttcttgcttcgtgctttttacaatgatatcatcaacataagttagcacatttctgcctatctgagagtgaagaaccttcgctattattctgctgaagcttcctccagcattcttgagcccctcaggcatccaaaggtaacaatatgttccgctaggggttatgaagctggtttttggctcatcctccttcttcatccaaatttgatgataccctgaataataatccagcagactcataagctctgatgaagctgctgcatcaactagggaatctatccttggtaatggaaactcatctttcggacaagccttgttgagatcagtaaaatcaatacacatcctccatttgccattggccttttttaccataacagtgttggctagccattctaggtattttacttctctgataactctggcgctgaggagtcttttcacttcattccgagcaccttcggccttgtcatcagacatcttccgaagcctctgctttctgggtctgaaggatggatcaacattgagcgagtgttcaataacatccctgttgactccgcaaagatcattagctgaccatgcaaaaacatctttgttgttgaacagaaaccttatcaagggttttctcctgttcttcggacagttgagatcccaatagcaccttctgctctgctatgtcttcgcataagagcatgggcttcggctgatcagccgcagcagctttctcccttctgtacttgtattgctcacaagcttcagctccatctatgttatggattgcttttgagtctatccagtttccttcggcccttctggcagcttcctgacttccatgaatagcaatgggcccttggtccgaaggtatcttcatgcaaaggtatgctggatgaagaattgcttcaaaagcattgagagtaccacgaccaatgattgcattgtaagggtattccatgtcaacaatatcaaacacaacttgttcagtccttgtgttgttgataactccgaaggttactggcattgtgatcttgccaagtgctacaatctgccttcctccgaagccacaaaggggatgtgtggcatcatggatcttgtcttcgggctcttgcatttgtctgaaggctttagcaaatgtaatgtctgttgcactgcctgtatcaaccaaaacattgtggaccaaaaatcctttgatcacacaagaaataaccaaagcatcattgtgtgggtaatccttgagctgaagatcctcttgagagaaggtaattgggatgtgagaccatcttgacttgatgaagggttcctgtacccctacatgttgtacccttctctgtgcctccttcttctgtttcttgttagccggctctgagcatgaaccgcctgttatcgggagcacaaacttcgaagccgaagcaactccagcttggaacgaagccatcaggtcagcaagtggatgtgagttcaccggaggtgggcgccaatgttggggacttgttcttaactgctacgaattaagaacaaggcaacacagaaattgttaaatgttatagtccttcatccttcgaagcattatttcccttaggatataatggactccggccgaaggttatgaaggtcataccttcataagcaatcaaataatgaagaaggattcatataaaatatgaataataatttaaacacatgattattattattatttcatttctatttcattataaaaataatgacaaattacaaatgtaccttcgacttgaaggaaagtaaaaataccagcgtgaagcaaaagcaaatgcccaatgcgtgattacaggaacgagtgaacagtacaggggtattgttcacctatttataggcacaaggcgcagcctgtgtataattacatttttgccctttacaatgaactacaataatgacacataatatcatgggtctttgagtcatttcatctttaagtcggttcaccccttcgtcttgagacatgtcactgtgccgaagcttcatagtcgatagcttcggcgctgctttggagagaatctgccaaaggtgtttatttcttaaggatcttcggctacgaagcttacccccaacaccacctctccttgttcgatgttttattttttagcttctttttgggtgaaaatttgatttatttaacctgctcggtggattagggagcacgaggacgaagccgctgccagaccagaag

SEQ ID NO: 566 - DNA, 3424 bp, Zea mays
  Intron number 7 from transcript GRMZM2G390160_T02 (locus G RMZM2G390160) derived from phytozome v7.0 (chr-ID 3; pos 1 94928291 to 194931714)
ctagggagagggaacgacgtacacttcttcgtattgtgagtactgtttttcaacttttcacactgaacaaacttttgttcgtatgcacttgcctctataattagtagtcttcgtgatgcagaaactgaattaacataagactttggagccacgaatctgaaaaggaaattgtttttttcattgttactgtttgataaactttgggtcctttacctatagttccctcttaagactatggagatggatctgaaaaggaaattgtgttttttattactgtttgataaactctgggtcctttacttatttcatggatatctgatacttacagttgtgtttccgaattttgcatctatatttttcattcttgttttttttttgcaaaatctgctggtatttatatcttgagaaaattccaaacatttgtatcacccttggttgtacaaaatatatataacctttgctccagagctacactgtggaatttgagctagggtcctgttttggcaaggttccagttccatccagtgaaaccttacgatacaatgaaaactgaaaagccaatgcaacaatgctatatcgacctaggctatatggaatattgatactgacttgttggtggagaccggagaattaacagttatgtttgatctgacctttgatctgctatatcttagtttaaaacttcagtattttctcactgttgccaattgaataatttttctcaagtgtattctgatacacaatcaattcccattgtttgggcaattttatctgtactcttctaagactgtctccagcagcgtcccctaaatttcatccactaaaggaatattctctgtcctttacagaacactctaaaagattctgtcctctatatattctccgtctctagcagcgtcctctaaattccgtccctaaagctacagtgttaacagattcacattttccatttctttttcatttttctatgttttctcggcattcaacgctgcaaaaatgatacgtaaaaattgtatttattaattttgaaattaataaattcgaatccttgcttacggtattccggctgatgccgttgacgaatacgtacgcattggtgaatctactgctcatgaggcattgaaacacttttgcacggccgtccaaaccgcgtttgctccgtattatctccgtgcaccaaatgcagaagatatcgcacgccttctccaagttggcgagtcacgtgggtttcctggtatgcttggtagtgttgattgcatgcactgggagtggcgtaactgcccaagttcatggaagggcatgtttacagggcgtggtaaacatcctaccatgatcttggaagttgttgcgtcgtatgacctgtggatatggcatgcatattttggtctgccaggtagttgcaacgacataaacgttcttcacctttcaaaccttttcgaaagacatctgatccatgcttaagatcattatctcctcttccttgtcctcctttagtttctgcctttcaagccttaatttctgtaggttcaacttcttcttttctaggagcaatttctgcctctcatttctgttcattgaatccaacttcttttcctcagttgtaacaactgttttgtacactgacaggcgctccaaagaaagatctcccatgcgtgtcatgaactcagaatctgacgaagttgtgtccacagatttagtcctctttgccttttccttagaagaatctcgacccagtggcctcttcgatgtgaagctagatggtacagattcttctgcatccacatcgacagtgttagaatgtgtgggattagcgttggcttgctgattttgttgacccatgtggttgtccatccattttggttggtccttaagaatggcccaacagtgtaaaaagtggaaaggcttcttctcaattgctgcaaacctagaagctgccagtgatgtctgccacataaaacaactggttacaacagggacatacttacaaacctacaatagtgatgtcaaaatgttacattaaagatgtaccttgtctgtgtcactgagtccactaggattctgtcggaggactgccatcatgtatccagcaaaagtggaacactgtgttttgatagtatcccatctgctcatcaaagattttgtggacctttcgggcaatgttcctcgtcttgagttgtatgcttcagtaattctactccaaaatccttgacgtttctgccctgtgttaataatgggatcacaactaacagcaagccatgcatggcatacccttgtgtcctcttcagcagtgaagtttgctagcttagttctttgagttggctttttagtaacagctggtgttcttgagccctcgggttgcccatcaactggaaattcagaatgttgtgttgcgataggctgctcgtcaatctggctaaggaagcttccatattgagacatcacctggttccaatcactcccattctatgcaatagaggcagatcaaacatgatataaatgagcatgtagtgaacatgtaacaaaatctgtgtttccgaattttgcatctatattttttattcttgttttttttttgcaaaatctgctggtatttatatcttgagaaattttcaaacatttgtatcacccttggttgtacaaaatatatataacctttgctccagagctacactggaattcgagctagggtcctgttttggcaaggttccatccagtgaaaccttacgatacaatgaaaactgaaaagccaatgcaacaatgctatatcgacctaggctcattaatatggaatattgatactgacttgttggtggagactggagaattaacagttatgtttgatctgacctttgatctgctatatcttattttaaaacatcagtattttctcactgttgccaattgaataatttttctcaagtgtattctcatgcacaatcaaatattcaaatcccattgtttgggcaattttatctgtactcttctaatatctgtatctcatatgtagcgttgctagatactgaattctgcttaatgtaacattaacgaatagtatattaagtgtcttcataaaaaaacttttaagctacataaaagaataatggcaatggttgtatttaacaaccatagagcatgagatctggtacgttttcttttgaaacgaatactcaagtacatgtaaatgcaatatactgacattttctactcaaggttattgagatgcaagtggaatgtgactttggttccttattgtaagtgaaactgcagttgaatgttccagtttcaattctagcagccaacttgaccttatgacctttgttactcttgttttaaacaatgttgagcggtgatgtatttattccagtgaaaactctctacaatgatgataccgatggtactcaatatggttaatatttcatggcag

SEQ ID NO: 567 - DNA, 3375 bp, Zea mays
  Intron number 1 from transcript GRMZM2G055844_T01 (locus G RMZM2G055844) derived from phytozome v7.0 (chr-ID 2; pos 5 375830 to 5379204)
gcagcctctactctctcatccgtaaagttccatgttctttgctcagtatctgagtcgttaattttgtagtacaccataatatcttatatgctgtagttgtttggacaaactaaactcattggtgttgggaacaattctagtacctgcctttacatgttgtactaccactagattattagtggcctaggctggcattagctttctaaagtagggattcttcactccaacaagaccacatattgtatattgaaattcagaagacttgggccacgtgaaaaccaagcaatagaatgtgatcgctactagtgggcctatatctatatgtaactctgtaaggaatgctttattggtatcttttctctgagaagtgagaacccattaaacaaagcatacatgcattgttaagtgtccctagctacatatagagctcaactgttcaagtgcactagacattttatatatattcatggaacgaaaacaaagtgcaaggctgcttgtgatgttttactggcaagtaatcactgacaatagtctggagttatggatgatattgcttgtccattggataatggttagagaaattgtttaatacatttaggaaataacggagtgtatttagcaggcagtgaaaagtttcagttgaagtgttgaacatccacagtacactggttttggggagttacataccttggaacttttgctgctccttaccttttcttttgaggaactagaatagctttgccaacatttagcagccttgtagttgttaaagcgataattgttatatagaagctgacatgatactgatgagtgcttttgaatgtgtggattagaaaaactaaggtaatagtagattttattaatttcttaagttgatttggctgtgagccacattttgtgttgcaaacattattatatgtacatgctagctaaataacacacttatttcattggaaaaaactgtccacaagctataatatgtcaagatatccacatagagatggcactgagtacccgaaacccgaatactcgacgggttttacccgatatgaaggcggatacgggatgatttctctacccgcgggtatgttaatgggtaaaaacctctatacgttgggtagacgggtacgggttggtactacccatacccgtctatcaatgtgtaaaatatacccgcatcagtaccactataaccatctaatagagcccatcttagctaaaataaaactcttctctagctatcatttgtctagataccaagttgtgcaatcatatgatttgttatatatgaagttgaagttgtttttgtatgtttatttaatattttgagtgattgatatattggaatttaagactttcctaacgggtacgggttacccgacgggtaaaaatacccgcgcgggtacggatatgggtaagattttatacccgcgagcataaatgggtaacccgacgggtagaattttttttatgggtacgggtatggaatgatactacccgacgggtatgtacccgttgccatccctatatccacacctttttagttcattcttgaatatttaggtcataaattgcatgagtagattttttgttaattattcttacctttccaaactaggcactcttgacccagcatggctattgtatgaaattaagaatataacagcacgaatatctggcagcaaaatgctgatgcctagtcaagtagtgaacccactaaacaaaacgtatatgtgatgctttatgattttactgactacttggattttttctttgtcaacccactaaacaaaacatacctgcatttataactcataagtggtcactggtcacatatatggtcatctgactaatgatttgtttatattcttgaaagtagtagctgagttggttaggtggtctgagtagcactgctcagatcatgggttcgactctctgtggaagcgaatttcaggctatggttaacaaaatacgccaaagcataggtctaaggtccaacctcggtcgcggttgttctcacattggctacgatgccgctatgtatgagtggggcagggttcgttggttttctcaacatgtgcgagaagatcttcttcttaatataatgacagtacccccgctggtcgagttttttttaggggaggagatgagcgacaggagcctggccgcacctaatgttacagaatcttcattagtacatctcataatgtttcagtagtcagtaaaaatcataagtaaacaaaccttctcaaccaaattctagttttttttcgcaaatacatttcttggttgtttaatattaagtgtctaaataaaataaatatggtatgaacagttgatctatgaacattgtcccgtttttatctccaatctagacattttttagaaaggaaatttttaatattgttacattgagatgatacaaatcctcgaaaatgattctttcagcctctgcctgacaagatgtacacaaccatcaaaagagggaaccccacacactctagtgactattaattttgttgactaaaacgcaacccacctagacatttagcctttttctaagatataaagtttattatagatttttaagacaacatcaaaggtgacaacattttaaactgatattaagcaagaagtgccccccaaaaaaaacacgcacacaccctgaatcctggctccatccctggtggatacacaaggttgcatgtgacactttactgactagttttcattgccaagattataatgatgatattgctttattcactggatgttgggatgataaatcatgtaacattattaggaaataacagaggtatgactgattttccatgggccatgaaaaacatcatttgaaccactacaatagactggccgttgtaattttttggttcatgacttcccctttctattatccttttgcttataaaaaaagtaataatacaagtatggacttaaatgctgggtccatagatagtgtcatatgtacttatgggttctgattgtagttttttggtaacaatggtatgcttatataattcagactttgggtaatattggtgagttcttagggacattatagtaaaccagtagcaagagaaggtttattcatttctttatactgatttgattatgagcattgctaggtaccacaatgtcctattcatactccagctgaataaaacacttgttgcatagcgaagctaaacaaaactcttcacaagttacaacatatcaatacacacttttatgcattcatactatatttgtgccataaattgtatggatatatgttttaacaattgtgcttaattgttctgttaatgtttgtgaactgcaggttcaaggtcatctcgggcaaaaccacttcactgg

SEQ ID NO: 568 - DNA, 551 bp, Zea mays
  Intron number 6 from transcript GRMZM2G081538_T06 (locus G RMZM2G081538) derived from phytozome v7.0 (chr-ID 4; pos 9 0842685 to 90843235 reverse strand)
tggattataaccccaagaagcaacacattattgtgagtatgacacttactttcatgtttcccatatgaagcaatatttcatatatatttacattaatcgaacattcctatgaattatctttatgtagtaacattgaagacaacaactttgtattaccttgtgtttcttggttatatttctacattatttttgttataatttgattatggattctttttttttcttgcttctgtagttcactgcatgttcacactggagtatgacatgattttttactttgttattattaaataactggttagaactcttgattgtgttctacgagcaaaattattttttatcgatttattgttgtattagtttaatctagccaactcctgatccaattacgtagagtctgccaaattgaacacccgtgttctagttcacaacgacgacagctattacttgttcattttgaattattatcaacttatttatactgctactcaaaaatatatatttgcttctgaatagtaatcggttatacgcttcaggcaacaacagaagat

SEQ ID NO: 569 - DNA, 9589 bp, Zea mays
  Intron number 2 from transcript GRMZM2G000623_T01 (locus G RMZM2G000623) derived from phytozome v7.0 (chr-ID 9; pos 1 599689 to 1609277)
tgccagtacttctattggtcgctccattattccaggttctatgcttactttccacttccgacaatcgtcatccatttccccgcttttaccaataaggcaatacccgcttgttacttttaggcgggcatttacagtttgcttaaccagcaaaatctgccatttattgatgtcatttagaatctgtactacgttacatattattctgtgtttttcagttgttcctctgcacccattattcttttatgagttagcattacttttgtacttttgtaacctgtaataaattcttgtaatgcctcctgagtatccagagcaaagggctctcctttaactaaaaagggatcgattttgcatatacttatctttgtattgcgtcaatatgagaatatccttcctaaattctttatcttatcaatcattaacttagattttcccaagatcttggccgctattccaaattaaattattttactatcccgaagacaatgaaaataagtaggacccaaaaaattgtggggttctattgatgccttgaataacatgtaatatagacaatgaacaaaaaagagaaaaaacgatggatttggttttatcctccatattcagttattcctgctctccacagttcgggtttaggataaatcaacctatttgcatctaataatctagtagtgagaaccagcaacttccatcattctatagctctttgttggggttcacatattcttcaggggaactatatccacaagagattggcactcgttttgtagcatgacaagaccttaccatgtcttgtagcatgcatcaccgttctttcttgtatgtcattgttcagttgtccaaaacaaaccaagtgcggcaattgagaattttaccttacaaagcaacttaatctgcttttagaatgttattgaatcttgctatctaattgtgcacagggtgcttagtatttaagcccaatctacatcatttagtgtgatctatacagtgtatgcagagccctttgtcttgtccttctttacttgctggttcacttttcatgcaaatttgttatagtttacttgtaccaagtactgaatacaagcctaattagattgttgtttgaacctggcaagctgaagtttcagccgtatgtactgtttcaagttgtaagccatcgtaattactttacccatttgacatatccatccctttgcttactgaagaattaaggctcggtacccatttttgaattttgagataatgaactaaaacctggctgctctagtaacacatataattaatcctgtgatggcaaaactgcttgacacaagaatctgatctttggtgtttactgccttatggacctcttcgctcaagaatcacaagggtgatcctagttgcattgcattttaaaatatcctcaaaattaatggcacatgtgcttcctttagttgtttatttggcacttcatttttttctgttaaagagttacatggtccagatgttgtaaaagttttggtgtgacggagtcagacaaggacaatagggccatggcccatggggactaaattacatgtgatgcttagcaaaacttgaagtgcatgtcgagataacttttttaaaggtcatgtttgttactaaccttgggattaacaaatgatgatcagtccctaaggactatctgataaatataggctataggcctgggcctaatgggccttaacacccctcctcaaactcaatgtggagaaggaggatctgaaacgttgagtttgatcaagtgaagttgatgttgtactcttgtttgtgctttggtaaagaaatctgccaattgagattctgagggtacatattgaaggtcaatagtcttctgctgacaatgagaccgagtaaatgatgcatcgacaccaatgtgtttagtaagttcatgcttcacaggatcatgagaaatctgtatagcactcatgttatcacataatacaggtgtaggagtgtcacaagaaacaccaagatcagccaatagccagcgcagccaaatgatttcagcagtggtagttgcaagtgcccgaagttcggcttcaacactagaacgagatatggccgcttgcttcttggatttccaggcaataggagaggatccaagaagaatacagtaacctgtagtagaacaacggtcaacagggtcacttgcccaagtggcatcagaatacgcatgtagctgaagaggactagcagaatcatagagtaaacatcttgattgtgtcccacgtaagtatcgaagcacacgaagcaaatgaccataatgaactgaggttggtttggatacaaattggctcaacatatgaacaacatgagcaatatcaggtctggtgatggtgagataaacaagactaaccacaatatgacgatatcgagtggggtctgctagaggtgtcccatcctgcggtcgaagttttaaatgaatatccattggtgttgcaactgtccgagtatcagtaattccagatcgatcgagaagatcttgtatatacttggattgagacagataagaacctttttgaagtctgctgaacttcaatacccaagaaatagctaagtggacccaaatcagacatctgaaattccttactaagataagatgctgcttgacatgagaaatgtgttctgagttgtcacctgtagtcagcatatcatccacatataatagaagtaaagtgcgcccttttggagagatatgaacaaacaatgcaggatcatgttcactagaagagaaaccagtagctgtgatgacagagatgaaccgctcaaaccaagcacgagtggcttgtttcagcccatacaatgcgcgacgaagacgacaaacgtgtcctgagggagtatcaacccccggaggaggatgcatatacacttcttcacgtagatcgccattgagaaaagcattcttgacatccatctgggagatagtccaagaagatgaggctgcaattgcaatcaaggttcgaacagtagtcatatgtgcaacaggagcaaaagtctcatcataatcaagtccttgagtctgttggaaaccacgagccacaagacgagctttatacctctcaatggaaccatctgattttgtcttaattttgaagacccatttgcatgtaataggaacatgtgagggtaaaggaacgatatcccatgtaccagtgcgttcaagagcagccaattcatcaatcatagctagctgccactcaagaatcccagaagcttcctgataagtagtgggttcaacaattgccacaccagctcgtgggaaaccatagcgatctggaggttcaatggtaccacgatcacgaagacgatatccctgattaaaaacatcgttagacacataattgttagtacaagaatcaggtacaggatcaggatcaggaccagccgcagggatagaccgggaacgacgaatgtaggtttggatgataggtggtttggaagagtaagtagaggatgacgtggaggtggaaggtggtgttatgggaatgagaacatcagatgtggatgtagaaggtgatggttcagcagcaggaatggaaggaagacacatgaaagaagtagaatctgtgggataatatgaggagtgagtagactagttgtgaaagaagggtcgattttcattgaagctcacatctctagaaattcgaatacgacgagtagatggatcataacaacgatatcctttgtgttcaggactgtatccaaggaatacacactctacagattgagcagtcaatttagtccgctcacgaggtggtaacaaaacataacatatacatccaaacacacgaagatgatcatatcgtggagaagtcccaaaaagaacttcacctggtgatttgccagaaagtttagatgaaggttgtctattaatgagatacacgacagtggaaacagcttcactccaaaagtgtgaaggaacaaaagaagatatcaaaagagtatgagcactctcaataatatgacggtgtttgcgttcaacaacaccattttgggcatgagcaccaggacaagaaagttgagcgagagttccctctatggtcaatatctggcgaaaattatcagataaaaattcaccactagaatcagaacgaaaatttttaatagtagcagaaaactgggtgtgaaccatgcgagtgaatgacttgtaaatagaaggcaattcggagcgacgtttcatgaagtaaatccaagtataacgagaatgatcatcaataaaaatgacataatatttatgaccacctttagaaacaaacggagttggaccccaaacatcagagtgaattagatcaaaaggtttagcagaatgggaattactagtaaagtatgggagttgtatttgttttcaagatggcaacctttacaatgaaaactagactcaacatgtgtaggacctaaacatcctgactttattagagtagacagacgagatccacataaatgaccaagacgatgatgccactgggcgaatgacgtcgtggggtccgaagcagcaagcacatgaggtgtagtggtatgggttgaaggaagatgcaaagtatccaagatgtagaggcgaggcgaagttttacggcgacgaccagtcccaatcacatcccctgttttgcgatcctgtacaaaacaagatgagtcatcaaatctaacaaaacaattgtgattggtaatttgaccaactgatagtagatccatggataactgaggtacaaaaaatatatttgggacaataaaatttggatcagaaagagaacccttgtgggtgacatgacataatgtaccatcagcagtctgaacagaagtaccctcggtgacaggtgtagtagtcgccagccgtgactgatcagatgtcacatgaaatgaagctccagaatcaagaacccaagatgatgacaaagcaccagcagatgaagtagcagccactgcaactgagcctctaggagatggtcctgttccacgaccacgagtagcacgacgaacacgaaaatcagccagcttctctggaaacttagcgaagcagttctcagatcgatgagtggtctttttgcaatgttcacaaggcggaaaagaagtgtttctggacttctgagcagcagccaacacactgtgagaactcacaccagtaatagaagacatggacttaagacgagtctcttcagcaagtaattcagataacgcctgagccatggtgagagtatcagaactgtgaagcagccttgcacgtagagtatcaaattcagatcgaactcccataacaaatctgtatgtgaaaaacttctcaatgaacttgtgggctgggcaaggcacagttgcacaagcaggcaccatggaagtcaaggcattcataagacgatcaaaggttgaatagtattcatcaatggacatatcatgttgcccaatgacatgagtctgttgcataagagtatgtaaaagagcaccactgtcctgaacaaaccggtccttcagatgtgaccagatagccttaacagtggtgaatttagacaaactcataatcatggtttagtgctattgaccattgcagccattaccttgccatcattgatctgccaagtcttgattgcaacagcattgcttctatcggctgctaggaccggtgaatcttcggtcaaatgaaatagtaaaccatgaccacttaatgcagtctgaacacagaaagcccattcgggataattctgaccatcaaacacaatattgacaacaataacattggtcgacataatgaagagcaagagaacagtcagagaataccaaaattcctggcaagaagcctgaataaagctcactgatcggaagtggcaggctaattctggactgatcggaagtgaccacgtcgccgaatcagatctgggcgaggtgaccgcgttggtgcagaggacaacaggcagacggcggacagatctgcgcagggttggtgcagaggacagctggcagacggatctgcgacgtccaggggaggtatctgcgacgtcccagcaggcgagcagaggagtctggctcgtgggcggccggatcggagcagagtcgcgggcgaccgattctggcgagtgcgcggcgcctcgcgcgcaggagcggccggatctggcgagcgcgcggcgcgcagagaggcgaggacgatccagcaggcgacctcaggcggccgatcctggcgagcgtgcccagcaggcgacctcgggcggccggatcggagcaggggagcgcacggcgagcatgcgggatcgacgatggcggatgggaggagcgcgcgacacctcgcgtgcgcgcagatgggaggagcacgcggcacctcgcgcgcaggggcggccggaaaaagaaaatccgcggccgcgacggcagccgggagggacgcggccacgacggcagccgggagggaggtggaggtccggtggaagggctgcgacgacagcgggaggaagaccgcgacagcggctaggaaggagcgacggcggcggctaggagatttgagaaaccctagtagtaacctgctttgataccatgttactaaccttgggattaacaaatgatgatcagtccctaaggactatctgatatatataggcctgggcctaatgggccttaacaatgttgagataacttgaactacataaggctcacgagtcactaccatgttttgtaaaactgctgaacttcatgttctccatgctgccaaacagctctactaactaataaatcatgtggtggtcctctctctttctctgccccgcaacataaaaaagggttctagttgatggaagatattagatggcaagtaaatggtcggcaattgtagtgaagtccttgttctgatattggtatctgtattgttatttgttccccacctagcagagtttatgctcccttgttgtcatgggcatcatagggagcgagaggcaacaaccaggctgggataaggctagagaataagattgagatgagctgggataaggctagagaataagattgagatgagagaattgtggagagttgattagcatcagataagtccaagaaagtaggagttagttgagagtttgtaggagaagttggttagccatagggctatttataagccgcatggcagcagggaataaatcaagcaagatcattaacaaaccaatctccctctcttgcaatgaccctctcaagcgcctagggctgctaccctagaaccaagcctgcggcagaggggtataacctcgccggagaagacaactatccccatggaccgaaggtccatgacacctggtatcagctccaggttatcctcaccaccaccagccgcccatccctcaccaccaccagccgccgcaacgcctcccacccgccctctccaactccagatgcattcactcggctcgaagagaagtgggatcaattcgttgtgatgttccaccgctacaagaagacagagaaggaactccaagcagcggtgcggcttcaggcggcagcgcgaggattcctggcacgccgccaggtacagtcccttcgtggggagaagcaccttgctgtggcctccagggccaccccatggccgtcatcacatgagcatgccgtggtgcgcctgcaagccgcagtgcgcggcttccttgttaggcgggcggtgcggaagctgcacttgctgatcagctcatcgctgcaccaactcgcagcctgcgcgcccaaccaccaggtctcgtctatactttttgaaccccctgcagaagtcgagatctgggtatgcagcccccctgcacggccaaagagggtcgtctccttcattcgggcaactgccttggtgctggacagacccaacataagaacgggttggttcctccttcacctttcatccaacgtgaagtccgcagttcagctctttccttgggatccaggaggacaggaggacatagctgcagttcaaatttatattttagttccacaattattttgtattttcgtcttaaataataaaggtaagccgagatgtaaaaggcttaaccttaagtcgtgtcaggtaagtctatggcagctcgaggacgagctggtcttcaagggagggggagatgtcatgggcatcatagggagcgagaggcaacaaccaggctgggataaggctagagaataagattgagatgagctgggataaggctagagaataagattgagatgagagaattgtggagagttgattagcatcagataagtccaagaaagtaggagttagttgagagtttgtaggagaagttggttagccatagggctatttataagccgcatggcagcagggaataaatcaagcaagatcattatcaaaccaatctatctcccttgcaatgaccctctcaagcgcctagggctgctaccctagaatcaagcctgcgacagaggggtataacctcgccggagaagacaactatcccctggaccgaaggtccatgacacctgtatattgtgcattgccttgtacaacaaacttctgtccaagcgcgactagtatttcactacagtttctgcttaatatttatcaaacatggtctaccttgatggttttaccctggtttgttcttctgcgttggtaggttgctgccttactggtgatagatacaaatgtaccctagtttactggctctaccatttcttgggatacattgataaatgttaaacttgagcgcaatatagtttaatgctggcaacataagattttagcagtgtgtgagctcctaattactacctccgtcccagaaacgatgcaattctataaggtcccgtttgtttcttgtcatttcgagaaattgaaatcttactaacggaatagactattttttttagaatatgacattccaccactttccaatattatcatacaagcctacctcaaattcatggggtgagagatagaaattgaatctatagatttacatgctatttttccgatgtacaacttatagcacattcttctacttgcgcctctataacataaatgtagtatataactatctatctcatatgatttaggataatatacaaatatattacatatataaatatataaacttaattagttttatttaaattataattattaaaatggaattcaattccaacgaaacaaacgggccctaatagtattcaggtaaaccatattaagcttgaccaaattcatgtaaaatactaatatttaccatattaaatatgtatcattagattcatcatggaatatattttcataatatgcctatttgaagtaataaatgtttggtactcaaatttaagatagtctgacttggaccaaacctggaattgcattctttctcgagtggagtactttactggtttgacttacccatccctttgcttagtacatagttaagcatttattactgattgatttaaggtttggctgtcttggtaaatattagttaatccaatgatagctgcatttcattgagaatgtagttttgttgtttcctgccgttagacctgtttagtctagaattgccagggtagtgtcagtcagagtttcatcaaatataataatggagtccttgcttcctttatagcccttggttcaacactttgg

SEQ ID NO: 570 - DNA, 2616 bp, Zea mays
  Intron number 1 from transcript GRMZM2G447455_T01 (locus G RMZM2G447455) derived from phytozome v7.0 (chr-ID 9; pos 2 1874949 to 21877564)
gaggtgcgttcgtcgggatccgggttcgcattttggttcggcggggcttgggtgggtttttgtgttcggagctgctctgtcctgcgtttggataacctagcctggcctgcttccctgtttccgactcgctgctgcttgaactcacgcgattttcgtggggattgttgctcttttcattcacgtaaatctagctgcggatcgcctgcaccgttttgattgctaatgttgtgccgtagcacgatcggcctgccgagttcatccagattttgggcttgctagctgagcgatttgcctgtgttggtgcaagtgtataacgtatctctgccgagcaatcgcaccattttggaactgacgttgtgcgtttcgttcattgagtataagcgtcgttattcagctatcgctggatttttttccagattgtattggggggtttggttgactcggcagggccttggtgtattgttttggtcacggcaagatcgtgtgtttgatatatttgttgttgcatacatgtcggccacgagctccctgcaacccaccacaaccaatcatcccactttaagctgcaaaactaatacagctgctgagaataatgaaagagccacagttggtaaatgtgtcttcctgctggttctgtacgcatctctggtcagtagtttaccttgcagagggtgacaccaagtgtatgttactatgcatagaattagttagttacaatttgcattaagacgcccaatcttccatgtaagagactgtcctaaattcatatgaaaccagtagcagtaacactctcttggtgctctcttgggtgtgtttggttgagaagtggagaagaatggagcgactccatttctatttttttggatctttagtttccaacaaaagagcagcggggcggctaccatatgaaaatttaccataaatagttggaatgcttccgctccaccaaaacgtccaaacgcaagcgctctcctcccctctacactcatatgactgtccaaccaaacaaagaatggagtggctctgctccattctactcttcaaccaaacaaaaatgaagcatagttgttaaggcgtcgcctaagcgctaaggcgtgcgaaaaccttaaggcgtcctagttgccttatcttggagcctaaaacgtccgctttggacagtagggcgtcgccccgacgccttggagagttctaaggcgacactatgaggacgccttgtagtgatgcagggttggatcctgacctgatcacgtgatttgaaaccatgtccttggagagtgccatcaacagcggcggcggtggccgctcccctcctcgaccacgagatctagctgcgccggcgaggtcccctaaccccctcacctctcggcagctgggagagagggaaaagcggttgggagagaggccgctgggagagagggagaagcggggagagagagcgttgagagagggaatagagggaggcggctgggtgatgggtgcggctgggagagggatgggagtgagtgattaagtgggtaacctaattttaatggccaagtgggctgatttggactggttagactattattttccttttcgttatcctttttctcttctttattagtattgttgtcctacacactttctcaaatatcaataattttctattcttaactatatttaaggcgtcgcctcgccttacgctttaacgcttaaaagttaaaaagggggtcagtcgccttaccttgccttatcgccttaaaaattatgaaatggagtgactttgttctgcttgccaaacacagaatataatgtctccattctcaaaaactagaatggagccactccattctagccgactcttcaaccaaacagacccttaattataccggatttggattttcagttcccagtgaatttcttatcgtttaaaaatgacccactttttttgcatgtcgtttaaaattttctcgagagtcagctaaccaagttggttaggtggtctggttagcactcgtcaggtcttgcgttcgactccccgtaggagcgaattttcaggctgtggttataaaattccccaagcataggactaaggcccggtcctggccacggtcgttctcacatgggcttacggtgccactgtgtatgggtggggcaacaattcgatggttttctcgacctgcgtgagaaagtcttcttaatataatgccgtggggtggtcttaccactgttttaaaggtgtcgcctaggtgtccaggcggcagtccaacgccttgtctcgccataccgctttaaaaaccatgagtcttaccccgcaggtcgagttttttagaggccctttcacagtgtgtaagctattgcatattgaaactgcatattgcaatgttgataactactttgctagttgcatagacagttaaatttcatatttttaactccatgatggttccagatatttgaggtttaaattatggttgacattatgtgtaatgttcaaattataaagaactctgatcttgtttagctttctggtaattttgatttgatcgaatatctatatttctggtcaactgaaggatctattcctccctggtctttgcagtttctagtagagtaagggttgctgtaaggcttagg

SEQ ID NO: 571 - DNA, 812 bp, Zea mays
  Intron number 3 from transcript GRMZM2G175549_T01 (locus G RMZM2G175549) derived from phytozome v7.0 (chr-ID 10; pos 116616732 to 116617543 reverse strand)
ccctgacctcactgaattcatcactgccttcctaggtatagggcttgcttttgttgttatgaatggcatagaacattcctatgattatgtgcaaagtagcgaagctaaacttgaattgtttgctttcatagagatttggtagtggcatgggtgggtagaggctgttgaacatattgtcaccatggatttgtagtgggagaatctatctatagagttggtctgcactgagaatcatatatcctctgtgaaaatgctgatggagaagttcgcaggggagcttcatggctgttctatgatactctgattcattctgtcaaatttgttctccaaggtatcaactggccctagtgctttgtgtttcagtaagatagtatttttcatgccaacaaatcgggtacttgttgtgctatattgatatcataccataacatgacaaatgctggcgtagaatgtaccctttgacatagtatgttgtgaagaagttatgactgtcatctctgcatcttctgttcaaaaattgtaaaactgtaagggtgcctcttaatttagtgactatggcagaatttattaaaaacaaaattgagacatttaatgatttaatgatattcttcctcgtgttttctgtaaggaaagtatgatttccagtgttttgacatggcaaatggttttgtttttctagcttgattgtttggaaactgatcaatgcttgttttttaataacgtgagcttaactagttaaggatttgaggtgaatatctggtctttgttgtaatgcagagagctacagacaaaggatattcaaactgttgact

SEQ ID NO: 572 - DNA, 12298 bp, Zea mays
  Intron number 3 from transcript GRMZM2G455687_T01 (locus G RMZM2G455687) derived from phytozome v7.0 (chr-ID 9; pos 3 4923650 to 34935947)
gagaaggtaagcatttgtactgaaatttcatattcttgtacattgttgcaagttcttatttatccagtactctacttgggtggaaagtataatatcatttcatgtgaatgtgccaataaacactaggactcatacgcagccttttccagtttaattttcagttgatactctttcaaacatagtcaccagaaacctgggtcgatgagtgatgtggattgcaggtcacagttatctaaaaatgaaggtcaaagggtcttaatgagaagttccagtacatgggaaccctcaataatgaggatttctagtacatgggaaccctcatcaagcgctagtgttcacgagaacaaaagaaataaaaaataataaactgaagacacagacaattgtagcaattatgaaccacattttatgcaaaatattcatcaaacatctagaagcgtacattgatgtcagtgctaacatagagagctcgagcggatcaacatcgccgatctcctccaccttgccctccaccatgctcgtcatcgcttggccacctgcccctccatgccctctgccactcctgtcgacctactgtacacattcctgcattggctctaggatgcagtggccttttaggcgcgctgcagtccagtggcatcggtggcaacgacgactatggtggctgcagtcatcgccgtggaggtggtgtccgctcgctggccctctctaggtgtcagggcccgaggaggcccacggaggggttgcggcagcagcaaccatgggcccttcaagggggattagataaggatagttagagataagattaaaagattagttgagattatttatgagattagttgagattatctaggaaggttatcagttagtttgttgagagttttaaggagataagtttctctagctagacagggacggccatccgacctatttttgtaatcaatgtatgagaaataatgtaagcaagaattagaagggaaaacccctcttgctcgcccgtgggcagaggcccccgactggcgccctgtgaacagtaaccgcgagtacggagtaccacaccacctccaccagcagctccatccatcgaattccctctccaatccctcatcgatctagcgaccataacatctggtatcagatagcttgggtttcgatccgatctcatggcttctgctgccaatttcgcggcggcgtcctggcaaccggcgtccccatctccatggaatgtgccacatgccaccttcgtcacgctgtcctggcaatcgacgtccccatctgcatgggctgcgccacatgccaccttcgtcacgccatcttggcaaccgacgtccccatctccatgggcagcatcgcctgccaattttgtcaacacatcctggacgtcggcgtgcccatctccagggacaatgccaaattttgtcacatcatcttcgttgacgacgtctctgtctccatggacgacgccaatagaggcagccatggctcaacaatcaccagctccatcgatgggggacttgtggaccaacataagggctgatctcgcaaaaatgcaagactcgctccggatggttgagcaggggctgctgcaaatcaaggcagcagtgcaacatgagcagcaacagctggcgttgttcgcacggctccagacgtcggcggctgtgggcatacaggatgctgcttgtggcttccttgcacgatggagagtgcgagagatgcaccgatagatgctcgaggcagccttggtgacggttgaccgcggcacacgggggcgcgacctcgccctgtcggccgaccatcagcagcggcatcgagccgctatctccaagtgcgagcacggtacgtgtcccgcgggcgacgaacttcaattctacgacaacggcggtagggaaggcactcccctcgttattggcaagggcatactgtttagcgccaccacattccgctaccgaccgccacgagggcgcctctgctggttattgttgcgacctattccaggtgcctgtccatgtgctcccctttcgtccagatggcgtccatgggatacaggtggctgcacacgtgcaagtccaatgcgcggagggtgtccgccttatcttatagggtaaaaaaaattcagattcagaataataagataagccgagatgtaaaaggcttgtcttctaggtgtctggttttgggttaagtagactcgatctttgagcacccgtcatgctgcagctcgaggacgagctgcttgtccaggaggggtgtagtgtcagggcctaaggaggcccacggaggggctgcggcagtagcaaccatgggcactctaagggggattatataaggatagttagagataagattagaatattagttgagattatttaggagattagttgagattatctaggaaggttattagttagtttcttgagagtttttaggagagttttaaggagataaggatctctagctagacaggggtggccagctggcctatttatgtaatcaatggatgagaaataaagtaagcaagaattagaagggaaacccccctcttgctcggctttgggcagaggccccgaccgacgccatgtgaacagtaaccgcgagtactgttcacgcatgaacaataccgcaccacctccactagcagctccaaccatcgaattccctccaatccctcaccgatctagcaaccataacagtaggctacatctatgatccatacaccatatgcatgtagccagcctcatcactgggctccttcgatggccgacagggccaacaacagatgttcaccatgctggccggtgtccaactgttatggtcgctagatcgttgagggattggagaggggtatcgatgggcaggaacatcggtcggggcctctgcccacagccgagcaagaggagggtttctcccttctaattcttgcctactttatttctcatccattgattacataaataggccggctggccgcccctgtctagctagagatccttatctccttaaaattcttctaaaaactctcaacaaactaactaataaccttcctagataatctcaactaatctcctaaataatctcaactaatcttctaatcttatctctaactatccttatctaatcccccttggagggcccatggctgctgtgactgtcggagcccctccgtgggcctccttaggccctgacaacaaccctgtggaccaatttcacccacacatcgcgcccctgcccatcctgccgccgcagcaccgcctcaagctactcccctggcacacccgagcatcaacaattctctagtgcccacaacccacctctgattgagtggttgaccctggtgcttgtaagcacatgacgcccaatgctggtctcccttagttcttataattctccatctatcattcttggcaatggttctctccctatcattggtgtttgtcataaagctttgcctcataattttcatctaggaaatattcttgtggcacctaaatattaatataagtcttatctctattcaccagtttaccatcgacaactcttgttccatcaggcttgaccgttttgccctctcagtaaaagatctgctttctaggagactcatcatcaggtttaatagcctcaggccactctacaccatccagttactagcatccccatcatctcaccttgttgcttcatcacccacggtatcctggttgtgaaactcttcataggcttgctagttcatcatttatatcatgtagtaaaatacctagtcactcgatatgccactcatgtcaactaggtcatcactagattgccttttactagttattcatgtggagctctcaataactttgatttaattcattgtgatctgtggacctctctagcagtgaacatttctggttactaatattacttggttattcttgactctacgcctcaagtatgagacattttccaccctataacttctatggggctatgcagttcggatgcaccactatgagcgttcagagtgataacaagtgcgagtttgataactcccacatggtctttctttctctcgaaaggggttgtgttgcacatgtcttgtctctaacataacctcagagcgggtagggccgagagcattatccgcaccactaaggccgtgctcagtagatcgtgcatatggccgtgcaaagcactgttttgcactgtatgttgtacattttagagtggagtttgaaatgagagatgagatgagtaaggccgctggagatagcctaataatgtcgttcgcaccttactccatgtcctattgggtcaacgctcttcacactgccacacatgccatcaaccttctgcccactaaaaccttgtagtcgcaaaagctctgcctgacatccaccccacacagtatcaaccttaggattttctgttgcgcatgctatcctaacttgccctccattgcgccacacaaactggcacctcactttggtatctgtgtgtttctaggctactccctagactgcaaaggctatcagtgcctcaatctctctaaccatgtcataatctcccaacttatagtctttgacgagtcatttccgtattaatctacgtcctctagccctttcttcacaagttcgtgctcgtctttttcgatgatattttaatctactgttcgtcgtggttccagcacctgcgtcatgttcatctcatccttgaggcccttgatgcacatgacctccacttgaagtggtcaaagtgctcctttggagcgttgttggtcgcctacttcagccatgttatctctgccaacggtgtcgccacgaacgacgacaaggtggaagttgtctcgtcctggccagagccctgctcgccctagggcgtgcgcaacttcctggactggtagactactatcagaagttcatccgggacttttggcatgatcactgcgcccccgacacaattgttgcgcaaggatgcctttgcctggatgcccaaggctacggaagtatttgtggcactcaagcacgtcctctccacggggctagtcctgcaaatgtcagacttgactaacagtttgttgtcgagtgcgatgttagaggtaaacagagtggttttgccggaggtgctaacctcagccatcattgcttgattatatagaaagatgagatgagtcacattgattacataacagctcattagagcttagctaatcagataggagccttggcagccgcacacacctgttgagctgctcaaggtctttaatgactataattaactagcacaagtaactaggagagtgcttaggaaacaggacttaataacaacatttctccccctaaggcctgtttcaactgatcttgatctccttgatcccaattctgcttctcatatcttccaacttggtcttgcccaaggctttggtcagtatatcagcaagctgatctgcagtgggaataaattctgttttgatgctaccttcttccacacagtccctgatgaagtgatgcttgattctaatatgtttgctcctgtcatggaaaacaggattctttgccaaagatagagcagatttattgtctactctaagttccaccacctcaacttctcttcccaataatgctgcaaacaaccttgacaaccacaaggcttgggttgcagctgttgtcattgccacatattcagcctcacagcttgacaatgcaacaactctctgcttgatagattgccagctgaccagactgtttccaaggaaaaacaaacatccagtagtgcttttacttgtatcaatatctccagccaagtctgagtcactataacccacaagtcttgccttgcctgtcattctagtatagcatagtccatgatctagagtaccagtcacatatctcaagatcctttttacagcctgaagatgttcagctgttggcttctccagaaatctgctaacataccctacagcaaaagccaaatctggccttgtgtgcactagatatctcagactaccaactagtcttctatactgagttggatttacctcctttgctgtactttccttgctcagtttcaacctttcttccatgggggtggtagctggattacagtctgccataccaccgagctcaagtatcttcttagcataatgagtctgtttcagagtaatgcttccctctgattgtcttacctcaaccccaagatagaaagacaacagactcaaatcactcatttcgaatgtctgcttcatttttgccttgaaagcttcaatcttctgctgattgactccagtgatgatcaaatcatcaacatagactccaattatcagcaaagaatcacctgaacctttcctgtacatggcagcctcatatacattctgctcaaaacccatctgcttgagagtcaagtcaagtttggcattccacgcccgaggagcctgtcttaggccatacaatgccttgtgtaacctgtacactttcttctcttctcctgatacttcaaaacctggtggctgagtaacataaacctcttctttgagttctccattcagaaatgcagacttcacatccatgtgatgtactgtccaaccttcttgtgctgctagagcaagtaaaacacgtactgattccattcttgcaactggtgcaaaggcatcttcatagtcaatcccttccttctgaacaaagccacgggccacaagtcttgccttgtgcctgatcacagcaccatgttcatccttcttcaatttaaacacccacttcaatgaaattgggcgatgacctggactaggagtaacaagttcccaagtcccattccgctcaactgagctcagctcttccttcattgctgcctgccaatctggatcatcttttgcctcttcatagcttgtgggctcaccggcatgagtgaggtttagttctgcaaacaacctctgtgccggcaaaggggttggctgattaccaataatatcatggaccttcctataacgaagctcttcaccatcatgataagcatccaccctttcactatcattctccagaggagtcacatgctctatctgcgggcttgctggagctggtgtaggtgttctaggtgacacaggcacctctgtctccactgcggattcctctgcttctgctgcagactctcctgcactcaccaaagggagactaggtgatgtaggatgtggctgaagaggtggtgagggcaacactgaactttctgcttcaggaaactcttctgcccatggaaactcaacaacaaaatcgctgcatgctgcctttgaagtacctgctgccgctgatgcccagtcccagccacgtccttcatcaaataccacatcacggctgactcgcacgcgctgggacactggatcaaatacacgatatgccttggccccttctgcatagccaatgaacactccagccttaccgcgatcatcaagtttctggagctgagtaagctgccgggtataagccacgcaaccaaataccttgagatggccaactgttggtgcgcggccatgccatgcctcatacggagttacattcctcagtgcctttgttggagatcgattcagaatatgcacagccgtcatcacagcctccccccaaaaccgagaaggcatctggcgttgcttgagcagagctcgtgccatggccaccacagtttgattcctgcgctcaaccacaccattctgttgcggtgaataaggagcactgtaatgccttttaataccttcattggcgcagtatgcggcgaactccgcgacggtgaattccccgccattgtcggtgcgcaggaccttcaacttgcgcccactttccacctctgctgccgccttgatcttcttgattgcttccgccgctgcgtccttggatggcagcaacacagcccacataaaacgggtggcatcatcgacgagcagcaggatgtagcggttgcccgccggtgttgctggcgtgactgggccacacagatcacagtgcaccaattcgagttgattctgggcacgatatgctgctgcggccggaaaagagcgccgcctctgcttcgtggtgacacaagtgtcacatacctgctccacatgatcgaccaccggcatcccacgcgccatctcctccttgctgagtcgtcggagtgcatcgaagttcagatggccgaaacgttcgtgccactgccatgcctcaacatccttgcgcgtcgcgagacagataggttgtgcagcctcgaggtgcaaaatgtacaacctgttcttccctcgatgtaccttggccagcaatcggtgatgattgtcccaaatgtggagcacgccatggttaatcacaaccttggaccctccttcatcaagctgtcccaaacttagtatggagttcttcagcgctggaatgtagtaaacgccgtgaagaactctctgctcaccggtcttagcttgaaaaatgatggatccaactcccttgatttccaccttcgatgcatccccgaaccggaccgttcctcgaacgccagtgttcagatcagcaaagagttcctgacgcccggtcatgtgatgtgttgcgccagagtctaggtaccaaccgctgtccatatcttcttcatccacgccaaggtaggcacatgcacgtggctcagaaagctcgacgtgctgcgccgtgtagctgtgcgccggcgtgctctgctctaggctgataaagccctgtgccagaaacagagcaccatcttcttcacattcggcgtactggacgcgcgcctcatgccttccttggttcccgccacgctgtccagcctgatttccaccgccgcgacctccaccacggttgccaccgccgcggccagcacggtttccaccgccaccgccgcgctctgcatcctcacggcgcggctgcggacactcacgtgcccagtggccttcctggttgcagttgaggcaggtgttggggccgacacggccagcaacattgccgtctcctcgtccgccaccacgtccacctactctgcctcgtcctcgtccaccaccgcggctgcgtccaccgccaccgcgctggttcctggaaccagagccacatgcatcgtctcccttcttttcctttctgcatcgcgctttccactgcgcctcagtgtacaacagcttgccattgatggccaccggctcagtcagtatttgttcttcgcgattgtccactgccttaagccttccagtcacctcctcaagagtcagtgcctcaaaatcaaggaactgctcaatggcgacgacgatctgcgagtacttggccggcaccgtgcgcaggaatttctccaccacgcgctcctcggtgatgtccctatcgccatggatgacaagctgctggtgcagagttgacaaccgcacagcaaagtcatccacttgctcaccaggattgacgctgatgttctcccaatcacggcgtaggcgctgcagtgttgctcgacggaccttgtccacgccgatgcgggtcgcagcgatggcgtcccacgcctccttcgccgtagccttgtcgagcaatgggagacccatctccttgggtacagccccgacgatcacctccagtgcgcgtctgtcatcgcggaactggacaggaccgccttcaatggcgtcccagagatcgcgcgcctgcatcctcagcttcatggtctggctccactcgtagtagttcgtcttgtccagcattggccacgacgtgccgctgccggagtcgcggtacaccacccttccttgcggcgactcgtagcgagcgccgccacggcagcgccttcggtcccgtagtggtgactgcgagcgcctcctatctcgcggtggagtcctcatccgcttgttcctctctgtctcctcttcctcctcccagtcctcttcatcttctcccttctcggcggcgatttcggcccgcagctcctgcgccgtcctcgccgctgcctctgctgcagccgctgcctggactgccagcgccgctgcttcctctgcagccttcaggcgtgcagccttgctggagaagtcgtccagctctccttcgctggttcccttggccttgagcctggcagcgcgctcagcagaggtcgacatgagtagagaagagaggagtcggccttgagactctcaggtgtctaacctaagctctgataccaaatgttagaggtaaacagagtggttttgccggaggtgctaacctcagccatcattgcttgattatatagaaagatgagatgagtcacattgattacataacagctcattagagcttagctaatcagataggagccttggcagccgcacacacctgttgagctgctcaaggtctttaatgactataattaactagcacaagtaactaggagagtgcttaggaaacaggacttaataacaacatgcgacactttcgatgtgggtttcggtgccgttctccaccagggggccggttctctgaccttctttagttggcgcttcgccacctgtcatcacaagctagcgtcatacgagcatgaagtcataggcttggttcaggctaagcggcattgacaaccctacctctagggtcgtcgcttcctcgttcgcaccagccactacaacctcaagtttctcttggaccagcaactatcgactgttccctagtactagtggatcatcaagctattcagcttcggtttttgtggtcaagtatcgtctcggtcgcctcaacttggtggcagatgccctctcatgccgcgacaccggcactagggactttgcaagctgcacccctctctgggccctcgctccacctactcaacgagactgtgccacaatcactaatgatgaagaggctggtcgcctccacaagtagctctaggatgcaactcttggtgtgccatagcggaccatcgatgacttctttctccatggtaagcacgttttcatgctgatacaacttgacttattgtagcaggtgcttgcgctggccctaccactgaccttgaggggatacagaaggccttctagcgattgcttatggaattctacatcgccgacgactgggtggtcggccaggactacgtccgcacgtgtgtcacgtgccaacgcaacaagacgttgaccttgcagttgatcggtctcctttagccgctcgacgtgctgtcctatgtgtgggccgacatcttcgtagacttcatcgatggcctccctaaggttgacaacaagtttatcattctcaccatcatctaacgcttctcgaagtacatgaacttccttgccctcagccacccatacacggctgcctcggccattcgagccttcttcaagggcgttctttgtctacacgccttaccatctccatcgacaacactgcgatctagtcttcaccagtcacatgtggcatgactgactccctctctagagtcctggtccaagggtaagatcaggccatgctatgctagctcctttcatgtgctggagtgcagtggcctattgtcttcagcttccagcggatgcttgtctccacgacgtagtcaatgtggggttgctcacgccgtttcatgggaactccaacaactcccaagccacgtgtgttgcacgccaaactacgtcggggcacctggcatgttctcatttagtggcgtggcctacccaacgacgacaccacttgagagccgcttcagcaattcaaggaccccaatatcctagctcgaggacgagttgttcaaagaggcggaaagagatgttgtggccggtgtcacctatagacgtcaggatcgccatgcagacaactaggaacgaaatgccaaagaatttccttctttaggtattttgttttgcttccataaataggatcatgatggattcttgattaggaggtttccataaaaataaggatagcttccttagaggtttccatataatataaagaaagatgtatcaatctaagcaagcaagacaattatcttgcttggcctcaagggccatctcccacaacttttctcgcttgtctgctccttgtgcacgaccacggctcctgtgtgccacctgggtacacgcccctatccctgtcatcgatctcatatctatgcaacttacacagccgcagtaggaatccatatcctatcaaaagtcagccatgataggattccatattctatcaaaaggctgcaagcgtattgcctcatgtgttgttagttgtagagggtcatgctattgatgttgtgcactagggccctgctattgatgctgtgcacttgtggtaaccatgcccgcagagtgatactgtgatagtctcaaactacactttttacacgattgtatttcttctttccatgaatctttacttattctttatttcagattgccaac

SEQ ID NO: 573 - DNA, 9391 bp, Zea mays
  Intron number 6 from transcript GRMZM2G169820_T01 (locus G RMZM2G169820) derived from phytozome v7.0 (chr-ID 1; pos 1 90548802 to 190558192)
agactccttgctggtgattcagtcctgtttattaggtaaagtttggagaatgaagtccttgtctttctgtggatgtttaacttattgctgttatggtattctttggtagtcagtatagcaaattagactgtagagtgtgtattgtgtgtttgcaagaaacgaagaaagcctccatctctcactttatgcttttatccttattgggtaatgattttgatgattccttggttctgcctgcggctgggtcatgtggtggtattctgttagcttggaaaagctctgtttgcagggttgctcagacaaggattgacgatttttcagttatagcacaatttcagcaagaaggaagatcagcatggtggttcacaggagtttacggcccccattcagatgacctcaaattacagttctttcaggaacttcagatggtctgctctgcttgtaacggcccatggatgattggaggtgatttcaatcttatttatcaagccgatgataagaataatgataacctgaacagggctatgatggggaggttcaggcggcttcttaatgatctgcaattaaaggagttaccgttgttgagaaggaaatatacttggtccaatgaacgggctaaccctactttagtacgcctggattgggtcttctgtacagcagattgggatgatggttttccagattgtgttcttcaaagctctgcttctttaatatctgatcactgccctcttttaatgggtttgcatgagctcacccaagggaagaggagattccattttgagagcttctggaccagattggagggcttcatggaagttgttgagctttcttggtcccagcctgtggaagcaaattgtccccttcagattttcgctaccaaattgcagaggttgtctagacaattgcaggcctggagtcataaaaaagtgggcaatattaagcagcagctccttatggccaaagagattcttcacaggctagaaattgaaagggattctagaagtttgtccccctctgaagaatggcttcgtcgtaaattaaacatcatagtttggctttggcatccttggagagaactgtagcccgtctgaggagtggtttactttggttgaaagaaggagacgccaattcctcatattcaccagcatgccatatataagaagagaaaaaacttcattgggaagttgcaggttgggacagattattgtttgagcaggaagataaaaaagaggcagtgtgggatttttataaccatcttcttgggacagtaccttacaggggctctattctaaatctagatgccttccataggccggccttgaatctacatgatctggatcaaaccttcagtgaagaggaggtgtgtaatattattaaagctctcccatctgacaaagcccctgggcctgatggatatgctgggagattttataaaaaggcatggctagttgttaagtctgattttatggcagctataaacagagtgcttcaaggggttatttctaaactgcatctccttaattcagcttatgtgaccttgttgccaaaaataatgaggcattggaagttaaagattttaggccaataagtctgaaacagttttgcaaaaaatgtaactaagctgttggccaccagacttgcaccaggctccctgtttagtgtcaaaaaatcaaagtgtctttgtgaagggaagaaacatccatgataattttatttcggttcaacagactgcaagggctattcataggcaaaaggtgcctcgtatcccgctgaaattggatattacaaaagcttttgactttgtatcttggcccttcttgttagaaatcttcagacatttgggttttggacctgtttggtgcagcatcatttctaaaatgttatactcttcttcaacaagagtccttgtgagtggtgaaccagggaagattatcaagcatcaaagagggctaaggctaggggaccctctgtccccaatgcttttcatcctggtaatggatgttttgaattccctgactctaaaggcacaggaaaggggattgttgcagccactattgagacatggaaatggtcaacggatttccctgtatgcagatgatgttgtactattcttacagccaaacagagaggagatcacagtggtcatggtgattttaaggatttttggggaggcttcaggcttaaaccaatataagtaaatgcagtatgactcctatccaatgtaatgatcaaagtgttggagaagcacagactttattcccttgcaacattataggttttccttgcaaatatttggggcttccactttctgtcaagaaactgcctagaagtgtgttcttggaacttattgataaagttgctaataagctgccagggctcctttaattaaccaagatggaagactaacccttgtcagatctgtccttactgccatccctatttatcaccttattgcaattcaatgccctaaatgggtggtcaaggctatagacaaaaccaggagcggatttttgtggaagggcaaaaaggatgtcaaaggtggccattgtgttgtgggatggaatagggtttgtaaacccttaagcctgggaggtttgggcatacacaatcttaaaattcttggttgggcattgaatctgaggtggctgtggctcaaaaaaactcagccagacatgccttgggctgaatttgatgtgcaggtccatcctaatgttacagccatgttctcagcctcagtctgctccatagtgggggatggtgctagaactctattttggactgaccgctggctgcatggtcaacgtatctcagaagaaacctcgtacaactccacacaaactcgcatacactaggttagaggaagaaggaaaaaaatcaacaacaaaagacatctagacccgtggccatggagactcaaaataaagataatgatacacagctctcctgcgttttcgaaagaaaaaaagaaattgccccttctctgttaagtagagtttcaaaaagattgagaaaaaggaaaacagttcagcaagctctcagggataacagttgggtcagagacatctctggtagtttaccagcagaagtgattgtcaaattcttagtaatttgggacttaacacaaaatattcagttgcagcatggaatacctgatgctttccgttggctaccaggtgcttcgggggagtactcagcataccaacgtttcttggctggttctgtgtattttgagccgggtgaaaggatatggaagagttgggcgccccctaagtgcaaattcttcatctggcttgcttcccttaatagatgctggacggcggatcgtctagcacgtagaggtctttaccactcggagaaatgtgttcttgcgatcagcagcaggagacagttcaacactgatagagtaataattgatagtataatgggaggatcagccaacataaatataggtcggactccttccgtaggcaaccggtttatagaagcagtacccggtgctaggaaggtgatcgcctgattgggaccctgacatgtacgtacgcaggaatattggcatgcaagccttacaccagggaatggaaccaatctacgtacgcaggaatattggcatgcaagccttacatgcaaggaaaggaatcaacctaaacatagtaatccaacaccctcccgcaggatgaacgtggtcagccgcactgaagaacgttcagactggacctgaactccgcaaatacagacgaaggcaatcccttggtgaagatatcagcatactgagaggaggtagggacatgcaatactcgaactgtatcggccgcgactcgttcgcgaacgaagtgtagatcgatctcaatgtgcttcgtacgctgatgattcactgggttcgaggagaggtagactgcactaacattgtcacagaaaataacagtggcgtgcttcaggggaatatgcatttcgtgtaggagctgacgaagccaggtggtctcagcaactgcatttgccaccgcacggtactctgcttcagcactagagcgggatacagtaggctgacgcttggatgaccaagagacaaggttatcaccaagaaaaacagcatacccagaggtcgaccgacgggtgtcaggacaaccggcccaattagcatcagagtaggcaaccaatgtagagacatccgtgggaccaagatgtaggccatgatttaatgtcccatgcagatagcgaagaatacgtttgatcaacatgtaatgtggttcccgaggatcatgcatgggaagacaaacttgttgaacagcataagaaatgtcaggccgagtgaaggtgatatactgcagtgcaccggccaaaccccggtagtgagtcggatcagcaacaggtggcccttcagtaccagaaagcttgctactcgtgtcaattggagtagaacatggcttgcaatctgtcatacccgcacgttcaagaacctcaagaatatattgccgctgagaaagatgaaacccatcaggctgccgtgtcaccgtgaggccaagaaaatggtgcaaagggccgagatctgtcatagaaaattcttgctggagagctgcaatcacccattgaaggagggagtctgaagatgctgtcagcacaatatcatccacatatagaagtaaaataaattgtgtcatggccatgtttgatatgtaaaacagaggatgtgtcagatttggcactcacaaagccaagagagagaatgtgagtggcaaaacgactgtaccaggcacgcggagcttgtttcaacccataaagagacttgttcagacgacagacatgatcaggccgagagctgtcaacaaaaccagcaggttgcacacaatagacaatctcatcaagggtgccatgcaagaacgcattcttcacatcaagctgatggacaggccaactatggaagagagccactgtaagcactgtacgaatggtagcgggtttgacaactggactgaaagtctcatcaaaatcaattccagggcgttgagtgaaaccacgaagaacccaacgagccttgtaccgctctagggaaccatcagaacgaaacttgtgaagatagacccatttgccagtcacaatattagcacccgaagggcgaggaaccaaatcccaagtgttattcttttgtagtgcaaaaaattcctcagacatagcagccctccaatttggatcagccaatgccccacggtatgattttggcacgggagacaaagtagcagcatgcagatcaagcaatacctttggttgacgaaaaccccgtttgccacgcgtcagcatgctgtggtcattggctggaggctgaacggccacaacatggggaggcgttgtccgctcgagaagaggtagcgtgtcatgcagagctgtgctcccatgcacgtcgactgaagaagcaccagtggtgctagccgaaccaggcgccgtaggggcagcgctcccagacgcgttcccagcgggagcatgggtggtgtgttcctcggcaggctccggagaggcagcagtggccggagtagacgaggtcgagacggtggcaggtgtggaaccaggtacgcaggggcggtcgcactggatggagtgcaagccacccttgtggacgccgaagccgggaacggtgtggtaccgctggcagcagcctggggcgaggggccaataggggcagcggtacgtcgagccgtggtacctgaaatatgtgagattccaggagaaataacaggtgcatcatcaaactccgatagaaagtcaaagttagatgaaggaggtgaagaaacttcagagaaaggaaatgaagtctcatcaaaaataacatgacgtgagattataattcgattggtagaaagatcaagacaacgataccctttatgatcggagggataaccgaggaagacacaggcagctgagcgtggggctagcttgtgtgcagcagtggaggagagattaggataacaactacatccaaagacacgaagatggtcataggagggctgggttttgaatagtgccaggaagggtgtggcggaggccaaggttttagtgggatggcgattgagaagatatgtggcagtatgaagggcctcgacccagtaggacgggggcatgctggcttggaataggagcgagcgaaggatattgttggtggtgcgaataattcgctcggcctttccgttttgtggcgaggtatggggacaagacatgcggagaatgacaccatgtgtagcaaagaacgtgcgggaggaggagttatcgaactcacgaccattatcgcactggatgcttttaatggtgacgccaaactgagtggagacataggcaaaaaaatgagtaagagtggaaaaagtttcggacttaagacgcaaagggaaagtccagaggaagtgagagcaatcatcaagaatgactaagtaatatttgtagccggaaatactgggaataggggatgtccaaagatcacaatgtattaaatcaaaattattggttgctctcgaactggaggtgggaaagggaagacgcacatgacagcctaattgacaggcatgacacagatgatcggaatcacttttattacaagtaatagcgcatgatgacactagactagacaaagcctcatgaccaaggtgtccaagacgccgatgccaaagagtggaagaagagacgccggcggcgagtgctaagggccgaaagaccgatgacagaagcggatatagcggaccggagctattgcacctgacgatcacgttccgagtttcgaggtcctttacagaaaaaccagaaggatcaaattcaacagaacatttattgtcaatagtgaattgtcgaacagaaatgagattcttaatgaggtggggagaaacaagaacattatttaggtgtagaggaccacatgcggcaggaaaggtgacagagccggtgtgagtgacaggtaaaagagaaccattgccaacgacaatattggatggagtaaaaaaggaaggagtttgaaaggtgcaaagattaccggagttagatgtcatgtgggtttcagcacctgtatccatataccattcgtgagttggcggtggctgaagtgtcatcgtgttaaagttggaggccagcatgttggaatcccaggagaagccgggatgcagccacccttgtggtggtgggccgacgtcgacgaagcctggtgcaggcggcagaggcgacccaggcgaggcaactggtggaaggaacgaccctggcaagggcaccgtcgagggcggcccagacagcatcggaggcggcccaggctgcgtcggaggcggtccaggaagcacagagggcccaccgtaaaacgcctgcggtgtagaaccaggggcgcggggctggatgcctggtgggccggcccaatacgcctggaacgtgccaaaggcaggctgccagggcgttggccatgacggatgaccagcccaaggcgcagtgactggtccaggaccagaaccgcgaccgcctccaggggttttcttgccgccgccacgcctggacggcttgcggccaccgccgaatccgccggagttgaccgatggcggcataggaggatgaggagtcgaggaagcaaaggcctgggatggctgggcagtcttggcagccatgttgatctcggcgaggcgaagatcggacttcacttcagcgaacgtcgggaacgaacgttgacgttgaatcagcgcgccgaggtaagagaaccggtcgttgaggccgcgaatgacattgagcaccaaggtgcggtcacgaacaggttcgccaagatccgcaagttggtcagccatggacttgagccggtggcaatagtcggagatggacaggctgccttggacgaaggtgcggaactcggcatcgagaagaagagcacggctctccttgttcccaatgaactgctgctccagtccaagccacacaaggcgagcagtgggaggaccgtcgtcccggttcatgacaacctcgagaagctcgggattaatcataccgtagagtcaggataggacggtgcagtccatgcgcttccacatggcgtcgttggagcgatcgtcgtcagaaagcacatgatcaacgagctcatagcgctcgagagtgttgaggaagaggccacgccatcggttgtagtggggcgacgtgaagtcgaggacgatggggacgagagacttgacgttgaggatcgccgcggcttgagcatgaagcgcagcagtagccgcggcaacctcaccggcgacgaccagcgcatgggcatcggcgtcgcgtctttcctgctccaagtgcgcggcctcccggcgctcggcctcaacgcgcgtagcctccaggcgcgcagcttcttggcgagcagcctcgcggcgttcttcaacagtaaagccggcaacacgctgctccaaggcatgacgagcagcgacagcggcagcgtcgtcggccatggcgacgaggtggcagagtggcgtggctagaaaatgcggaagctgtggttcggaacgaacctttctgataccatgatagagtaataattgatagtataatgggaggatcagccaacataaatataggccggactccttccgtaggcaaccggtttatagaaacagtacccggtgctaggaaggtgatcgcctgattgggaccctgacatgtacatacgcaggaatattggcatgcaagccttacaccagggaatggaatcaatctacgtacgcaggaatattggcatgcaagccttacatgcaaggaaaggaatcaacctaaacatagtaatccaacaaacacatcttgatttcatgtgtcttctccaggaatatatggtggcagatcttaagtagagtggggctgcagcttgtgtcaccagggctggaggtatctatgttccaagattggtggagtgtggctgaaggtcttgtgccagcattgcacagaaatgggttcaacacattggtcattcttgtggcttggtggatggaagcatagaaatgcttgtgttttttatggtgtttctccaaacacgagttcagttatacaacatatccatgaggatgctaggctttgggaattggcaggtgctaaggccctgagaaggttgtggccttgatttggggatgtcttagctgtttccctgggagtggtggtagtttctgtttgtggtgttactctatttttcaaggctcctgaagcctctttcctttttctgtatagtctttttttctgctttctttgggtatttctgtatttgtcaccttgtacgtggtcttctttagaccttttctctctacttaatataatgatgctcagttcttctgagtgttcgataaaaaaaagtgtataactaaagctgctgaacttcctgcctgtgattgtagggacggaagacagcaactcctcttggggataaggc

SEQ ID NO: 574 - DNA, 26596 bp, Zea mays
  Intron number 1 from transcript AC206868.3_FGT004 (locus A C206868.3_FG004) derived from phytozome v7.0 (chr-ID 4; po s 196667620 to 196694215)
cgcgaaatcctccgcctccgcgaggagctcaggtctgggatccgccatacccgagagcgcctacgggagtagctgaggcatggccgcatccctgccttcaccaaacccggtaagaccttcccttggagttcgttgtagaatgctagtcttgtagcatccgtggcatcgagtttttgtatccgtacgcgggggaaatccggccggtagttccgtggcggcgctgcagctacgatggccgccgtcgttgctgacgggcatgccagggttggcatgtgtagtggcagtggtgggagaaggcatggatgtcgtccgatccaactcggacggatgagattagaagggagatgtaccggttcggctcattaaaatggggccaccagatcggaagccaagggcctaggattgatcgcgtggtgaaccgtcgatctttgatcgcacgttcaatattgaatactagctcggtgtagatcaggtcaaatctgggccgtgcatagtaaatcgggcggccagggcttaaccgtaccccttcgtgacgaatatttttctaaagagccctccgaagattagtgaatcaacccgcagtcctagcggaggagttctgagtctgcgtaagctttgtgctttagtccctgatcttggtgatattagtagccgcagtccgatagcaggatgtaattctgaatttaatccgaaaatcgaattttagtacaaaatttaattcaaaagcttagtaaatccataatttctttgtttcaactccaaattaacccgttcaaattgcgttagcttcataataatattaactacacagtaatattattatttgtaccatattacttacttgtataattagatattgtttaaacctatgtttaatagattaatctccttaatcaaagatggtttgtctatgactatgatctaactaaaatatggtctccactcaaatataatatatattagagttatttatttaatatctttatcacatggtttataaaatcaacataaagatctataactaattgtttaatcgagtaggtcttccgaaaaaccatatttttttaaccatagctccgatcttagtatttctcaattccgcgatctcatagcgacgcgtaaatcattattattcagtttgtacttatgtatggtgtaatgttaattttatctataccatgtttgcttgtattgctacgactagcggtgaggtcacgaggatctgaagaatcaccctggtaactggaatctcaagtgccaggcaagttgtgcccttgatcacttctttttacccactcatgttctaattaatcataatgatctgcataggttaattttgatgggacccaataggttaccctagtttgtttatcctgtttaccttgtttacccctgaatcaattgggtagttatgctattgctttatatggtttttgggttaatatttcattacatccatgttccaattattctgttatgttatttatgttcatgataagatcattatgttaattggaacatggagcgaccacccgggaaaacagtgctaccacaagggtttaatgggacgcccttggctgattaactaggaaagctagtggaggtcttccttacccgaaaggggcaagggcagtaggggagtggtcagtgtagggaggccctcgggaggattttgctgcgatggcggtcctgcaagggattcctgcattggagcttcctataaactgtagcgggatttctgaagctagtggaactttgtaaaggcctcgtagtgttaccctgcctcgcctcctcggtagaggtgtatgggactcatgaccccttggcagatgggtaacacggcttgtgggtaaagatgtgcaacctctgcagagtgtaaaactagtatactagccgtgctcacggtcatgagcggctcggaccctcacatgattaatttatggaacctaaattcaatttgtcatttgcatttgcatgggattctttattaattttgttctattacttttattaaggtttggtatttacttacacctagtaattgctaataaaagtttgaccaacattaaaagcaatgctcagctttaaccattttctttgataagccttacacttcatgagctctcacctttggcgagttcatgcacattattccccacaacttgttgagcgatgaacgtatgtgagctcactcttgctgtctcacaccccccccccacaggagaagaacaggtggttcaagtggagccgcttaatgaggagttcgattcgatctaggtggcgtctcccagttgactttctggcgccaagggtggattttagattctgctatatttatcttttattttgtaagacttccgctatgtaataagtactctgattattgtgacatttatctctatacactctgtgattatatatgttgtcttctttggcgcatgtatgagatgcacccggctttgtcccttaaaaccgggtgttacagaagtggtatcagaggaaatgttgactgtaggacgaaacctagatagaattggacagacacttaactacttaccttactctgattcattctatacttatcttgatccttttcaccttctactgttctactctgattaaccttacctttgctactctgattcttttctaaacttatcttaatattttctcatctatttccgcttcactccgattattcttaccttttctttcgaaaggcaaatatggatttcacactttcgaaagcctatgcctaaagtgatctttaggaataggagaccaactcttaggaacaaaaaaaactatttttattgatatctatacgcttgagtgcttgttcttatgatacttgtttgatttggatctttgattgagtgtgatgagttgtggagtaatgtccataattacatctgcatatatgtataggtataaatagaattcataagataactaaacaacttagattatcctccattaaagtgtacccatttcagatagattcctttaagttaaaaaaaatatatagatatactctatcttatcctaataggttcatctcatgataaaaaaaaacatcatatcctcttaaattgtttataagataaactagaccaactaagaataccccattagcatatatcaagcctaatggacccctcttatcttaatagatccatctcatgttaaaatattctatcttatcctactagatccatcttatcttaaaagattctttcttatctcaaccaaatcatcttatcttgaaagactctttcttaccttaataggttcatcttatctcaaaagattttatcatatcctaatagatctaactaatctatctaaaaaaattctatcttattcttagagacccctcttgttctaataagcatacagatccccaccagcttgcttatctcataacagtgtaacaaacatgatctattccaaaataaattaagtagatcttatctagtctaatctgtttacaccaatttaattctgatcccatctaacctaatggacaaacatgttagataatactggtaaaataagattggatcctactcttataaatatgttttaacctaaataggagttctagtccatatgcaactaccttaaccaatcgatagttgcataactcctctgttttaacctaagattatgacctagcctatgttataggttgcccaacccatttatcttacaagcaaaaaaaactcggttcaatctacctaccccatgtacccacacctatctcaactaagtccctagttatggtaacaccaatacccattatccttgatgataacaccaaacttgaccgatataacaggttacataacttatccaaccaatctagaagcaaaacaacaagacagactctgcttaaacttatttaactcataaccacctattaacctattttgtttacctaagaatctaccttgactacatgtcccaaattcggataacaacttcaagaacgaagattgaagatgattgacctcatcaaatcaaggaaggatgcgatttaagccagatcttcaaaggaatcaagatccacaaccttggatagagtagttccttaccctatcctttcttgcccaaacctgtctatgctttaaaggcatcttctatcctacataataaagtggacatacatatatacacccatgctttcctaaccaccaactccacctagctacataaacatatatataaattactactatttgtaagatctaaatgttactttagttagtaaatggtatgatactattttaggaagaataataaggtctaattgacccatgtgttgctaataaagtatgcatcatgctgagatttttgtgtgtgcatatgtgttgagacaatatgagtatacaccctttccttacaaatctcgaggacgagatttttgttaaggggggtaggatttgtaaggcccaaaatctgtttaagaaaaaaaattattattaataaaataaatatatgaagaaaagaaatagtaaattcagatatctcaaattatacctgagtattacaaattgaggactgcattttgaaaaccaagaattattttagagaagaaaatactaaataaaataaataaataaataaaattctgccataatagtaagttcacattgtacggttaaagatgagtttaaattcacaaattgagtggaattcaaatttgagattttaaattgaaagggaagagagaataaaagaaaatgtaaagaaaagaaaaccctaactgggctatttctctacctggccagcccaaatccctttctcagccgcatgacccatgggcgccagcttccctgcgtgtggggtctccgcgcctgaatctacagccgcactcgtttcgcactgactggcaggtgggccctcgaccacggctatgtgcttcttccaccccgcgtcgatctcggtgggggttgttacaacaaccattccgtggtgttcggccggctggggaacgtccgcgccgctatatatccacacggcagggtcgcccggatcatctcccctatcttcgcgcgcgtgccttcttcttccaccatgcgaagaacccgactgcatcctaacagctcgcgcgtgattccggtcgattcctctgtaccggtccgttcaaccaaatccatggtggctacaccttccaccgtgttttcctctcgcctctgctagccgcaacagattcttccccttcaaatagctgggatcggacctctcgctttgcctcgaccgtctcttgggcgctgggcgtcaccgccaccattggggtagtcacaccgaactccatcaaagagagagaaaggaccaagctcgccggtgacctttgggttcgccgctggtgcaatcgacgtcggtgcgcgggggaaatcgagtgatccctgcaggtaagagagagaaacctcgctatccccatggacgaccgctgctccgtcgtgctccttctgttcctcgtcgttcggtgcgcgaccgacctctgccgccgggccgcgaagcagcaacaccctccttcgcaggcctggaaccggatgcgcgaaatcctccgcctccgcgaggagctcaggtctgggatccgccatacccgagagcgcctacgggagtagctgaggcgtggccgcatccctgccttcaccaaacccggtaagaccttcccttggagttcgttgtagaatgctagtcttgtagcatccgtggcatcgagtttttgtatccgtacgcgggggaaatccggccggtagttccgtggcggcgctgcagctacgatggccgccgtcgttgctgacgggcatgccagggttggcatgtgtagtggcagtggtgggagaaggcatggatgtcgtccgatccaactcggacggatgagattagaagggagatgtaccggttcggctcattaaaatggggccaccagatcggaagccaagggcctaggattgatcgcgtggtgaaccatcgatctttgatcgcaggttcaatattgaatactagctcggtgtagatcaggtcaaatctgggccgtgcatagtaaatcgggcggccagggcttaaccgtaccccttcgcgacgaatatttttctaaagagccctccgaagattagtgaatcaacccgcagtcctagcggaggagttctgagtctgcgtaagctttgtgctttagtccctgatcttggtgatattagtagccgcagtccgatagcaggatgtaattctgaatttaatccgaaaatcgaattttagtacaaaatttaattcaaaagcttagtaaatccataatttctttgtttcaactccaaattaacccgttcaaattgcgttagcttcataataatattaactacacagtaatattattatttgtaccatattacttacttgtataattagatattgtttaaacctatgtttaatagattaatctccttaatcaaagatggtttgtctatgactatgatctaactaaaatatggtctccactcaaatataatatatattagagttatttatttaatatctttatcacatggtttataaaatcaacataaagatctataactaattgtttaatcgagtaggtcttccgaaaaaccatatttttttaaccatagctccgatcttagtatttctcaattccgcgatctcgtagcgacgcgtaaatcattattattcagtttgtacttatgtatggtgtaatgttaattttatctataccatgtttgcttgtattgctacgactagcggtgaggtcacgaggatctgaagaatcaccctggtaactggaatctcaagtgccaggcaagttgtgcccttgatcacttctttttacccactcatgttctaattaatcataatgatctgcataggttaattttgatgggacccaataggttaccctagtttgtttatcctgtttaccttgtttacccctgaatcaattgggtagttatgctattgctttatatggtttttgggttaatatttcattacatccatgttccaattattctgttatgttatttatgttcatgataagatcattatgttaattggaacatggagcgaccacccgggaaaacagtgctaccacaagggtttaatgggacgcccttggctgattaactaggaaagctagtggaggtcttccttacccgaaaggggcaagggcagtaggggagtggtcagtgtagggaggccctcgggaggattttgctgcgatggcggtcctgcaagggattcctgcattggagctttctataaactgtagcgggatttctgaagctagtggaactttgtaaaggcctcgtagtgttaccctgcctcgcctcctcggtagaggtgtatgggactcatgaccccttggcagatgggtaacacggcttgtgggtaaagatgtgcaacctctgcagagtgtaaaactagtatactagccgtgctcacggtcatgagcggctcggaccctcacatgattaatttatggaacctaaattcaatttgtcatttgcatttgcatgggattctttattaattttgttctattacttttattaaggtttggtatttacttacacctagtaattgctaataaaagtttgaccaacattaaaagcaatgctcagctttaaccattttctttgataagccttacacttcatgagctctcacctttggcgagttcatgcacattattccccacaacttgttgagcgatgaacgtatgtgagctcactcttgctgtctcacacccccccacaggagaagaacaggtggttcaagtggagccgcttaatgaggagttcgattcgatctaggtggcgtctcccagttgactttctggcgccaagggtggattttagatcctgctatatttatcttttattttgtaagacttccgctatgtaataagtactctgattattgtgacatttatctctatacactctgtgattatatatgttgtcttctttggcgcatgtatgagatgcacccggctttgtcccttaaaaccgggtgttacacaacccaaacatacaaccggctcaagaccctcgtcaacaaaataaggagctatggaagcacacgatggacggaccacgacgtcgtccgcctaatgctaaggtcctttactgtacttgatccacatctggtaaacaatattcgtgaaaatcctaggtacaccaagatgtcgcccgaagaaatccttgggaaatttgtaagtgggcggataatgatcaaggaggcgagatacgtggatgatgcattgaatggcccaatccatgagcctcaaaccgttgctctcaaaggaacaatgagcaaggaggcactacctagcaaggtggcacaagttgaggcggtcgggcttaatgaggaagaaatggcccttatcatcaagcggttcaagacggcgctaaagggtcgcaaggagcaccccaataagaacaagacgaaggggaagcgctcctgcttcaaatgtggtaagattggtcattttatcgctaattgtcccgataatgatagtgaccaggaaaagaagagtggaaagtgggaaaagaagaagaactacaagaaggcgaagggcgaggcacatcttggaaaggagtgggattcggattgctcctcgtccgactccgacaacgaaggactcgccgccaccaccttcaacaagtcatccctcttccccaacgagcatcacacatgcctcatggcaaaggagaagaaagtatgtactcgaaacaatactacttatgcttcttcaagcgaggatgagtctagtgatgatgatgaaatagactattcatgcttattcaagggcttagatagaactaagattgataagattaatgaattgattgatgctttgaatgataagaatagtgttggggacttgttctcaaatgctatgggttaagaacaaggcaacacagaagatgttaattgttaaagtccttcgtccttcgaaacattatttcacttaggatataatggttttcagacgaaggttatgaaggggataccttcataaattcattatataatgacgaaggatgaaatgtaagaaatacaaatgacaatatgtacaattatgcattattattaagcataaacaggagtatcgttgaattacaagtgtaccttcaactggaaggaaatgacagtacaagcgtgacgcaaaaagcgaatgccaagtcagcgtgaacagtacgggagtactgttcacctatttataggcgcgggacacaacccatacaaaattacattcatgccctttacagttgataataattctatagtaatctgttgaggtctaaatagccttttcatctttaagtcggttccactttctgctatcacgccgaagctttcctgtttacaccttcggcgctgtaccgaccttcgtattattctggtctgctgcgatgccgacctgagtccgaagatacctgttcacacattatactccagaaatactgttaaatcctgtttttgaggaccttcggataccgaaggtccccaacagtagcccctcgcaatattaatttgtttgaaataataaatttagattgcgacatggacgaaggctttacgccgaaggtccgaaaaaacaccttccctttgctagaatagcaacattcactgacaagcggggtctttcaattttcaacgctcttggcgtataaatacaatcataccgcaaactcatttgacacgctctctgaccaattgctcctgctcactcaatttttagctcttgtgcactgagatttgttaagcctttagttttgaagcttcggctttgaaaatagtttttagtgtctccgaagatatctgaggataagaagactgctgctgagatgaagctgagcctggacgaagagaaaaacttggggtttcttatagcgatgtcaaagaccaatacagaaaaaatcaccaaggagattctggaaggtttgtctgaagatactggtgacagtgacagctatgatgtggacagtggtggtgaggactccgaagatcgtccctggcgaccaagccattcagtttatggtaaatcaactatcaaagagaatcatcttgtcaacatgagaggaaggtactttcgggatttatccattgtgagggccgacgaaggggaaaaaacgtgcccacaccctgaagaaaatgaagtcgtagtgtaccgaagctttttgaaagctggactgcgatttcccttgagcagcttcgtcgtggaggtgctgaaaatcttcgaagtctatcttcaccaacttacccccgaagcaatcataaagctgaatatcttcgtgtgggccgtgagaagccaaggtctgtagcctgatgcaaaaagcttctgcaatatacacgaattatcatacgaaacaaaaccttggggtaaggaacagtatcacaataattttggctgctacagtttcgtttcccggtccaggtcaggctgccccgtgccaacctttcggaagagatggcccggagattggatgacagaatggttttatgtgaagaatgatctgacagtacgagaagatatcaaaggtataatcatgcgccctatttggcaaagcttcggccttcggaggccgaaggttgaaatgaatgaagctgccgaagaatgccagagggccttcggcgcagtctgctctttcattggaacgagagacttagtacaagagcatattgccttcagggtatggccgctcgcggagaaatgggaaatgccacaagaaaccgtaaaagaggccgacgaaggtggactgatcaggttgaagtacacttttaaatttggagataaattcgttgagccagatgatgactggttaaaaagtattgaaaatttaagtgatgaactgcttggggcttactcgaaggccgaagacactgcattgtcagcagccttcggaggccgaaaaaagaagaggctgaatcgggtatttgatgcaatcgggtttgtctaccctgactattgctatcccattcgaaggcagaaaagaaaaaatacaacctctgcaaaagaagaagctgcaactgctcctagcgagccagaaccgaaaagaaagaagataaaggtccttactcatcggccgcgctatattgaactagcttcggtgcctgagtttaccggagaaacttcttcggccaccgaagctaaaaagccagccgagccaaccttgctgccagaagtcgcagaaacggccgaagtgccaataaagatagaattggaaaaatcaaagactttgttatcagaaacgaaagagaaggccgaaacgccgtctacagaaaaaatggaaaaggtaaaagaagcaactgagggatccaaaacatcagaagttttgagtcctgcagcaaacattgagactgcaaaaaatcaaaaagtgccagcagtgactccaaaaagaaagagaatggctaatgtgctggatgtactagaaacgattaaatcttcaagcacacctccgcagagggctgctgtcattcctgaaacaacaactgaaatttctgattctaaagctccagggcaagagattgaagccgaagctgggcccccagagcctgcaaagataaaatccttggaaagtgaggcagaaaaaataacaaagccaacttctgttgaagaaaccggtgtcattgcccccgaagcatcccccaaaattcgtgattatattgttcgtcatgcttcggggaaaaaactgtcagaaaaagaagaacaagaggcccagcactacgcccaaaaactgaaatatccaaaaggggcgttaatattcaatggcagtggagaagaagacttcttgtattgtctccccgacagcaaggagatttctgtctgtcgggagatgagcaagagcttcggattcccaactttagaagacgggctctcggtgctgtcgaagaacgatctggccgacagcctggcttacaatagcttaaaggtgcgacaaatgaaatccttgtatttttgttgagtccaaaatctttcgcttgtttaaatctattgacacacacataattctctttgcagggcctgatacttagcaatgccctcagggcacagaaagatgctgaagacgaagggtgttctatagccctgagcaaccttcgttccgaagttattgaactgaggaacgaaggtctcgagaaagataaaatattacactcattgataaataaaataaaggcagacgaatctgcttttaaaggtcaagctgaagctcagaaacgcgaaattgaagatcttcggaaacaactggccagagccaaggaagagcgcatacttgaagagacaaagcgagaactcagcgaccaatgggcagaacacctagaaggaactgttgaggagcttcggtcgtccaaaaagagatgttataacaaatctatagaatgtgttaaaaagctgaaggctagcttcgccaaggtcggcgcattttcaagtgaggaaaactttacgagaggcaatcccgaaggtcccatcgagtggatcgaccacgaagctgaagccttcgaagaaattttaaatagccgtggagatatatgtgccttctctggcgccagaggaattgccaccatcttagagaagaaaggctgcgaacatgtaaaaattttagcacaatccgaagctgctttgccttttgaagatgcaagagatccttcggccgaagctagtataattggtggaaaattttttaccgatatttgggataatggtggccgagaaatggccggggaaattattagaagaagtgaaaagggaattcacgatgctagagaagtagctgaggctgctgaaaggagcgcagaggccaaaggtcaattaggtattaactgatggttttattgtgttgtaatcttaggctttaagatttgtttgcgatttgtaattgcattgtatccgtatcctatcctacttcagatcctgctaaagcgtcttcgggccctcagccgaaaggagacgacgaaattaaaaagatggctgaagatattatggacgaagtcgtcaatcggctcctgaaacgaggctgccgaagtcgtttttgagagaaagattaaagtatttttgtaaaaaacttcggaaatgtaatatactgtaacattttgtaacctcaaatgtaatatacctatttttgttagtcaattctttacgatgcatgaaactttacacgtaccgcttttgagtctttgacgaaaaaacaccttcccttcttttcatgcttcgtgaagaaaaatttatctttgtcacaacaatatccaatgttctgatgaataatatccaggcttcgtgaaaatattttccgaagttacacttccgaagatcaatgatgtatcttttttgtgactgatttctcccttttttcaaagcgttcttctgtagattgataatgtgtccacctcttgtgccatgtgcaaaatgatgtatgatgcttatgctatgcgaaatgatgcgatgatgttatgttatatgagatgatgtttattccgaagatacatacgcatccctgcaataaaacacaatcttttataagcctcccttaggagcttcttcgccttttacttcagcggaatcagcgtttatttttcgctgtaagcctcccttaggagcttcttcgccttttactttcagcggtattcgcgttgacttttcgtgcttcgccttttacttaggcggtatcagcgttgacttttcgctgtatgctctgcattccctttggaacgactttggagcagaaaacttacactgcgctccctttggaacgactttttgtgacttcggcaaacttactctgcgttccttagaacgactttttgttgcttcgaagaattttcgatagttcgaaggtcctctttgttatcaatataagcctgtaaagaaaatatattttccttgtaggaatcaacgaaactaattacatgaagcctaaacaatgtcctttattacagaaaataaaactgaatgaaaaagattgctattaaggtaggatatttgtcaatagatgtgctttgactctggcacagtgctattgactgtacgagcttcggactgctctctgaaatccctctggtgtggagcatactggctcccttctggctgctggccttgttgcaacggaggtggaggcagaggctgttgccaagaagcttgaggctgactcgccgaagcaacagaaactgcaggatgattgcccacatattctggaatgtagggcgaatgatacgaagctgtatgcatgacctgcttcggctgagcttgttgtgctgctgcttcagctatttccttttgcttctgaatagtaacatggcacatcctggtagtatggcctttgttctcaccgcagaataagcaaaagattcttctcggttgatcaccaaatcttcctccaaagcccctagcgcctctgcctcttggagctggtggtctgaaggagctttggtgttggcccgaagcctgtgaggaacattgtggcctttgttgttggctgcctctatcatcattttgtgtagagttatgaattgatctcacgtgcctcgggtagaacctccctccgaagcccctggtcatttcagaaaacctgaaagcttcctcccttctttggcgaaaatcattatcggctcgaatgtactcgtccatcttctggagcagcttctccaaagtctgaggaggcttccgagcgaagtactgagctgaggtcctggccgaagccccttgatcatggcctcaatgacaatttcattgggcaccgttggtgcctgtgccctcaaacgcaagaaccttcgaacatacgcctgaaggtattcttcgtgatcttgggtgcactggaacagagcctgagcagtgaccggcttcgtctgaaatccttgaaagctagttaacaacaaatccttcagcttctgccacgaagtgatcgttcctggtcgaagggaggaataccaagtttgagccacactcctgacagccataacgaaagatttggccatgactgaagcattgccaccatacgaagatactgttgcttcgtagctcatcaaaaactgcttcgggtctgagtggccatcgaatacaggaagctggggcggcttgtaagacggaggccaaggtgtagcctgcagctcagcggacaaaggagaagcatcatcaaaaacaaaattcccatgatggaaattgtcataccagtcatcctcgttggggaaaccctcctgatggagatcttggtgttgaggccttcggtgctgctcatcctgggcaagatgacgaacttcttcagaggcttcgtctatctgcctctgcagctcagctagcctggccatcttttctttcttcctctgtacttgttgatgaagcatctccatatctctgatttcttgattatctcgtcctctggtggtgtcgggctgacagcctccttttctggcttcgggcctcccgcagggagactgtctcctgattgtggtccaatggttgcagagctgcagctccagttgctgaagccttcttcggcgccataacgaaggtttatgatcgccgaagatgttcaaaaaacttagagtggaagtgagttcaccggaggtgggcgccaatgttggggacttgttctcaaatgctatgggttaagaacaaggcaacacagaagatgttaattgttaaagtccttcgtccttcgaaacattatttcccttaggatataatggttttcagacgaaggttatgaaggggatacctttataaattcactatataatgacgaaggatgaaatgtaagaaatacaaatgacaatatgtacaattatgcattattattaagcataaacaggagtatcgttgaattacaagtgtaccttcaactggaaggaaatgacagtacaagcgtgacgcaaaaagcgaatgccaagtcagcgtgaacagtacgggagtactgttcacctatttataggcgcgggacacaacccatacaaaattacattcatgccctttacagttgataataattctatagtaatctgttgaggtctaaatagccttttcatctttaagtcggttccactttctgctatcacgccgaagctttcctgtttacaccttcggcgctgtaccgaccttcgtattattctggtctgctgcgatgccgacctgagtccgaagatacctgttcacacattatactccagaaatactgttaaatcctgtttttgaggaccttcggatgccgaaggtccccaacaaatagattactagaaaaacaagaggaccttttatatgaagagcatgataaatttgttagtgcacaaaattctcttgctctagaagttaaaaggaatgaaatgctttcttgtgaactatctacttgtcatgaaaccatttctactttaaatggtgttaatgatgatttaaatgctaaactagaagtagcaaataaatctaactcttgtgtagaacatgttatgatttgcaataggtgcaaagactttaatgttgatgcttgtagtgaacacctagtttgcatttctaaattaaatgatgaagtggctagtcttaatgcccaacttaagactagcaagagtgaatttgacaagctaaaatttgcacgggatgcttacacgattggtagacacccctcaattaaggatggtcttggcttcaagagggaagtcaagaacttaacaagccataaggtctccatctccgccaaggagaaagggaaggcccctatggctagtaatgctcaaaagaaccatgctttcatgtatcatgataggagacattctagaaatgtttatagaagttatgatgcttttgattctcatgccatggttgcttctagttcttctattatgcatgatagaaatttagctaggagaaatgttattaatcacgtgcctagaagaaatgttgttcatgtttctaggaaaataataaatgaaccttctacaatttatcatgcttgcaatgcttcatttgcgatttgtagaaaggataagaaggtaattgctaggaaattaggggccaaatgtaagggagacaagacttgcatttgggtccctaagactattgtaactaaccttgtaggacccaacatgagttgggtacctaagacccaagcctaaatttgccttgcaggtttatgcatccgggggctcaagctggattatcgacagcggatgcacaaaccacatgacgggggagaagaagatgttcacctcctacgtcaagaataaagattcccaagattcaatcatattcggtgacgggaatcaaggcaaggttaaaggcttaggcaagattgcaatctcaaatgagcactctatttctaatgtattcttagtagagtcgtttggatataatttgttatccgtaagtcaattatgtaatatgggatataattgtctattcacaaatgtagatgtgtcggtctttagaataagtgatggttcattagcttttaagggtgtattagacgacaaactctatttagttgattttgcaaaagaggaggtcggtctagatgcatgcttatttgctaagactagcatgggctggctgtggcatcgccgcttagcacatgtggggatgaagaaccttcacaaagcttctaaagggagaacacgtgataggtctaactaatgttactttcgaaaaagatagaccttgtgcagcttgtcaagcagggaaacaggtgggaagctctcatcatgccaaaaatgtaatgacaacatcaagacccctggagttacttcatatggacctcttcggacccgtcgcctatctaagcataggaggaagtaagtatggtctagttatagttgatgatttttcccgcttcacttgggtattctttttgcaggataaatctgaaacccaagggaccctcaagcgcttcctaaggagagcccaaaacgagtttgagctcaaggtgaagaagataaggagcgacaatgggtccgagttcaagaactttcaagtggaggagtatcttgaggaggaaggaatcaagcacgagttctccgctccctacacaccacagcaaaatggtgtggtagaaaggaagaacatgacgcttatagacatggcgaggacgatgcttggagagttcaagaccccgagcgcttttggtcggaagccgtgaacacggcttgccacaccatcaaccgggtctaccttcatcgcctcctcaagaagactttgtatgagctactaaccggtaacaaacccaatgtttcgtatttccgagtttttgggagtaaatgctacattctagtgaagaagggtaggaattccaaatttgttcccaaagcggtagaagggtttttgttaggttatgactcaaatacaaaggcgtatagggtcttcaacaaatcatcgggtttggttgaagtctctagcgacgttgtatttgatgagactaatggttctccaagagagcaagttgttgatcttgatgatgtagatgaagaagacgttccaacggccgcaatgcgcaccatggcgattggagatgtgaggccactggaacaaaaggagcaaaatcaaccttcttcctcaacaatggtgcatcccccaactcaagatgatgaacatgttctaaaataggaggcatatgatcaagggggagcacaagatgatcatgtagtggaggaagaagcacaatcggcacctccaactcaagtccgagcgatgattcaaagggatcatcccatcgaccagattttgggtgacattagcaagggagtgactactcggtctcgattagttaatttttgtgagcattactcctttgtctcttctattgagcctttcagggtagaggaggccttgctagatccggactgggtgttggccatgcaagaggagctcaataacttcaagagaaatgaagtttggacactggtgcctcgtcccaagcaaaatgttgtgggaacaaagtgggtgttccgcaacaaacaagacgagcacggggtggtgacaaggaacaaggcacgacttgtggcaaaaggttatgcccaagtcgcaggtttggactttgaggagacttttgctcctgtggctaggctagagtccattcgtatattgctagcatatgccgctcaccattctttcaggttgttccaaatggatgtgaagagcgctttccacaacgagccaatcaaggaggaggtgtatgtggagcaacccccgagcttcgaggatgaacggtaccccgaccacgtgtgtaagctctctaaggcgctctatggacttaagcaagccccaagagcatggtatgaatgcgttagagactttttaattgctaatgcttttaaggttgggaaagccgatccgactctatttactaagacttgtgttggtgacctttttgtgtgccaaatttatgttgatgacataatatttggttctactaaccaaaagtcttgtgaagagtttagcagggtgatgactcaaaagtttgagatgtcaatgatgggcgagttaagctacttccttgggttccaagtgaaacaactcaaggatgggaccttcatctcccaaacgaagtacacgcaagacttgatcaagcggtttgggatgaaggacgccaagcccgcaaagactccaatgggaaccgacggacacaccgacctcaacaaaggaggtaagtccgttgatcaaaaggcataccggtctatgataggggctttactttatttatgtgctagtagaccagatattatgcttagcttatgcatgtgtgctagatttcaatccgatccaagggaatgtcacttagtggcggtgaagcgaattcttagatatttagtcgctacgccttgtttcgggatctggtatccaaaggggtctacctttgacttgattggatattcagactccgactatgctggatgtaaggtcgataggaagagtacatcggggacgtgccaattcttaggaaggtccctggtgtcatggagttcgaagaaacaaacctccgttgccctatccaccgctgaggccgagtatgttgccgcaggacagtgttgcgcgcaactactttgtatgaggcaaaccctcagggactttggctacaatctgagcaaagtcccactcctatgtgataatgagagtgctatccgcatagcggataatcctgttgaacacaaccgcacaaagcacatagacatccggcatcactttttgagagaccactagcaaaagggggatatcgaagtgtttcatgttagcaccgaaaaccagctagccgatatctttaccaagcctctagatgagaagaccttttgcaggctgcgtagtgagctaaatgtcttagattcgcggaacttggattgatgtgtagtatacatgtgtcttatgctttgatcatgttcccttatgcattttgttgtttatttatggtgctcaagttgtactcatgatccccggaccacacaagtccatttgcacgtgatgcacttatttagggggaggcatgctacaacttgaccctttgagactaactgtgtgcttgagtttacttgatttagtctcaaaggtggattgaaagggaaaggtgaacttggaccatgcaagacttccactgcactccgatgagagggtaactcactccaagttcatctccatattcttattgcctttgtactcttatttgaagattttggtgaggcaatgaggtttaagggccaaaaattgatcccgttttggtgcttgatgccaaagggggagaaaataaggccaaagcaagaaatggatcaactaccacttgagaattttgaaaaagtagagttagagtttttgtttgtcaaaatactcttgtttgtctcttattgtcaaaaattggtctcttgtggggagaatggttgattatgggaaatagggggagtttttgaatcagtgatcaatttctcttggaatatctttctctatgcctcaacaagtgaatttgacttagagataggaaattgagtttgatttgcaaaaataaaccaagtggtggcaaagaatgatccatatatgccaaagttgaatctaaataatcttgagttcttatttgaattgattttgcacttgttctacttgctttgtgttgtgttggcataaatcaccaaaaagggggagattgaaagggaaatgtgcccttgggccatttctaagtattttggtgatttagtgtccaacacaagtatctaagtgttaaatggtggacaaagtacaaatcaattataaaggtatgtttctaagacttagtatattgttttggagactaatgtattatgtctaagtgctggaaacaggaaaaatctggttggatataaaggtggctttgttcagtcgaactcggctcagtctgggtgcaccggacagtgtccggtgcgccaggctgactcaggcgaacttgctgctctcgggaaatcgtcggcgacgtacggctataaatcactggactgtccggtggtgcaccggactgtccggtgagccaacggtcagctaggccaacggtcggtcacggaatccgcgcgcgacgcgtggcatgtgccaaccgtcggatggggcaccggactgtccggtgtgcaccagacagtgtctggtgcgccaacggctccaagactgcaacggtcggcttcgccaaataaggaaagagatccacaccggacagtgtccggtggtgcaccggactgtccggtggtgcaccggactgttcggtgcaccaggcgacagaaggcaagaattgccttcctggaatgctctcaacggctcctagctgccttggggctataaaagggacccctaggcgcatggaggaaaaaaccaagcattatctaagcattcctaagcaccaagacttcaattccgcgcattcgattctttgtgatagcaactagagctccatttgagtagagaactctttgagttgtgttgagagctcgtgttgtgacttgtgtgcgtattgtcgatctgattttgtgtcttgtgtgtgtttctcatccctcccttactccgtgcttctttgtgaacatcaaagtgtaagggcgagaggctccaagttgtggagattcctcgcaagcgggatatagtaaagtgaaagcaaaacaccgtggtattcaagtgggtctttggaccacttgaaaggggttgattacaaccctcgtccgttgggacgccacaacgtggagtaggcaagtgttggacttggccaaaccacgggataaaccactgtgccatctctgtgttgatctgtttgtggttatcgtgttgtgcaagttctcctctctagccacctggcttattcgtgctaactcctaatcaagttttgtggattaagtttcaagttttcacaggatcacctattcaccccccctctaggtgctctcaaatagttgaactgtcgccgctgccggaaccgtagaaccccctagctgatccggacatgaaggaagcatttgatgcaataagcattgctaactctattatcgacgaagttgtcgacatgttattgaatgaagccgcagaaaaaatccttagagaagagtagactttactgtaataatactttgtaatattttatgtatggaacaattgatgagacatgtaaatttctgtaatatatttctttacaatgcatgaaatttacatacataccgtttttgagcctttggcgaaaaaacaccttcccttcttttcatgcttcgtaaagaaagaagccccttttatgacaagtcggataaaactgtatttcccgaagtttacttcgtgcctcagcacattttcattttgacaaagtatttgccgaagttttgcttcgtatcccatctttgtgtcgttgatgcgatatgatgtatgatgtaatgttatgcggaatgatatgatgacatgatgcaaaatgatggtaatgccgaaggcacacacacgcgcacccacactggaatacacaagactctgcatccccttaggaacgtcttttgagtctttaagctctgcattcccttagaaatgacttttgagcttcttcaccttgtatttcggtggcatttaagctctgcatcccattaggaacgacttttgagcttcttcacctaatatttcggtggtatttggctctgcatccctttaggaacgacttttgagcaaaaaacttacgctgtgctcccttaggaacgacttttgcagcttcagatcgtaatttattagctctccattcccttaggaatgacttttgagtagaaaacttacactgtgctcccttaggaacaacttttgaagctttagatcataatttttggctctgcattcccttaggaacgacttttgagcttcggaatttacttcgtttccttagagacgtctttcgagcttcggaagtctgtgaggaaggtatattttactctgatacaggcacaattattacaagaaattgaaattaaattcttcattacttgtttcttgtagaaaaaataaattggcataaaagataaaggtacatcaaaagtaggatattcctcagtatatatgctttgattctagtacagtgctattgactgtacgagcttcggactcctccctgaagtcgcgctgctgttgggcgtgctggtgcccttctggctgctggctttgagtgtgagtaggtggcagtggtggtggtaatgggagcagagcccaagaagcttgtgaatgacttgccgaagcaacagaagccacaggttgattaccaacgtattctggtacgtagggagaatagcatgaagcagtatgtaagacctgcttcggctgattctgccgcgcctctgcttcggcaatctccttttgtttctgaatggtgacctagcatgttcttgtagtgtggctcttgtattcaccacaaaataagcaatagagccttttgggctgatccccataccttcctccgaagcctctgccacccctgccccttggagctggtggcctgaaagagctttgctgttgccctgaggattgtgagctatgctgtggcctttgaacctggcttcctctatcatcactctggttggagttgtggattgatctgacatgccttggatggattcttcctccgaagcccctagtcatctcagaaaacctataagcttcttcccttcgctggtggaaatcattatcagcctagatgtactcatccatcttctgaagaagcttctccagggtctgagggggcttcctggcaaagtattgagccgtaggtcctggtcgaagccctttgatcatggcctcaatgacaatttcattgggcactgtgggcgcttgtgctctcagacgcaagaaccttcggacatacgcctggaggtattcttcgtggtcttacgtgcactggaacaaagcttgagcagtgaccggcttcgtctagaacccttggaaactggtgatcagcatgtcctacagtttctgccatgatgtgattgttcctggccggagagaggagtaccaggtttgtgcgacattcttgactgccatgacgaaggatttcgccatgactgcagtgttgcccccatatgaagatatggttgcttcgtagctcatcagaaactgctttcagatctgagttcccatcatacatggggagctggggtggcttgtatgatgggggccatggggtagccagcagttttgctggcagaggagaagcatcatcaaaagcaaaatttccatgatggaaatcatcataccattcatcatcatcgtaggaattgtcctgacgaatctctctgcgttgaggtcttcggtcctggtcatcttgagtgagatgacacatttcctcatcagcctcatcaatcttcttctttagatcggaaagacgaagcatcttcttcttcttcctctagacttgttgatggatggcttcgaggtcccttatttcttggtccaactcctcctccttaggcgttggacttctagcctttcttttttggcttctagcttcgcgtaatgtttcttggttgacgtccagtggctgcagtgcagcccctagccctgaagactttttcggtggcatgacgaaggtcacagcttgccgaaggtggtcgaatgagttcactggaggtgggcgccaatgttgggaacttctctcaaacgctatgagttaagaacaaggcaacacaaatgttaatggttaaaggccttcatccttcgaagcattatctcccttaggatataatgatcttcagacgaaggtcatgaagggcataccttcatcatctcagcatgtaatagaaagcataaatataaattacatataaggaatacgaacaatcatcttaaatcattatattgtttatattctcattaaacaaccatgaataaacattaacgatattgaattacatttgtaccttcggcttgacagaaggtaagaatccaagcgtgacgtgcgaatgaatacaagtcagcgtgaatagtacggtgctactgttcatctatttataggcacaggacgcagcctgtttaaaattacatccatgcccttgacgtttactattgacttagggatattccatcgaggactagacaaccttttcccctttaagtaggtttcattttccaccgctaagccgaagcttctccacacgtagcttcataactggttcatccttctctcagaccgcgctttttgtatcgtgtacagcttcatcccaaggccgaaggtccctatgcatatattatacttggaaaacatgccagtcgtgtttttgaggaccttcggaagacgaaggccccccacaattacgatgtgtcagattgggtgaatgtaaatgcaagtcaagaaatgacattattaagagattggatcgctgctggagtatcattgatgtagtgtatgtaatgaagtagttagatgtaatgaagtagttagtgatatattgtgtatctcagattgttgggtagatagattgtgtaatcatgcatgtattgatcacctctctggtattgagaaatcatttaatgtattggggtaccgatcactgagtaatcatgcaatgtattggggtaccgatcattgagtaatcatgcaatgtatttgggtactgatttactctctggtaccgagtattcatgcaatgtattgacagttttattaagtgaaccgccagtgtatatgatatttccactggcggtgtacttaatacaaccgtcagtgtaaatacatcctttccactgacggttcggttaagtgaaccgccagtgtaagtacatccttttccactgatggttcagttaagtgaaccgccagtgtatatgatatttccactggtggtgtacttaatacaaccgccagtgtaaatacatcctttccactggcggtttagttaagtgaaccaccagtgtatatatatttacactagcggttccttaaggcgggcccacccgtttgtcacaggcgtgctataactgaaaccgccagtataaatttctgcgtgccgccaccttagagctcttttctactagtgattattacttatatattcttcaatggctgtagtgcttcttttactagtgttaactttgaccagttggcatccaatcacttttctaactgtcaagtgtacttgtgaaacaggcaccaccagc

SEQ ID NO: 575 - DNA, 1704 bp, Zea mays
  Intron number 1 from transcript GRMZM5G844173_T01 (locus G RMZM5G844173) derived from phytozome v7.0 (chr-ID 3; pos 9 303358 to 9305061)
gcggagagcctcgggtgggagcgcgccccgtcgaggtagtgctcctgtttttttttccggatttttttcctgctcgggcgggtttcgtgttcccggcgctgtatttagtattcactgcggttttgcccgttgatttacggctatccgttcgtcgcggctactggtgccagctggtctgctggatttgtagatactttttggagcaggtggttttatcggggttacggtgatggatttactagagacgcttaggattggcggcgaggttgagctgattgtatttaccatgttttgttttggctagtctcgacggatcgatgcgtcgggatgcacttgtcaatgaatttctgtagtatttttatttcggctactagatccttagctcgtcgattgcaagtagtgtggatttgagctgggcctcgctatttacggtgtcatactacataccagtgtgtagaattatgttcccgaaaaaaaacggtggaggatccgtagttacggttgtggaaaagttataaaggtggggacaatcatttggaattgtatctagtaatggttgttggtcctatatttaacatgtctgctttggttatcctgtttgtttgtttgtatttgttgacgaggagctatatcagacaattattgatctgaactagtactagaaatatgcgagttcagcacacaggattattgattcaaaacaggaaggttttactttgaacttccataccagtcatcctattcctacgaattgttcatcagtatacaggaaattaggtgataagttgagtcctcggaattgctgaactgaaccttgatggacgattttttagatgtaggcacctgtatgaactttctaaaggataaataactgattcccaattcaccttccccttgcgggcagtttcgggacaaaacatcacattggttatttaaaatgctcttttgccaagtcgatttttcatttatgtgatccagaaatgtagtttaagtgtccattttggactgtgttgctgaaatgtcagataagtaccgcctgaaaaattactgccgtaaaaagttaagcataaattcccaatcccctattttggtcataattttgtttgatcatgcatttattgtaaaaaaggacagacccaatgctggaggctcccacacgagtggggtcttgggaaaggataattttgtttggtcatgcatttattgtatcaaaaaatttataagatctatcagcagattgtacacatttcttgtttgagctccatctcatttcttttgttagtttctatatttgtagttcagttgctttttattcttgaatattaattctcaaaactattcaccccccaattcttttttgttatatatttctaatgcagaggttttcaaagcaactatgtttgggattggttgatatgatacttgttcacgttaggggatgtagacgccctcctctgtgggggttgattgaagaagttaatgtcacacttaggataacttgtgtattactgaaagtttcttggttttgaggcaaatagcattactaagagtagtattttggcgtatagattgatgaactgattgacaacttgaacacagtgttgattacaggtgctcttattggttatgggatcaatgtgcaatttttttctttccgtttgagagcctttctagtttcttgggcaggctcttgagctaccaagc

SEQ ID NO: 576 - DNA, 1481 bp, Zea mays
  Intron number 1 from transcript GRMZM2G357595_T01 (locus G RMZM2G357595) derived from phytozome v7.0 (chr-ID 4; pos 1 86949985 to 186951465 reverse strand)
gtacctcttcaccaacaccaacgtccgcaagatcggtgagtgcgccagacgtcgacgaccgacctcaccctgagacctccttccttcccctcgactgtcgtaaaattgcaatttctttctgttgttcttgttcgatctgtcgcgcagcacggatcgatctatcgagacagagcgttagttcctaaaaccaatcatggtgttctccaggtcgccaaaaagaactgcacgcggcagcaggccagcagcaaatgcttcctccaacttcttttagctttttctaaaaagtaacttctaaaatgttaaaaaaaagtcccatagcaaacttgttggcggtaccatctccggctacctaccgagctgcggcgctggcatctggcaagaagccagacgaactgggacttggatttagggccaaatattgatttgatcaactagacccatttctttatgcgcagggtccaagatgatcatgtagagtagtaggctgtagatgacttgcgtgcatatgggattaagttccagtactgaccatgcgctgtacatactgcaaggaacgtggagttcttgttggcagcctttattgtagaccatgaaccttcttttatagtgtgtcaacaggtcgagtactgctagtaggccatgtcgctccctagccatttgcctgtaaatgctggccgcctggcacatagtttggcaaccaaggaggccccatggattcagtcagctctagatgtgtttatttagaaattatttactatctgccacaggcataccaactggtctgttctttgttctgtactgacaaactagcaatttgatcattccttaacgaagcagatagtttagttaaattttacactctgatcgagtggccaatattgaatcgatcaagtgcatccatttctctatgcgcaaaatccaagatggtcatgcagatgacttcatggttataaggttatttttttagtaccgatgatgtgctcaaaacatattgtactgtaagtaacatgaagttcccctatggaacttctctgtagcgtttgaacaaatgaagtattgctagtaggctatctcactctcaagactttcgatgtaacagtggcacatagtttggtaatggtaatgatgccttttgggcaatcctgtttgctggagtttggatccagctgggtactgattctgtgtgatttgatattcttaacttgatcttcgtagtcaaaacaatttgtgcaagattttcatataccattttattcaagccatgagacgaatgtttcttcattcgtgtgaccttaaaaggccagtgctaacttgtgttccttttcctctccctttttctgactagtacgaagcacacctatatcagattcagtatttcctttctatgtcctgtacagtctgcttttcttgataaaaatatgctaatttctgtttctgccctttcaggacccaaggaatttacttctgtgttttacagtctt

SEQ ID NO: 577 - DNA, 1214 bp, Zea mays
  Intron number 2 from transcript GRMZM2G013750_T02 (locus G RMZM2G013750) derived from phytozome v7.0 (chr-ID 5; pos 1 023042 to 1024255)
ttctcctctccaagaggagaggccagcttaagcaggttcggttctcgagaattcaccgccttgctcttacatccccgttttttttttttggtgtaatcagtatatgtgtatgagaccctttagaggtactttagtaatcaatttctttatacgaaaggagggtggcctttagacttcagatttttcactgctattgaagtggctaaagaagtattttactactgtaactttgttgtgctcttgtgtcgactctggtttttggtttgaggtattggacccaagcatctgttgaactcttgccagcttaaaataagctggacttgagaaagttttctgaatcgaagttgcctatttaaactattatagtggttggcagaagtgtggttcatccatccaataaatattccctgcagttgtaattattaagaatgctagatagaaatacatggtatctttatgcattgttgctacttgtagaaaccattgattattataacattttgtggttgtttttttatgtggttctacttaacaatactgattggtcttcctttaaatgcaacgctcctcaggttctcactattcttccgtgtgaatatgaagcatgctcatgcttcacttacgatttttgctttacatttctcaagtttgcattatgtctgcaatctgaacgctctcatccatggccatagtgatgtttagatgtatgctaacacaattatcttgaactgctgttatccatttggttgttcgttagggtacttgttttcttagcaccagcgaatagttgcatttatggagtattttgcgttggttctatccatcgttgaagaaccacaatgtgaaatgtttattgggcagcatttttcttcgatatttagttgcttgcatgtacagctgcgattttttagtcttatgctgttatgcacactcatctctagcaatggtttgcccatgaccagaacactgttgatcaatgtattaagtataagtagttatttacttcctttcaaatgttccctatgctgtaccaaagcactactctaactgttaccttgtttttgcagattcataagtcatatttgtctatttgtttaattacaaactgaaaatcatatcaaatggaaacactataatgtatctcacttgctactgttttgtttactatacacttatattactgtcacttctgttcgttgcaggccattactgct

SEQ ID NO: 578 - DNA, 1391 bp, Zea mays
  Intron number 3 from transcript GRMZM2G336929_T01 (locus G RMZM2G336929) derived from phytozome v7.0 (chr-ID 3; pos 2 6078947 to 26080337)
gttcaggtgagcactcgtatcgtttccatcaaatcttcttcaccttctctttcagacagggtatccagagaaactgtttcttggggagggaaaccgacaaaccgtagactagagaaaaaataaaaggaaaaaatgtaggaaatcgtttagaacattagggccagcatgagattgtaacctgaccgtcgacgcctggcagagatggaaatggctacaagctaataaattgataatcactgggtttgacctcaacataccaactaaaagatctgaatggcaaatcatatatggttggacggtgaattagaaactgggtgtcagattagttagatctaggtatcaagttgtgatttttgagtaacggattagcgcctactttagatctaaactaccaaattaatagtactgattctggtcaaatgacgctagaagctcgagaagaataaaacaatctgaaaaaaaaatgagcatggtgccatgatgggatcaaagtcaacatgcagcaaatagttgagcctcttaaattaacatttaagattaattttcttaccattcacaataatgatgattaagtcataaaaagtcggcccattttaaaacaagcatgttaattttaccggacacgttactgacaaaaacaaattctagaaacttccgtaaaattgaggctcaattgttggcaataatatattgcgctaacccatatttatcatcatgaaaagacacttaaaataactgtctggttgaagccctctcaggcacttggctgccacacaagtgatctcagccctaggcactcaaaatcctacgcctaggatcactgcctggcccaggcagcgcgagcaaaccaaaccagccctaagcagttacatgggctactttttgtttcatctactttaagcaatttggagagtgaagggtgtgaaaaaactcaaacacttccctctatttatatgttggattccattttttatttttttgaaatacaaaatgataaccaataacaaattgacgacatacggtcggtaccgattgatcgaggccgatactgatcaggtctctaatgttcgagtcagtatcaactggtccgattttatcgtggtcaggccaaactgatctgatcagtattggggtccctatgtcatcgatcggtatagacgttttgccgattcggccttaaaacgcatggacctgtacaattaatacatgagtacatgacccgataaacctgcactgtgaaaacagaaatgaacggtgttacttttttccccgctggtgtgaacgtcctcgctgtatccagcttctgttgttaagaaatgtatgcagacacttattatactaattattgagcatcaggtgagaagggcaaggtggtgtacaacacgaaggga

SEQ ID NO: 579 - DNA, 3685 bp, Zea mays
  Intron number 3 from transcript GRMZM2G553687_T01 (locus G RMZM2G553687) derived from phytozome v7.0 (chr-ID 6; pos 1 12271513 to 112275197 reverse strand)
tggtatgtgaaagctctacttatttccattgccttttgcttttgtcatcatttgatgaatgttagtaggtaggtgaatgctagtgtctcctatgctttaataattttacagtatgaaaacaaactacatatagataatagagtttacatagcactgtagaacagtctttctgctttacattgcaggttaatttggtcacactagtataatgctttgattccccagttttcgaagtgatattgtggaagaaacttttgtttcagagattcattgatgcttatctagaataatcaagttaccataacctagataaggggtaaagttaaagtacttattgataaattggagtactgcatttgaccaaattggttgtaagtatttcatctattgtatatagaaaaataatctagttaatccttgccattcttgagccctgtattaaatttggatacttaaccatgaaatatgggactgaactaactaatctctacagaatttgagggggttattgttggttgaggttataaagattggtattgtttgagcataatcattgctaaagagctactctctctgattcgaagtctatgttgtttataacatccagtcttcaaaatgacactttgatttgcaattttgataaaattatactcccagttcccagaaatagatgacgttctgacatgcaacttttgcctgcagctagtacatgtctctgaatggaaatgaattttatttctgaccaaagggagtgctattttaattaaagaaagttgtatatataatattatgttatgaaattattttctatggttaatcgagtaacatcagccatgtttttgtcaatctttgtatttttcttatattgatggctcaagttaaagaagtttgattgactagaatcctaaaaacaacctaacatttggaattgaaggtttatgtaagttggttcgatcattaagcttctatttatgttccttgttgcattgatagataccgtgcttgttaatcttatttacccgagcattgttttgagactcatgacatataaatatatttagtatcacaataacatccatatatttagacatttgtactatgacataccgtgcttggtggtggaacaaggaagttcaaagggttattaaggagaagaaataatgctatagacgtttgtacactatcataggagtgtggacaatatatagaagtacaagtagcaaagaagaccacataacgagctgtaagtgtgacaatgggtagggtgtacgagtatctttatcgatgttcgagtatgaaggaaggaaggatatatatataggatggctagggcccgtgagaggaagacaagggatttcaaccaagttaagtgcattaatgatgaaatagagcacctcttggtgaaggaggactagatcaaatatcgatggtgatggtattttgacaaattgttcaatggagagaatgaggacatcacctttcggtaggatgactcttttggtagggccatgatgggagtttccggggccctataccaaactcaacgagacttatctcactataaaaaactataatagtataaagttccaatgtattgcatagcaatgaaatttacaaccgaagcaaaagattgtatcgagttcccagaatagacaagccaatctctatcacaatgttccccatttggtcgaattctattatagaacaatccagaaaaccttctataatatttgtcgctaggatctttctgaattggtaagtctcttttaggacccttttgtgccaaaatagcaatctgtttaggatcaaggaaaccccaatatctagggtcaaatatatcgggctaaaaagaatcactagcatggccaacaagagaattttttgagttaacatcaatagtagtggcattcatattaacaaaggataatagtgagtcaaagcaaaaaaaatcaccttgatctctaatccttgctggctagattggtctcgtgcagacccgtgcctaaagtttgtgtacgtgttgctgctgtcctagtctacctagctatcatcaacatcaagcgccgaccctcctaattcccacagttgagcggcgatggcgttgtggggatgagaaattacagcaggatcggcaagccaacaaaaaatcatgagcgactcgtgattagatcaaggactcgtggaattaggaaggatacacgtgagacgcacggatcccctcaagagatcaattgtttattgtagcgagccttaaataatataattatatgtgtagacaatataattatatgcgttacaatatcaatatttaggggcccctagaatttgggggccttgtaccatcgaacactttgcacatgctcttgcacgggcctgtcttttggtgacaccaaaaggcactttgtgcgtaggatcgaagaatctaaggttagatgcactaaaaaggatgaaagagggtaagacgatgggccctgatggtatcccagttgaggcatgaagatgccttgaggacataattatagtatggctaaccaagttgttccactatatctttcgttgaacaagatgtctgacgagtggagaagtctattggtaccaatctaaaagaataagggagatattcaaaattgtattaactaccagggaattaagttgatgagacgtactatgaagctacgggagagagttattgaacatcgtatgaatcaatttggtttcatgcccagaaggacaaccatggaagccatttttaataagataagtgatggagcagtatagagagcagaagaaggaccttcacatggttttcattgacttggagagggtttatgataaaatactaaggaatgttacattctgggctttggacaaacataaagtttcaacgacgtacattgggatcgttaaggatatgtacaacaatgttgtgactagtgttcgaacaaatgatactatgatagagagacagatgacttccctattagaatatgactgcatcaaggtttagctttgaacccttacctttttgtcttggtgatggatgaggtcacaaccgaaagggcctctagcctagtggttaaggctttcgatggagaaaagtttgttcaatactggttgagatgatttggacatgtcctatggagacctctagaggcactagtgggtattaggatcctaagttgacatgagaagagacagtaaaagaagacttgaaaagatagaaaattggaatatgcccaaagatttagccttgaatggaagtgcatgaaaaacaactatccatgtatctgaaccttgacttttgggttatcttgggtttcaactatagcctactccaacatatttgcgactaaaaggctttgtcgttgttgtagttataacatccatatatcctattgagttctgtttgggagtttattattcatactgtaaggcagtacgtcatctttgtacaaacacttcaaaatcagacatgaccataagtaaatttggatttctttttacattccttttatctaaatggttggatacgatgtcctagtgtggcaccattttttaagaagtgcttgtcacttatttggcatttgtacttagggcagtaggcatctgttttttagttacaggtttacattggaattgcctaaaatctttatattccatctagaggtctttaataggtgataag

SEQ ID NO: 580 - DNA, 1149 bp, Zea mays
  Intron number 5 from transcript GRMZM2G452529_T01 (locus G RMZM2G452529) derived from phytozome v7.0 (chr-ID 3; pos 1 95885315 to 195886463)
ttcactgtggcaaacatatttgaagggatattctggtaagtgattcgttcctttatgaataacctgtttagagtttcaacatttttgggatatatggagtgcttagctatttttgttcagtttaggttagacatgtattgatttggtatttccaccatcatcagaaagcttccatgatccatgtcttccggaaaatgaatcttgcaattttgtctttcatctgctgtaaacttgcagattcactagaatttgtggacttaattctgacttattttttgtacagctgtaaaaagtatagtaaccttgagcctctcaatttgagaggaaagttttgcactttcattatccaacactatgtgcctctttacatcatttacagtctgcattttttacttcagcaacattggtaccacgctcttggttggctgtattggcctgtacgagtttgtgtgatagcaaaggcttgtaattacatccagcattttctaatttcatagccatatgagtaaaccgatcagctgactaatccaattaattgaccaggtccagttagttggtggctagtcggctcgttgagcagcctacttgccaacctgtgttaagtagttaagtattgctactagactatagcaccagtgcacaactacaaactgcacaggcatatggctactagttgtccctgagctaataagatgactaatcatgattaattcgaagatcagatttctaattgcactagtcgccttggagtgccaaatcgtggatttttgtggtccgtggaccaataagccagactaattgcgagtaacggcgattggtcggacaatttagtaacacgttagatgttgcagaatatcttatggtatagtgtgctctgcccctgtctgacttctgtgccttgatatttcctttttgtacttttttcatgggaagtgttcttctcttttattttttcaattcgagttgagtttggaatattctatgggactagtgatgcatatctctaaatatatattgtggaagatatttgttccgattgtttaatttactcaagtaatttgtgttacgcaacgattaatgaacttggcgcatttacaatgttatgtttactcaggtttcttttgcctgcttcacttattgtgatcaacg

SEQ ID NO: 581 - DNA, 14041 bp, Zea mays
  Intron number 1 from transcript AC205532.3_FGT005 (locus A C205532.3_FG005) derived from phytozome v7.0 (chr-ID 4; po s 142785703 to 142799743)
aattgactaagactgtcggtaagaaagtcaggtatgctgcttgttgcaagcactgtaagcaaacattcagtgctcgatctagttctggtactggccatttgttgcgacataattgtccttctaagaaaacacatgaacgctctggccaagtccaatcagtgcttaagtacaatgttgatggtactttgcagcgttggtgaaagggaaatgtgcccttgggccatttctaagtattttggtgattgagtgccaacacaagtgcttaaatgtgaatctatgcccatggatgaacaaagtgcaaattaagagtaaaggtatgtttctaagccttagtacattggttttgtatactaatatacttgtctaagtgttagaaacagaaagaagaagaaaagaaaagaggtgaaaaaggcttggctgtgcacagccaagactcagctctgtctggcacaccggactgtccggtggtgcaccggacagtgtccggtgcgccaggctggctcgggcgaagtggccgctctcgggaattcaccggcggcgtacggctaaaattcaccggactgtccggtgtgcaccggactgtccggtgagccaacggtcggccgggccaacggtcggccgcggaatctgcgcgcgacacgtggccaagccaacggctagaagggggcaccggactgtccggtgtgcaccggacatgtccggtgcgccaacggctctctggcggccaacggtcggctgcgccgcttaaggaaagaaatcgggcaccggacagtgtccggtgtgcaccggactgtccggtgcacccgtcaacagaaggcaagatcagccttccagatttgctctcaacggctcctagctgccttggggctataaaagggacccctaggcgcatggaggagaataccaagcaaccttagagcattcttgatcatccacactcagtctttgcgcattcgtttgtcattctcagtgattcgagctccgttctagtgagaactttgagatagtcttttgagcttgattcttggccgtgtgtgtgcgcattttgctgtggatttgtgtgtgttgcttcccttccttactccgtgattctttgtgaacatcaaaagtgtaagggcgagaggctccaagttgtggagattcctcgcgaacgggataagaaaagaaaagtataacactgtggtattcaagttgatcattggatcacttgagaggagttgagtgcaactctcatccgttgggacgccacaacgtggagtaggcaagttttgtacttggccgaaccacgggataaatcactgtgtcttctctgtgttgaattctttgtgattatcgtattgtgcaagaccttctctctagccacttggcatcaactgtgctaacgtttaaccaagttttgtggcttaagtttttaagtttcacaggatcacctattcaccccccccctctaggtgctctcaattggtatcagagtcgttctcttcacaaagggactaaccgcccgaagagatggatcctaaagggaagggaatcgtgatcaacgacaaggagaaggagtccttcgtcaacgagccaagggatgacaagtccaacgactcgggctcgggccacagacgcaaagatgggaagaagaagaagacaagacgcatcaaggagatcgtctactacgacagcgatgagtctacttcctcccaaaaggacgacgaccacaacgaatacgagagaaagaaaccggtcaattcgaacttttcttttgattactctcgcattcctcaaagtactaatgctaatttattatctattccacttggtaaacctcctcattttgatggagaggactacggattttggagtcacaaaatgcgtagtcacttgttctctctccatcctagcatatgggagattgtagaaagtggaatgcactttgatagtacggatagtcccatgtttattaatgaacagattcataaaaatgcacaagctactactgtgttgctagcctctttgtgcagggacgagtaccataaggtgagcggcttggacaatgccaagcagatctgggacaccctcaagatctctcatgaggggaatgatgtcaccttactcaccaagatggagttggtggaaggtgagcttggacggttcgcaatgataaggggcgaggagccaactcaaacatacaaccggctcaagacccttatcaacaaaataaggagctacggaagcacgcgatggacggatcacgacgtcgtccgcctaatgctaaggtcatttaccgttcttgatcctcatttggtgaacaatattcgtgaaaatcccaggtacaccaagatgtcgcccgaagaagttcttggaaaattcgttagcgggcgaatgatgatcaaggaggcaaggtacatggacgacgccttgaatggtccgatcaacgagccgcaacaccttgctctcaaggcaacacgaagcaaggaggcgctacctagcaaggtggcacagattgaggcggccggacttaatgatgaagagatggctctcatcatcaaaagattcaagacggtgcttaaaggtcgcaagggacagccaagcaagaccaaagccaaggggaagcgctcatgcttcaaatgtggtaagcttggtcattttattgctaactgtcccgacaatgatagtgatcaggatcaagggaacaagagggagaaaaagaagaactataagaaggcaaagggcgaggctcatcttggcaaggagtgggagtcagactgctcttcgtccgactccgacaatgaaggactcgccgccactgccttcaacaagtcatccctcttccccaacgagcgacacacttgcctcatggcaagggagaagaaagtaagcactcataatactagtacttatgcttcttcaagtgaggatgagtctagtgatgatgatgagatagattactcatgcctatttaagggattagatagaaccaaggtagacaaaattaatgaattgattgatgccttgaatgataggaatatacttttagaaaagcaagaggatttgttgtatgaagaacatgataaatttgtagaagctcagaaaatctcttgctctagaaattaagagaaatgaaatgctctctagtgaaactatcttcttgtcatgaaactattgctaagttaaagagttttaatgatgatttaaatgctaagttagaaatagctagtaaatcaacatcttgtgtagaaattgttgaaacttgtaataggtgtaaagattttgacattgatgcttgtagtgaacacctagtttcaatttccaaacttaatgatgaattggctagtcttaatgctcaacttaagactagcaagagtaattttgataagctaaaatttgcaagggatgcctacacaattggtagacacccctcaattaaggatggacttggctacaagagggaagccaaggacttgacaagccataatgctcctatctccgccaaggagaaagggaaggctcctatggctagtagtgctaaaaagaaccatgcttttatgtaccatgataggagacaaactagaaatgcttataggagttataatgctcatgatgattttgattctcatgtcatgtttgcttctagttcttcctatatgcatggtagaaatatgtctaggagaagtgctattcatcatgtgcctagaaagaatattattcatgctcctaggaaagtaatgaatgaaccttcgacaatttatcgtgctttaaatgcttcctttgctatttgtagaaaggataggaaaatagttgctaggaagttaggggcaaaatgcaagggagacaaaacttgcatttgggtccctaaggatatttgcactaaccttgtaggacccaacatgagttgggtacctaagacccaagcctaaatttgccttgcaggtttatgcatccgggggttcaagctggattattgacagcggatgcacaaaccatatgacgggggagaagaagatgttcacctcctacgtcaagaataaagattcccaagattcaataatattcggtgatgggaatcaaggcaaggtaaaagggttaggtaaaattgcaatctcaaatgagcactctatctctaatgtgtttttagtagagtctcttggatataatttgctatctgttagtcaattatgcaatatgggatataactgtttgtttacaaatgtagatgtgtctgtctttagaagatgtgatggttcactagcttttaagggtattctagacggcaagctttacttagttgattttgcaaaagaagaggccggtctagatgcatgcttaatggctaagacttgcatgggcttgctgtggcatcgccgcttagcacatgtggggatgaagaacctccacaagcttctaaagggagaacacgtgataggtctaaccaatgttcatttcgaaaaagatagaccttgtgcagcttgtcaagcagggaaacaggtgggaggctctcatcacaccaaaaatgtgatgacaacatcaagacccctggagctgctacatatggacctcttcggacccgtcgcctatctgagcataggaggaagtaagtatggtctagttatcgttgatgaattttcccgcttcacttgggtgttctttttgcaggataagtctgaaacccaagggaccctcaagcgcttcctcaggagagctcaaaatgagtttgagctcaaggtgaagaagataaggagcgacaacgggtccgagttcaagaaccttcaagtggaggagttccttgaggaggaagggatcaagcacgagttctccgctccctacacaccacagcaaaatggtgtggtagagaggaagaacaggacgctaatcgatatggcgaggacgatgcttggagaattcaagacccccgagtgtttctggtcggaagccgtgaacacggcttgccacgccatcaacagggtctaccttcatcgcctcctcaagaagacttcgtatgagctactaactggtaacaaacccaatgtatcttactttcgtgtatttgggagcaagtgctacattctagtaaagaagggtagaaattctaagtttgctcccaaagctgtagaagggtttttgttaggttatgactcaaatacaaaggcgtatagagtcttcaacaaatcatcgggtttggttgaagtctctagcgacgttgtatttgatgagactaatggctctccaagagagcaagttgttgatcttgatgatgtagatgaagaagacgttccaacggccgctatgcgcaccatggcgattggtgatgtgcgaccacaggaacaattggagcaagatcaaacttcttcctcaacaatgatgcatcccccaactcaaaacgatgaacaggttcatcaagaggagtgtgatcaagggggagcacaagatgatcatgtgatggaggaagaagcacaaccggcacctccaacccaagttcgagcgatgattcaaagggatcatcccgtcgaccaaattctgggtgatattagcaagggagtaactactcgatctcgattagttaatttttgtgagcattactcctttgtctcttctattgagcctttcagggtagaagaggccttgctagatccggactgggtgttagccatgcaggaggaactcaacaacttcaagcgcaatgaagtttggacactggtgcctcgtcccaagcaaaacattgtgggaaccaagtgggtattccgcaacaaacaggacgagcatggggtggtgacgaggaacaaggctcgacttgtggcaaaaggttatgcccaagtcgcaggtttggactttgaggagacgtttgctcctgtggctaggctagaatcaattcgtatcttgctagcatatgccgctcaccattctttcaggttgttccaaatggatgtgaagagcgctttcctcaacgggccaatcaaggaggaggtgtacgtggagcaaccccctggcttcgaggatgaacggtacccccgaccatgtgtgtaagctctctaaggcgctctatggacttaagcaagccccaagagcatggtatgaatgccttagagactttctaattgttaatgctttcaaggttgggaaagccgatccaactctttttactaagacatgtgatggtgatttgtttgtgtgccaaatttatgtcgatgacataatatttggttctactaaccaaaagtcttgtgaagagtttagcagggtgatgacgcagaaattcgagatgtcaatgatgggcgagttgaactacttccttgggttccaagtgaagcaactcaaagacggcaccttcatctcccaaacgaagtacacgcaagatctgctaaagcggtttgggatgaaggacgccaagcccgcaaaaactctgatggggaccgacggacacaccgacctcaacaaaggaggtaagtccgttgatcaaaaagcataccggtcaatgatagggtctttactttatttatgtgctagtagaccggatattatgcttagcgtatgcatgtgtgctagatttcaatccgatcctaaggagtgtcacttagtggcggtgaagcgaattcttagatatttggttgctacgccctgcttcgggctctggtatccaaaggggtctacctttgacttggttggatactcagattccgactatgctggatgtaaggtcgataggaagagtacatcagggacgtgccaattcttaggaaggtccctggtgtcgtggaactctaagaaacaaacctccgttgccctatccaccgctgaggccgagtacgttgccgcaggacagtgttgcgcgcagctactttggatgaggcaaacccttcgggactttggctacaatctgagcaaagtcccactcctatgtgacaatgagagtgctatccgcatggcggaaaatcctgttgaacacagccgcacaaagcacattgacatccggcatcactttttgagagaccaccagcaaaagggagatatcgaagtgtttcatgttagcaccgagaaccagctagccgatatcttcactaagcctctagatgagaagaccttttgcaggttgcgtagtgagctaaatgtcttagattcacggaacctggattgatttatagcatacatgtgtttatgcctttaatcatgttcattctgcattgtgttgcttattatggtgctcaagttgtacaagcactccccggacctcacaagtccttgtgccagtaatgcacatatttagggggagatgtgttacaacttgaccctttgagactaaccgtttgtttgagtttgattgttttagtctcaaagaaggtttgaaagggaaaggtggacttggaccgtgaaagacttccactgcactccgatgagagggtaacttattccaagttcatctttaaactcttattgcctatttgctcttaattgaagattttggtgaggcaatggggttaaagggccaagattgatcccgttttggtgcttgatgccaaagggggagaaaataaaggccaaagcaataaatggatcagctaccacttgagaaactttgaaaacagtagaatagagcttttggtttgtcaaaactcttgcattgtctcttttgtcaaaagttggcctcttatggggagaagtgttgattatgggaaaaagggggagtttttggaatcttgaatcaattttctttggaaaacctctctttatgtctctacaagtggatttgacttagagataggattttgagtttgatttgcaaaaacaaaccaagtggtggcaaaggatgatccatatatgccaaattgaatcaaaataaatttgagtttttatttgaagtgatattgcacttgttctagttgctttatgttgtgttggcataaatcaccaaaaagggggagattgaaagggaaatgtgcccttgggccatttctaagtattttggtgattgagtgccaacacaagtgcttaaatgtgaatctatgcccatggatgaacaaagtgcaaattaagagtaaaggtatgtttctaagccttagtacattggttttgtatactaatatacttgtctaagtgttagaaacagaaagaagaagaaaagaaaagaggtgaaaaaggcttggttgtgcacagccaagactcagctctgtctggcacaccggactgtccggtggtgcaccggacagtgtccggtggtgcaccggacagtgtctgatgcgccaggctggctcgggtgaagtggccgctctcgggaattcaccggcggcgtacggctaaaattcaccggactgtccggtgagccaacggtcggccgggccaacggtcggccgcggaatctgcgcgcgacacgtggccaagccaacggctagaagggggcaccggactgtccggtgtgcaccggacatgtccggtgcgccaacggctctctggcggccaacggtcggctgcgccgcttaaggaaagaaatcgggcaccggacagtgtccggtgtgcaccggactgtccggtgcacccgtcaacagaaggcaagatcagccttccagatttgctctcaacggctcctagctgccttggggctataaaagggacccctaggcgcatggaggagaataccaagcaaccttagagcattcttgatcatccacactcagtctttgcgcattcgtttgtcattctcagtgattcgagctccgttctagtgagaactttgagatagtcttttgagctcgattcttggccgtgtgtgtgcgcattttgctgtggatttgtctgtggttcttcccttccttactccgtgattctttgtgaacatcaaaagtgtaagggcgagaggctccaagttgtggagattcctcgcgaacgggataagaaaagaaaagtataacactgtggtattcaagttgatcattggatcacttgagaggagttgagtgcaactctcgtccgttgggacgccacaacgtggagtaggcaagttttgtacttggccgaaccacgggataaatcactgtgtcttctctgtgttgaattctttgtgattatcgtattgtgcaagaccttctctctagccacttggcatcaactgtgctaacgtttaaccaagttttgtggcttaagtttttaagtttcacaggatcacctattcaccccccctctaggtgctctcagttgggagtactctcctgctgttgctaggaatgaactatgtcgtttaattgctagggatgatctgcctctatggcatggttctactgttgcttttcaatgttacattaatcgagctcataaccctagatctgtgcatgtttctaggcaaaccactgctagggacatggttaaattatataatgagcgtatgcagaacttaattggtactcttaataatgatgttggttctatttgtcttacctatgatagctggtctggaaaagcaaaggaggattacttaagtgtagtagctcattttgttaattctaagtgggaattagaaaaaagattgcttgcacttaggctcattgatggtaagcatagtggtgttaatattgctaatcttgtagctactgtgattgatgagtataatttaactgaaaaagtttttgctataactttggataatgcttcctcaaataatgttgccatgaaatttctaagacctttcttgtgtggttaccttggtgtacctgttcctgatagtagccttggtactgatgcatatgatgatgaattgtctactatgtttttgcatcaatgttgttcatgtcatgttattaatctaattgttaaatctggtttggatcctattagaacatatcttgatgactttagaactgctataacatttttaaatgcatccaaccaacgtatagctgcatataaaagctactgtatgagtatggctattcgccctcgtaaatttggtgttgacatggatgttagatggaactctacttatttaatgattaaacacttgttaccacacaagtccaccttctctgtttttatcagaactcagtatcctttgaatgaggatggggctcctttacttactaataatcattgggcaattgctgaaaaagtgttatatttcttagaattattttatgaatcaactgttgcattgtctggtgtctactatcctactgctactttaatgttgcatcacattttgaggatagctagacatctaaatgcatttgagaatgatatattgctaagatgtgttgttgttcctatgaaagataaattcttgaagtattggagagacattccaattttatatgcagttgcatttattttggatcctagagctaaaatgaggggttttaacaaggtccttattaagttatctagtttaactggtactggttactctaggcttccatttgatgttcgtactaagctaaccaaggtatttcagttgtatgagaccaaatttggcgatgcacgcttgcgtgccactcaccaaccatcagcacttggttgtggtaagaaaaaaatggcatgggatacatatatggtgaagatgaccttgatggtgagtattcttctacactaggaaggagaccaggttcctcttcttctacccctcaatctatctctactgttgcatcaacatctgagctagcttcctacttagacagtgacactatcactgagtttgatgaggacttcaatatcctatcttggtggcatcagcataaattaacttatcctattctttcactacttgctaaggatgtcttgaccgtgccagcatctactatttcttcagaatctacctttagtcttgctggcagggtgattgaagagcgccgacgatgactagctcctgatatggttgagatcttgtcctgcatcaaagattgggaactcgctgacgctcacctgcaacatagtgtggaggaggacacacaagaacttgaagctgagcatgaaaacctttggcttgatgacccaacaacactatctaggaatgctgaaaatgcttaggtggatctgcatgtcttatgtcttatgagttgtatgtgtgtatgaacttatgaactgtggagttgtggattgtaataaactaatgaacttaggagctgggctgcactcttttttccttcttagggttttcccacgaggtgtgagtttttacctaagaaggtttttaatgaggcagccattgcactaacagctccatataatttatttcatttccatatttgtgtctgcgagtgatctgttctaacttgtgtaatatgttttctctgtgtgtgtaatatgttttgtatgtaatctgtgtgtgtaatatattttgtgttataactggtctgttataatctgttataactggtctataatctgttataactggtctgctatacattgagctgttgggcgggccagtgtgtggcacggcccgtttggcacggcgggtttacgggccggcccggcacgatcctgacatggacgtgtcgtgcttgggcacacgtctgagcacgtgggccggcacggcccgacccgatccattaacgggtcgtgcctggcccgacactatttggactgggccgaatcgggttcgggtcgtgcccgtgtcgggtggcccgttaggacatctatagaccgagtgagccttcttccttaatctcacgggtcactaagacgtcgcaaggaccaccacacacatggtgtctcttgcttcgcttacaaagcacttgagaataagaatgggaaaagaaaaaggccaaaccaagcgacaagagcaacaaaagaacacaaagcaccctctctcaagtccctaatggaattgagttgatttggtggcttggagaggattcaatttatttgatgtgtcttggagtgaagtcttttgctcttgtattgaatgcaatgtttagaattcttggatagatatgaatgaggtggttgggggtatttatagcccccaaccacttccatagccgttggtgaagctgctggcgaagggcgcactggatagtccggtgcgtcaccagacatgcactgttccttgtccggtgtgtcgccacgtcacccaaccgttagggtctggagcttgtctatcgttggagagcttgtcttcttgtggcaccggacagtctggtgccacaccggacagtccggtgcccctctgactttgctgcattgacttctgcgtgatactgttcaccactgtagcattttgcagagtcgaccattggcgcagggagccgttgctatgctagcttactagatagtccggtggcacatcgaacagtctgatgaattatagcggagcgtggcctggaattcccgagagtggctagttgatctttgtacggtcctggtgcaccggacggtccagtgcgccattcttcagcacactcaagtccttttgctcctttaaaattgtgtccctaacttgatgcctttattggtttgtgttgaaccttatgcacctgtaatacatgaattctagacaaactagttagtccataggtttgcgttggtcgtcaaccaccaaaattaattataggaaatggttagcccatttccctttcaaagtcgaagcacattacgttcttcgtgtaaggtagctcccagataaacgagatgtgcgtccaattgtgtcctttaccatacccttgaaaccaacctcctacgcccggttttaggtcacaatgttgtctcatgatattttcaccagttcgtcgcttcggtggcccatctctaaccctcttgccttttcaaaatgactttgtatcctttctaaaaggatgattatagggaaggaggcgttgctgaacatcaaaaaatgtttccttcttaccatgttctaacctatatgcttgtgagtcacccatacatttcggacaacgcagtatgccgtggacacaccaaccagaaaaaatgccatatgctagcagatcatgaattgaccatagatatgttgcacgtagagtaaaacgacatttcagatgactatcatatgcctcaaccccctgccacaacatttttagttcttcgatcaatggttccataaatacattgatttttgttataggatccttcagacctggaacaatcatttggtgggttgatatcaataattagtttcacaaaatcattataacagttgttggagaaggtgtactttgacttcatcgccatgagacgtgttaccacctgcagtatgctcacattggttccttcatgcactttagcctctgaggcttcaagaagcttgtagaactctttcacatcctttggaaaagcttgattattctgtagttctaggtactcattcctaatatcatccaacatctcttccattcgatctacatcctggtccccatccgactcaatagtatggtccacctctccatgctcatgccataccagatagttcggcataaagccatgtttgaaaacatgatacgagagctccacctttttcaaccgaaccaagttccgacattttattcacgggcacctcgctaaacgagcatcactagcaaatgcgagtaccatgaattcatctgcaactctcacccatgcatcagagtgcccatgagtgacactgtcgaatccatcgtacatcgcccttcttcgatcgtcactcatattcaaagctaaagaaacgacacatatttaacaacatatatacacttaggtacgaaaaggccatttataaacagttaaacactaaagcaattgtttcaagtttagttgcatctatgttagcattgtaccacgtacagttacttaattcagttacttaatacaattacttaatttagagcccatgagtaataacattcccattagaaaaatatacaagacaataatcaacaatcagcaataaatatatatctatattgcacatcaagattgagagattaagagatgattacctgagcgcgtggtgcccctggtgctagggtaggcggtggcgcggcgcggcggtgatggtgcaggggcagcgcggcgcgaagagcggcagctgtgatacggcgatgaagcactcgagcagcggcggccagaaggtcgcaaagca

SEQ ID NO: 582 - DNA, 23536 bp, Zea mays
  Intron number 1 from transcript GRMZM2G171650_T03 (locus G RMZM2G171650) derived from phytozome v7.0 (chr-ID 3; pos 1 58983323 to 159006858 reverse strand)
agtactcctcctccaggttccgtacccctaccccatcgtcgtagaatcgcttgcccctgttgatcgaagtgagattgaagcaggggaatagccccacccaacaatctagcggtggagcagctgaggtgatcctcgattcgctccggcaccatttggacccccctcactcccgttgctccatggcctctcgcacgcgcggtggaccaccagccgccttgatcgtgcacgccttgtgctcgagacaatcccccgtatcaggacttcaggaggcttcgtctgtgccaccttgcatgagtactatgaccctgtttagtttgggatctctatccgccctgccgcttatagatggccaaacgggcggcacggcccgacccggcacgagcccgacttgggcacggcacgacaggcccgagcacgacaggcccgtttacataatcgggccgtgccgtgccgcccgacgtgcccagcctcaggcccaagcacggcacgggagattgttaaccgtgccgtgccggcccgacagcccgaagcacgttagggctcgtgccggcccaagagcccgtaaaactcagtacagaaacgcaggaacatctaatacatatatttctcatcagatcagagttaataacatattaatacaacaaaatctaacacaatcacaacacataacacattatttagtttgagctggtgcaatggctgcctcgttaaaaacctatctaggtaaaactcacacctcgtgagaaaccctagataggaaaagagtacagcccagctcaatattttcattatttcatcacatagttcatctcagaattaagttacatgtccagaacccacattacatgtccagaataccagaacagactaatcaatgaataaatctctgaaggactcttcaaggatcttatcttctgttgtgtgctgcattcttgcatctgctgcctcccaatcctttagcaaggaaagcatctccaccattccagagccaagtcgacgacgccgctcctcaatgagcctacctgcaagactaaatgctgattctgaactcacagtagagacaggaactgaaatgatatctttagctaggattgaaagtactgggtaagtaagtttgtgatcatgccaccaatctaggagattgaattcatcatcaaacttctgaacagtgtcactatctagataagcagctagttcagaaccagaaataccaggagtgcttgctgcatgaagcaaagcactagcagatgtccttcttgacagttcaggaaccatcccagaactgctactggcaccaaaggcacccagaccagcacccagtgccattgaagaactgctaccaatgccatctgcaccaaacaccaaatcccaagcatatttgctcttaccttcaccaggggtagcatttgaagtcctctgcaacctaacagaaccaaatttgtcatcatatttattaaataaatcagataaatcagccctcacagaagttagatatccagagtaatcagaatgagtcaactgagacatgagtgcaagcacattgttgaaacctctcattttagctctagggtccagtataaatgcaaatgcatatagcaaaggaattgtaccccaatattttaagaatttgtctttcattgggacaactatatgtctaagcaaattatcattctcatacatgttcatgtgcttattaatatgaagaatgtggtgcaacattaaaggtgatgtaggatagtacacaccagacatcacaacagtagaatcataaaacctttcaaggaactctaatattttttcagcaacataccaatgtgcttcacttaaaagtgtagtaccctcttctctagggtgatagtgggtctgtataaacacagagaatgtgctcttgtaaggtataagatgtttgagcataaggtaggtagagttccatctcacttccatatctaaaccaaacttacgaggtcttactcccatagcaacacaaaaacttttgtatgcagcaatcctttggtttgatgagttcaaaaaagagatggcagttctaaaatcttcaagataaggtttcagttccacaaatgtggcatgcacagcaaggttaatgatatggcatgcacatcgttgatgcaataataaaggaccaacataagcagatagcaaaggtgtaagatggtccattgccctagtgttagcagatgcattatccaaggtaatggaaaaaaccttttcagccaattcatattcattaacaacagcatgaatcctctctgcaatgttcttgccagagtgggaacaatcaatgagacgcatagcaagaatccttttttctaactgccaatcagagttaacataatgtgcaacaacagacaaataatcttctttagcattgccactccaaatatcagaagttaaagcaacagaagaaacatacttcaatttttcagcaactatagcatgtcgttctttaaagtacttttccatatctctagttgtagtttgtctagaaacattgcaatgcctaggattatgggcagttttaatgtattcatcaaatgcatcacaatcagcaaagcataatggaaggtccaacctagcaatcaaacgacataactgaacacgtgcaacttcagcactatattcccaacgaaagacagtaccatcagcattatatcttagcatagattggttcccagttcggccatggagtcgtttacatttgtccctatgccgagacaaatgaccagtgccaatggtagaacgggcagcaagttatttcttgcaaaaatgacaccttgctcctactctaacctcaacaccattttcagtggcgaaaatcttatccatgtcctcccagacatcggacgtgcatttcctctttctaccagtgcttgccgtagtggaggcagtagcatctgggagagcctcgccctcggcagcgacattgtcgtcgccaaggtttatggtagggttaggggtagggttaggggtaggggcagtggaaccaaagagatcctccaaaccatcgtgcacgtcatccacatcgtctggggtttgacccatcaacaccaaatcatgattaatggaggtaggatcatacctatgctccatcgccggcacctggtccctcacggccacgacctcgacctgcaaagaagcaaagacatagggggattaggggggttagggttaaagaagcaaaaacagagggggattagggtttagcgagttcataccttagccgattaggccggagcaccagttccgtcggcgatagagaagatccagcgacagcagatccagagacacagagatagagccagatagaagaacagagagactatgagcacaagcgcacgatatagatggccaaacagggagaggaggtgtgtgtgaagctttaccttaccagatccgcagaccatcggtgatggataagacagaggagaggcagatccacagatctagtacaccggagtccatagcagaggggggaagcgctagggaatggggatacaagattctgttaccgaagacgtgccgaggacggggcatccaggattccaggaagcacggcgcgcgacggccgacgcctcgacgtcgacggaactggccactgggtgcgaggcggcggtcgacggggaaccgagggaaccgggtgcgagcaccgcgagggaaccgatggccggcgagccgagcaccacgagggaaccgacgaccggcgagtcgagcacccacgagggaaccgacgggcggcgaggcgagcacccacgagggaaccgacggggcgaaaaggcgactgggcgagggcggagcggacagcggagacggagagaacgagacgagtgcacgactggggttagggttagggttacggacttcgggtcgtagaaagtaggaataggtagtcgggcctggcgtgctttccgttttaaacgggccgtgccgggccggcacggcgtgccttggtcgcggcccaagcccggcacgggcgtagtgccgggccggcactagcccgaatccgatcgtgccgtgccgggctcaggcacgccaaatcgtgccgggcctcgggccggcccgactaacccggcccatctggccatctctactgccgctgccgcccgcagcgccacctgttctttattattattattattgacgatccgtcacctgctccatgagcttgttctggaccttggctgctccaatgcgtggagatagtgtgcgtgtgttctttctctctttttcacacgtggctcacagataggaactcgggagcgtgcttcaatgccactgtgcgcgagtatctctcgtgcgggcaatgacaaatagggtgcacaccctccaatttgcacccggttacgttgactcgacttttcccgcacttctctcgtctaatctggagtcaagtgagacctgttcctgtgttctgatttttttccgtctattgataaccttggatcggcatccatcttggactttttagaggagcctccagctctactctagaccaataatgttaaatgaatgtggccaagtccttctatttagaaattttccaaaaaaattatagattcttctcaagacgaaagccatttttatctcgtttgctaggactttttggtaacctagaagtcctaccaaggacccttactctgtaacatccacgtggttgatatgcgtgataggttaattatagcaccgattaaaggaagtgaacatatacagtggagatctttagacacactagtgtgtaatatagtgtgtaataggatcttaaagcgggatagcaacgaaacgaaagatagaaaacggctaaagttgacatagaaagatgcattaaaaagtgatttgaaaagacagaagagagttatcgagcatcgtctgagagacataacaagagaaataacttagatatctatgaaccaatttggtttcatacttgaaaggtcaactatgaaagccatttccttaataagttatggagtagtatagcgagcaagcgaaagacccacacatagatttcatcgactcgaagaaggcttataacaaaatgttaaaaaatattatatggtggtatggagaaacataacaaaatacgttagattcattaaggacatgtacaacaatgttatgaatagtgttgaacaagttataaggatgtatataactttttgattaaaataggactatatcaagggtcaactttgagcctttacctttctgccctagtgatagatgatgtcacaagggaatacatgagatgaacatgaatatatgagatatgtggctatacaagaatggatcgagttcaaaatgatgatataggcaatagattataagtagcactagcaccaattaaagaaaaacatattcaacatcgattgagatagtttggacatgtccaacggagatcccaaacacactagtgtgtagtggaatcctaaggcgtgaagcgtgatagtaatgataaaagatgcgagagaatgccgaagctgacataaaaagatgcagtaaaagagacttgtgatgtagcggtataagggagaagaacctacacatggtttttgacttagagaagacttatgacaaaacataaaaaatgttataggggggtttagacaaataaaagtttcaatgaagtttgttaaggacatgtacaacaagtgtttcaacaagtgatggagacatggctttctaattagaataggactgcatcaaggttcaactttgaggccttaccttcttgcctttataatggatgaggatggatgaggtcacaaaggacatttaaagaggtatttcttagtgtatgttttttgcgaacaatgtagtgctagttgataaaagccggataagagcaaatagaaaactaaagttgtggtaggagactatagagcccaaaggtttgacttggtagaactaaaaccgaatacatgagatgtgagtatgtgactttgacactactacacgtgagggagatattagtttggaaggtcaagtagtgaccaggaagaatagattttgatatttaggatcaattctatagagaaatgggatatagatatttaggatcaatactatagagaaatggaatattgttagccatataatcaaaagaagggcaaagaaagtggcgctaaacatctaccttatgcgtgataagagggtactacataagctaaaagacaaattagacatgttttattatatgatgcataatattggtctacaaaaagataagttcaacagataagcattgcaaaaatatatatgttatatactagaattgtggccacacgagggatcaaatcgatgctatatatatgtgataggttagatatcagaatgaattcataaaaaatgataactagggcgtagcatatcataaaagagaatgaattagcctacttaaatcaagctttcataggccatgctactctttactcgactgttcaaggaaatcaaatcaagtagtgctagcagtcatgcaaataaatcgttcatccttctctctcatggttcatatgtcagggcccaagagggcccgctacagtgacactatagcgacgtggtactgtagcacgcccttaggttggttagataaagataagactagtttgggataagagattagatctagtgcttacaggtcaagtaaccctctttatataaggacagagattgtatcaattgaaggtaaccaagagattagaaggaaatctcttctctcttgccgaccgtgggaaaatagtgcgggtactgtttatccatgtgaatagtaccgtgcctccccagccaactgcccgacgacgtccaagcgtcggtgtcttggtcctagaccccaaacctaccactcgtactacttcgtaaccctagatccataacaatctagtatcagagacgacgtcgaccctcaccctggaagtcgtagcccaagcggttgtcgatctcgaccgttccgtggcgatcatcaccgccttcctctccaccaatttttcaccgctagggcacacgtcccacaccaaccttttgccgccgctgcatgcattgccaggctcgatccgtcaacctagcaccccggcggcaccatgcctgcccattcatttgttgcccatgccgccgtcgccttcccctattccatcatacgccatggctatgggggaccccagtacaccatgcccttgccgcaaacacagattgcgacatcaggtgcaatcatcccttagggaggcttgcccctttacctcatctccatgccaccatcatcatcgccaattccatcgtacaccctctcatcatcaatggcaccataattcacgatggcaacgtctccttcatcgaccccgttgttcaccgccccattcctgtgccgccacagcagcagtgcgatgacgtcttctacggggcgtggatggcatccgagcatcgatgacacaactataggcggcggcatgctgcctcctagtgcgtcggcaaggacatcgccccatcttcaagcggcggcgctcagtcgtcccatcaactagaggaaggcgattgcgtgggcgagtgcctgtaaggtgtcagcggtggtgcggctgcagtctgcctcctaatgcgctggcgactgcaggaggtgcgtcgacagatgcataacatcataacaccccgtttacctagccaacatttagatccgactctaaccaaacttttttggttcaccccaacactacccacttgtttgattgttgctaagcacttttaggataccaaacatacctcccaaatggtacttaaagtggtcaatttaccattgagtcaatgatatacatgataaattagaggtggcaccaattggaaaaaaagattgtccgacaataattgagatggtttgaacatatgtccaacggagaccaatagatgcatcagtgcatagttgaactggttagatgtataagtggattgtcaccattcagtgcatagttgaacggagtcaatgtataagtggattgtctactctcctaaaggcttaagctttttggttgaactggttagaacgtccactttaacatgataccgaagccagacgtctcgagttcgaatcctgacagaggttgcccctgcccctttatttggttagaacgtccactttaacatgataccgaagccagacgtctcgagtttgaatctgtcaataccgaagccagacgtctcgagtttgaatcctgacagaggttgcccctgcccctttattttccacgtttgtgtctttcctctcccgctacacatgagtgagaatattaaagtgtataagtggattgactaccttctcttaaaggcttaagcttttaggttaaactagttagagcgtccactctaacaacttaacctaatacaaaatagttctattaaaattaacgacattacataagatgaactaaatctatcatattgattcacatggtacaaagagagtaaggtttaatgtcataatgtcacaacatacaattttccatgagttctcgtgactacatcggtgtagggtaccttcaacctcctctgcctgtgccatataggtaaaaagaatttgattagaggtaaaaaggataccgactaatcatgtgatggatgaagaaaatattccatatctactgtacctcgttaacaggtacctatctctagttatggttagtgcataccgtttgatataactgtgtttattaacaccatactcaatgaaataatgtgttctcttttgctagacgaagattttttttcaaaggtcacaatttacggtgcagacacatgcatgatttagtgtggggcaaaaaggcatgatgtagtgatgaactcaaaaggatggtttaaattctttttacatttggaatttgagtataggaaccgttgtaccgtaaagaaaatacaatacacaagtttaagtgtgtaaccaagtgctcaactccactccacaaaaacttacgtggccctgcagcacgttctgcggtactatcacaacttagcgatcattggaaagctgagggtatttatacccactcttctcaacggccatctcgtgtttttcattctcaccatccttaagataactcttctcactccattgaagactcataagctctacattgacttccttttagattcctttgagattagagtctctaaactttgttagagagttattcaaactgagatcaaactcttaaaaccatggttattaaagaggtaaaacgttaaaacgttatgaaccaacttttcaacatttaaacgtttaaacgaacgttgaaacatctttttaaacttgacatagaatttcaaatatagaataagttcatacataagttgagttcacaaaccaaataacattagcataaaaagaaatagatcaagttcaacaacacaagttcaacaaacacaagttacaacttttatgcatgattattaaccatcatcaaacttatcaatattaagaccatgagcatcccatgataaattgaaatcaactccaagagcattgctaacatgagaagaattagctaatggatcaacccattcattgtcccaatcaaagtcttctaaaatcaaaggatcaaagttttttccttccttacgtattttttaaaatctatcaaccatctttctgttgtatgaaagatagaccaaatcattcaaccttttgtgctctaacctattcctcttttggtatgcatctacaagtacaaataaaagtaaccaaagaagaactgaggataaaaaagtagtggcgaatagaaattgaataatttgactagctcatttacaaatttaaatgtactccaattccgctcacaaccggatgatgaagcacaaagactaacaatccgtcttgcaaacttatataattcaatagtacgaccaccatatgcaagccaccaatcaactaaaatggcgcgaacaagaagattatatgttacatactgaaaatggaggaaggctatcaattttagaatacttacgtggattccttgtttgtgcttcttcctctcatctgtctttgacaaccctagcaagtaaaggctcacgtagctcatgtaaagtaggaggcttgaacccagatccatattgagcaatagcctccacaactacctcaaattaccttgagttcgcagcattgaatggtataccacactcatagaaaaacttggctatctccaaacaaatagaatttctttcttccttaggcttcatggtagcacttatggtagtttgagcaggtccctttgcatgtctctatgctacaacctcttgaggtgttcgtcgaatcatagatgcaatggacttctttggagctgcaattgggtggggcttcaattggaaaattgctttgtttcttttggcagctgctccagaacttggcacaatacatgaggaagcctgatgatgctgacacgacctgcttcccataacttggacatcatcatcttgtactgcttcatcttccattacatcgtcatctaggtacaccgtcctagcccgcttcccattattcaaagcttcattcatctctttatcaatctctctagcagtgttaggacacttgacaatgtctccatagccaccaggtagatgtttcaccctcttgatacctccttttatttgtttggggcacaaagcacattgaatcagctctcgctttcccgcctcaacatagtatgcatatttctatcctggatcatttgactttggccttagtcactgatctttgagtgggtcataggagtcattactttgaccgacagacaatgcctcgctatttgttgccattgaaattcactgtgagcaaatagagattgattcactgtgagcaaaatcaacaaattcactttgaggctggctgctggtctggcggagtggctgctcagctgctggtcttgctcagcagaggtgaggcagagcagcgcaagtgacaggtgaggcttgcgcactggtgagagcacctagagggggggggggggtgaataggtgatcctgtaaaaacttaaacttatagccacaaaacttgattaggtgttagcacagtttatgccaagtggctagagaggagtcaaaacacaataaccacaagaatccaatcacagagatgacacagtggttatcccgtggttcggccaagtacaaaacttgcctactccacgttgtggcgtcccaacggacgagagttgcactcaactcctctcaagtgatccaatgatcaacttgaataccacggtgttcttgcttttctttttctcaatcccgtttgcgaggaatctccacaacttggagcctctcgccccttacaaaagatgttcacagagaatcacagagcaaaggagggattagcaactcacacacgacacaaagatcacagcgaatacgcacacacaagacccagacttgagctcaaaagactagcacactagaacggagctcaaatcactagaatgtcgaacaagtgcgcgagattgatgtgtgagtgatcaagagtgctcaaggaatgcttggtgttctcctccatgcgccaaggggtcccttttatagccccaaggcagctaggagccgttgggaacaaatctggaaggccatctttgccttctgtctcgtggcgcaccggacagtccggtgcacaccggacactgtccggtgcccgatttgtttccatagaaagcgaagccgaccgttgccgaccgttgcagatctggcgcaccggacagtccggtgcacaccggacagtccggtgcacaccggacagtccggtgctcccttccgaccgttggctcggccacgtgtcgcgcgccgatcgcgcggccgaccgttggcccggccgaccgttggctcaccggacagtccggtgcacaccggacagtccggtgaattttagccgaagtcgccggagaaaaaacccgagaagcggctggtttgcgctgcgctgatctggcgcaccagacactgtccggtgcacaccggacagtccggtgccccagcccgaagcagcctttggctgtacacagccactctccacttcttttcttttcttctttctcctgtttctaacacttagacaagatgttagtacacaaaactaatgtactaaggcttagaaacatacctttacttgtgatttacactttgttcatccatgagcatattttcacatttaggcccttgtgtttgcactcaatcaccaaaatacttagaaatggcccaagggcacatttccctttcaatctccccctttttggtgatttatgccaacacaatataaagcaactagaacaagtgcaaaatcactttaaaaactcaaattggttttattcaattttggcatatatggatcatcctttgccaccacttggtttgtttttgcaaatcaaactcaaatctctatctctaagtcaaacacacatgttgaagtataaagagagtcattccaaaagagattgatcaaagatttcaaaaactccccctttttcccataatcaacacttctccccacaagaagccaacttttgaaaatagagacaataagagacaataaaagcttttgacaaaacaaaaactctattctactattttcaaaatctctcaagtggtagctgatccatttatcactttggcctttattttctccccctttggcatcaagcaccaaaacgggatcaatcttggcccgttaaccccattgcctcaccaaagtcttcaattaagagcaaatggcaataagatttcatgagatgaacttggaattagttaccctctcatcggagtgcagtggaagtctttcatggtccaagtccaccttttccctttcaatcctccttcgagactaaattatcaaactcaagcacatggttagtctcaaagggtcaagttgtaacacatctccccctacacatgtgcatcactttgcaacggacttgtgaggtccagggagtgtttgtacaacttgagcaccataataagcaacataatgcaaaaaggaacatgatcaaaagcataactacatgtatgctacaattcaatccaggttccgcgaatctaagacatttagctcactacgcaacctgcaaaaggtcttctcatctagaggcttagtgaagatatcggctagctggttctcggtgctaacatgaaacacttcgatatctcccttttgctggtggtctctcaaaaaagtgatgccggatgtctatgtgctttgtgcggctgtgttcaacaggattttccgccatgcggatagcactctcattatcacataggagtgggactttgctcagattgtagccaaagtccctgagggtttgcctcatccaaagtagttgcgcgcaacactgtcctgcggcaacatactcggcctcagcggtggatagggcaacggaagtttgtttcttagagttccatgacaccagggaccttcctaagaattggcacgtccccgatgtactcttcctatcgaccttacatccagcatagtcggagtctgagtatccaactaagtcaaaggtagacccctttggataccagagcccgaagcaaggcgtagcaaccaaatatctaagaattcgcttcaccgccactaagtgacactccttaggatcggattgaaatctagcacacatgcatacgctaagcataatatccggtctactagcacataagtaaagcaaagaacctatcattgaccggtatgctttttgatcaacggacttacttcctttgttgaggtcggtgtgtccgtcggtccccatcggagtctttgcgggcttggcgtccttcatcccaaaccgctttagcagatcttgcgtgtacttcgtttgggagatgaaggtgccgtccttgagttgcttcacttggaacccaaggaagtagttcaactcgcccatcatcgacatctcgaatttctgcgtcatcaccctgctaaactcttcacaagacttttggttagtagaaccaaatattatgtcatcgacataaatttggcacacaaacaaatcaccattacaagtcttagtaaaaagagttggatcggctttcccaaccttgaaagcattagcaattaagaaatctctaaggcattcataccatgctcttggggcttgcttaagtccatagagcgccttagagagcttacacacatggtcggagtaccgttcatcctcgaagccagggggttgctccacgtacacctcctccttgattggcccgttgaggaaggcgctcttcacatccatttgaaacaacctgaaagaatggtgagcggcatatgctagcaagatacgaattgattctagcctagccacaggagcaaaagtctcctcgaaatccaaacctgcgacttgggcataaccttttgccacaagtcgagccttgttcctcgtcaccaccccgtgctcgtcctgtttgttgcggaacacccacttggttcccacaacattttgcttcggacgaggcaccagtgtccaaacttcattgcgcttgaagttgtttaactcctcttgcatggccaacacccagtccggatctagcaaggcctcttctaccctgaaaggctcaatagaagagacaaaggagtaatgctcacaaaaattaactaatcgagatcgagtagttactcccttgctaatgtcacccagaatttggtcgacgggatgatccctttgaatcatcgctcgaacttgagttggaggtgccggttgcgcttcttcctgtatcacttgatcatcttgtgctcccccttgatcaagcgcctccacttgaggtacctgttcgtcatctttggttgggggttgcaccatagttgaggaagaagtttgatctcgttcatcttgttcctgtggccgtacttctccaatcgccatggtccgtatagcggccgtcggaacatcttcttcatctacatcatcacaatcaacaacttgctctcttggagagccattagtctcatcaaatacaacgtcgctagagacttcaaccaaacccgatgatttgttgaagactctatacgcctttgtatttgagtcataacctaataaaaacccttctacagctttgggagcaaacttagaatttctacccttctttactagaatgtagcatttactcccaaatacacgaaagtacgatacattgggtttgttaccggttagtagctcatacgacgtcttcttgaggaggcgatgaaggtagaccctgttgatggcgtggcacgccgtgttcacggcttccgtccaaaagcactcgggggtcttgaactctcctagcatcgtcctcgccatgtcgatgagcgtcctgttcttcctctctaccacaccattttgctgtggtgtgtagggagcggagaactcgtgcttgatcccttcctcttcaaggaactcctccacttgaaggttcttgaactcggacccgttgtcgcttcttatctttttcactttgagctcaaactcattttgagctctcctgaggaagcgtttgagggtcccttgggtttcagacttatcctgcaaaaagaacacccaagtgaagcgggaaaaatcatcaacaataactaaaccatacttacttccccctatgcttagataggcgacgggtccgaagaggtccatatgcagcagctccaggggtcttgaagtggtcatcacattcttgctgtgatgcgctcctcccacctgtttccctgcttgacaagctgcacaaggtctatctttttcgaattgaacattggttagacctatcacgtgttctccctttagaagcttgtgaaggttcttcatccccacatgtgctaagcggcgatgccacagccagcccatgcaagtcttagccattaagcatgcatctagaccggcctcttcttttgcaaaatcaactaaataaagtttgccgtctaatacacccttaaaagctagtgaaccatcacttcttctaaagacagacacatctatatttgtaaacagacagttatatcccatattgcacaattgactaacagatagtaaattatatcctagtgactctactaaaaacacattagagatagagtgctcattagaaattgcaattttacctaacccttttaccttgccttgattcccatcaccgaatatgattgaatcttgggaatccttattcttgacgtaggaggtgaacatcttcttctcccccgtcatatggtttgtgcatccgctatcaataatccagcttgaacccccggatgcataaacctgcaaggcaaatttaggcttgggtcttaggtacccaactcatgttgggtcctacaaggttagtgcaaatatccttagggacccaaatgcaagttttgtctcccttgcattttgcccctaacttcctagcaacaattttcttatcctttctacaaatagcaaaggaagcatttaaagcataataaattgtggaaggttcatttgctattttcctaggagcatgaataacattccttctaggcacatgatgaatagcatttcttttaggaacaacatttctcctagtaacatttctatcatacacataagaggaactaggagcaaacatggtatgagaatcataaacatatgaatcataagcatcatgacttacatttctagtttgtcttctatcatgatacaaaaatgcatggttccttttagcactagtagccataggggccttccctttctccttggcgggaatgggagccttatggcttgttaagttcttagcttctctcttgaagccaagtccatccttaattgaggggtgtctaccaattgtgtaggcatcccttgcaaattttagcttatcgaaatcattcttgctagtcttaagttgagcattaagactagccagttcatcattaagcttggaaattgaaactaggtgttcactacaagcattaatgtcaaagtctttacacctagtacaaatttcaacatgttctacacaagaattggatttgtttgctacttctaatttagcatttaaatcattgttgacacctttcaaagtagaaatggtttcatgacaagtagatagttcaaaagaaagcatttcatttctcttaacttctaaagcataggatttttgtgcctcaacaaatttatcatgctcttcatacaacaaatcctcttgcttttctaaaagtatattcttttcattcaaggcatcaattaattcattaattttgtctatcttagatctatctaagcccttgaacaaacatgaataatctacttcatcctcatcactagattcgtcctcacttgaagaagcataggtagagttgcgagtacataccttcttctctcttgccataaggcatgtgtgacgctcgttggggaagagggttgatttgttgaaggcggtggcggcgagtccttcattgtcggagtcggacgaggagcaatccgagtcccactccttgcctagatgcgcctcgccctttgccttcttgtaatgcttcttcttttccctcttgttccccttttcctggtcactatcattatcaggacagttagcaataaaatgaccaagcttaccgcatttgaagcatgatcgcttccccttggtcttagtcttgctcggctgtccattgcgaccctttagcaccgtcttgaatctcttgataatgagggccatttcttcttcattaagaccggccgcctcaatttgcgccaccttgctgggtagcgcctccttgttccctgtggctttgagagcaaaaggttgcggctcgttgatcggtccattcaaggcgtcgtccacataccttgcctccttgatcatcattcgcccgctgacgaattttcctagtacttcttcgggcgacattttggtgtacctgggattctcacgaatattattcaccaaatgaggatcaagaacggtaaaggacctgagcattagtcggacgacgtcgtggtccgtccatcgcgtgcttccgtagctccttattttgttgacaagggtcttgagccggttgtatgtttgagttggctcctcgccccttatcatcgcgaaccgtccaagctcgccctccaccaactccattttggtgagcaaggtagcgtcatttccctcatgagagatcttgagggtatcccagatttgcttggcgttatccaagccactcactttattatattcatccctgcacaatgaggctagaagaacagtagtagcttgtgcattcttatggatttgctcattaatgaatataggactatccgaactattaaagtgcattccactatctacaatctcccatatgctaggatggagagagaataggtgactacgcattttgtggctccaaaatccgtagtcctccccatcaaagtgtgggggcttgccgagtggaatggaaagcaaatgtgaatttgaactatgcggaatacgagagtagtcaaaagaaaagttagaattaaccggtttcctttgtttgtcgtagtcgtcgtccttttgggaagaagaggactcatcgctgtcgtagtagacgatctccttgatgcgtcttgtcttcttcttcttcccatctcttcgcttgtggcccgagcccgagtcattggacttgtcatcccttggctcgttgacgaaggactccttctccttgtcgttgatcacaattcccttccccttaggatccatctcttcgggcggttagtccctttcttgaagagaacggctccgataccaattgagagcacctagaggggggggggggtgaataggtgatcctgtaaaaacttaaacttatagccacaaaacttgattaggtgttagcacagtttatgccaagtggctagagaggagtcaaaacacaataaccacaagaatccaatcacagagatgacacagtggttatcccgtggttcggccaagtacaaaacttgcctactccacgttgtggcgtcccaacggacgagagttgcactcaactcctctcaagtgatccaatgatcaacttgaataccacggtgttcttgcttttcttttctcaatcccgtttgcgaggaatctccacaacttggagcctctcgcccttacaaaagatgttcacagagaatcacagagcaaaggagggattagcaactcacacacgacacaaagatcacagcgaatacgcacacacaagacccagacttgagctcaaaagactagcacactagaacggagctcaaatcactagaatgtcgaacaagtgcgcgagattgatgtgtgagtgatcaagagtgctcaaggaatgcttggtatgctcctccatgcgccaaggggtcccttttatagccccaaggcagctaggagccgttgggaacaaatctggaaggccatctttgccttctgtctcgtggcgcaccggacagtccggtgcacaccggacactgtccggtgcccgatttgtttccatagaaagcgaagccgaccgttgccgaccgttgcagatctggcgcaccggacagtccggtgcacaccggacagtccggtgctcccttccgaccgttggctcggccacgtgtcgcgcgccgatcgcgcggccgaccgttggcccggccgaccgttggctcaccggacagtccggtgcacaccggacagtccggtgaattttagccgaagtcgccggagaaaaacccgagagcggctggtttgcgctgcgctgatctggcgcaccggacactgtccggtgcacaccggacagtccggtgccccagcccgaagcagcctttggctgtacacagccactctccacttcttttcttttcttctttctcctgtttctaacacttagacaagatgttagtacacaaaactaatgtactaaggcttagaaacatacctttacttgtgatttacactttgttcatccatgagcatattttcacatttaggcccttgtgtttgcactcaatcaccaaaatacttagaaatggcccaagggcacatttccctttcaactggcggcttgcgcagagcagcgcaacgaggcagaacaacgcagaggtgaggtagagcactggcggcggcggcacactggactttggagcggcgccgcactgcactgtgggcggagggaggagggagtagaggggccgacggcgtgcctggactcctggaggcggctgagggcggctgaggacaatcgacggcggtagcaggctgaggacggctggcggctgaggacggctaaggatttagggtttgagggcgactgaggacggctaaaggcctaggaaggcccactaacaactagaatgttcatagaacgcttaaaacaccataaaacacgttttagacggttacacgacgcttaaacgtccaaaacggacgttcaacaccattttcttagaacatgcggacgttttagttcctactcacgttttatcgcttaaaagacgcttaaacgtcgtttaagcgacgttttaataacaatgcttaaaacacttagttctcactcaaaccggtggattgcgacctagatcaaacttctagaacacttagttgtcactcaaatcggtagattgcattcgttgctcttgaaaaagggctcctagccggctagacatcttctattcactcaagcccttgtgggtactccaaaaagtttgtaatctctatcaacatctagtaagaactctcaatcaagagacttgcactcttaactttagttctcactcaagacggtagattgtattcgttgctcttgaaaaaaaggctcatagtcggctaggcatctcctattcactcaagcccttttgggtactccaaaaaaaattgtaatctctaccaacatctaggaagagctctcaatcaagagacttgtgctcttaacttgagaagtgtacatagttcttgaaaccaagtctggatggcttcctcaacatggaggtgacaatccttagtggcatgctaaaccatagaataaatcatttgtcccttgtgttttttatgatcgtattatgttctacttatgttgtggttggtttagggtttgcgcccgatctacttgtacttaagcttttgacatcgttgtgaattagactcaaagctaccacaagaaccttagtaaatcactcgatctaagttctcttagatagtttttgaattttatacatgaggtacctcgggtgcggtagtaccacatcaatacccaaaactgtcgtggcacggtgatcctcacgcaagcacgagagtatcgcgtctgattctaactgttatattaagtttgttttatatgtctattgaaccatggttcttaaggcggtaagacgaggcaaggcgttggaccaccgcctggacgcctaggcaacacctagccgcttactaaggagagcaaggggacaccttaccaattagagaaatagaagaacaacatagatgaggaagaaaaagcaccttaccaattagagaaatagaagaacaacatagatgaggaagaaaaaggaaaaggaagggctaggagatgtataagagatggcctatcccatcagctagcccatataaccttccctgctagtgattagggttaccccagtctcacgatgctgctcgccggcatctcagcgtcacctctcctgctcccccgagctctacgccgctgctcccccagctttgtgccgttgttgcccctgagctgtacgccaccgctcgccctgagctctgcattgtcggtcgccgctctctcgagctctgtgccgccactgtcccaagctctataccgtcgcctaggcttcttccccttcccctcttacctcgcttgctgattcttagctaggcggggacgcctagaacttttgggcgcctggacttaggtgtcacctaggcgacacctttgaaaccatgtattcaaaaccctatagacttgcatgatcctttttcactaccagaacccaagatttggcaaagtcgccacatccacttgctgctgtgcatgttgcatatcactaaaaaataagtgtggtaaatgctaaaataaatctagaaagaaaaaagtagaaaaatacgagtacttattgatacaacttatgaatattcacatattcgatatcgtttctaccgcgatgtgtcgatcttctgtaactatggtaatatgagaagtttgtgaatttaaataaatgaaataaaatgatacttaacacatgtttttatctttctacaatcaaatcttggacttccacaatgctcgtgaagaaccctctatcccttggaattattcctcgtttgtgccggattggtgggtcggaacgattcctaaccggattgcttctctaatttatataaactttaattagctgaaacgattccggatgcaatccgatagaaacgaacaaggcctaaagtgattgtgatgccttgttgctagcctagcggtcaaccattattgtcgcattgtaattatcagatgacaatgggtatgaatccattttgtattgtccatctatacctacaattgatgggataaatgggtatgaatccattttgcattgtccatctatacctacaattgatgggataaatcgtacccatcaaactttacctgatctaggtacaaactcagatacatacccatgctctgatgctcataagaggttgaattgctacgacagcttgtccaaaggcagcaacaagtaccacaacctcatgatgtgtacaaccaccaccagcctctggttgtgagctaccaggatttcgatttcttgagtacacaactgttcaacaagactgaagaatccactctgatgcttggatatgcatggagatgctttcagtagtttgtttggatgaaagcaaggccagatttggtgctcaacaactgcgatgattggctcgtctatgtggaacaactatcacgtcatactctcagcagatcacattttctcataggaagaatttaagataactttctggaaggactaacggagagggtttctaggactgacccaagacaactgcaccatactctagtatggtcaagctttcgaaatctatgccagtatgtaggatatcatggagacacggatgccaaaaaagagatcgttttcgtcggcctcaataccatgctcaaacaacgcctaaacccggtgaaagtagacatgtacaataaaattatgaacttggctatcacgcaagaagactgcatcatgcctcggagaagtgaaaggccccaattgcaccatcaaatgcccagaatcagaaattcaagctcgtctccaatgcactggccagagtttctcaagcatcacaacccgaatgttaggtaatacaaccaccgcagcaacagggtaacacccgttttaccgttccaccacccaagacacaaggcccaattttcagcagcagaatcgtcctggccaacataggaataggtgctttacttgaagtaaaggacactttcacttcagaattttgtttctttctttggtccaagttcgtttcaaggaattactctaaaacgtcaagatctcatatctattaaacaccatgatctcacatcagacgtcatgactcatctgtttttccttactttataggtagtttg

SEQ ID NO: 583 - DNA, 1961 bp, Zea mays
  Intron number 5 from transcript GRMZM2G052610_T02 (locus G RMZM2G052610) derived from phytozome v7.0 (chr-ID 7; pos 1 41883294 to 141885254)
ggaagcaatctcggtatgtttatgttctgttattcgcactgcaagcttgacaatattcacattgcatgctccaattggttttgaaatactatggttttaatatgtcataacataaccatagtattttttacattactcttagcactacgtatttagagataaagtatcttaaaccatgataatgagtgtacatatgcaaggctagtcataaacaaaaacttttggttgaagttgagttttaaatactccaaaaataatatctacaaaacaatagtgttcaaaacagagtttgtaccatatagccaaacaccttttggcaaaaaatactatggtactcttcaataccatagttttacctcaaaacttcaaaaataatttgcttccaaatacccttaaggtgttgcgtttaaaaggctcatagttggactttaggccgggttggccggtacaacttatgcccatcacactgcaacgagtgatgttcttttaatcgaggtctgtttgaatatattcccacaaggagtcgaaccatgatctaaaaaatgctacttaaggctcttgtgaccactagacttcagaacatcttcagtagtacctcaaaaaccagctaaatttaatttggattgttagtaataaaaaatcatgctccaataattccttaaatgaagttctaaagtataccaacttcctaaatatctctatttatttctcaaacttgagaaattgtttcgcacttgtgatagcctgtttttctcataaaatcacttgtttgtcatcaagttcgcacccgtgtataagtggtgtaatttaaattatttaagttatagaaataataaatttactatcgagttagcataatttaaaaatatttaacaacctaagaattaagaactattggaggttaaggtcggaggttaagttggttttgtttataatatatatttagcaacttgctaaatcggagtttagggagcattttttaagaactaacgaagatgctgacctgttcacatgtgcaaaaaggccacatttgtctcttttcccagttaggctatgtttgggtactctaatattcacttcaatacatatggatctcaatccacctcaatccatgtgtattatggtgaatactaactagatcattcaaacaaacccttacggtattgcatccgctatataatataagctatttataaataaaacatctaggataagtttattagttattacaacctttaaaatttgtaagcgtattccgttccatttgacaggatttggacaaacaattactctattagtatgtcatttgtgtgatacaatttcgtgatcataagaattattttccgataccaacttttcacatcaaaatttctattgaaaaaaatcatttattaataaataaattgtatgccaaagtgttgtcctaacgaaatgaaatacgcctactatttcttcaaatgcagggagtagttgtgctttttttttaacaaattagcttgtactaaacgtcgtgtattcaaaaaacgaagggagtagttcatcattacattgtgctttctgctgatggggttttagcattagaattttcagtgactgcaaaggtaaaccgagttttcttcgactgtttggatttagcagaatagtacccacattctctaatattttctttaaatttgaactaaattcacaaaaaacaaatgtctagaaggatgacgggtaacttgatccttgaggaaagaaaagcagcatgcacaactcatctgagaatactgattaggaagctgttgaattcactttcacacagttattgtaccaccaatatttttcttcttttcagaaagtgacttgttcgaaatatcgtgctattttctcgagagcaaataatatcagcgttggagcttatgctctgttccggttgaattttggcaggtccctgatagctgcgtacttgttggtcctga

SEQ ID NO: 584 - DNA, 11244 bp, Zea mays
  Intron number 1 from transcript GRMZM2G177424_T01 (locus G RMZM2G177424) derived from phytozome v7.0 (chr-ID 7; pos 4 4803782 to 44815025 reverse strand)
ccgttcttctaaaggtgatatgcaatctttacttggtacttattacggaaaatcgaatgggatgagaataattacttgtgaaaatgattacaaattaattaaactctgccaatatgattttttggtaaaatctaaaacgtggcctgcataggtcagagaccgtcgaagcttcctctagctctatacgcattccaagtttaaagaacaaattaaatcccattagtcagatatgatagaaagattaagctgacgccagatttcatacaaagagtgatccgtagtaatttgacattgctgaaatttgaagctttgtgtgtcatgcaaacaatatttgtttctttactgatattctcatgtagtaaaaatatataggtggtctctaaattctcttagcatgtcagtcatgtccttaaactcttacagtaaagtttaaggacatcgaacttgtcttcatatatcatctagatcctaaatttttcaaatcctattttcagagcttacgatttgtctcagggtgtcatatatatgtacccgagcttgccatagcgtgtcacttagatccaaatagaactgatctattccacatttgtcatggcgtagcaaaattagactgtctccagcagacttgtaaaataggggacacgaaactgtagatgacactatttacgatgaagtttgaaataggggtgatacatgggatggaataggggatctgctggagatagacttagggctagtttgcgtactctagtattgacctcaatccacttgtattgaggtggattgaggtgtaacttaaactaatttacacctcaatccacttcaacacatgtggattgagtccaatactagagtatccaaacaaagccttagggtacttaaagtaccaaaaaagagatacacatgagaaagtggggcataggttggtggtcgtgctataggtaggcacgactagaagccaactcgtggacaattaaagaggtttgaaacatgtacaatatgtgtaataccatgtgtcctcttactactcatcgattgatgaatagaaatgtgaagaagattacaatcttatacaccactgagcatgaagaccttctagctcctccagtcctcctcacctcatggttcttgtgggagctctagcctaatagtcataatccacctttatgcatgccctttatgtagagtaaactcttatgtaagagtatgtcgtagaaactcgataacctaccctaacccttggagagtctggaacccaaattgacctaatttgacccgacccttgatctttgatgcgatccctctaaacgttactctggccctcccttttatagtgcaaaggaggagagaagttacatggacctcgaagatgctaagatgcaactaccacattcttatcctgttcttgaagtcgtacctagggtcacaccttatgccacgacatagtgtagagatgcccttcataagtctactaccatatctgccataggggcaagtttgatatgttgcatccacgagcgttggggcccatgccactaagtataatgtaattggtagttggtttatccttcttgatagttgcttagtggtgaataggcaacacctgaaaaacttaacacttaaaaacaaactagatcccaaattagaggttacaacgagaaatatttaaatcagagtagtaggatagggaggggaaagttctcttgggcttgttgctcttatgaatatgaaattgacctagacaacaactcaagtgacttaaatcaaagtccaagcaagagaacttagagagcgagatgaaagttctcttgaacttgttgctcttatgaatagaaaaatgacttagagagcaactcaattgatttaaatcaaagtccaagtaagagaaattagagagcgcgagagagaataacaaatcacaagcaaatgcaaaacacacacacacataaagacacacgatttgtttgactagagtttgattcaaagaacctatgtctctgttgaggtgtccctaaggacggggtctcttttaactctttcaagtgatcctaatgatcaagcttgagccctcagatcttcgatgatgagagacggagtctccacaaggtactccacaagcggaaaccacttgttagcctttacaatagagaataacccacacaaaagcaagaacccaacaacacaacaccaaaacttatatcacatgagcacacacactctctaaaatgattatatctactcaaatggggtgctcggatctctcggaatggcttgaatgtgttgcagaagtgtttgggaataaagcacaactctagtagcgattggtgtttcgaatggattgtttgggggtattaatagccccaaacccctcaaagagccattggatttattgctacctcgagtgcacctcttactgtataagaatcatcaggatcccgactgaagccttccttctgcattggcatcggactggttcgctgcaccaccagacctggccacgtcaacagccacgtcagctagccattgtaatcgaccgttgaactctgaagtagccattgaacctgagtgtctgatgcacaccaaattgggccagtgcaccaactacaatctgcaatgtctccacgtaagtggtccgacgcaccaccagactagtccgatgcgccaggccataggagtcacttatgtagagctctttgcataagtggtttggcactatagatggccaaatggatggctcggcccgacatgacatgggcccatttaaggcatggattgttaggcctggctaactcatcaggccatgcccggccagctcgcgtgccgcgacagaggtctaggcacagcacaacggcctgataatcgtgttgacctattaatcgtgtcctagcacggcacgacagcctgttaatcgtgtgctgtgtgcatgagtagaaggcttcagagcgatctgataaccagtggagctcatagtcatttgtgttttttgtgaattggtataatatatatgcacatacaaattattttaaaataaaaaataatccagtcaggccggaccagcactgtgtgccaaggaggcggaccaagcacggcccgtccctcgtaccgggctcgcatgagcccattttccatcatgtcgggtcgtgccaaggcactattaaatgggtcgtgcctcgagtcagcccacctgtcacaaaccatttggtcatctatatatagcgcaccaccaaactagtctagtgcgccagatcacttaagaccttctacagagctctctgtgtaagaactcatgcagacctctctgtgaactaggtctggtatgtcgctggactggtccggtgcgccccagcctactaagttgaagttcctattgattaatcttcttcaaattgatttgagtttctttgagagtatttccatgacttagacaacaacttatagtgattgtccaactagtataagtcatggatcttcactactttacctcatccaactttagaatctagttttggctcaaactaggctccaaaagtaccttttccacaatctaacttctcaaatcatatatggtgctaaaaaacattcctaagggtacttagaacttatctaaacttatgaactactcatagctcaccttatccaaaatatgtccttcatggcctttgtttgagctaattgttgagttgaatatctcaatttgacacttatgaacttgcaagcacatacttagcaaactagttagatctcaaggttgtgttggccattaatcaccaaaatcaaactagaaatggcatatagcacatttccctttcacttttatacttgataatattacatggtacacttgcatgtgcatgcgtagctacaagatcgatgcacatattgtatagtggtctcgagtaccctatagcctaagccacaacaacaacatgtccattaggcttgtaatgttgcacttcacatattaaatatgttgtacataagacacatctaataatctaacataattgacttgttggtaagacttttgatgtaggatcttgaccttggggctatactagctaacattatggacttgtcaataggatttgatgctaggtgccgaccttagggtcatacttcccttagtgttcctagacacatcttttagtcttatgataggattacacatatttgcgtcaagtcccttgttccttcagttgattcgtgccttgaagggtttggggcccggtcgttctcacaacatgaggtcaaagacgttatggacctcagggctagtagaggccccaagtgttagagcataattgactgctctagagcttgaactgtttcgagcacttgtaccactcatgagtgtccttgggcacaacgtttctatgggacttggactcacaagcatcctagggttcaatgggcctcggggacatagattactcatatgtgcacaagggaagatggtacatgaagcatctccatcctttaggactaaaatatgatacaaatactagtcctaggaagctagtatgcacatttatacatcagctggttctatatctgcttaaatgagacaaacctatacaagtggtggtcaactctaagagttggacaacaactcaagacatatcatcagagtacgacttaagttgtccaatatacgtagcgaaacaaatcagcaatccacttgccataggcatggttgggcagtaggcgtaactcttacacgatcaacaatcttcttctaaaaaacaacaaataagcaagggcgagtacttatgtacttacaacccaccttcacccatggagtagggattttagattaaatgcattgagtcagtggagcttagagactttagcataaaaggcatttttatgcagggatatttttgtaaaacattttatcttaaccaaaagtgcattccctcccaaaggagcggaaattttttccattattagacaaaatcccctagactaaaccatccaagaatctcagttgtttcccatcgattttcattccaaaaccaaaagcagtaactggacttcttgtccactatatagctcacaactcgaccatcggacctttccaaatcatttttcaaagtatttacaaaacaaaacactaattgttagaaccaagccataacttgtccataccaatggacacagactattccaatatatttttaactttgcgcagaggtgtacacttcacccactagtctagttctataatctcactgccatgagactcaataccgaaactcatcatcccctacatggctttaccttggtggttatagagagaggaacatggccaccttcttgcccaaaatcgagacaacaatgtctcccttccttctcctcccattgcccccagccaccaataaccctagggtttagcccatgcaaacatggatcgagtggctacccatgcagatttgagtggttgcacttttgagagtttatctaaggtgtaatgtcaaaaattggtccttatgcgagaaggaacaatctaccttgctcacacctatcctagttgaacgaacttcttttctggccctcccacgacaagagagtcccgaccatcacgctcaaggtagtgatggtgataactattcacttttttttggaaatcaagtttcttttgcaaaactcaaaccttcctcaaatcactttgtatcacaaattataaggagtctatggatgtttcacggagatgttctaaggctaggtggctatatcaaaggcatttagtgagcttcatcaaatcttttagcaacaaaataatatgatgcgtataaaaaataggctaaggaattgtgtttgaaatataggtaatttatgcatcaaagacattcaatgagtttgtcattgctttaatcgacgaaagggtgagagctcaccgaactgtctccttgctttaccgtttggcgtagactaatgaaagtagcgagtatatcaataaatattcattatagtggtcaagaatggtgcctactgggtgaatagagttttgagtacaacttgtgttgatggagtggagatgcttacccaaaggggtatatcggaggtgaaccaacactagaagtgtagttggcaaagaagagtaactgagtgtgttagggtttgcctcggctcaaggtgttaagtgtgtgggaggaagaggatagccctcatggtgtatttatagctagggtgcacataacttagtagggttttgaaggagggaattatatgcagtacatgggataaatatattttggggggttttctagaatatgaaccatgcgtagagaatgacatggttgggtagaggataatttgataggaatttataaataagaacgatcaaaatctgagttttgatggaggagttttagattttatatccatatgaattagaaaaagaaaaggaaaaaggaatattcctagaatattccaaaattcgaatatttagcaatatttggaaaatcaaaaccatgaatgtatttttaactagagtaacataaaatatttctaggtggttcatgagtgaaggttcatgtcggtgtcaattgttcctacctatggtgtcaattgagacataaacagctagcgtgagacccgaatggttgggatattgcgatatcctggcctgggtaggttgtggtatcttggcccaagatttgaataaggtcgatagcatactcatatagacaaggtatatcttcctttttggaagcctgcctcaactggaccactatgttaagtgtgcttagcttggagaaatttttagatgactgaccaactgggaagttttcattggaaaaaatcagtcaacggagtcccttgccccctctattatatgcaaggcagaggattagtttgcaagtccaaagaatagtgggagataagcatacgattagatggggataattatatttagcatgtagagcttatcgtatgatagtagggttgtatgtatgcatatgggcttaagtggcgcaagggaaattattaagaaaatgttagtaggaattttaaaaaaattgagggtacttctcaagaggaaataatatttaaagaagtatcgatcgaatatttaggcaatattttcgggaagcaattgatgaaaatcatttggtaaatatttatagaatactttgtgagaattttggagagaaatatagaccactatatttcctttgttgagatcaactcgcatacagatttttttgaaaagaaaataaaattcattttgaatttagaacaagtttaagaaattttcttgagtgaatttttagggtgttacaatccctaaggatagaatcataagcgtctgggcttaaggagccatggggacttatatttctcaagactgtctcagggcacgagggtttcctaggacatagacccatgagtgccctgggcctcaaggggccttagagacttccattattatagctagagatgtctagaggcacatagagcctcatacattcgagtgcctccgacctggtgagcttagggtccttaatggcctgttgtgagactttatgattcaattatttcttcatggtgtcctagtgtcaagttacgtgatggcaagcccctaaacttgctagggccaggagaggtcactagggcctgtggccccatggccagaggtcttagttggtggaccctacggtaactctctatactaggatccttggatgcattttggtaatagtcaagggtatgttctttccatgcactaagacatcaaatcatggtaccacatgccataacgattgaatcgatacgtcattcttcgttgtgaaaaaacttaatgcgaaaattgtttgtgtacctcttttgtctaaaaagtgctagctttgccatttgatgccaccatgattggtgatgtcttggttttcatgtggatgatgattaagatatgtgttggggatggcaagttctagatcgagttgtgatgccatattagattggaaaagttgagagaagggaagagcatggatatagagctagagagggttgagggaagacatgcaaatggagagttagagaccaacatgtggttgatttggagctcatttgtacttagatgaaacaaagtaataacttcaaagtactaaacataaaatttcaagaactctagaatgttaattcaagatcaagctcaagtacataaaaatgtattttgagagttcaagaacctcactcttcataaaagataagtttatatatcacttgtgcattttactttgttttagacatatagagcttccaactacttgttcgtgacatttttgttttgtagttccaaaagaataacatgtttttaaattgaaataacatgttttttacatgatgatagactccttttgtactcataatatactgcatccattttacgttataagatacttattgtttttttagatatttagattttactattcacataaatatacactataactagatagagactaagaataatatacccaagaaagtcaaatcgtggaagtagtactaacccagccagtctattcgtatgatcaggaaacaccaaatatgttgaatacatacatacatagagggacgagatagggatattggaagcacagggcttccaatagttatagaaatccccaaacagagcacgcttcgggttcacaccactcaccctcgaccccaccaggagcatttgcgcaagttctgtcggatggggatgacccggttgagacacaggtgggtgcgctctgcatttgtaattgaagtgtaagatgctgtaagaaatgtagtaaaatccattgggaaatgcataaattaagatgatcaggattattattgacatgtaaatgatgaaaccataaaattccattagacatcatagtgagcatgatagatttgcaatgatgcatatattcaaatatactagggccaccatattatttgtacggctgtaatcatattcatgatcgtaaaatccacaagtttgagtgtaaatattgttaaaatggttagcgcgatgtgacatatgacacccatgtagacatgtgcgaatccaggtggttaccgtaaatacaaagccaacgagagagatgtggatatctctagatattgtatttgtgatcataaaatcttcaagttggagcataaatagtgtcaaatatattgtacacgttgttagggaagctccaatagttatgtaaatattaactctatttaatcatgaatttaaggagttgctaaataactttaggggtcaaaaattgtgagttctccaatagctatctcaatattggttgtagtttgttttgaatatatccatgtcctaaaacaagccacaaatgtcaacaaccaccttcattacctacataatgcaaccaattttttgtttagggagttggtaagtggttgtcaaatgtacagaggaaataaggttagatgaggaatagctaaatttagtaagttcatttaaatagttgttagagagaaatttttaggttaaccttctaagttattgatttaaggagtcgtttagagaactactagagttgctcttacagtggtcagcgcgaagtcacgtacaacccccgcgtaacaaacgtgcgtgaatctaggtagttactttaaaatactgagccaatgcaagagatgtggatatttcatgatcataaatccttaagtttgagcatgaccctcgtgtaacagacacgcgtgaaatctaggtggttactataaacaccgagacaacatgggagatgtggatatcactaggacgtaatacacacgatctcataacaaagtagatctctattcgtggataccgctatgacatgataaacaaaagggttaagtttagttacgatttcacaaagaccgcacttattttttgacataacaaaaatcgaggagcgtaacatacatggtaattcagcatagatacacctacaaattagcattaaggtggtgtaaaaaatcagcgtagatacacgagaatcgtacattatgtctaaaattagcataaaacgtttatgtgtagtgcataagaagtgatatggttgcgccttcgcgtcgccgtgcaccaatggtgtctcatactgctcatggatgtacaaatgggcgcaggccacctacagcgccactagcacccgccgcgcccacgtcatcggtgccatgtcgccatggagctgctcgtgtaggctaccattcgacgtgaactctagcaccaacatgcctttgtatttctagtgatagaaggcaaggaggtggacgatgtgggggtggcagacgcataggagtgcgtcgagctcctggtggaacacgaggtggaggcgctcgctgctattgtggaccttcactgtagcgagggggccggtgaggctggcaaggtagacagtcctggcgcaacatgacgtgaagccccccattatggcctccacctgcaccctcaaaagttgcctcatgcttgccatcgtggcggcggagacaacagtacctgtactggccgagctagtgttgatcgcaaatatcggcgtcgtggacagttgggcagggtttatagtgtgggctaaaaacattttgggttacgtctctaactgtgggctagccggcctggcctgagtccacccctaattgaggtggtgcggctgaaccaaaaggtattattggatcgaggcttcctctagttattggaaggacatgctcttaatatgcaacacacatatatatacatggacacacactagcaaagtgaccgtgtattgcaactgtttctatttatgcttaattatagcgtataaacataaagatatgtgtgttctgttgactaagtgagtgtgaatgtaggtttggaaccaacactcatggttggaatctctatttatacttaattttagcttttctactatttaaatatgggagcacgacggtggaaaccgtgaaaactagagtttagaaccaacacccatgctattcctcaccataggtaaagccttgcccaaccgataattactgaacggtaattactcgatattaccgagcaatattcagtaattatcgaaaaatatcgagcattcttcagtaattatcggctggaaaagcttcacatagaatgaaaaatagcgctgcctatgtgtgtgtgagagcagacaaaaatttcatccaatattaaaaaatgatagtgaaaaaggcattaagtaccctaccaacttctagtttttataatgacgaagttgaggccatatccaatgctacaga

SEQ ID NO: 585 - DNA, 1245 bp, Zea mays
  Intron number 3 from transcript GRMZM2G143655_T02 (locus G RMZM2G143655) derived from phytozome v7.0 (chr-ID 1; pos 3 7410832 to 37412076)
acatagacaagaagattcgagcactgaaaaagaaggtttactcttgctctttcttgcgtctgcacattttctatgaaaaaaagatgaatgtgagttcagttccaaactagtatgtttaaatcattttcctcgttgtcggtctgggcctggtagttttttctccaatattaagttagattttatattgcttatatcaaacttcaattgcgtgttttcatttccagtatcttcaaatcaaatatgatagtgacaagttgtgccttcctgcaagcctagttttgtaagaattgggacctggcctcattttcaattaaaattgtttttcttctaccttggtttattcatgctgaatgctgagaatacagcttaatagtgtctattaactgtaatttcttttgtagttttagtgcatttaatgtattccacatgtcatttaaacatgtgcgcccagccctcttactgcttagtctagatttcactgaatgtgtgacacttctttttccattaggctctgtttggttccaggaattgagagtattgaaaaaaatggaaagtaatctaataatgaaatgcaaggcactatgtagatattggtttcaattcatgggattcaaacaggctgttagtgatatttcacttgtttgagagcctttgtgcctcacactaaacccatcttgatttgaggatattcattagtagattctttgatttaaaaggttaatactccctccatcccaaattataaaacatttcaactttcttggagagccaaaacacctcaagttgaccaaatttatataataaaataataacatttactccctctgtcccaaaataaaatccattttgactttttagtggtttcatacaatacttggtgtatgtgttctatatatgtctctacatttatcatcatccagttgaatatagacataaaaactagagctaaaacgaatactattgtgggacggagggagtattaaccaaataagtatcattagattcttcattaattgtttatagtttacctatttgaccttataaatcttgtaattctctctataatttggtcaaacttgatatgtttttgattctccaagaaagttggaggaatgacttggaatgcaggggatactcgagtcttaggtgtatttttaggaaccaaagcaggatgagttgacatggatgaatctatcttgatttttaacagatacgcttagctgaagcacaagtacaaggtgaccc

SEQ ID NO: 586 - DNA, 9424 bp, Zea mays
  Intron number 1 from transcript GRMZM2G030915_T01 (locus G RMZM2G030915) derived from phytozome v7.0 (chr-ID 9; pos 1 48079885 to 148089308 reverse strand)
agaccccaagcaccagcgcggcggcggcggcggcggcgaccatggctgtcgggaagaacaagaggatctccaagggaaagaagggtggcaagaaaaagacgttagtttgcttgcctgttatatcccagttcttcagatctagcttgggtcgattgctttctttctttatccgttgctgatgctgttgtgtggttgcgatacttcttttatgcagcgtcgaccctttctctaagaaggattggtatgacatcaaggcaccgtcggtgttcagtgtgcgcaacatcgggaagactctcgtatccaggacacagggtaccagggtatgtttttttttgactatcgatattttttcgtactgcccctacattgtgtgttgtgaacttgcgcatatatgcatgtgtatgtagaccgcgctagtcatgcggtatattagatacgctcgttcgcgcgtttgtttgtggggactattcaggtttcattgcaagaattcgtaggagaggtaacaggtaattaagtttgttcggatttgcttgatagatagtttgtcagtatttgagatcgcagccttgcgtgcttattctaagctgttcctgaagaggtatcattcagtgcaatgcaactagaaccgcacctatcatttttgcactttctgttggaacgattattattattcaatccttttgcttttatatggacaataacgaatcgccatttacttgagcacccgaatggcaacttgtccttgttcatcaatgatctatcactgaaggtcacatgatcttttaatggcatggatatgattagtcttattaggtgccgctttgtttgcaatgttattcagaacgtagatgcactgcttactgtcctgatttttcgattgacgtactttctctggttttagattgcttctgagggtctgaagcacagagtctttgaggtttgcctagctgatcttcagggcgacgaggatcaagcttacaggaaaatcaggctccgtgctgaagatgtgcagggcaggaatgtgctcacaaacttttgggtaatgatcggcattcttttgctagcagctgttgccctttgttgtgttgtttatcactaatttgttttctattactagggtatgaattttaccactgataaattgaggtccctagtgaagaagtggcagacattaatcgaagcccatgttgatgtcaagacaaccgacaactacatgttgcgtttgttctgcatcggcttcaccaagaggcgcccaaaccaggtcaagagaacctgctatgctcaggcatcccagatccgtcaggtaacgtttctgttctttccacatatgcagcagtcgtaaaactgtagcaatttctcaaaacgtcaaacagtcacctgctatatttgcctgttatctttatacttgccatgtattgtgcgcagatccgccgtaagatggttgagattatgatcaaccaggcttctacatgtgacctgaaagaacttgtttcgaagttcattccagaagttattggtaaggagattgagaagtctacctccagcatcttcccacttcaaaacgtcttcatccgcaagggtgaagatactcaaggcccccaagttcgatcttgggaaactcatggaggtaattgctacatgcatgcaaatagatttaccagactatctccctgttacttgttatcctaaaacttgttgcttatcaggttcacggcgactacaaagaggatgttggtgtgaagcttgagaggcctgtcgagggagatgaggctgggcaggaggttgctgctgccgagtagtttgtttgctagttctatatctaggcgagtctggacatgaggttgcttatgacgtgaacttatagagttgtcttggctatgtgttttcgtctagccctaagattttgtcttgaaacaagtttaaaattaagattatttgtaacaagtgtttaggattactcgtggtgatattctgtgttcgattactgctgtactaagttccatcatcctcatttttgtttggtcatcgataatttactttctcattcgtatgagatgttctctgcttatttgttgttagctgacactgtcagttaaactagtgcccccattcttttttatttatcatgatttagtttaaaaatgaactaggactccctctcgtgtattattagttgttgttttggataagatttgactaaaacttataaactcttgactacaaataattattttattatttagttttgaaacctaatgattatatgttcttatttattttaacatgtacttttataaaagtgtaattgtattaagagtttatttgtattttaacatttaacaaaaaaatattggttaacgttatattttggagaaatataggggcccattgagaagaaatatgttatagttgacactgaagtgaggcgaagcaccaggcttcgtgagaaatcaggaggctttatgaagtctggacacttgcatagtgcctacttttgcactacccctcccataaaccccagaaacatcaaaaggcttggcgcggagctctgcatggttgacaaagagattgctccccccccccccccccccccgaagctctagcagcaactaagaaacagctggaggtgatccaacgtccttgcaaagctaactccaacactaggggcaagagagagaaaaagaaagatgacaagaagaaaggacccaagagccagacagaaagtagagcatgattgctctactctgctatgtttgcttattgcaacgatattttattttggggtttcttattttgtctcctataaagttattgcaacggtatttcattttggggtttcttattttgtctcacatgaatagatacaatacaagtctagtggggcctcacaagcagccgaacattttagattgtgtatttttacttttggataatcatagaactgataggttgcacattggctttatcttcaatgatcgttggttaattttattttggacttatgcactcgtttgcatggattggttgctttggagggttacacatcactatattatatacatgacaatacttcgtcgctccctaattttttggctttatctgttaagtgcatggaccgctctaattttaaggtgttcagttgattccctttggcataattggcattatgtatgcaccatggcacatggcattccgaacgcacactccgtgtttgttactggtcttatgaatcacaatctttatacatacgatgaacaaacaaggagaatggaagatactggtccataatagttgggagatcaatgcatcagaaaaatgaaattccctgcataacagaattgcataatctaaatgtgacataatatggctccaagaaacaaaaagagaatcttttgatgaaccatacattagaattttctgccctcgaccttatgatggtttttgttataactcttagttggttcatctggtggcttgattactatttggcaaggtgccaagttttatggagaaaggattttccacaatgagcatgcacatatggtgagatttaaatacaaaataataaaccaagaatggttcctcgtaaacatttagcgccttccacccccgactcaaaaaattgagtttctgcaatggttctctaactttagtgctaaccctgttcaacctataatttttatgggagatttcaatcttatttgcagcttggacaacagaaacaagcctggaggaagtacaacattgatgcttgaatttaatagtgcaataagtcaacttggcattctggaaattgctttaagagggcaattatacacttggtcgaacaaacaaacaacaaccactcttggagaaactaaactggtgctttgtgacacaagaatggatctcgcacttcctaggtacagaggctcatacactcgtaagagacgtgtcacaccacgtgccctgtctggttgaaataaagatatgcattccaaaacctaacatctttagattcaaaaattactggttgatgcatgataacttcctttcagtttttcaagacacctggacccaaccattatatcaactggacccagtcaggagactaatggccaagtttaaaagggcaaggaaggcattgtctaaatggcataaacaactttccaaactagccaataccattgaaaataacaagcttattattcaattcatggacttgattgaagagacgagggatctaaccatccaagagtgcaaccttagagatattctcacacaccaacttcaaaacatgctagaacaacagaaggtatattggaaacaaaggtgtaaaatgaaatggtcccaaagtggagatgctagtacaattttttttcataccactgcctctatgagacaaaatcataacttcattgctacaatacaagatgacacatgacatatgatatcttatcatgaggccaaagccaatgtattgtttgaggcttacagaagtatacttggcacttcgggggattctgaaatggtttttgaccatgatacgatattacaaaatacacaagatttgagtattttggagtcaccattcatggaagacgaaattaactcagtaattacaagcctccctaatggcaaaacaccgggtctggatggcttcaatacatattttctaaaaaaatgttgaccgattatcacttagtatttttatgatctttgtacaagctttcatgctgaaaatgtttgtatgcaaagtatcaatgggtcacacattaccttgataccgaagaaaacttccccctcacagtcagtgactagaggccaatctctctacttaacacaagcatcaaactagtgacaaagcttcttgctagtaggcttcagaatgtcatcaccaaactaatccacagaaactaatatgggttcatcagggggcgcaccatataggactgtcttgcttgagcctctaaatatatttatatgtgcagaaaatctcaaaggcaaatggttattcttaaacttgactttgaaaatcatttgataaaatagagcataatgccataacggatattcttcgtcataaaggcttcagaacaaaatggttgaagtggatagatatgatcacgagctcagggacatcatttgtcatgttgaactaagttccagggaaaacgtttcattccaagagaggagttcgtcaaggagaccctctctcaccgctaccgtttgtccttgcagctgacctccttaattccatactcaataaagcaaaagacgttggtatcatcaagctccccttaatacaacttatcattgagctcccctcgaatacaacttcagggcatgacctctcgattatacaatatgctgatgacacaattttggttatggaggcttgtcctagacaacttttcttcctcaaggctctaatgaactcatttgttgactccacaggactccatgtcaattatcaaaaatcaaacataaaccctatcaacgtgtcaaatgaaagaatggagctactagctaaaaccttcaactgcaaaattggtacctaccctttcacatatctagggcttccaatgggaactacaaaactaaggattgacacattcttacctctggttcagaaaattgaaataacgcccatcagcatctttcttcctctcgcaagctggcacgctacagatggtaaatgcggccttcaccttgaaagtcgcctagaggggggtgaataggcaaatctgaaatttataaactttaagcacaactacaagccaaggtcagtgttagaaataaagtcaagtccgaaagagagggtgaaaacaaatcaaccaaagaaatagatcggatgacacgatgatttgttttaccgaggttcggttcttgcaaacctactctccgttgaggtggtcacaaagaccggatctctttcaacccttcccctctctcaaacggtcacctagacagagtgatcttttctccttaatcaacgagtcgcttagacccctcacaaggaccaccacaacttagtgtaccttgcgttgattacaagttgcttgagaacaagaatggaggaagaaaaaaagcgatccaagcgacaagaactcaaatgaacacaaaaatctctctctcactagccactaaatgtttggagtgaatttggacttggagaggatttgatctcttgatttgtgtcttggagtgaagtctagagctcttgtatttgaatgcaatggctgaaaacttggataccttgaagtgtggtggttgggggggtatttatagccccaaccaccaaaatggccgttggggaggctgtctgtcgatgggcgcaccagacagtccggtgcgccaccagacactgtccggtgtgccagccacgtcacccaatcgttagggttctgacggtttcgaccgttggagctctgacagattagggcaccggacagtccggtgccgcaccggacatcactgttcagtgtccggtgtgccttctggcgctgatctgactctgcgcgcgctgtccgcgcactgttcacgttcactgttcacttttgcagacgaccgttggcgcaatagccgttgcttcgcatggcacaccggacagtccggtgctacaccgaacagttcggtgctacacgtgacagtccggtgctacacctgacagtccggtgaattatagcggagtggctctcagaaacccgaagctgagtagttcatagttgatctccctggtgcaccggacactgtctggtggcacaccggacagtccggtgcgccatgccgccataccagggcagtcttcggttggttttgctcctttctttttgaaccctatcttggacctttttattggtttgtgttgaaccttttgcacatgtagaacttataatctagagcaaactagttagtccaattatttgtgttggacaattcgaccaccaaaatcatttaggaaaaggtttgatcctatttccctttcacacctccctaccaacattttatttatgtacactcaagatacacaactctgtcgtgaagcaaattgacaaatacaaaaaacattgcctatggagaggtgatgatattaatgccacacgacctcctcaggcagcctggcatctagcatgcagaccgaaatagaaagggggcctgtgattctagatctcaagaaacacaatgaagaattactgatgaaaatgctatacaaattctacaacaaacaagatatatcacgagtgcatgtgatatgggacaataggtacaaaaatggttcactgccctcagaaggtagtaaaggatcgttctggtggagagatatattgaaaaacttgccagcgttcttagaaatagccaaagtcaaaacatgcaacggaaccacaactcatctttggcaagaaaaatggggcgacattctgatttgtgataaattcctagagttttttcctatatagtgaacaaggatacaactctaagacaagcaaaattgacacccatgatttaggatttgttccatctacctctatctgcccctgcttacttgcaaatgctttcattggtcacaatgcatcataacatggaactgacggacacatcagacaaatggagatgcgccaacattgcagataagtactcttcccgtaagatctatgaaatcaaacataaagtcccagaagcgccatatacctttgctctgatctggaaagcaaaatgccagcctaaaaatattcttttggctactctgcactacaaacaaaacaccaaatcagtgctcaagagaagagagatggaattagactcctacacatgtgacaattgcatacgacagaaagaagaaacatggagtcatttgtttctaaagtgtagcttcacaaagagatgctaggaaattgtcgggatcacactaacatgatctttgaacccacacattgcaatccgggatatgagaaggaaactagtataactttgggccatggagacaattatcacaatgatgtggtgcatttagaaatgtagaaatggttcaatcttcgaaaacacctctccgaccacccactggtgcaaaatcagcttcgttcaagagttgaaccttaatatctataagataagatgcgggaaacgataactgacaatgttagacaatgcatatagtcattgtaatatgacaaaatataatctgtaaaaacatatatagaaaagtaatgaaaggaatactgtaggagcccctacagtaggaaactttatcaaataaaactttacaatagaactagaatgatagaaatagaatgggatgacaatgcaattctctatgaatgtgatttgaggtccaattcagttcatccattgcaatcgtgatattcaaaaagagctcaacctaatgatttatctcctgtaaaatagtattggttctaaaatattggatatagtattaatgatcaccattagtgcttttcaaaaatataatctcctccagtagatgactaataatctccttgaatacatgaaacacatataccatgtatcgtttcctctccttttctcgtggccttctcccgtgctcccgaccgccgatgctcttatccgtcattgttctacgcatgttcgacgcttgtgcctccatctatgtttgcgagatggcgtcgacacggacactcacagactcacctgacgacgcaatgaaatagtaggtgatgtcatatcatcctgtgtccaatcgatactattccacgtgattggttcatgggctacccgcagctaggctcgcgcgcagcaggctggctggatacggtaactttgggtgtacaagcggatgcaaataaataaccttaaaataacttattcctgttgattggatgcctgtattcggacgcgtaggctcgggtggccctggctgatctgatacggcatttttctacgtacgagtatccgctcatacagcctgcgtctcctttgtgcgggtaaccaaacaggagctgagacaaagtcaatgcatacggtggtaaagatgagatggtgcgggtaaccaaacatacggattttgaattcactcgtacacctcgcgtctcacacgtgtaagtaaccaaatacattcttagacaaagttaacgcagtgatgattaaggatgtgattatacagatccgagtgaactccgtcaccgtagcccgtagtgttcctgaactcactttctctgcaccgtccgttacgctgcagatgggccgaatcagatgggccaaccatgcctcgaagcacacatatgggccacaccgcatcgtgtgcgtccatccgctcttgggtgcctgctgaccgcatgatcgaacctggaaaccctcgagtcgtatataggtagtccgctctgcctcgaagtgccttctcccgcagagccgccgacaactctctctaccgtccgataccccaagcaccagcgcggcggcggcgacc

SEQ ID NO: 587 - DNA, 9479 bp, Zea mays
  Intron number 2 from transcript GRMZM2G401831_T01 (locus G RMZM2G401831) derived from phytozome v7.0 (chr-ID 4; pos 2 36651331 to 236660809)
gaagctggtggtgtcaattggttagtaggtaaagttaccttctcaacgttggtaaatgataatatcattataagacttactcgtgattgttgagttactcttaaagcacggtgtgagtctagtttgctcatttgtctggtgaaattcaagtgcattacacaatttctagaaacgtactccctccggttcttttatcaggtgtattaggatttggagaagtctttaaaagtgtactttaactgcaaatttcttcaacaataatttattatcaactactaaaaaataaacctgatttgtcgtgttacaacatcatgttgatgcaatttttgtatggtacccatgcatgcaagttgatgatccattaatcaaattcaatgaagtttgacttctccaaattaagtatgccctatagaaatggaatattttaggaatgaaatatcattggaaagatgatgattacatgtagttccactatgaagctaagaacatgatagaaagtactacatgagatgtttggtgccaagactcttgattatagtcttaagtcttaaccatgggtttgctgatgtgattaaattttgttttggtaaaaagaattgagcatttgagtgccaaccctgaatcaaggttaactgcacatcgatatattaagaagaatataggaaatgtcatgggtggagttttgacttttaaacattttaaacaaagtttaaacgtagttttaaacaacatatgaaaatatcaatatatcataatttcggacaataacattaagttaaataccaaacaaccaacataagttcacataataatattgtgcaacatggcatgtccacaatcacattaccacaataacacaagttcagctaatagcaagtcgacaactgcaaacaaagtggaatgaaatatccaatagtccacaaccacaaacatagcacaaaagcaactaaagtggaatgcaatgtccacaactgcaagcatacaagcgttattcaatctccctctatcatatctcaataaccatcatccaaaacatctataccaacatcatcgttgtctttgtctttctcatcaccatagctccactgttgtttgttgcttcatcaccatccatatcaaggtcgtcaagcacaaaattttcatcatcttcattccgttcacccacttcaagcccatctacatcgtcctcaaatcttgacacttgaatgccatgagctctactgggaaagttgcggccttgaagttatgtagatgcaccgacggcatgatcaacatgctcccatatgaaaagagggtcatccccaacaagagttgaattagctaatgtatcaacccactcattgtcccaatcaaaatcttcaagaaccaaaggatcaaagttctttccttcttcacgcattttttggaacatagcgaccatctttctattgtatgaaacatataccaaatcatccaatcttttgtgctctagcctgttccttttcttggtatgcatctacaagttgcaagtaacaataaataaaggggtaacaattgcaaattgaattgtgtaatatgatcatgttagttaacttacaaattaaaacttgctccaattccgctcgcaaccgatgatgaagcacaaagactaacaatccgccttgcaaacttatataactcaatggttcgacggccaccatatgcaaacaaccaatcaactaaaatggcaaaataggttgtatttaaatgctggaaatgaagttattcttgctgaaagtaactaataaagtgatacttttagaatactcacatgaatttcttgtttgtgcatttttaatagccactgggtttgcaaatgcttctcttctgttctcataaaggacagcctgagcataaattttatctttaaggtcctcacctaacaccattttaacaagtacatcattgaagcaaccccttagctctccaacatagccttcatcatcactttgcttcacgctataaaattttctagggttcaagtagagtgctgctccatacaatggagtatccatttgtttcatacaacgattgtcaacaattttcatgatgcggctgaggcaagagttcttgttttgacttttgagtagagaatgatgaagtagtcttttgctttgctatcttgatagctgctgcaacctcaggcatggctggcttttcatcaccatcaaccatgaatcgaagcacaagtagtggtaaagactaaagaaggtctaaggcagtcctcaactgaattccaaaattgtgttgagaaaacaatttcatatacttttttccctgcttctgttttagctactttggagcgatcaaaaacatcactagaaaataatgctctcaatgcatccttgtgcttatgtaaacttctcaaggtgaggaatttagtagcaaatctagtagcgacagacctcacaagatccataccttttgtatgcaccctcatctcacttagaatcctcccatgcctatatatgaatattgtgacatgacgacacacgcaataggcttcttaaaattcttcaatttttctatgtcgtccaacataaggtctaagcagtgagcatcacaaggggtccaaaataaggtaggagtggtttgaaccaaaatgcacccttcagccttgtagttggcaccattgtcagttacaacctatgacttatccctgccaatcttgtcaattctcttgtctagtagttctgcaagcatgcatcatgagactcactcgatgcatccaccgactctaaaaagaatgtacctttagggctgttaactaggaagttgatcaaacggtgaccctcctgtctgtccatccatctgacatgagggtgcagccatattgactccatgcattctcgtgcttcttctcacaatctatctctttgacagccttcacaaacaatagttctcgtagctcatggaaactagggggtttgaaccctgtaccatactgtgcaatgtcctctacaactatctcaaattgtcttgagttggcagcattgaagggtatgctacactcatagaaaaacttggctatctccatacaaacaacttctcttttttctttgggctttattgcaacattgatggttctgagttgcccccttggcatacctttcctctacaacctcttggggtgtacgtcggagcaaagttgtaattgacttttttgttgccccaacggttgatggcctgcttgataattcctttcttttgccggttgttccagtgctgttgcctcctctggatgctgacacaattacttccacaacatcatcttcattctcatttgattcagcttcatcaaagtactctccctttggtctatcctcttttccttcatccaaagccgcctccaactctctagcaaccgtagttgtggcattgggacacttgaggatatttttgtatccacccacaagaaacatcttgtgggtggatacaatggtgatgctaatacaaggctcttccactcttggtctcgttatcggaaaagaaaaaatttcatagccaaaattcaagacggggagcagctggtgaccagtcatagtgataaggcagaggtgctccggtccttttattcagatctgattggtacagggcagcaaagatccagaactgtcaaccttgacaccttagaaatgcagcacactgaccttcaggggctcgagcagccaatctcagaggaggaggcgtggaataccatcaagcagcttcctccggacaaagccccggggcctgatgggttcacatgccgtttctataaggtccgttggtcaatcatcaaaaaagacattatggctgctatcatggctatctggaacaaggacttccggaatttcagatacctcaacacagccttcattactcttttgcctaagaaagaggatgccatacttgccaaggactttcaacctattagcttgatccacagcttcgcaaaattaatcacgaagatcatggcaagcagacttagtggttatatggacaagctggtttctaggaaccaaagtgcgttcatcaagggccgattcatccaagataatttcttgttagttcagcaaactgcaagactgctgcacgctcaaaaacagcccagaatccttctcaagttggacatttccaaggccttcgattcggtgtcttggtccttcttacttgaagtattggaaaaggttggattcggccccatttggagagatgtgatcagtgggctgcttatgacctcctctacccaaattctacttaatggagttcctggggaattcattcaacacttgaggggcctgcggcagggggactcgttatcccctcttctcttcatcatcgttatggatgttctcaatggcctaattgttaaagctgctgatgagggtttgcttcaacccctctcaactcgctccatccagcaccgaatatcgctctatgctgatgatgtggtaattttcttgagaccggctgctagtgatctgcacttggtaacaaggattttggagttgtttggggacgcctcggggcttaaaaccaatgttcagaaaagcagtgtggctcccattcactgctctccggtagacatggaaatggtaacctagatttttccttgcaaagttgaaacacttcctcttaaatatctcgggctgcctctttccctcaggaagctaagcaaggagcagctgcaaccactaatcgataggcttgcagacctcttacctaattggaaggccgacctgatgactcgagctggcagagccatccaggtgcagcatgtgctcacgacaacagttatatatcacgccatggcattggatttacctaagtgggctatcaaagccattgacaagattagacgtggctttctttggaaagggcgtaaggatgtgctcggtggccactgcttagtcgcttggggcaaagtgacacgcccaaaggagcttggtgggcttggcatctcagatttacaaaagctgaattgggcccttcgggttagatggctgtggttggaaaaaacagatccctcgaagtcttgggctgatttacccctccagagttccagcattctgaaatctatcctctctacagctttgattacagaaattggtgatggtcgtaacaccttattttggagggacagatggttgatggggttgaggattgaggatctaactcctcatatttttgccatcgtcccgaccaggattaccaataggagaacggtggctgaaggtatcgtggagatggcttggattcgggacctgagaggcaccatcacttgggatgtcctctctgattttttaactcttagtgaagtcattgcagattactccattaatgttggagtgccagacaagcatatctggaaattctccccgacaggccaatactcttcaaagtcggcttatgatatgttatttcttggttccacttctttgggagcatatgagcgcatttgggaatcttgggcaccttcaaagtgcagtttcttcctttggcttgtcatgcacaacagatgctggaccgcagaccgtcttgctagaagggggctaccccaccccagtgtgtgccccctttgcgaccaagaagaggaaacaatacaacatcttctcatctcttgcgtctttgcacgacagttctggtattccttgttaagcaggtctgggttgcctaacctttcaccagataatgctagttgcagccttgatgactggtggagcagagctgtggagaagattccccgtgatctccaatccggcttcaattctctagttattcttggcgcttggagcctttggcgtcatcgcaacgactgcgtgtttaatgggagatcgccaagcctggcgagtgctctcaccctcgctagcgatgagctcaggatgtggtgtagtgccggggcaaaagggttgaacctgctttcaactcttatgtttatgcttgacccagggggatagtctagtggcttgttcagagtggttgtgtgtggttgctgtgttgcgtcttgtgtcttgttgtgtcatgtgtgtgtgtgtcgtgtcaggtgtgtgtcgtgtgtggtgtgttgtaccttcttctatctattaatggaatgatacgcagatctcctgcgtgttcgagaaaaaaatatcctggcccggatggatggtgatatcctggcccaatgattaatagaattgatagaatacatataccaacaaggtgcatcttctttttcgtaagcatgtcttaaaagatcctctgggttaagcgtgcttgactcgagccaattttgggataggtgacagaccaagatgctttcttaggtgtgcatgagtgaggacaaagtgcgctcaaaagactcatgttggtatgtggggatggtctatgattctagagggatgccaggagtaagtaccgctggcctgagagtggacggggtgttactaatggtatcagagctgacccttgcggttttacgagcgtgtgtaggctaggggttcggacatatgtcacatggcgtatgtgagcccagagtggtcacatgacatggcatttgacgacactagacacagacgtggccaagatgggaggtttctgacatgggttgactgacgaggatgtcggtcttctaaagggggtcgattgtgatatcctggcccggatggatggtgatatcctggcccaagacttaatagaattgagtcattgatagaataatcacgccaacaaggcgcatctttttttggaagcctgtcttaaaagaacctctggcttaagcgtgtttggctcggagcaattttgggatgggtgactgatcggaaagttttcttaggtgtgcttgagtgaggacaaagtgcagacaaaaagactcgtgttggggatggtctatgatcctagagggctgctaagagtaagtaactggttcgggagtggatgtggtgttacatttcttcaccctcaagattcctcgtttaatctgccttgggcaaagggtgcattggatcaactctcgcttgccaggctctacataataggcatacttccaacctggatcatcagatttgggctttatttttggatcttttagtggatcatatccatcactttgtatttgagagccagctgcatatgcttctgtgctaaaatcagccatttcccctctaatcttctctacaataatggaatgcatatgtttagaacttcaactgcttcagcaagcgagcaacagagctcctgagaggttagtaggcagtaggcacataccagattactagtaccagttcaatgctccaagcagatgtcaaaaaatgaaagaaactgagattgagaagtgagaagcataagcatgtgttgtccatgccaagaggcggatgcaggtagcgggcagacgtcggcgtgtgctgtccatgccaagaggcagatacaggtagcggacgggcgtttgcgtgtgcaaaggagcagacgttgcggattggacgacgtcgacaacgaagcagaagagcagtggacggcgccagcagcgtggatcggtcgtgcacgacgtgggcgacgcagggtcaggcaagcagcctcctcttgcgcggatggtccgacggaacacaacctcccttgcgccacggacccagctctagcagcctgagttggctgacacaactctccttgcaccggcaactgccttggagtggcggcggcttgggctctggactggcggttgggcggtaggatggggcataggggatgagcgaacaacaaagcagcctgagccgacggcctggagtgccggcggtcgggcgggaggatatggtacgggggaggagcacgagcacctgagcgagagtgagggcagggctgaatgcctgaatagaaactggattggaccgaatttcacagttgggcatgaagactaaaacgttagaaatgtggcgtttttttttcatccagcgtttaaacgccaaaacatgacatttaagcgccaaaaacgtcgttttacgtcaagtcgcaaaacgttacagcgttttagctgggtgagctgagttgctgggatagggctggggctaaacagttagcaagtattagtagggtctaggctgggttccaatctggtcttgttggttttgcttgccctctgggcattgtactttggtcctcttggaccttttttcctctcttaatataatgacgtgcagttctcctgtgcgttcgagaaaaaaagcatcctaatagcattttgtcgtttaaacgtcgttttaataacaatgccctgaatgttgatgactaatccgaaaaagcttagatcttttctacactattttaattttctgcgcaggagggtgaatctgaatcacttctgtttcatttcccaaccgactccaaacctgaactgtattgcctagtacaacatttgtgttccttttacatttggctagctactaaaagttggtttgttaataaaacttgtcaggtgtagatttgtttgttcagaggtatttccctctatttgtcatcatattttttgtgaggtcagagagagtaagatgtaccttgataccatcaccagcagcactgtgtcttctcttggtttacataatgtactatattatgcactcttagatatctaagaatctaagttgcgttgaagacgtttgcatgtgataaaatgcaactgtttcagataacaaatactctctccattccaagttataagacattttaactttcttggagaatcaaagcatctcaagtgacaagtctgaccaaaattatagagagaattacaaagatttatgacatcaaacaggtatactatgaaaatataattaatgaagaatctaataatacttatttgatatcataaatgttattattttattatatgaatctggtcaaacttgggatgctttgactccaagaaaattgaaatgacataatttgggatggaatgcaatatatctgtgaaaccgctaataaacgtgtagagtgtgtggtgttgtcttgtccttcctccaagtcgaagagttgctggcttaaaacagcggtgtgggtcgtgtttcctacttgttttagtcggtgatccgtagttagtctctagtggtgtgtgtgctgtattggggtctctccccctttcttttcttcttttaatacaaaagatgcgcagctctcctgcgtattccagaaaaaaaaagtgtgtggtgttaaacttcttaatttttaatgaaatgacgtgcggctctcctgggtagttcgaggtagcaaacttcttaattaaatcttgtagtaactagtaaatagatttaagttgtggtaaatatgtgtagagtagttttccataccaaggtatagcatgttttttctatatgcttcagttggcagagcattcaaggaaattgttccaatgaagtgtccacttgttatatcatttaaccacattttttcatcatcatatcttacatattttttttgcagaacttctaagggttattcgaagattgaatttgaaa

SEQ ID NO: 588 - DNA, 2023 bp, Zea mays
  Intron number 2 from transcript GRMZM2G087484_T01 (locus G RMZM2G087484) derived from phytozome v7.0 (chr-ID 2; pos 1 87644693 to 187646715)
accggcattgtcctcgttgctgctcgcacgatcaggtatgttgcttgcggctcgctttgctctcctctcttgtctcggtgtggccgcacccgtgcagcacctccaatggcaacgaagacagaaagtcttatcatgggtgagtctaacttcataggctacgccctagcaaagtcactgctaaggtccaacattgtacaccatggtggttatctctctccaattccatctactcacgaatgcctcactcatgagtgaagcacaccacatgttcgatgatttggctctataacaatttttggtgctagcctcagattatttctgtttgagagttatgtaaggtactactaactctgcatttttagttatggtttcgaaacatgtaatttttagaccatgactaatcaagtatattctccaacattaattcctctaagcatgaactggaaaactgcttagctgatctatgtccctgctttctagaggtggcatcacttctctttggggaggcttctagttaaacttgcttcaatcacgatattactttgctagataaagatgaagccaaaggggcaatctcacaatgttgttgcactatgatttcctttctccccttgatttagtcatattaaataatggtatgaatggatagttttttttgctactagagctaacaaaaaatcatcatctttcattttcgtatgttgtttatctgaattttgaggttgctaaaccatgcacctagaatcagagttttacagttgaagctccatgtggtaggaatgtgctcacaaatcaaatcaaatcaaatctcttttccaataacatggccattagtatcattttcccttttatttttgaccagaatatccatatttctatatattaaagccgggagcaatgctgctctcctatgcttccacgtctactctaaaatttttagccgttcgattatattttagtggtgctccctccaagtatcagatgagcggtgtccagaaaaggtgaaaggtctcagtgaatgactcctcgaatagctgcgatggttcgcgatagcaaacagataggcggtgggtaaaagtgaagacagagagagcagtgcgcgccggtgaggatggtcagcgctccatgtccactcctcccactgccccagtagccatgccgccacgcaccgccgactggtgctgcgtcgccacgtctttccttgctctcatactactggactcgaatctggctcccagctccccccaccgcacgggctccggcgctcctggccgccactggttcgcgtcgcgtctgcagttcacaccaccgcatggaccgcgcccgcatccgcaccggcacggtggagtcggcgtcgagccgcagactgaagctctctgcgcgggtgtctcggcagacgttcaccggactaagtgttgcatagtacatttgtttagcgaactgtaatgttcagatgcacttgcgctcatctgacaaattctgcattttgtatgctcttcaagattcctctaaaaaattccccatgtactatttcacctgccacctaaaaaagaaacagccacttcagataatcaggcttcactaggtatttaacttagagttttacgatgtcttgaatagttaatagtactactgaaatttactcataatagttaatagtattttgaaatatgttcctttatttttatcgtccaatatacagtgccatacttgataccttccatgtgaaataaaccaatgtactcatgtacattatgcatatgaagttccttttttgtctcattggaacgttagttcattaaaaattaagataagaacaacataacgaatgtgctatgttttatcatgtttaatggtacataggtgccatttctaaacatttttttatttgatgatatgatgtacagacacttttgattatgtattgcacaccggtacttgccacaatttattatcttattttgaatttttgcatccagttttggtcagataaaaaactgagacaatatcgttttttataggg

SEQ ID NO: 589 - DNA, 7536 bp, Zea mays
  Intron number 1 from transcript GRMZM2G462639_T01 (locus G RMZM2G462639) derived from phytozome v7.0 (chr-ID 5; pos 9 6393768 to 96401303)
gatccccaggttcgtctctgcgctttactcatttgtttttttgtttattattagaaatatctggtgggacgtcgcttttgtacggttcatcatcttgccgaaaacttagattatacagggaccgattcagttactcagaagtgtagatcagatcaagctgctccttctaattctaattactatttgacctgagattgtagtatatctggatgtgaagatttggggtttctttgggacaggtctgccaaaaaagtgaatctagatctggattcactatggagcagctccactagcggatctgagcaccgtggaactgtttggcaattgtaacatatccatgcaggggcaattttgttggaattgtctaatttactcttgggatagatcatatgatccaccgtggaactgtttgccaaatgtagaaactccagatccacgtagaaacaatttggttgaaattgcctaatttactcttggggtagacctcacatgtcagtatattttgttccttctttttccaccaaaaaaacgaggaagttgtgggctagcgtgtccaatgaagcttgagtggccgagcgcggggcggagagggagatggccggttggagtgggaggagatgaggcgccgacggatgaggaagcgatgggaagacgagttgtacgggaatgaagaagaaagaaataaaaagaataaatcattttttaaactagtggcagtggtgagcaattcttaccaactccaccaaactagagttggtgaaacatcccttgaggagctccaccaaaatggtgaatctggcccctggattcaccaattttgtaaatctgaattgcgtgaatctagaccgtttgactatttttttttttccggagtggagccgttttcggcgaatctggagctgctggagctgtcgcaaacaagtcatcaattaatgttatccatttaggattattatacttgttatggtgtttttctgctgaaacatgacttcttttgctcaaaagttatgtttgtaatgttggatcgattcacaagtgttttgacatacgagtttgagttgttgtgacacataataataatagcttgacatgtgggggtgttgtagattcttttgtgggaaggcattatgctaggcgccaaatttagtttgttaagaagtactaaaagttaggcaataattaaggaggcttatcctcccgggagagttattttatcccctagaaaatctgtaatatggttaggcacctaagctataaaggtggccttagattgtactaggagattatcaaagaagttgtgcctgtgggtgcggctgcttgatcaccctggcagaacctacgccatctggtgatcttagctcccagccgccacacaggataccctattccctgcgttcttctactcaatccaccttgatatcccacccttcgtggtgcactcctccccgccctgcgcatcgtagccgggttcacaacaatttggtatcagattccaaagctgcagcgacatccatgtccggcagcgacgaagatcctgggaagatgactgactccgagaagctggaccgtattttgggacagctggccacaatgaacaaccgcctggacgcccacgctcaacggctcgctctcctagaacaggaacctgttcagccgacaggatcaccgctagcgccacctctggccgcggctaccctgtccacgggtcctgccctggagagtcacgcagctgcagagcttcccagttctggcgcttacaatggcggattcggcggtggtcgccgagctccactacacagcagccaccgtgatcgctatgatgacggcggaccatggcgaccaaattttacctttccacactttgacggtgaagctgacccttgtcttggatcaacaaatgcgacacatattttcgcggcatgggcgttcatcaagatgagcgggttcggcaggcatccttgcacttggaaggcgtcgcaacggagtggttttatgccctggagcgtgacattggtggcgtactcacttggtcaaggtttatagaatttctccagatgcgttttgggccaccactccgtttcaatggcatggctgacttgaaagcattacaacgcaccagcaccgtcgaagactacactcgacagtttttaacaattctgtgccgctgtgatgacatgactcatcgacagcagaccaacatgtacacaccaggattgggggagcccctgcgcaccgatgtggagatggagatgccagagacacttcaacgggcaatgcatttggcccgagtgtatgaaagacgtctgctgctatctgccagctccagcaccacctcatatcaggcaccagcagcgccatccaaatccccaacaactgcagcagcacaaccaacatcatcggcctccagcaggcctcgcttccggcgtctatctcctgaggagattgctgctaagcgagccaatggtgaatgttaccattgcaaagagaaatattctcttgatcacaagtgtactgctcgctgcgtgttcctgctagaactggaggaagatgacaccaccacagaaactggctcaccagaagacttgggtatttcactgcaggctatgaccagaataggagtcgctgacaccctcagacttccggtcagcatcaatggcatcacactcactgcattggttgattctggttccacccacacttttctttgtgacgctgcagtatcgcgcctaggcttacaagtggttcctcaacccggtctcttagtaaaagtggccaatggtgagcgcatatccagcaggggcagggtcactaccacgctcaccatcggcactgaggatttccccacaacatgctactccttaccattggacgacttcgatctagttctgggggttgagtggttgcggtctttaggacccgtcatatgtaattttgacaaccacactatggcattttggcgccaaggacggctgatccgcttgacaggcatgggggacccgattctctgcagcacagccattgacaaaagccgagaatgcatggaggaacttttacaatcatttgctgctttgtttgaagaaccacacggtctgccgccttcgcgtcgccatgatcatcatattcagttactgtctggaacagaaccggtggcagtgcgaccgtacagatacccccaacttctgaaggatgaaatcgagaggcagtgtgaccaaatgttgcagcaggggatcattcgtgagtgcacatcagcattttcatcgcccgtcttgttggtaaagaaggcagacaatacatggcggttttgtatagactatcgtgagttgaatgcaaaaacagtaaaagacaagtttccaatcccagtggttgatgaacttctagatgagctacggggttcatgcttcttcaccaagcttgatcttcgcagtggatatcatcaagttcgaatgcatcccagcgacatccacaagacagctttccgaacacattgtggtcatttcgagtttcttgtaatgccattcggccttaccaatgcaccatccactttccaagctctcatgaatgacatcttgaagcccttcatccgaaagttcacactggttttcttcgacgacatcttgatatatagttcgtcctagacagaccacctgaggcatgtaaagcaggtgttccagctgctgagtgacaacaagctggttctcaagcgttccaaatgctccttcggtgaaccggcagtgtcatatcttggacatattgtatcagcacagggggtcgctatggatccatctaaagtggatgcagtggagtcgtggccaataccacgtacactcagagctctccgcggttttcttggtcttacaggatattatcgcaagttcatagctggttatgggtctgttgcaagccctctcactgctcttctaaaaagggatgccttccaatggacagatgaggcagcagaggctttttgccagctgaaacaatcactattaacaacaccacttcttcagttacccgatttcaccaaaagattcttcattgactgtgatgcgtcgggcttaggatttggggcagttctacaccaaggggatggagccatagcatttttcagcaggcctgtgtctcgccatcatcagaaactgcccagcctatgagagggaattgattgggttggtcaaagcagttcgacattggagaccatatgtatggagtcgaccattcacagtccggactgaccattatagcttgaagttcctgctcgatcaacgattgtcaacgattcctcaacacacgtgggtcagcaagctttttggatatgacatcacggtggaataccggccaggcaaactcaatggcgcagcagatgcgctgtcccgtcgggatgaggatatgggaactatgtacaccatctcctcgccttcctttgatttatttgctactttaaaggcagaagctgaaactgattcacaggtggctgcaatctgcaagcagttggctgatggcactgctagtccgggttggactacaacggatggtctgctacggttcaagggcaaagtattcattccataggcgtcgtcattatggtctgtacttcttgcccaagctcatgaatctggtcatgaaggcgtgcaaaagacaattcacaggtggagaacatctttttacagtccaaaagcactccaccgggtacgtgagttcgtgcgcagttgtgcagtttgccaacgcaacaagactcagcaccttcatccagctggtttgctgcaacccttgcccattccttctatggtttgggctgacatatcaatggactttattgagggctttccaaaggttggtggcaagtcagtagtgctgacagttgtagaccgattctcaaagtatggccatttcattgccttgggccacccctacacggcagtctcagtggcgaaggctttcttcgatgatattgtcaaactccatagtctaccatgttccattgtaagtgatcgggacacagttttcactagccagttttggactgaaccgtttcacatggccggggttaagttacagatgagctcagcctttcacccacaatcagatggtcaatcagaagtggtgaaccagattataactatgtacctccgctgtcttgctggggatcggcctaaatcgtggttgaagtggcttccatgggctgaatattgctataattcatcatatcagtcggctctaaagtgctcgccattcaaagtagtgtatggcagggaccctcctcctatggtttcctaccagccagggaactccaaggtagcagccgttgatgtccagctgcaggacagagatgcatttcttgaggaaatcaaagcacgtctagtgcaagctcaagtcactatgaaaagctaccaggatcagcgtcgcagagaagtggaattcagtgtgggagattgggtctggctacggctacaacagcgaacgactgtaggggtcactacagcttctccctccaagttgggaccaaaattttatggtccatatcaaatcacacaaaagataggggacgtgtcctataagctgcaactaccaccaaatgcacacattcatgacgttttccatgttgctctcctgaagaagttcgaaggcaccgtgccaacacagctggttcccttaccacccttgttacatgggcgggttattccatctcctgagaaggtcctccgagcaaggctgaatagaggagtctgggagctgttggtaaaatgggtagggcgctcagaagcagatacgtcatgggaagaaattgaggcatttaaacgccaatatccacatgtggcgctcacggacgagctgtttgttggggaggggggaagtgttgtagattcttttgtgggaaggcattatgctaggcgccaaaatttagtttgttaagaagtactaaaagttagggcaataattaagggaggcttatccctcccgggagagttatcttatcccctagaaaaatctgtaatatgggttaggcacctaagctataaaggtggccttagattgtactaggagattatcaaagaagttgtgcctgtgggtgcggctgcttgatcaccctggcagaacctacgccatctggtgatcttagctcccagccgccacacaggataccctattccctgcgttcttctactcaatccaccttgatatcccacccttcgtggtgcactcctccccgccctgcgcatcgcagccgggttcacaacagggggtaagacaactcctaggtattgtattaagaagaggatcttctcatgtggatcaagaaaactcctgaatccttgccccacccatacacagcggcaccgtagtctatgtgagaaggaattttttaaccctagcctaaaatcgctaccacatggtgtcgaactcagaacctgagggctaaggagtgttactcagaccacctaaccaactaagcgacacatcatatagtgaacctgttgcactcatgtttttcacatagatgaaggatggatttgggcatttatgaagcagcaactgtaagaatactgacatgtgaaggttgtagtgcatgcagcttgttccgcctctgttatagccaagctggaaaatttcatttcgagcgcatgctatttgcttatattcacctatacggcaggatcatatcaatctgcatctggtctttggaatactgactaaaaatcttgttctgacttctgagcatttcagcatgttgcataagtcacctacccagtgttattaaaactacatttaaacgttaaaactctaattagaggttgaaaccgtgttttagcgttttgacgttctaaactgtaacacaaagtgtttcatgcgttttagaccattagctacttttgagcccaatctgttagttacttttggggtccaatccggctcatgggtgaagttttggtaagctactaaactctctgttttggtatttaacttcatgttattgtctgaaattatgatatattggtattttttctatgttgtttaaaattacgtttaagcaaagtttaaacgtttaaaagtcaaaacttcacccatgagcgtgtcaacattttatatttttaaaaccttgcacctacttagaagtggtccagttctcagtaggtattagattagctgatgcctttttgtttactctattagtttgaagctctgatgggttcacaggtttcatgaagacctttttcatattcttgtcacttttgctctgcacttagcagtgttctatggtatcattcgctgtgcaattgaagtctcactgcattatctattttaaaaattaaaatgttgctttcagttacgtaagtccaatgcaactatgtatctagataaatattgtttgagatgtcttgttgctaaccataaattcttgttgcatatttagctcgtcttggtagcgaatagagctggatatatctatcgtagctcgacgttcttgattttcattgttatgattctcattttcaaaattatatcagttacttgaaaaagctcttgaggcctctggag

SEQ ID NO: 590 - DNA, 7420 bp, Zea mays
  Intron number 1 from transcript GRMZM2G159675_T01 (locus G RMZM2G159675) derived from phytozome v7.0 (chr-ID 10; pos 109719358 to 109726777 reverse strand)
agtcgtaaagctcaactccggcgtcgactacagaggtattaatcacatttttttctcgcgtttccgctactctgtccaaaccctagaaggcggtcgtaaatctttaaacgctgggttttggtgatgtcaatgggcagacaattagctgctttccgcgttttggggcgttcggtaagttaagttggggttgctagaaacacccttgaatatatacactgcctgactgtcccggcgcggcaggtaattcttgaatatctagttttgaagcctatgtatctgtgatttagaagggcgagccgcgagcatagggtagtgtcaacttgtatggattgacacctcttatgtctttgtgaacttcaatcttcacgaccaaaggagcacactaacacagtgttgcaattgtagaactagttcgtgccgcgttttggggcgttcagtaaggtaatttggggttgctagaaacatcctgagtataaacttgagtatatacactgccccagcgaggcacataattcttatatatcttgatttgaagcctatgagtactcttctagggttttgtatctgtgatttggatgggcgagccacgaggatggggcagtgtgtacttgttgtattaattggtaatttctcacatctaatgtctttgtgaacttcaatcttcacgaacaaacgagcatagtacagtgttgcaattgtagaactagcccgcattgtagaaccaagcaaatgactaggctttgcttgcgactacatattttggttacagaaaggttgttgggtgccaaactaacatgaagtgttgaatggacattcaaatattgtaatgtggtttgtggaaacacaaaattaagtccagcaaaaatagaggaacacaaactaggtccttttgtcagcaaagaacaatggagctgcgtgtagggtgtcaaaaaacatgttttccagaaactacctgaagctgagcttgagctcaagcctacacaatggctcagtatttttatcactaccagccaaacttgacctattttataaagcacatttctgtttattttaatgttctcatgtgcagtttgcatttacaaactcaaagctgctaagaatcagctcagacgcatccccgaagactaatcacaactactgattaactaagggtgtgtttggaacctttaacaggtttgtccagccttaccttaatgtgaattaaggcacgaggtgcttgccagcccaggcaagctaatttggttcttcctcctggtcagcaaggaaaacttttcctgcactggtagtgaggcaggagaagtccaggatccaaacagctaacaaagtctaatttcttgcttggctaggcaaaagattgtttgccgaatcttccaaacatgctctaaggcagtaatgcttatctctggcaagaacttccttttttttgaaacgaaccaggcaggagagctgccgattatattaattaagaagtagtccgaaccggactaaacaacaaacaacatgcggttgcattgagacatcaacacgccaacaccatacaactcaactcgtcggttggattgggacatcaacacgacaccacactcaccgccgacacagagtgcccaaacaacacaggcaacgacaaccccacacgagagcacacaaaactgctaaaggtcatcgttatcaagcaaggatgcagagcatccaacaactccgacttcccaaagcagccaacaggcgaaccaaacaaaaaacagacagacagcccgaagcgaaaggtctcaacaagtcatcgttgccgggctcaggcacagagcagctccgacttccaatcttgaccctccgccctgcctccggtttttgcccgaccttcgaaacattctggaccacgaagaagggaggttcgcctcgtgttatcgttgccgagccacatccccttacgtagcagctccgacttcacgttgcaaaacccccacctccactcgcataccaggcaccgagaagcgaagcaacagccgaaggcaaagtcctggccgagacgaacttcagaagcgacgccttcaggaagggagtgacgtcactgtgacgccatcgtcacctgtccgcgatggaccgggctttcacccaaggaagatagcgctggggatgcgacaccctcaataggggaagcgacgcccatgggcgtcaccgttgccgagactttcgcccaagagcccccagcacaacgtctggccgaaacctcgagacacagcaagctgccttcgccgtcgccggtaccccgacgtaccacacaaatgatgaagattttgggccggccgccaccaccaccaccctgcgctagcccgatccactagccgatgcttcctcagacgagaggaggtcccgccaccgcaattccggctgactgcgcaggcctgccggcgcaccaacgccgacctccaccccggctcatgcgctagcccaggaccagcctgccggcgcctccgacggatggcatgcggaggccgccaacctcgcgcgccggatccagccctccgcgcgctggatccagccctccgcgcgccgacgccgctcccccagggggcgccagatccagccctccgcgcatcaggtacgcgagcacacagcccaggcacacctccaacccccgagcagcagtgattgccgtcgcggcgcgcaggcgccaccaccgggccagcctcgcggacgcgcaccaagccgcaggcccgttgcctgagtgggcggacgccgccaccgtgggctagacgcgcgacaaggcagcaagcacctgctcgacgccttcaccgctagccgtgcgagcaacccgccagctagctccggcggcggcaaggcaaagagatggggagggaggggagttggcagccgcccgagccgcgagggggcgaagccggggccgaccacgccgacgagcaactcacggcgaccttggcggccgcgcccgcccagatccgccggagggagacggagatgccccgccgccgccctccccgcaagcagccggaccttccggcggccagctcaggcagcggcgcggcagggagaggcccacgaaggggcggcggcggctgctagggattatggggagcgtccgagtcgcccgacgcgggggcaacccagcagcccccctctgttcttttcggtgcaaggctgcaagctgctatcgaatagctcggcaagaacttccttgagttcatctttcctacacgcctaccatagttcactgccttctctgagttttgattgccatcagtcaggtcccttttatcccctgtctgttccagatctcattcagatttctaggcaaccgattttagaaaacgagttttactagaatgttacgctcatcaaggacatgtatgacaaggttgtgactagcctccaaacaactgatggtgatacaaatgttttcttgattaacattggactacatcaaggttcatctttgagcccttatctatttgccttagtgatagatgagatcacgagggatatataaggagatatcccttggtgtatgcttttcgttgacgatgtagttctagtagatgaaagtcgggaaggagtaaatagaaagctagagttatggcgtcagactctggagtcaaaaggatttataattagcaggaccaaaaccgagtattgagatgtgactttggtactacaattagtgaggatgaagatgtaagcttgggagtccaagtagtaccaaagaaggacacctttcgttatttgggattgatgctacagagagatggtgatattgatgaagatgttagccataggatcaaagcggggtggatgaaacgacgtcaagcatcgggagtcctatgtgtcaagagagtgccacagaagttgaaaggcaagttctacaggacgacgattaggcctgctatgttatatgggactaagtgttggcctactaagagacgacatatccaacaactaagtttcgcagagatgcgtatgttgcgttggatatgtgggcacacaagattggactgagtgagaaacgacgacatacacgatcggctagaagtagcgctagcgccaattgaagcaaagcttattcgacacctgttgagatggtttgggcgtgtccaccggatacccccccagaggcaccggtgcacagaggcatcataagacgagacaataacgtgaagagaggtagagggcggccaaacttgacatgggaggaggcaatcaaaagggacttgaaggaatggaatatcccaaaggagttgtgtttggatagaagtgattggaaagaagctattcatgtgctcgaaccatgattaggccttttctcttttcgtgctctcaaaagctttttcccctcccctttctctctctttctctttttggtgacttcttgttgggtttcaactctagcctaccccaacttgcttgagactaaaaggctatgttgatgttgagcatagtttttaaggcgtccaaaagtagctaggcgtccgcgtcgtccagcgaagaaccagcaagaggaagggagacgaggaaggggcggcggtggcggcctgaatcggcagcgacgcgcctgaatcgggggcagcgacaccaagggcctgtttgtttcggcttctggcagcttctggccaccaaaagctgctgcggactgccaaacgctcagcttttcagccagcttctataaaattcgttggcgcaaaaaccatccaaaatcaacataaacacataatcggttgagtcgttgcaatagtaggaatccgtcactttctagatcttgagcccgatgaacaactttatcttcctccacacgtgatcgtaatgatactcagattctctccacagccagattctctccacagccagattttcagaaaagctggtcagaaaaaagctgaaccaaacatgtcccaaatcgggggcgccggcggctccttcgggggtggcgatggttccatcggctggagaaggagggcagcaggggaagatatatgggctagatggttggctgggcctgctacccctttccttctttttttcttttttctttttcttcctctccatgctactgtcttgctggttcttggatagataaggcgccgccttgctcgccttaggcttcgcctaggcgtccaggcggtggtccaacgccttgtctcgccttaccgctttaagaaccatgatttaagacattgaatggaacttatgaatataacgtgcaatattgttgcactaatggaccctataagcatgtgatcacatggctgggcactttgcatatgttaggacttaagtcgtatcatgtggaccagattctgaggaatggagactgaatcctcatgtgagtaaccacatgtagttttcttaaagaataaactgagaactgtatacatgaatgatagaggaagaacatgaatatcggtagcctcagtttgggacatgcaatcgtagtagatattaaatactccactaacattgggacatgcaaaagggcagaccatataggaggctttcacatgagtggggcctggggaagggattcgaggcaagccttcaccccacaaatgcaaatgtggagaggctgtttcaaacccgtgacctggtgtctcagtgagacaactctcacaaatgcaccgggcctgccattcaaagctgcaatattcaattgtgtgtatttgagagtttaatgtatcttttggttactgcatattatgtgaggtatcaagcaagaaaattctcattgacttctcatttcctgttgtgtgttgctctacaatcatcaaatgtatatagaaagcaattatagtactattctgtgttcttggcctatttccccatttggttgattgtgtctcttcaatacagtttttcttaggaaaacaaaaggttctatcaggaacttctcctgtaacttgaaataagtttgtgataaaaccggtgataacattattatcaagtgtttcattatcgtttattactgctaagggctgatagcatgatttgttgtggaataattaacaaagcatgctcctggtagtacaagttgtctgcttttagattatccatccattttatagggggcctgcttgtttgagatgcagtttttggatcttttctgaaaagcagttgttgggcttttgatcctgagaagtcaattatagcttttcgatatgttattagcttcctaaacttaggaagctataaaaagcctataaaatcaggcttttcagcttcccatataaactcaatttttctgagcttttggcattctggaagctacaccaaaaagctaactgttcgtttgagcttctggcttttcacgctgagaagctgcctagaagctcaaacaaactaggccttactatttatgcacctgccaagttgcatgttatcgatattacagtgcatatcgtaaagaaatttgtaatactatgatgttatttaataccttggctaacatgtgttaactagaacatttaaccgcttacgagctctgtttcacaacgtttgtcctctttgtttgtacctaagaggctcgaatgcagagtaacttaaaatgaaatcagattgttcttggtctcattgggtggatggactattgatttatccaatgagtagtagacatattttctttaagctggctttggatagaggtggagatagggaaatggaggggtatagcatagggatgtgagatcttatatccattcccgtgtttggctatatcatggtttgggttagggatatgttgtgggtagggatgaaaacagatacttattaggatatcaattttttttatcttttttctttgattacgaaaaaattggatatagaaagaatctgctatgcaaatttgtattcttgtttttagcatagagcttgtaaagattcataaaaggcaaacctcaaatttatcatatagcagccaagaccatcgagctctatagaatcgaaatgcagcagctctatatcctatttatcatatagcagcctagtgcttttaaattatgaataccaagaccacagctccaagggcctgcagaccggctcccaaccaaccctgcaataattcatcagactatacttcctcttatgcatatcatgcatatagcaaattatttgccttggtgtagacctatgtatgtggaatctttttggggaacacaataaaatgttgttttccagtgtcggtacatacattcggagcatacctatcctaaaatccattttcatttcttccatctggccctggcatgtctgtgctcgatgataatcagtgcgcatgccagctctatatgatatcaaagtctggcaaggaaaaatagcatctcatggcatggctctcgcagagaaattggggtttgatcgttagttccattaaactttcttttgtccgaactcttgtgatgaccaggtatattggcttgtctgg

SEQ ID NO: 591 - DNA, 11791 bp, Zea mays
  Intron number 3 from transcript GRMZM2G035341_T01 (locus G RMZM2G035341) derived from phytozome v7.0 (chr-ID 8; pos 8 102721 to 8114511 reverse strand)
tagcgcgaccagcgaggagtgcactgtcgcttggggtacaaatccaatctcctagggtcttctcacctatcttctttgttgtatcttttgtctgttgccactaattttatgttataggtatgtctcttcatgtggaatgaaagaattcgctattcattattttgcacactagttccgcggttgctcattgtggcatttagttttcgggaatcttacactaatcaatatgtaactggcaactatgtttagggtatgacacacacagatcgcaaaatatagattttccgtgctctttcctaagattctactatgtgatcttgattactttagtctggtgaactgtgcaatacgaacaatttgtttcatatacagtggcactggagctgttagaattatagtacgataagaattcaaaattgcacttcttcctcatctccaaattttgatatggctggtgaactgtatatgaaactactgcacctagtttttgtttgacatacctaattgcctcttcagatgaaacttatcctactgattacatatgaagctcagattacttaaactctgtttaagtgtttgtatatattttgagaaaaaatatccatgaatcccaaatttaactagataagtgataaatatctgtttaagtgtttgagccgaagttgacgacagtgggagtagggctggacgaaatactcgtggctcgctggctcgctcggttcgtggtcagctcggctcggctcggatcggctcgtttgaattttttcacgagctgagctaacatcctagctcggttcgttaatgagccagctcggttcgttaacgagccagctcgcgagctaaacgagctaccatattccagcaaaatgaaactatatgcatatcatttacaaaataattgatgaacatgttatatatatgtgaggtgtttatggcttatgaattaaactaatgattaatgaactatgtctatgtgttaatttggtttatacaaatataattatgggttaaaccgatgagcatgtatgtgaattgtgaattaatgagtgatgaattgtgctaatttggtgttatattgacgtgatttgtgaaactatgagtacaattactattttctattattaaattagtttgaaattaactaaaaaataattattatatacattttatttttttctgctctggctcgcgagctaaacgagccagctcgagctcgtaaacgagccgagccgagctgactctgtggctcgttaccttaacgagccgagccgagctggctcgttagcttaacgagccagctcgaactcggacgagccgagccgagctggctcgttatccacccctaagtgggaggggccgccgccgccaccgtcgctcccctgcaaccatgcgctgccaggacgagtaccacagcagcgtcagccgatggccaagggaaggtcggaaaccgcggtggcaccctggatccacccactggcgggccggatccactctagggaggcttgatctggtcgctgacgaggccctggcgacgaggtgatgaccgactaaagcatggatgaaacgggaggtggaggagaagaggggcatgagagagctgaggtaagccccgccgcggccttcctagcgcaccggcacgggcctcctggccgtgtgctccagcggcggtgaggtggtgttggggggcggcggtgtgtggatggcgcggcgcggggctctgcccgagtaggcggcatatcctcgggaaggacacaaaagacatacagttaaggtacaactgtataaactgacaatacaacaatctctgaaatctgaacattggcaaagctaaccaaaacattgaccactgtttctttaattgtatatgtttattttcttgattataaatattgagggtttgagacgaaaatgaacatatccattccagccttccttgcatgccatagtgggtacgcattaagataaatggatgagctatggcatcaagcgttatagaacttcacaacaatgacggtcaaacaaacaaaattaaaataaacactccaaacaaaatgcagaaccccttaaggtcgccaaattagatgagaaccaaacttcctgaagctcaagagttgtctcactctcaccatgacattgatactatttttcactaccactattactgtcacctaatttttttcttaaccaagaaacattcacattagtcacttcagtttgtcaaagctcccaaacaatccactcttggcccctcatctgtagacgcctccctgcagaaacaaatttaaataagtaatacctgctgatccaatgttatccatgttttagtagccttcaatacatataattcccataggtaactaatctcactgacaagagacaatcactgcggttgtcaggtagcaagttcttgttcaaaagctcttgtaggaagacatacatcattgtcttgctcattcctgacaccttcaattttgaaggaagaggcctgatgatctacctttagtttagtcaaggtacaacatgtaacctagtatccgtgatttcactgcacatcctgattcatctctattgtcagttggccaccagaattgtgctgattcatttctattttcggttgcccatcagtattgtgcttcttttagttattgagttatctagaataaatcaagtttggaattatctgaaagataagaaggtaaattcaatatcacaaagcaacctgaactaaacagacaagagacaactacatagtcgatcattttttttctcgaaaagcgcaggaaaactgtgccccataaatatattagcagggaagaaaaggtataagaagacctgaaatacaaggcgctccttaccgaggccagaaacaaccatacatgtataacccagccaaaaaaaaactaaaaccacctagttgaagcccctcagcagcaggaggggcagccaagaaagaaagacccttttgtagtgcccaaaggaacttgaccctacaaacagacccttgtatgctgaactcgcagaatacttgccatcaggtgccaaggagaagatgtgtttgtcttcaatattaggctgcaacacaatgacagaaagagcatcccagagagataagaaatctatcagaactccaactgagtgctcccttgaatatctgctatccatcttctgttcaacaaagcttcttgcacagtcctttttcatgctattctatttgggattatggcaaacagtcttggaggaatatctgaaacctttttccattgatccatctatctgcccagaagaaagtgttggacccactgccagtctcagtaatcagcacactagagaagaagagcttagctttgcttggaacttgtattgggaaccctgcccatgggcggttaggatcagttctttgcaaccataaccatctcatgcgaagagcccaacaaagttcatggagactacaaattcaaccctcctaactgcaaaggacggcataccttgccccatgcaaccaagcagtgttctccatttacctcttttctcccttgccatagaaagccctttcttatcttgtcattgggggaaatcaattgccattgcagcataaatagacatcccagtaaggacatgctgcacaaggattcttctccctgccctgttaagcaaatctgccttcaagaatgggagttgtagtcgatcatattcaaagtaatatttcagatactcaacatttaagctactatttatattttgtttggagggcaatttaaaagaatagagatggcagacatgattaaatgatataatttagaagctgataagcatactgctatcttttcaaatatttgaatcctgaacattttatcttacagacatggtgcactacatgttccacaactatagaaatagccactgtttacagtgtaaatatgtaccaggtaatgaatgggcaactggtgcgggattttattcattttaacttctattcaaggtgcttttaggaacaaaactaacataagagaattgagtcggccgatcatgcttgttgctacgtgtcgaggctcgaccagtgacttgcttgtggatggtggatcttacaaacaaactggtagaaacacctcggctgcgcagattataggagtgagtatcaagttggctggacgagcgggagcgaaggggcgccgtgctgccgctcggctgggaacttaggtgaggtgcggaacacaagtgaggcagggaacaatcacttcttagattgatcaatgcttccaattgattacagacgcctggactttatagtccaactctaaacagactccttaatcttaggaactctaacagactctccttaaaaaacagactccttaatattaggatctctaaacatattctccttatctaaggatcctcctaatccttatctatatgtccctctataatgggccgactagagggctgtttaggcctcctactataaaccataacatttctccctccctcgacgaacagctcgtcctcgagctgaaactgcggatatgaagccttgaactgttgtagaggttcccatgttgcatctactgactgagtaccattccagtgcaccaacacctgccattgtccgtgctgcatccttgctcttattatcttctctggcgatggcagaagccggccattttgcataggtgggaggtctgggggcaggacaggaggggtaccccggaaaggcttaaggagtcccacgtgaaagacatcatgaattcgtgccccttctggtaactccagacgatatgctactgcgcccacgcgctcaagaatacgaaatggtcccgcatatcgcggtcccaatttccctttgggtcgttcgaccagtgactgagcttgtcgattgaggagacggagccaaacccagtcatccacatcgaactcgagatcccggtgtcggccatcataaaactttttggcatgctcttgagcttgcagcagcctatctctgacttcccctagaaatatatctctttcccgtagcatatcatccacaacttgagtgtctgctgtcccctgcttatatggaatgagaggtggtggatctctgccatatactacacgaaaaggagttgtcttcaatgctgagtggtatgatgtattgtaacagtattccgcccatgcaagccagtccacccaagctcttggcctgtctcccgtgatgcacctcaaatacatggcaatagttttgttgactgcttccgactgaccatcagtttgggggtgaaaagcagtactcattcttaacttgacacctgttagcttgaacagatccctccagatatgtccagtgaaaactggatctctatcgctgactatggaacttgggaacccatgcagccgcactatgtcaataaaaaatgctcgtgccacagtcgcagctgtgtaaggatgactgagggcaataaagtgggcatatttagagaaccgatcaaccactgttaatatgacagacttaccatggacctttggtaaaccctcaatgaaatccattgagatgtctgtccatatttgtattgggacttccagcggttggaggagccctgcgggatgcagcgactctgttttgttcctctgacagattgcacatgatttgacccaatcctgtaccagtgtcctatccttgtgaatgaagaaatcagctcttaatcgatgcagcgtcttttgtactccaccatgtcctgctgagtgtgcggcctccagtattgagggaatgagtttggatgatgttgggataaacaccctgcgaccgtgcaatatcaagccttcccgtatctgccatggggcctctagggatccctctgtaatctgagcctggaggagtttccactcatcattattagcacattctgtctgcaattcttggtacagctggaatgttggggttgatatggtatggactgaactttcagttgtgtccctgcgagataaagaatcagccactgtgttgagtcgtcctgcccgatattccactgtgaagtcaaagccaaacaacttactaatccactgatgttgtggtaccgtggatagtcgttgatctagtatgaacttgagactgaaatggtcagttcgtaccacaaatcgtctgccccataaataaggacgccagtgacgtattgcctgtaccaacccaatgagctcgcgctcatatgctgccaattttatgtgtcgggctgcaaatggccggctaaaaaaagctattgggccgtgatcttggtgtaggacagcaccaaaccccgagcccgaggcatcacaatccacagtgaaagtccgttcaaagtcaggaagctgcaggactggtgctgatgagagtgcccgtttgagcgcttggaaggcggagtcggcttctggagaccactgaaagccttctttctttaggagtttggttaacggtgcagcgattaacccaaattccttgataaatttccggtagtagcctgccaatcccagaaatccccgcagtcctcgtggtgcctttgggatcggccaagaagtaactgcttccaccttgctgctgtccatagtcactcctttagctgagatgatgtgccctaaataagcaacggatgtcgcgccgaattcgcatttggactgtttgacaaacaaattgttggtcagcagggtctgtaggacagccttgacatgtatgaggtggtctgaccatgtggcactatagatgaggatgtcatcaaagaatactaggacaaaccggcgaaggaactgacccagtacttcattcattaacgcctgaaatgtcgctggggcatttgagagaccaaatggcataaccagaaactcaaagtgcccatggtgtgtcctgaaggctgttttgtgtacgtcttctggatgaacacggacttgatggtagccggatcggaggtccaatttagtgaagaaatgtgccccttgcagttcatctagcagctcatcaaccacgggtatagggaatttgtctttgactgttttctcattcagtgctctataatcaatgcagaagcgccatgatttgtccctctttttcactaggagtactggagctgaaaaagctgatgtgctgtagcggataatcccctgttgtaacatggttgtgcattgtgcctccaattcatccttttgaagctgtgggtacctatatggcctaactgcaacgggtgctgttcctggcaaaaggtggatcctgtgatcacaccttcttgctggaggaaggtcactgggcgtagcaaacaccttctgaaattgcaggagcagacgatccatcatcggtttggtggttgtgatatctgtgctaattgttctcactgctgggtacacattaatggccttccgatctgatcccagtcctttccacacaattcgttgtccccttctccagaaagctaggcacaggttctcgaggtcccaaagtgttggccccaaagtgcgcaagaatttgaccccgagaatgatgtcgaaagaatcaattgggatggcgtaagcatccatcagaaagtcttcctggccgatagtcaagctgatgctgttggagagcttacaacacatgattttatccccattggccacaaatgcctggagggctgggtttggctggtagtccagtttcagagcgcgtgctgtgtcttcgttgatgaagttgtgagtagatcctgtgtccaacagggctgtaagagctttccccatgatatgtacttccagctgcaaggtactctcagaatggatacccgtgagggcatgtaaggagatcactggtgttgggtcccctggcactgaatcagcctctatagattcatcttcctcatagtccatgacctcaagatagaacaatttagggcagctgtccacggacatactgttcatcacaattataacaaagtccctggcgacgccgctcagccatctcagcaggcgtcaacttcttgaatgttcgctgctgtcctgtactgggagctgcaggaatcgctggttgaggtgccggtactggtacagacgggcgctggggttgacgcatggtcttgttggtggttgatgtcggctggtgatcgagcacttgtgacctccgttcatatgcgcgcgccaaactcaaggcgtgattgatatcccgtggtgccatgagttccacgtcgatcttgatacgctccggaagtccagccgtaaacagatgtaccttctgctcctgtgacagtggagctgtttgggctagcaggtcccaaaacctctcctggtagtcatccactgtcgtgcggaatggaaggcgtgccagttcgccgagaggattgctgcgtaatgggggcccaaagcggagttggcaatgctgcttgaagagttcccatgacatggaaggttcgtcgcgctgcagctgggtgtaccacgtccgggcaattcctgtcatgtgataggatgcgagccagactttctcatcctccagcgtgcgctgaccttcaaagaattgttcacatcgattgagccactggagggggtcttccttgccgtcaaatagggcaaattcgaggcgatggaagcgaggaactcctgcagtaggagtatggggaatggtgttgagagatggcagtgtaggtggtggatagtgtgggatgggcgaaggggaatgtggcaatggtagaagatggattgggagctgggtggtggtgggtggtggcacatcatcagttggcgtcgtggtggggggtatgcctccatacccgggcaagccataggggcagcttgctggaagggacagcgccgctgatgcaggcggagtctccactgctgcaatgcgcgaggacatggaggacatctgcgttgcgaaggcccctagttggcgctggacttcggcaagggcggtggtgatcgctgccaactccgacgcctgggtggcggacgctgcactgtcgtcggtgttggatcctggcatctccgataccaaattggtagaaacacctcggctgcgcagattataggagtgagtatcaagttggctggacgagcgggagcgaaggggcgccgtgctgccgctcggctgggaacttaggtgaggtgcggaacacaagtgaggcagggaacaatcacttcttagattgatcaatgcttccaattgattacagacgcctggactttatagtccaactctaaacagactccttaatcttaggaactctaacagactctccttaaaaaacagactccttaatattaggatctctaaacagattctccttatctaaggatcctcctaatccttatctatatgtccctctataatgggccgactagagggctgtttaggcctcctactataaaccataacacaaacacacagaggttcatttggtcggtacattagcttgccaatggtggatcctacatttgtttgaagccatgtggttggctcgaaaattgcagaatagctttagacgtctaacatcaataagctgaatgggtatgcatgataggtggtgctgcataccagtgagcgaccatttgtctgttctgcagctggaccatggccatccttttttgcctggcgtaccagccaaccagccagctagtggaagccatactgcctatttgcatccctgctcatagccattgcagggatctgggtttacctgtcaacaaggaccggggcttccgtagtgccgttatctgaggctggttgctgcaggactggggatagggaactatgcaacgaatgttggagttgaacacaggtttggtgcagatttttctatttcttatgccacgctctgaaccgtggctggttatggttacatatataggaccaagtggtctgttacaactgaaagtagagctaagattccaactactaaactagagataaggtagaagataagatgctgaagtactacataaggtgctgacatatgcacatgacttatcctatcattctcccctgaagtcttgtggcgtcgctgtaggaattcgaaccatccattctggcatgaagctggtcttgagtgctgatgtacaagcagttttctgatgaagtggtacttgacccgaatgtgcttgctgcgctcatggaagacgagattcttcacaaagccaaggcagacttgttgtccaccctgagctccactgctcgtctatgccaagatcacccagcagttgtgccagctagagaacctgagtggaggcagaagtggcagcgatgtactctttgacacaatcggatagagccactacctgttgcttgactgactgccaactgatcaagcacacttaccaaggaataatagagttctgcccgtgctcttgctcatatcaatgtcaccgacatggtcgttgtagctgaagtgtgcagcgctgggacaccacgggtcatgcaattcatagtcagagatacccgtgacacagtgtaggatcctcttgatggcctgctggtgctctgatgtcagtcgctgcatgaatcgactgactagctgacagcgaacaccaaattcggccatgtgtggatgaggtagtgaaggctatacataacgtgtcagtactacaccacgcccacctcctctgccgtgctatcgtggctcagcttcagcctttccatgggagtgtaggctaggttgcagtcggtgagcccacctagcttgacgatgtgtttggcatcaacggtctggtggagtgagatattggagctgccctgtcagtagatagcagcatcgtaagcactttgctggtaccccatctgcttgaggcacctccgcctcttcttggtgctggtgattaccaagttgttgacgtagatgcctaccagtagggcataacctcccttgccctgtcagtagatagcagcatcgtaagcactttgctggaaccccatctgcttgagggtggggtctagcttggcgttccaagctcgtggtgtgtgtgccgcaaaccgtagagggccttgcgtaggtggaggaccttgttctctttgctaaaatctgattgcgtgggttgtcgcagagatggcattcatgaagaagtgttcctgtgggacgctgtgtggagtggcacttggagagaagttttatatgggacactatagcgccaggcagactatcgtggcgagcaagcgcacgtggggagtgagcgcatgaagccgggtggatggaatcatttgatgatacacttgatgtgtcagttcctgcagatgtttaccgcattatatctggattaaggcagttacaagcccataacagcatctgtagcagagcactacatgctctttttgtactgtgctcttggcaacctcttgtgtgttcgttgaatggaccacttgagcagtggacagtgaacttttcatcatgttgtggtgttgattgtagaaaaagctgacccatgtttgcagctggaaatgatgttaaatgctgcttggctcaaaaataaaacgaatggggagctcaagcatgtaaatcttttttttttctactaaatcttctttatatttgattgtacaaaccaatagacattggaatatgttgtggcatgtgttctacgtgtttttgggccccagtttcaccggcctaaaaaggtttgttcgctgggtctaacaagatttgtttttgcatactgcaggtgtctgtaatcatgcttttcacttccactgcatcagcaggtggcttaagactcgccaagtgtgcccattaggtagctgcagttctgtgttgatttgatcccgtagttgattcgtttgggcattgcattactgacggtggactttttttttatcttgcagataacagtgagtgggagttccagaaat

SEQ ID NO: 592 - DNA, 2896 bp, Zea mays
  Intron number 1 from transcript GRMZM5G811948_T02 (locus G RMZM5G811948) derived from phytozome v7.0 (chr-ID 3; pos 5 7665830 to 57668725 reverse strand)
ccacgcacgggcagcacggcttccaggcttcgcaggtacagttcctagccctccacgactccacggcctccacggaatcaacgcaccctagtttttagtatctttgcttttgcttgttccccagaagaaaactacaaaaacagctttctctacctgtcaaagtgttgacatattattcagaatcttttaaggtaccaaatgaactaagttggtttctgaattagagtattccatcgattttagcttatgtatatgacaactgaaaacagagtccaaataatgtgatcagtaaatattgtggagcaaatttagcaaaatatttaactcaatgtacacagaataagcaagggcaaaccatgatgatcagacctcttcaccagatatgggatcagttacaggttcccctgcagatgcctgattgaataacatgtttcctcttgtagctcgaaaaagcatccgctcaaaagcaagtgccttcgactttaatattattccactaacaaatctcactccagaatgtccatgtgctccttgatgcactccctgggaacagttcttttttgtaatggcagaacaggcaatgtaatagtgttagcattatgaatcagggctaaaatcagacctgttcgagcagataggcatttccctcatgtattccggttaacattatgaatcactgaaatatgagtaatgcacctctagctcctccagatcaatatgagcaatgtaatagtgttaacattatgaatcagggctaaaaactttctgttacaagaaatatgagtaatgcacctctagctcctccaaatcaatatccggttcaagtgcaggtcgaacagaagatcttaaacctgccctgttgatctgatcactgaaaatttttagtttgcgtgacatttctgcacatcgctttacctgcaatggaattaagatgtgtttgtcaacataactaaaaagttagtgagaccagagatttttaaatatcagcaacagcccaaacaataagttttagtactgtccgcttcatcatcatattgtttatgtactgtgctatttttagaggatgtgaagtctggttctaatttcctatcatctaccatactgtactcagtgctatgagcatattttaactggtaacttgattggcaatccagtactcatgatatcaaatagcataatgcaatgagtagattaaccccttttccccacagttgtctactgggcaaatcactatataatccacaccaatcctgaaatgaccatcccttatactgtaaaatagcctctactaaaagcaaaccactcagagcatcacctactgcctgattgatcagctgactcgctgccaacaatctcattacagcgtggtactgtgctgattgctgaacctagaaagggcattagaccaaccgcatcaaataaactgttgaaagggagaataaggacgtaaaacagatagtaagagcgtaccaatgtcagcttgagaggagagctcattgcttaatgactctagctaagagatgaaatcctctgagaataccacagtcccatgcccatttgcctcaaagtatataccaatgtcatactccaaggcccttttgtgcagatatttcactcctgtaggagtgaacaccacttcgaggccaaggctcttcagaaactgcgtcgacgccccattcgcataagctgtctgaactattccaagccttgcagacaatgacttgtttgcttggccaccattgttattaacgatatctagctgctctctgataaaaagggcaaacagagatagtatcttatctccatcaacaagatcaacccaaaaatacactgcatatgtgtttaccaaaaatcttgcttcccagctgcttccaataactttgggaaacaaagaaagttaaaagtattaaccttaaccatttgatagtcaacacaaagagaaacatatatccttaaattcgacgtatggctggttgacaaatacctggttgacaaagatacgctacaaaggactctgttttagaatgcatcagtcaaactcgccttcagtctagtggcgttgtactcccattttaacaaactgcataagtatatgattatcaatcagtgccttctttgaccctgactaagcattgtgtatctcttagcaaactgcataaatatactaatttgaagtatattgatccgtgccttgccaattgccatgagtcaatgacgtcgattgcgcggtgctccattcatatccattctgaatttctgatttgattgtccttggagtaaatcttggactgtcttcatgtgtccgaatccaaaatagtcttgtggttcgtctgcctttcagctcatttggaaggttctcagagttgctgatcccaccattggcagttcaagtatcaagaggccattggtgacagaagctgcaacatccatggttattagatgtacatgtcattttctttcacccttttcctgaataacttgttggcattaagatgcatgacactattaccttcttcctgaataactgtgagcgagatgtataaaatatgtagttttttatgttgaaaatactgaagtatggaacaatgtactcctaactagggattgtggtgggacacaaaactgacagtagcttccattttcctatagtaaattttatttgtcatgatctagctttgcatatataattttctccgagttccttacagaagctataccaagttttatatttagtccctagtatgagtggaaactttgtataactgctgtaaggaaaaacttgttcataaaactttgtatttcccaacacgccctgcatacctctctgttcctaactttttttgtgtgcatatctttttcagcagggaagttccctaaggcaagcagttgaagttta

SEQ ID NO: 593 - DNA, 4570 bp, Zea mays
  Intron number 1 from transcript GRMZM2G143512_T01 (locus G RMZM2G143512) derived from phytozome v7.0 (chr-ID 2; pos 1 8708211 to 18712780 reverse strand)
gcgcgcaggtcgtcttctatcccgccttcgtgtcggtgagcatcggtcctctactcctctagttgatttgagcctttgaggtgttgctttccgatgggcgggttactttttttcttcttttccatatgggatgtttccagatgatgattagatcaaccgttaattcttttatgatatttttttcttcatatacttatgtgccaaccttgagcgaaaattatttataaaaaaatattggacgaatattttggttatgcaatttcgatgtgacacagaactctaaattagaacatcttatgcagatcgctatgtgattttgatgtaacgcaccgctctaattttttttcctgaaagcaaactcgtagtagctccgcctgtgagtctatccattagcccagcaaattgacagaaacgagcgagaacaaaaacactcaagaaagcgtcccagacacatattagtggtggagcataggacaccttctttgttctaggttgcacggctctatctagtcttttaatcctggaaatctgtacatgcctacacgggctttcaattttgtacgacatagtatctggaaaaatgtttaaaatttctaaattataattttaattacaaaaatacgaccacatggtcaataaaaggccatgaaccatgctattaaggatctatttggcatgtcttcaaagcaaaactccaagaatgagctggttaaagcatgccaaacaccctaactccagagttgtaaactctacgagatttttagagctacaatacaattttttgagtacctcttttgctgctccgaaaactccaaaaaactgtcatggaatttgtagttatttacccgacactgtcaccggttatgaaaaacaatctaaactctggagcagagctgctccatccagagttttggagtagagctgctttggggtggagcgaagccatgccaaacatgccataaagcagatcgagtgggggcttttgtagaaaatggtgttgaactggtcatataacatctctcttgacgctgcgctaagtgtctttctctaatattcttcttgttatcgattgtaagttcgtttttaaatattacatagattatatatatatatatatatatatatatatatatatatatatatatatatatatactcgtcactttaggtgatgattattcagtgtagaatggcttagggtctttttgtttctttagtgttaaagtttagcacttgaggtttgtttggatgaagtattaaactttagcacttgcggtcaacgagaagtacacaaccaatgatgggagagagaaaggggatattcaatgcaaaatagggttagggaccacttttagcataatttatcatctttggtgaagctaaagtgctaatgattgctaaaatttagcacaacacttttagccacaatgtttgttttttatagctaaactttaattaaaaaatacaatgctaaagtttaacaagaggaaacaaatggacccttaacaaaaaatagtgaatgacttaacaatgttaaggtagtgatgaataacactgtcttatgtatataccatgtgtagtaaaatctatgtacctagaaaaggcagagtgacctataatttagaacatgaagagtgttaataaaatgtatgcagacatatggagaattgagcgtaaacttttatgcatttaatgttccaatttttagcaaaatattcagtgatataatttagatgtgacgcagggctcagattagacgcgtcatttaggggtgtctcgtaccaccaaactaatgtttagttgtgtcacatcgatagtttaaatgacaattaatgtttagttatgtcacatcgattgtttaaataacaatgatgtgtatcaaatataatctaattataaaactaattacatagatgaagattaaacgacgaaacaaatttattatatctaattaagcatatatttaacactcataattgatatttaaatattcaatattacatgaactaaactttaattagagaaacaaaacgacgcctaaagttggtccacaattttgattgaatgtagagcggtagaatggaccaactcatatagttagatctctacgagggacgtagtcataaaaaaattgttggactagattatactactacaatatatcagtctattctatactatattgtgtacattttaaatcttagaagaagcttgagtgaggctcttgggcttaggagcagtcttgccccaccgctgcctctatcccctatctaattttaacataataatgtattgtattttttaagaaaaaatcttgcaaataccgctactattgctagatgtttttttgaccttaagcgaaagggtctctagctgagttggttaggtggtctgagtagcactccacaggtcctgggttcgactccccgtgggagcgaatttcaggctgtggttaaaaaaatcccctcatctgtcccacgccaaagggcaaggattctcgggggttttctcgacctgtgtgagaaggtcttcttaatacaatgcccgggggctgtcttaccccccgcaggtcgagtttttttattttaatcaatttgaatgtatgtaagttgataaataataattgaaatgaaatggctctccatgaattttatttccatttatttgttgtgatttactccatccgtttcaaattaagtgtcactatggtattcgtgccggtcaaactttcttaagttttactaggtttattgaaaatattagcaacatttctatatctaaataagtttattatgaaatatatttagcgatctatctaatgatataaataatataatattgatattcatatttttaatatattcacaaaggctgcaggcttggcgtacagtacagatggattttttaagaaaagaaaaaatggtggttcttgcttataatttattggttatcaaccacaaacgctatgagtttttgctcctagacagaaattgtaagaaaaactgtcccaaacatgcatgcttttgtcaaatcaatacttgttttacatccttttcccaaggtattcacacacaactggatactgacacacgtcgtagtctttcttttgtgaagtgtatctgttttctgcgctgctctttttgttacagtacatatcactctttttcttttgttaagctacactatatatcttttaatctcttcagttggcgttccttctgctgtattcccaaataattattatattgcacagaatgaaataagttgtcgtgttcaagaacaatatcactcacgtctctatgattactttctttcataagtggcgcatttggtcatgcaaagttgcaatcctgtcccccattattgaaaaagaactgtttataaaggcaagatatagccctttataggacataacgactagaaaaaagtttcgtctcatatatcaaccttgtgttgcttgctctcaagttatcttattggatgcatatttgattttattggtgccaatccatcgtatctaaatgtaaatacaatgtaataaattccatttattgaaaatctatagcaactgcgatactactatttaagaaatctttttacatgaacaagcggaatgactacccgtgaatattatctatgttgcatactttcttttatacaataagaaaaaattcatatacatccctactccttaaaaaaaatcatatactcttttaaagcaccactttcgtgtgtcgcacgtcacgtgcaaaacgcgtaggtttatccctctcccgcttcttaccaaacaatgagccgttatactatagatgggcagtgaaaaaacactaaaactcaacactacagaaagccacacatagtgaaacactcccacatagtgtcatctcgctaggtgaaggaggacgagcgatcaagtgagctataaaaaagggtcaagcttattttcaactcacacatttctcaaccttttggcatagtatttgtttttatcagtttaatatctaatatgtggaccatatattcattttgatattaaatttattttttatggtatcaaatatgattgtgtgatgtcgcaacacacatgtattgtactagttatcatttacattattcaacatctaaaatcacaccggttttcaggttaggaaaagacaatattggttccagatcatggcaaacatattgatgagtttgtttggatctcaaggtttatcaaaacaatctttttgttaacaatgtttagaatctagcaaccttaagccctgtccaggcaatagatgatgaaactagcataaataaaattaattttgttaagataaaaaaagacgtctgtcaatcactactccacgtccccaacctatttttcacaaaaaacagcttaacgaaatatatagcctaaatctctttttacttagtacgatccaaatgaagtgaccaacatactccttttaatttaataaaaatttaatatttgtttccttagcaccatcataaaactcattttatgaaaaaaatgtttgtaaaatatggcttttaacaggagggaaaaattagggaagcgatcgagg

SEQ ID NO: 594 - DNA, 16628 bp, Zea mays
  Intron number 1 from transcript GRMZM2G117401_T01 (locus G RMZM2G117401) derived from phytozome v7.0 (chr-ID 8; pos 4 4384242 to 44400869)
caggtctgtcgaagattccgtgtcttgcctattacgcgttggacttgtgctttctggtttcttcgccggctgtaaccatatatcttttgtacgtctgtataacggaatccatggaaccgtacctgtaaccatgtatcttttggattcttcttgcatttatcccgttatagaaatggccggaatccactgagttttgccacacttgctgaatatagctcatatacatttaaacaacatccattcttaaatttcattttacatctttatattattatcaaagtgattttagtgaaagaaattgcatgtttctcatcgagccaatcgtcatagttcatacatttaaacatgttgatagtccaaagtttcaaagtttggcaacaatgattctaggatgtcagtggaaaagaccgggggattagcatccttttatgtcttggatttttaccggtagctcgcacagcttgattgtttgagtttgtaacttaacaaggggtttactgcagaaccttgtgctaactgctaaggaagtaactagaaagtgagcttacacattgcatggtaagtttactagtgatcaaatattgctgatggtgtgcatgtggctttgttattattgttattttgctgggtgtgggtagttattacatctgtactgtatttcaaatatgttttctcatagtattatggtgcttttgattgagctgtggcttttaaaaaagctgttgtgatatgtgggctgtggcaaaactacggtagattgtggactatggaaaaggcgtaagctgtttggttcaaacaagtataaaactcaccttctatctctatttttcttgaaacaactgtgaaacaactctctatttgcaccattttggaaagaagaaagccaaaagcatgatccaaggtgctttcaaaactgtactaaccaaaattagctgcttctgaaaattagcttctagtttgcaacctttttgttggcttttggcttttcggaagcaaaagtagctcccataggcccaaccaaaagcacccttaaactggtaccggtaactagtgggaggaaagaatgtatccttgattctgattgtaggccacattttcttataagataagatgtggtctgcatagtttgctctatattaaattcatacatgaaacatggctccaaatctttgtcatcgtttaacaattagggggtaaatgtaacttaatgattttttttctcgaaagcgcaggggaactgcgcctttaattatattaagaagaggagaaacataatacatagtacaatagctctccttacggaggccagaaacaagcataaagaaacaaatccattaggaattcaggctaccgacaaaggagcagccaaaaaggagagacccttggcccctgctagctcccaaaggtttctctcctcatcagcctgctgcaggattcgagagaggctgggggtctctccataaaacacacatctattgcggaggttccatatcttccaggcacccaatatgatgagagaattcagccctttcttgaccattccctgcactgcctcagtagcccctttccaccactctaagaaggatgtgaggccaggctgtggggccagggcatgtaacccaaatttccttaggagcatataccagaaaattcttgtgaagacgcaggaaataaggaggtggttcatggtttcatcttcctggtcacaaagaagacacctttgcgggtgattcaggccctttttggccaaacgatcagcagtccagcatctgttgtgtgccaccaaccaaatgaaaaaacggcactttgagggggcccaagatctccagattcttttgtagtgatcaaaagtagcagatcctaaaaacaggccattataagctgctttcgctgtgtatttaccatctgcagcaaggctgaaaacatgtttatcccttatgtttggctgtaactcaatccctgaaagagattcccaaaggtttagataatcaaccaagactcttactgtaagagcccccttaatatctgaaatccatttcctgtttacaagtgcttctttcaccgcccttttgttagcaattcttcttggaattgacttgtgcaggctaggggcaatatcagcgatttgagtgccatgcagccatctatcattccagaacaaggtgtttgaaccatccccaaccatagaaacaagagccatagagaaaaaagccctagctttgtttgggacctgtatgggaagacttgcccaaggccgccccaaatctgttttctgcaaccacagccatctcatgcggagagcccaacaaagctcagggagactagagattcccaagcctcccagctgaaggggacgacacacctttccccaggcaaccaaacagtgtcctccctttgcttcctttgtgcctctccaaagaaaaccctttcttatcttatcaatggcatctaaggcccattgtgggatgtcaattgccattgctaaataaactgtcatgcctgtgagaacatgttgcacatgaattctccttcctgctctagacattaagtcagctttccaattagggagttgatctgcaattctttcaacaaagggctggaactgctgccgagaaagcttatgcaaggatagggggagtcccaaatatctgcaggggaaggttgccatctcacaaggcagcaaactctgaacttccatcaaatttcccccggagcattgaataggatatacatttgatttctgcacattatttatgaggccagaagcatctccaaaaagttgcaggatgtctagagtgatagaagtttcttcagcagtaggatgtaaaaacacagccgcatcatctgcataaatagaaatcctatggagcttctttcttctagataactgctgtagcaaacctgcttcttcagctttagcgaataagaggccaagaacatccataactaggatgaatagcatgggggagagggggtctccctgcctgagccctctcctatgggctaaacgttcccccggggaaccattgagcagcacttgtgtagtggaggaggccaataacccacaaacaatatccctccagatatgaccaaaaccaatctgctgcatgacttcaattaggaatggccaggacactgaatcaaaggccttagtgatatcaagtttgaggagtaggcgaggcaatttctgctggtgaaacaaccttgcagtttgttgtaccaacatgaaattatcttggatgaaccttccctttataaatgcgctttgaatcggagagaccagctcattgagccttttggccagccggttagcaagaatcttggtgattagttttgcaaaactgtgcacaagactaataggcctaaagtctttgacctgctctgccccctcttttttcggtatcaaggtaataaaggccgtgttgagcttgtagaaattgttgaaattcctgctccaaactgccctaactgcagccataacctctgctttaatacttccccagcaatctttatagaatcgccctgtgaatccatccggccctggggccttatccaaaggcaagcctttaatggtttccaaaacctcttgttctgaaaaaggggagtctagatcctccagattatgtctaggcagtccaagggcatccaaatcaatagtcctttccctgtttccacattgtccaatgaggtttgtataaaactgatccactgctgctgctttttcactgtggttggttaggatacgatctccatcaaccaacatggccacgaaattcttcctcttacgatgccttgcatgaatatggaaaaatcttgtgttcgcatccccctctttgagccatgaaattcttgaccttaatcttgccatggttcgcttgaaggaggacaacatcaaagattgttttttgagcctgtttttaagccagatctctgccggggtaagtggtctttcatcatgtgccatctccagtctatgcagcaactcctttgccaaagccaactgcaatcttacatgcccaacctgcttgtcactccaaccttgcagtcttcttgctgtcatctttagcttcttctctagagtctggaaagggcatctgacagcttcgtctgagttccatgctgaatgcacttcctcctgaaaaccttcaagcttggtccaaaaggattcgaaatggaaacgtcgttttccaggcctattgtcactgagtcccagaagcaaaggacagtggtccgaatcaagtgatgcagcactatgaagaagaactctggggaaggttagctcccaatccacagtacaaaacactctatcaagcttaacaaggacagggttatcttgctggttagaccaagtgaatttgcgtcctaacagcggaatctccttgaggccaagatcattgatcaaatccctgaaacgacccatcatggctctattaaaactggagttattcttatctgatgttttatagatgaggttaaaatccccagccaccaaccaagggccagcacaggctgttctgacatctctgagttcctgaagaaaaaggatttttccatcatctccctaagggccgtacacacaggtaagccaccaagcctgcccttgctccatgcacaactggactgaaacactgtgattgtcgattctttgctgccctgtatgacctatatgtcttttccaagtgatcaagatgccaccacttgcacctgttgatggcaggtagacgtaatcagagaactcagctccaagcatggagaggatagttcttgttgaaatgttttgcattttagtttcctggacacaaaccacatccacttgggaagagtccacaagctctctgactgagtcttgccgtactgaggagttcagtcctctcacattctagaataaaattttgtttggattcatggataacagtctacagaacactaccacaaagaacagggggaggaacctaggcttcaaacaggcccttctggtggcgtgggccaaccgaaaagggctgacaaggcctccacctggagctgagaaagtgggtgcttgaaaagctctgcataagccttgagggcttcctgactgatgccttcatcttcagtaataatctgcagggctttcatggcttttttggtggccctgccaccccaatcttgcatgctgaattccaatccagctccagcgacacgtcggcttcgtcttggcgcagcagcatgtgttgttggagagggaggagttgctttcttgctgtttttatttggtatcagcagacaagcgtcaggtcttctacagattttgttgaggaactcttcttttcttgtcgcagacagcggagcacccatggctgtgagggtatcaggtcttggatcagttgtatgcccattctctgttgccaacaactcccttcctgttccatcttgttggccgtcgtgaaattgacttgcttttgaccctctgcggtaatagaccttcagcattctagttggctctgtctgcaaggatgcagctgtctcaagcgacccaggcggatgctgaggtgagacaggcgcaggcaaggccatcttcagtgtcctagtatcttcaattggcaagacatcatctggggtcatctctggcgtcccaactcgaggccggggcgagacatgcacagaaggcacgatctcaagcatccctgctcgaatgtggggcgagacagccccaggcatcgtcgtgttcaggagcccaggtagacagtggggcgagactggcgctggaagcctcgtctctagcgtcaggcaaggctggggcgagacaggccttgggagccatgtctcaagcggcccagttggccgaaggggcgagaccgaggcattccaggccatctcaggcggcccaatcaggttccggggtgagcccaccatctcagacgacgttccaacagtcatgtcgcattcaatccggggactgtttatcttccccggggagatctgtcccaccataactgtcacggtagtctctctgtcttcctggggctcctcggaaaccggtgtctcatcaatgcgcaaagaaggcagcgcatctcgatcaggatctctcaccggatatgctgtttcccttcccgaggtcgttgacggcgctggaagcgcaacccgaggcgccagggttgcagcgccgcgtcccaacgacatctgcgggtccaggcgaagatgaaccgatcgccgcaggaacagggacggcgcgggaaacaccgcccgaggcgccaaagttgcagcaccgcgtcctgacggcagctgcgggcccaggcgaagatgaaccggtcgcctctggaacagggacccgttcgaacgacgagactgggggtcctggtcctcgccgccgccgccatcaccatcaggtctcctgccgtacgccggaggtgggggcggtggaggccccaggtccgccgcagatagttctgacagggtagcgctcacactgatcttgtaagtgaggcatctcttctcaagtgcgtgcaatccaggctcgacgatgagaaggtccatatcacggtgtagtcttccaggatcaaaacaccaagcactgacccgaaaggctgagtaatctttcttttgcaaagtatcaggatgcacgtccgaaatccagcaagagtctctcaagatgttttctgccgtagaacgaaaccaagcgtgctctgggattcctctaatctcaacctccaccataccagacatgatcgtcgaagatgcatgagtaaacctcgaccagcgcttgaacttcaaactgaaatgaggccccctatatgccttgccatcattaagcacccttgaggcagtttcttcatcaggtagaatcaagacgaaatcctctggctggacttgatgaatccacatggcttcaacctaatatttagcaaaatcggatctatttgaattagcaaacaatttcagtgtccactatttctagtagctgcaatgataatgggaaagacactgttctttttcttaaaaaatatcatagaacatattacatgcatgacataatcacatgacttggttgtattgtatgattgtttctatgccactgggaaacatgatactccttatttgatgctttttattttttgcggcttccaagatgcaagtttgagcattaattgttatgccatactaccttttatgaatttattttaaaacaaaatgtccagtaatataatttctgcagtcaagcttgacaatttaaccatattaattgtcaaactttggaattttgataacatgctagaatgagaattcagaaagaaaattggagggaatgtgtgaattgcttgcactttcagtatcattgtttctatgcattgttttcttgaacttattgggatatgccatttttttctcttttttggagataacttgtctattctttccttctcgttttgtgttatcccacgattcactcaccgtcttagtttcatggcttctgctactgctactgcattgacacagtaagcatgccttagtttgtccatgattttttttacagtttatcagaatcagcgcatcttaggacttactcattgacagtgatccatagttgttaagacatcgcctaggtgacgcctaggcggtaaggcgccccggcgacgtaaggcgtcttgctcgccttactcctgcacctaaggcgagtgggagaggctgtcggcagctggtggggtggtggtggctgctccagcagcggcgcggcggcgccgacacaggagagagggagccagcagggagagagggagagagctggtaaggagtgtgagctctgttgtcttgccggtaacaaatcactcaaggagctgcacggtggggcgcgaaggctaggcgcctaagtttgtcatgtagggtcgttggtttgtccttgcgtgtggcaaacttgtactctagagtgatgtgtggtgaggggtggacctcatgcctcccctcatgtgttgtactgttatcttttttcttaatgaaattacacgcagctctcctgcgttgtttgagaaaaaaagggagggagctaggagagagggagaggcgtctgggaggagggagtcggctgggactgggaatgaggcaactgggaggagggagttggctgggagagatggagagaggaagtgggcttaacctaatttcaatgggctagtgggctagttgggtgtatttgtaggttgattggactgactgggctagtccttttcttttctttacctttttctcttctttttaaatatttttgtgctaaatactttctcaaatatcaataatttttttttctatttttaactatatttaaggcgttgcctttgcttaagcctttttttctcgaacggcgcaggaggtctgcggtcatttcattaagaagagtagaaataggatcgtccagcatggccggacagagaacacaacaaccatacacacccctacaaaccaaactgaaacaatagaaaaaaaagatagaaaaacctgaaactagatcagcaacaaaactctaaagaaaaagacctgctgcaaatctaactacacaaccaacagagagcacaaaaacctggggaaaacctccagaaagggactgtggagaatcatacattcctggacagggcccagacattgaagtccaaaagctttgaagctccagcccacccccactttttgcattccccccaatctgtgtaagcagggccttgcattttcaaagacgcgtgaattccggtgcttccaagtctcccaggctgtcaagatgattaacgaattcagaccctttttcctttcttttggcataagtctagacacttttctcgaccaattggggaagctagactcaatcaaagtaggagccaaatcttgtagtttcagagcctggaaaatatgcgtccagagctgtctagtgaaaacacagctaaccagaaggtgtggatggtttcctcgtcctgatcacagagagggcaggcctcaggatgagatagccctcttttagctagcctatccgctgtccaacagcgatttttgaacaccaaccaaattaagaatttgcaacggaggggggccaactcttccacattcgcttccaaggtgcaaacttgatggatccattgaagaaagcagcgtaagctgacttgctactgtaataaccagtctgggataacctccacttatatgtattaggcatatcatgatgtaggattgttccttccacttggtcccaaacctggacatattcttccagcacctgtaccgttagtttccgacgaatgtcagccacccattggcgatcatttaaagctgctgctactgttctccggttagccactctttagggataatctgattcagatggggagcgaaatcagcaatgcagtttccattcagccacctgtccttccagaataggattttctcaccattgcctacaattgaggtaactactgagttgaaaagagccttagcatttatggggatctcaatatggaaaccagcccaaggccgaggctggtcagttttttgtgcccagagccatctgatttttggcccatcccagcttctcaagactcaaaatacctaggacgccatattccagagacctctgcacattttcccaagacacatgacagttacctccttgagccttttcctatcccatccataggaagcccctccttatcttgtctactgccttgataacccattttgggaggtccacagctaacataagatatacaggtgaagctgttagcacagccttgaccatgattgaacaaccagcccggttcattaaggaaggtttccacccagggagataatttgcaaccttatccacaagcagctgcaaggactcctttggggggggggtctgtgggcagcaaggggcagtccaagataggtgcagggtaactccttaatgttacaagccagagtttccaccaataacatcctctcatcagagcaatgaatgggaacaatggagcttttggataggttagtatgcagtccagagatgtggctaaacatatcaagaatatgcttgataacaagtaaatcagtttgaaaaggccctaaagtaattttatttttagcccagccattggaaccagagggggtattcttgtagcgtggcgggacagaaacctttccactggagtttctgtcatcaaggagttttcggtgtcagttcagtttcagttgctgtcaggtcaactctggtggttcacaggtgtttatgggcctcatcaagataaccttaaacttgcctttcttcaggagctcggtgtggtcaggaatgaatgtgaagggccatggatcattgctggggattttaacatgatttatagagcagaagataagaataattccaatatcaatcgagctttgatgggagatttcagaagctggatcaattctctggagttaaaggaattaccgctttgtgggaggagattcacctggtcaaatcagagagaagatcctacccttgtcaagctggatcatgtcttctgcactaacagctgggaagaattttttccggattgtatgctctttagtaatgccactgtggcctctgatcactgtcccttgactctcaaactcaagatggatattagggggaagcgcaaatttcattttgaaagtttttggcttaagctccctgggttccttgaggaggttgctgcctcctggaatcagccagctcactgtttctgtcctcttgagaaagtgtccatgaagctgaggagattgtccaagagactgcagtcttgggggcacaaaacggtgggtaatgttgggactcaattgggtttggctcgcgaggtgttgcacagactggagattgcccaggatgttaggaccctggctgtggaagaggtttggttgctgcgaaagctgaaacaacattgtctcgtcctaacctctttacagaggacaattgcccgattaaggtctcggatacaatatttgaaggaaggggatgcaaatacaagttttttccatatgcaggcttgctttagaaaaaagagaaactttatttctcatttggaggatgagggcaggactgtgactaatcatgaccagatgcaggagctgttggataatttcttttcagatcttttggggactgaaatccagagacctttcactcttaatttgttaaattgccacagggatccagttgacctaagcgatttagaatctcctttctccgaaagggaggttcaggatactattgcaagccttcccaatgataaagcacctggtcctgatggtttcactgggaggttttacaaatctgcttggcacatcattaagacagatattatggctgcgctggactatcttcgttttggaaatgctcacagtttggggctgctgaattctgcatatattgtgcttatcccaaaaaaacggaggccttgtcagccagggattttcggcctattagcctaattcacagcttcgctaaattggttaccaagttgcttgctaataggcttggcccccaccttcagaagttagtggctgctaaccaaagtgcttttgtgaaaggaagatcgattcatgataattacatgatggtgcaacacgctattaaatctcttcacaaaaaagagtcaagtttatttttaaaattggacatctccaaggcttttgactccgtttcttgggcttttctcattgaggtgctttctcaccttggatttggaaatatttggcgaaatttgatttcgaatctgttggcttcatcatccactcaggtgctgctgaatggatctcctggtattcctattaggcatcggagagggcttcgccaaggtgatcccctttccccaatgctatttgtgctaataatggacgtccttagtagtatgtttctgctagctgaagatagggggctgctccataaccttctggaagggaatgtccgaaacagaatttctatttatgctgacgatgtggttctgtttgttaaacctatagtggaagatctgaattgtgttaaggtaatattgaactgctttggttcagcgtctggactggtgtgtaatatgaacaagagctgcgccatcccaattaaatgtagcgaccaggctgtgcagcagggttgcaaccttcttcgttgcagctcggcgtccttcccctgtaattatttgggtcttccaatatcagatagaaagctcagaaaggcagatcttttggactgggttgagaagatagcagatagactccccaattggaaggctcggctacttaatcttgctggcaggacgacgttggtgcgttttgttctctctgccatccctatttatctcctcattgccatgagtattcccaagtgggtgatcaaatcgattgataagattcgcagagggttcttatggagaggcagaaaggacgtgaatggaggtaattgtttagtctcttgggatgtcgttacaaggccgcttctatttggtgggcttggggtcccaaatttgtattatcagagctgggctctgcaagctaaatggttgtggctggagaaaacagattcaaacaggccctggcatgggcttatgctgcctgtgccgttgcaggtcaggaagttctttcatgcttcggttattactgcggtgggcaacggaaacaacactttattttggactgatagatggataaatggcggctgcatcaatgattttgctcctgatgtcgtttccaaggttgataaaattattgtctccactagaacagtggcccaggctcttggaggacagcaatggatcagtgacatcttgacacctctttcctggatggggatccaacaatttttgctgatttgggatgctgttagcactattgtgttaactcaggaggcggatattcacacctggctgcatacttcctctggtcagttttcttctaggtcttgttacagggctttatttatgggagctattacgtttgaaccttggaagaggctttggaaatcttgggctccccctaagtgcaagtttttcttatggctggccattcggaacaaatgttggacttcagatagattggagaagagaggtctggaccacccagtgtcttgcctactctgtgatcaagagcaggaaaccatacaacatattttgtgtacatatgtctttgcaagacagttcaggcattccattctgtttggattgaatgttggtaatctctctccatctggagatgaggtctcctttgctgattggtggcgaaaaacaagtaagaagattcataaaagcaagagaaagggcatgaacaacatcattatcttaggggcctggtgtttatggatccaccgcaacaaagctgttttgatggggagaccccttcgctaagctctatcagatgcgtcttccttgatgagattgggtgttggattacggctggtgccaagcatcttcagagctttggcttagagcttgcacgtaaccttcacagggtctagggagtggtgtgtgttttgtgttttttcgttttttgagtaagcctgcttagggctttgtaccttggtccattttggaccttttttcttctctaattaaaatgatgcgcagttctcctgcgctttcaaaaaaaaggccctaaaaaatgactgcaccatctgcataaaaggaaatccgatgcttggcatgatgtggacagcaaggggctgaagcagatggttatttgtagcataattaaccaaagaattcagagtatccatgaccaaggtgaagaacatgaggctgtgtccagcaaggtccggtaaaggatccgataccttaaatgtagcggacgtcagcctcctttttccctccagcaaggcacgctaaatgctccggtaatatagcggacaacgtcagcgcccgccaaatgtggaggctctctcagtgctcgctatcacgtctctgccttcgctcccgcgcccactcggaaagttcccctcgcactcgtcgccaccgctctgagcaatgaagcaggttcgtgtttgttcggaggctttcacttctgcttctggtagagatttgaggcctgtagttaagttggcacctacgaaatcaaatgagaagacatcttgcttcgccatggcctgctcagccgctacatccagaggtgaaatctcttgttgaggtactcccgcacagcagccgtctcatcttaacggtcagttcttggtggctaggagaagctcgtgaatcttgagagcatgcagtacttgcaatggtatgtggtgcacaccagtaagggagattcttgaacgaggagacgttctgaatcatgagggcatgggtttcttgtcgttgatatcgttagcgcacatatggtgtttgacggaatgccataagctatgccatgcattgttgctattttttttcagcccatgtgacttaccggcaaagccttcgcttgtccttgtcggtccctccgtcctaaggacttcgcttggttggagtagacttcgctttcccccgtcatgatttatcctgttcacgttataaatgaaccgagcgaggggggcaagtgttggggcgagggctgaatgcccccctcgctcggttcatttctaacgtgaacatgataaatcatgacggagggaaaacgaagtccactccaaccaagcgaaggccttagacggagggaccgccaagacaatcgaaggctttgccggttcccggttcggctaggaaaggcgaaggccttgtcgattcccaaagacccggcgccctaagacgaagactactgtcactacccgcgcgtgttaataaagcaggcccgtgcagaactgccctgggtcgcctgaccccacttgtaagccacaacgcaggtaggataaatggtgtgcccatccgtgttgtacttaaccacactgtaatgacctgtaataactcttgaggggggaatattccaggaataacgtaggtaatcaggggcataactgtatttaccaaggtgagactgtcccttggttacctataaatacccctgcattgtaccctgatgggacacgctgaaaaaacactgttgctctaatccaccgtgttgttaagcatcaaaacattcctgttctcccactgtttggactcgctcgaccacgtgttagtgagttccaacaaaggccttgatgatgataaattggcagcccaggctccccattcacaagaatgcgggtggaagaggtggacagcagcagactaatgagatcacaccaacgctgttcaaaatccacatacctcaacctccataaggaaaggccaagaaatagagtcaaaagctttagatatatctaatttgagaagcacatgtgcttcattcttcttatgcaaggcttttcaacatttgctgcacaaagagaaaattatcatgaatattccttcccctgacaaaagcgctctgagtcgtggaaacaagagaggacagcactggcgccagtctgtttgctaaagtttttctcaccaatttggcaaaactatgtattaaacttatgggcctgtaatccttcacctggttagcatcgactttcttgggcagaagggagatgaaggccgtattgagcaatctgaatatgaagatattaccccttgaaatggcagcaaaagcttcaatcacatcatatttaatggtactccaacattctttatagaatcgtccagtgaagccatcaggccctggggctttatcagagggtaagtccttaatagttgcccagatttcttcctcagtaaaaggagcatccagactagagagatcatgttgatgtatatcaatttcagaaaggtctaaagtggaagtccgatcttcggcagttcctaagaccctttcataatagtcaaaaactgcttcctgtttttcctcttgggtaacagccagggaagtttcagtttggagctttgcaatgaaattcttctttctaaagcgggcctgctggtggaaaaaggaagtgttagcaatccccctcccgaaggtaaagaattctagagcacatccgaacaatggtgcgctccagggaggcaagatcaaggcagtgcaactttagcttctttgtcaaccaatcctcactattggagagtttccaactccccttgcaatttctagtcgatgcaatatttcctttgccatttgcaattggagtttgatgtttcccaccttttgcccccaatgttgtaggcctttaccgaggcgctgcaacttaaggaaaaggcgctcaaccgcgcaggtagactgcacgggagcgcaccaattctgttgaacagcctcatgaaaccctggtatcttgctccagaaattatcataatggaatcgccgcttacctttggtttgtacttttaatccctgccttatgccttatcgcttaaaaggtaaaaagggggacaatcgccttacctcgccttgccgccttaacaactatgcagtgatctgaaatctgcagttcatattagatctatgtgcaaggttcctatgttgaacctttggttctcatagtttgataagtttgaatgtcgttttgtgcttttattattgcctatcatgtagttgaagtatatgcaatttgtttttgctcgtaggtgctttattaatgcacatttgctgccactggtcgtgtttatgtagtttaacaatatggtagtattgttttttgtagggat

SEQ ID NO: 595 - DNA, 3616 bp, Zea mays
  Intron number 2 from transcript GRMZM2G060922_T01 (locus G RMZM2G060922) derived from phytozome v7.0 (chr-ID 8; pos 1 07289422 to 107293037 reverse strand)
aacccagccaatgtcagtttcttcctttcttttttctcttttccttcggttgtctgttccagctagttcattacttgtatatgcttttcactccaattggtagtttcctgtcaccatctatacatactgcgagcaaactttaacaccctaactaggaaataaccgtgccttttggtccgtcacagaactttagcttctttattgtctatctgacaaatagttgtaaatatcttatggctttcaggaatcttacatatgtggatagcctgatctattccattctttagtgagaaagatgaacttatatcataatttagtgttttgcctaggccaatacatgcacggatgttgtattttgagagaccacacatggctagacagtgctataacactgttctaggagcatgctgaaaaatttaaaatttatgataaatgtaaatagggaggaaatgactccgtgtaatctactcatttagtctgtgcattatgtttctggcactcataagtccctctaaaaaagtgaagtgcatctgcttcaagtcaaatccagaacaaataactgatgttaaaagtttaaatattttgtatgcgagtaatgatgaaaccaactacatggagaaaaaaataaaaaagaaagaattagtttactgctcaaaatactaatattttattattggctttgcaaagcaattagatttatgcttgtcgtaaccatcatctttgttagaagaacaacaacaataaaataaaagtcgaattgtttatttcttaatttgatgaatatagtacctagtaacatcaatctctttcaaaataatgcctatggctacaattccctcttattttatatgcactagcaaataaaaaaactcggccagggagggaaagaccgccctcccggtattaaattaagaagataccgaaacatggtcccgaccgagaaaatccccgaaccttggcctcccatcattagcgggttgtcaccacccactctgcaacagcgcagccagagggtggcgcgcaggacgtaacccaggagcgggcggggcacaacgaggagattttttaaccaagccagaaattcgtacccgagggggatcgaacctgggacctgaaagtgctactcggaagccttaatcattacgctagaggctctttcgcactagcaaataataatccgggcacaacattattacatgtgctattcaaaatgtgtctagtgcatctgatattatccattaaaccattttctttgctacatggaaataaattatttattttgctagcaagtgttatatcacttgagtcatgcaaaattagttgtctcttgtctgaatgaaagggtttcagttctctgggtacttgtttaaataaacagttactgtttatgcatgattacctatttctgaaacaattgtatgaaacggacggcatgttctgatgagaataaaaagctgcataaaattatttgaccaccaaatcatcatacttgatcttttgaagcatcttcttgtctctctgtctgaaggcctgcatgagaaattttgcaagtcaagagcacaacattgtgattcatccttttttaaaaaaaatacagcttttaactaatagagtcagcatggtgataggaagtgggaaaaaaaaatattgttcagaagaactctagagatatatcagatatgataggtgtttgtgttgtggactccttcgtggggcgccagtacaccagacacgggaatgccaatacaccagacgcaggaagcagtaggcgtccagagtcagatcgtccccagggttagttatgcttatccctggattgttgcgccagtctgttagcaggtgggcttatcccttaagtttagcagcttatcccttaagttcagcagatactttgttaggccacctgagctataaaggatgccttagtttgtactagggaatttatctaagaagttgctgctggctggcacagctcttgggtcatcctggcgagtccttcatctcgccctggtgaccgcaaccgctgtgcccatcgccggagtccctacatcctgcgttcttcttcccaatctaacctgctagtgcattcatcgtggtgcactccccctagacctagccaaatccacataagccccatcagttctctgactatagagaaggcacacatatgcagcaatgcagcatatagccactttatctccatatctaaatctgaacacatatttgcattcttcactggtggtttgttctttggccaaaaagtataattggaacactcatataaattaaagttgttggtcactggaatagattgaaatggaaaagttaggaatttaacaaattgtactaccatattgtaatgatttttatttttttatttctttctagaatattgtatatagccttcaaactgaattctacttcctctgttacaaattatagctcacattggctttgtccaaagtcaatcctttttttatagaaaaatgcatcaacatttataactttaaaatagtttcagtatattcttcatgaaatatattttgttattgtattatttgaacttataaatgttaacatatttttataaaaacttagccaaagttagagaagtttgacttagtacaaagccaaaagtgaagtataatttggaaccaagggagtagatgatatctcatatctggaaccatgcttgaagcatgacattgagcacatactcacctgaaaagggcctgagtttctgttttgccgaagtcgcaaaccttgggaaatctcgcatacttgccaatgattgtcctatgtgtttgaagttaactaaacaaagttaattaccgaatagaaggataaatacggagtaaagttggcagaatacaatgcagaatatcttaaattgtttgtgctgattagaaacagttcaacttcgtttagaatatctcaaattgtttgtgctgattagaaatagttctacttcgtttagctgagtaactaccacaccatgtttgccaaaacatattgcagcaatgtctgagtgcaggtattgttctgtaaaagtaggcaatatgctcagaaattaacctccggcacggcaatcccatgatggaaacatctaagagcgtgtttgaataaactcaatcactcccgattcatatatattggagcggaaatgaactaattttacacctctttcaatacatatggattgaagggtattgctttccaaacaagccctaaggagcagtgtataggatgacatctgagaagttgacccgaagatcaacagaggcaaggacaggaaccatcccgctcctcacaagagtgatgagacatggtgatggcctcgtctattggatcccaagagtggttcctatccccatatgccattgctaccctcagtggaatgctgccctaggaatagtggtgtagatcattgctgaattttgaatattttggtaattatgtggtaagagttggttttagattactgtttttatagcatttaaccatttctctgttgctattttcagtttagcgctctttactaagaataaagattctacttttctgttttccttaacggccttgatgaaatattatctacaggcatttggctgggcat

SEQ ID NO: 596 - DNA, 8602 bp, Zea mays
  Intron number 1 from transcript GRMZM2G032423_T03 (locus G RMZM2G032423) derived from phytozome v7.0 (chr-ID 1; pos 2 4932050 to 24940651)
ccaagtaagtcacatttctctctttcttggacaaggaggagggcggtaaaatgtcttgtttaaccagaggagtgtttctcaggatgcgtatgagtgataggttaaggggtgaattctgtgtcttggtcttgtgagtaagctattgcttaaaaatgatcaactcaatatcaggatagttagtgacctttagttcaattgaataattctgtataattcctaagttagcactcgttcatgcttcaatcaattcaatatcaaacttcatgtcactttcttattattctgagttgttattcctattacataaatttgccccattcaggttcagatgtactttcctgttctatcacattcaactcagctcggccttgagatatttgtgaaatgaaaaaccagacattggcatgcaactgaagtgaaaaaaatgttaaccattgtatcagaatctgtttgcttggaattctttctttcatggtttgtgagctaagctggcggacatgctgttggtcctgcttcctagatctgattgtcattatcttataaatatgttctatgattgtatgccttctgttgttttggttgtcttccgggctgagtcctgtgtggtcatcacaagggatgggtttcgttgtctaaattttgaagtatctggtgatagaattaatagactaaagaacttatgaaataaagaatgtgttgatctgttctccgacgggatgaatacataaacagagaggtagtcataccttcttgcccttgattaagggcaagattagccaattggttaacgtcctgggtagaaggtgctcctgcatcttatcgtcctagctcctggtcaccaccactctgcacattaggacttcgtggaggagtgttagggatctgtgccgtgggtacaccggaattcactagtgccatagaaatgaattcttagttctctaaaaaatggttaagaattgtagaaaaatattttatgagacaaattttttttctggagatatttatggactatttagtttttgctacgcaattttggaatattttatgcatttttgtgttaattatgaagccaaagtgaattaattttcattaaattgcatagaaatttagaaataatgtggtaatttaatgtttgaccaaactttaatattttttgtgccacatttagaacataaccttaattttctatttcatccaacgtcgttttagaatttgagtcagaaagttggtattagttgcatgattgttatttaaccaacatcgaatatttaatacatgcaagtatttttttctcgaaaaacgcaggagagctgcgcatcattgtattaataagaaggggaaattaaggtccaagaggaccagtacaaaaaaccacactatggtggccagcaacaagtataaataaaactatccataggactaggatacaaaaagacgaccaaggaaaaattaggtcgggcctgctgcgcctagagcagcagcaagtccaaggcttccgaggtgtttggcaccagccagcacccataaggatagctcgtcgatgaagcttctatgcaccttgccaatggttggtaaatctccatcgaaaataactctgtttctatgcaaccaaaggcaccatgctcccaaaataatggcactgttgactccctttctcttgcttctgtgcacctgaatggtcactagtccccaccaatcagcaaaattagtatcttctggtcctggagttaagtggcccataccaaagggggagaggatgctatgccaaaactgcctggcgaagacacaaccagtcaacagatgctgaactgtttcttgctcttgttcacagaaagggcatgcttccggatggggaagacctcttttttgcagcctgtcagctgtccaacacttattctgcatggctaaccataaaaaggtcttgcacttaggaggagcccacgatttccaaagtcttttccaaggttcgaaggtgatggagcccaaaaacagaaccttgtagcaggacctagaagagaaaaggcccgaagactcgaatctccacacatggtgatcctcctgagaagtgagcacgatctcacccagggtgtcccaaagcgtaagatattgctgtatccctacaagggagagggttggcttgatgtccctgacccacgacatgccctctaaggcttgatgcactgtcctggtagaggcaacctttttatccacctttgagatcacttcaggtgccagctcagcgatagagcacccatttatccatctgtccctccaaaaaagggtgttattgccatttcccacattagtgtacatcgaactggccactagtttccttacttgtgactgaacagggagatccaatccactccaaggcctattcgggtcagtcttggagagccaaagccatttagcttgcaacgcccaactcttatatatcagatttgggataccaagtccaccaaggttcagcggtctggtgactttatcccacgccaccaggcaatgcccacctttcacatcttttctacccttccacaagaaacctcgccgaattttgtcaatagcactgataacccacttgggaacgttcatggcgatgaaaagatatacggggattgcagagagcacgaacctgaccaaggctgccctgccagcaaggtttagcagtggagccttccaaccgggcagccggttagctatcttgtcaacccactgcaaaaggtcccttttccctaacttcttatcagaaataggcagccccaaatagttgcatggaaaaaaagccgagttgcactgcaaaatgttacagctgtcctgaaccgtctgatcatcacaactgagagggatagcacaactttttcgcaaattcacaactaagcccgaggcctctccaaagcaatccaggatcattttgacacaagtaagatcatcaactgcaggcttgacaaaaagaaccacatcatctgcgtaaatcgagagcctagatttcacatttctgatagccaggtcctgcagcaatcctcttttcctcagcatgcttgacattgttattaaaacgtcgcttaaacgtcgtttaagcgtcgtttaaacgacaaaacgtgcttagagtttagaacgtccggtcgttttagcaaaaacgcgtagaacgtccgtttatcacgtttaaacgtcgcttaaacgtcgttttctcgttttcggacgttctaagcacgttcaggacgttctacgtgtattgggtctttcacaggccaaaaaatacacagggctaccaggcgtccagtgccgacagcctccctcctctcctctcctctcctctgccccctcctccctctccatcctccaacagttcagcgccaccctccctagttttagactttcaatcatcaagagttccaggttcagttttccagttcagacattgacgcactccctagtttcagactttcagtcatcaagagtttatggttactgatcatatatacaagttgtaacttgtgtggttgaacttgatttgtttcattttgttttgtgaactcaagtacttaatttatgtatgaacacattctataattgaaattttatgtattgtctgaaaagacgtttcaacgttcgtttaaacgtttaaatgttaaaaaggtggttcataacgttttaacgttttaccgttttaataaccatgatgcttgaataagctactaagcacatccatcacgattatgaaaagcataggagataaggggtcgccttggcgcagccccctccgatgacgaatataatcccccggagctccgttcaatagcacttgtgtggaagcagtggataacaaattgaacacgagaccacaccacctaggcccgaagcccagatgggataatacttctaggagaaaggcccaggacactgaatcgaaagcttttgtaatatctagctttagaaacagaccagcgatcttcttcctgtgaaaggccttgatagaatgttgaaccaacatgtagttatcatgaatggaacgtcccttaacaaaggcactttgatttgtagccaccaaattttgaaggtgcggtgctaagcgattagccaagactttggatatcaacttggcgaagctgtgaataagactaattggcctgtagtccccggctgtcttggcatcaactttcttagggataagtgttaggtatgcagaattcatcatccacaatttgcgtgtgttaccttggtgcagggtgataactgccgccatcagatcagccttaattatgtgccaacaagttttataaaatcttcccgtataaccgtctggccccggggctttgtccgagggaaggctagcaatagtggcccggacctcctcctctgtaatgggaaggtccaaggccccaaggtcaacatcagcactgtggcaaacctccaaatctagagtgaactctcgctgcttcgctacccccaacagattggagaaaaaatcaaacaagacctcctgcttttcctcttgcgaggtggcgatctggtccccatgcactaattcagagataaagtttcgctttttccgatagcaagcctgtagatgaaaaaaggaagtgttggcatctccctctttcagatatttgatccgcgatctaagtctagcaattgtcctttccagagatgcaagccccaggcagtgatgcttaagccttcctttcagccatatctcgtccccacacaacagtctattgtcttgagcaatctcaaatctgtgcaaaatttccctggccaggttaagctgaaatttaacatttccgatccttttatggctccacgactgcaaagcctttgcaagccttttcaactttagagctaatctttccaagggacaagaaatcataactggctgctcccaagaggtagccaccgtctccaaaaaatctggaaacttggtccaaaaactctcaaagtggaatctccgtttccctttgacattctcattaagatgcagggctaagggacaatggtcagagagttctgaagagttgctatggagaatacaatccggatggatctcctcccaactggctgaacagaaaacatggtcgagtttaacaagtgtagggacatgcaagtattatgttttagaattttaggttacattatggtctcaaatattttcggttttattttgtaaaggtgcaaacattgccttgattcttggccaactgtggcaaatagaaccgctaaatagtagtaactaccatgtttggcgagagatttaaaaatggtgttcaatgtaagtgaaatagactatgcacttcagtatgagaaacccactgagcccacagagggcacactgacaccacagtactatcataagatgatgcagtacaaccaatgatttcaaatcgcctggtcgaaccctaggaccgactaggcgactagtcgcgattaggcgacgaccaggtcgattagtcgacccctagtcggtccctggtcatcctagaccttttagactagtagttatatttatataggtatatatacataaatatacctatatacattatataaattagaacaaacaactaggataaacaaaataacagattgctttattgtgatttgttacttacctgaacctgactacctagcaatggcttaggagtagagcagtaagccagcaaccatccactagtttgacactgggcactggcagaaataaagagacggggggggggaaccttgaggcaacgagctcatctcatcaatggtgctgatctgctggagagtggagacgccggtagtctgtcacagtcgctgctgttgctctgtcacaggtcacagccgccgccggtactggtcttctggactgcagcaggacagcagccgagcaggcagaggcgccggtgtagcaggccagcagggggcgaaggtgagcagccgccggtgttctgtggtcgctggagctggatgtccgatctggggcgcaggggcagccgccggcgaccaggtctgaaggctggaggttgggcaagagaggaggtgtacgtgtacgctggttttggagggctgggcatgggcagaggagaggctagaccaaatgatactgtagatgggctgaaaatggcccaataccaaaaccctagccggacgaccaggaaacactaagcagacgacatgaagataaagatagtaagatctgaccgcggggcgagtactacagacgccatacattgtatggcaactaccaggaccttttgcaaggttcatgcaaaaaacggaatagttacctagttctcaaaccagttgaaccccaacagaatagggtggtagaaagaagagaaacaaaacaatgatggacatggtaagaagtatgttgagttactctagtttaccattgagtctgtggatggagtctttaaaaaccaccatacatatactcaacaaagttcctagcaaatcagtgcctaaaaccccatatgagttgtggactggtagaaaacctacaccaaactatttacacataagaggctgtccagcagaaggaagaatattgaatctcgtatagggaaaattagttgaaagaacaactagctgccattttattggctaccctgagaagtcgaaggattttagattctactgtccggatagacaaaacaagtttgtagaaacaagacatgtagtatttctggagaatgagatgatgttgcagggctgaacgcgcgacctaagctttcaccccaatggacataaccagccggacaagcaaatgaatgcgtatctaatggatccgacaccctatttaataggggcatacacgggaaaactacatgcaattaattgctccttgatatcacaaatgatgtcctaaacgaccttaattctgagtatggagggagtatgctttagctatcggaagcattatgtatgctcaaatttgcactcgccctaacttcgcatttactactggggtgcttggcagatattagataaatccaggcacagccacagaacacaagaaagctctaagatatttggaaggcacaaatgatatatatatatatatatatatatatatatatatatatatatatatatatatatatatatatatatatacatatatattggctattcagatgctgaccgggcaggttgtgtagatacattgaagtctacttcaggttatgtattcacacttgataggggaggtgttttttttggaagagctgcaaacaggcagtggttgcatcatcgacaatgcacattgagtttgtagcaatgcatgaggcaagcacgacgatggaggcaaagaaatttgtacccggattaagagtggttgatagcatagaaaaaaccacttagaatttgccgcgataatgaggcggcagtgtcttacttctacaacaagttaagtggggctgccaagttcattgacattaattgttatgatgttaagaagaagatccaggatcaaaccattaaagttgatcatatcagaacccaacagatgccaatggatccactcacaaaaggccttccacccaacgtgtttagacaacacgtagctagcattggacgcattggattaagggagagcctatgattctggatcaaggggataaagaagcaaccatagaaaagatattccattctgaggcaagtgagcatgttatagtcaatggattcgatgacacttaatcggtcaccgttacctattagtcttgatgtgtaaggttgttaaggagtggaacctagaaagttaaagaacaagaaaattagagaacaaagaggaaaatgttagcgtgttctctatgtttgttaacagaaaccgaacaaaaaagggggaatcctaacgaactgcgccctgatcgggggcgcaatcctatatggttggttgtggcccccggtcacagagccctatataaactagggcagtggcctacatggaaggccatcgccttctgccttgcataaaccctagccgccacattacctcggatgcctgatcgccctagcccctgccccagtttatatagcgccatgtgaccaggggctgcaaccaatcggataggattgcgcgcccgatcagggcgcaaggcttcccctttttcttcagtttctgttaacgaacatagagaacacctaacatctggaactcttgtaattttgttggttatcagtaatgaaattcagttcctctgtatcagaaaaaaattgtgtgaattctgtagttctgttctcgaacaatgtaagagagctgcctacctcgtatggtgaaaggaagagaatagttgtgcagactgcagagcccctcagggataagaaaaggagagggacacaaattgtgcgttttatttgccttagttaatcacatagatgctgccacttttttagcaatgccattttgttcataagagtgtttttatagaatgccacataacaagcttcactaaaatgttgtgtttgcatttattcccaatatctgtagtctattattgactcaaccagggtcacctctgcacctgctgcttcaaaatttcaaggcaatttttgaggtttttatttttgataaaaaactgacatttatatgaaataattctttgcaccagtcctcattcagaaa

SEQ ID NO: 597 - DNA, 10510 bp, Zea mays
  Intron number 16 from transcript GRMZM2G052142_T01 (locus GRMZM2G052142) derived from phytozome v7.0 (chr-ID 2; pos 33780149 to 33790658 reverse strand)
agtggctaagtaagccattaacttttgtgtatgacatacaaaagaacagatcatgacatgaccgttgtttgagattgatgactgctgaaagaacttggattactgaatttgatatttctgcttgtttcacatggccttctacctaaggggcccacttgtactggcggagttatgttggggccatgccccccacacacagcgattcttttgaagcacactgttgggaaccgggttatggaggtagtacgagtggtgggtggaaggtcgcgcgctaggacctcggcgcttgggcgccgtcgttctagggttagggctgctgggtagaagaggtgtggtactgttcacgcgatgaacaatacacgcggtgaacagtagacacgggtgagcagtaccacggatgaacagtgcgcgggtgaacaatagatgggttgggggaagcacgggcaagatacttgtctgcttacctttttcattaaattgaagggatacatatatatagatgaggtaacaaccttcaactaaccaaccttatctaaaatctaaacaaacccatgtttaaccatctaaactctatctagactaacaaattgatgcttatccatctaaacaaactaactgatttaactctatcagactaacaaactgatgcttatccatctaaacaaactaactgattttattagggttgctgggctgccgatcataacatctcccccggcctcgaaaaatagctcgtcctcgagctagaaggtaggattacgggggtgggggatcttccgcagcagctaccccgtcggcggcggcggacacctcgaggtagaaggggtgttggcagtgatggcctcgcacaaacagcttgtcgtggttgaccctggcagcgtcgctccaccatctctgctggtgttaggcattggaacgtcagtgctaccggggtggaggcagcagccgctggcctggccggcgatgccggtgtagaggatggcgtagccagtagacgcgtagagggcggaggcgcgcgaccgtccgagccttgctggttgcgttcatatgcccgggcgagggccatggcatgctgcaggtcgtcgggcacacaaagttcgacgtccacccggagatgccatggaagtctggcagtgaagagttgtgcttgttggtgcggtggtggcacgggctccgcgtggcaaaggagagccaggaatcgatcctgatagtcctccaccgtggagcggaaggataggcgtgccacctcgcccaacgtgttgctgcgcagaggaggcccaaaacgccgctggcacaacactttaaagcgcggccagtgcagtgtgggctcgtcgcgccgtagcgtgatggaccacagttgtgccacgctcgtgagatagtacgtagccatccagactttatccatctctggcgtcccttgattgtagaaaaagctctcacagcgggacagccaaacaacaagatcttccttgccgtcgaagatgggaaagggaaggttatggtggtgcgggttatgagggtgttgctgcgggggctatgcgctatggtggggttcggaaaagcctgggattggtgatggggagtgtgggaagggtatctgatggatgggtatggttgatgtgggcgggtgaatagtgctgcggatgaacattacctcggatgaatggtgcgcggtgtgaacagtagacgcgggtgaatagtgctgcggatgaacattacctcggatgaatggtgcgcggtgtgaacagtagatgggttgggggaaccggggaagcacgaacaagatacttgtctgcttacgtttttcattaattgaagagatatatatatatatatatatatatatatatatatatatatatatatatatatatatatatatatatatagagagagagagagagagagagagagagagagagagagagagatgaggtagcagccttcaactaaccaaccttatctaagatctaaacaaaccaatgtttatccatctaaacttttttttctcgaacacgcaggagagctgcgtatcattatattaaaagaagaaagaaacaaggtctaaaatagaccggggtacaactgacgccttacggcggcctaaacgaaactaacatagactgactcttctataaaactctagcccacatgtgagagggaagcaacaagggaggtcagccccttggccccgacagtctcccaaagacggcgctcatccccagtttggattaggaaattagcaatattaggggaaaggccatcaaagatgcatctgttccggtgattccataaaatccaagcacccagaataatgatggagtttaggacatctctgaaggacccctgaatagcttcatttgcttgatgccaccactccataaaattaatattcgttggttggggagccaaaccctgcagcccgaattgcctaagaaggaggaaccaacattctcttgaaaagacgcaattcacaagcagatggtcaattgtctccctctcctgatcacacaaaggacatctttccggatgatccaaccctcgcttctcaagtctatcggtcgtccaacatttcttgtgagccaccaaccacaaaaagaatcgacatttgggcggagcccaagttttccaaatctgctcgaatggttcgaactccacagaaccaaggaagagcccctcataagcagctttagccgaatatttgccattagcagccaaccgaaaaatatgcttgtcctccttttcagggtaaagatcaacttgggcaaccaaatcccaaaggcgcagaaagtctgcaagtgcaccaacagataaactcccaggaatatcattaatccagaaattatcttcgatcgcctcctgaactgtccttttgttaatcaacttcttaggaatggtctcaaaaagtcggggagcgatatccacaatccgctgcccacacaaccatcgatcactccagaaaagggtagaggctcgacttcctatctcagaatacaaggccacttgtagaaactctcgaatttttctcgggatatgaagaggcagggatgatcagggccgacctggctcagttttttgcagccaagcccaacgcattttaagagcccaactcagttcagtgatgctgaaaatacccaacccaccaagctcgcgaggtctgcacactctgccccagaccactgcacaatgtccacccatggcatttttacgaccacgccaaaggaaccctcttctaattttatcaatgtccttcaaagtagcagaaggcaggtccacagccatagcactgtaaatcagcatccctgtcaaaacagattgcaccagtacacttcttcctgctttagtcaacaaatcagctttccacccaggcagttgattagctattttatccacaatgggctgcacctgctcccttcttaatttatataatgaaaggggcagcccaaggtacttgcaaggaaagctagatatctcacaaggccaaaactgctgaatcatctctaaattgtcttcatgacatctgatggggtagacactagatttctgattattattatataaaccagaagcctcaccaaaaagttgaaggatgtccgaaaccataatcatgtcctccgccacaggattgataaaaagaaccacatcatcagcataaagagaaacccggtgttgaagctgcctagtagaaagaggttgtaacaaaccttcctcatctactttagagaaaagttgaccaagcacatccatgacaagcacaaacaacatcggagaaagaggatccccctgtcgcagccctcttttatgtgaaattatgcttcccgggtgaccattaactaacacccgagtagaggaagtgaggagcagccctaaaatgatatctctccatatctgcccaaaacctagattttgcataacctcaataaggaagggccaggagaccgaatcaaaagctttagtaatatccagcttgatcatcagacgaggatgtctttgttggtgaagaaatttagccgtttgttgaaccaacatgaaattatcctggataaaacgacccttaatgaaggcattttggtttggagagaccaaatcattgagtcttgaagccaagcgagaagccaatatcttggtgattagttttgcaaagctgtgaacaaggctgataggtctaaaatctttgacctgatcagcactatctttctttgggattagagtgataaaagcagagttcagcttatggaaattatcaatttttttgttccaaaccgcaatcaccgcagccataagttcatctttaataatggaccagcaagtcttataaaatctaccagtgaacccgtccggtccaggagatttatcagagggcagagaatttatagcattgcacacttcttgctcaataatggggctgtttaactctagcaagtttggaaatggagtgccaacagtttcagagcctcaaggttaatggatatatttttgtctttactagccccaatcagatcaaggtaaaactgatccactgttgcagctttgtcattatgagcagtaaggacttgatttcccacaataagtttggatataatattcttctttctgtaacgtgcaaaggaatggaacagcttagaatttgcatctccttccttgagccaagaaattcttgatctaaggcgagcaatggtacgcttggttgaggccaaagccagagcgtgtttcttcaatttatttaacagccacctctcaaacacagacaaaatacgaccatcctgcgcaatctcaagttgatggatcaagtctagcaagatgcagctgagtctcaatgtgtcccagcttcttgctgctccatctttgaagggctttagctatccctttgagttttaaatcaaaagtggaaaatgggcagtgaccaacaggaaccgaactccaggcattgtgcaccacttcgtgaaacccttcaatctttgtccagaaggattcaaaatgaaagcgccttttaacgcctttgctatctttgagacccaataataaaggacagtgatcagaatcttcagaagccacactttgttttttttttcgtgaacgcgcaggagagttgcgcatcattaaattaagagaagaaaacagttcaaaatggaccaaagtacaatgccacaataggccaaacacaagaccaccaattcctgctacgcacagaactgcatcctccctctgcgcaagaaaacagcagcacgcaaaaggacaacagcaaaagtgctagcaggccacacacccacacaactgctcttcactaagcccccaatagaacccttgatctgaaaattgcagcaccaggacccaaagcctcaagatgtctagcaccgacaagcctcaagcactcaaactcatccagaaaaactgattttattccatgaatggaaggtctgacgccatcaaaaaccaccttattacgatgaagccataaacaccaagcccccaagatgatgatactgttaaagcctcttcttttggatttgtgcacttgcttacacaccttctcccaccaatcagcaaaagtggactcattagaggcaggggaaagattagccagtcccaatgaagagagaatgtagtaccaaaattgccgcgcaaaaatgcaagtgcaaaggaggtgttggatattctccgaatcttgatcacataaaggacaaacctcaggataatccaaccctcttttctgcagtctatcagttgtccaacatttatttcttattgccaaccaaagaaaaaatttgcatttgggtggagcccaagtcttccataaccccttccatggttcgaaagaaatcgaacccatgaagaaggccctataacacgacttcgaagagaactgtccagaggaagaatgaatccacacatgtcgatcagcctcctgattgagcaccactccccttaaaccatcccaaaggttaagatattgctgcagcccaggcaaattaagaggggtctcaatgtcactgacccactgccagttttgaagagcatgggccaccgttctagaagaaatagctcgtttcccaacattaacagtgcgccaggaaacagttcctcccaatcaatagagcacaacactctatcaagcttgacaagagtaggctgattctgctgattagaccaagtaaacttgcgcccatggagtggaatttctttaagagcgagatcatctaccaattttttgaatcgacccatcatatcccgattaatatgcgagttgtttttatcttcgacttgcaatgagattgaaatcctcagaaatcatccaaggaccctgacaagctgctctaatttgtctcagctcttgcagaaattcaatcttggcttcattagattgaggtccatacacacaagtaagccaccagtggtgtccctccactgaacaaaactgcacagaaatactatgaatgtctgtcctggtagctccagttatccccaaatgtcgtctccaagcaataaggattccacccctcgaaccaatagaaaggtagggccaacgagccggtaaaatcagatcccaacatagagaggatagtacacggagaaggttgtgccatcttagtttcttgaagacagattatatccgcaccataacaattgaggagctcacagacagaattctgtcgagccagagaattaagacctctaacattccatacaattattttttccggatccatggaataacaatgagaggtaaatcgacaaacaagaacaacaaaaccgccagctaaaatatgcttgctgcggtaatatccccagtcccattatcatattccaaattatctgggacagaccacccaaaaagagcagcaagagcccgcacatgactacaagaaagagtattcttgaagagcttggcgtagtcgtctaaagcttgacggctgaatccttcattgtcttcaataatattaagagccaccatagcttgtttcttagacctttttccccaatcctgaattttaaattcaaccccaacccccgccacacgtcggctgcaccttggaaccgccaggggtgtagaggactgacgtctgacagattttgggattggtaagacgcgtgtgatctggtttgacaatctgctgatgaattgctctcgagcattaatctccacagaatcttgtgttgttggaaggtcctcctcagatggagcagccaactcagcatcaatgtctaaggcactagcctccgacggagccgcgtgtgctgctgccacatctgacagggaggaaggtagcgttccaaacggagttgccaacacagcgtcaacatctaagacaggatactcagatggaaccgtgtcagcatctgccacgtctgtgggggagggaggaagcacagtgacagtattgggagctccagccccctccaaagtcaggacgttcttgagcctttgacgagagtaaactttcagctgcttcgccttcaccggtgaagtaagaaccctgtcatcagtcatctctatcaacctaggggacaaggtcccccaatcagattccaatgttgtccttaaatctgaaaccgccatctccgagctaatgttccgctgttgcatgttctcatctcttggacccaaacgctcatgaactgaaagacgtcccaaatgaccatcttctccccttccccgaagcgaatgggggggtcttgaaaaaggagatccctgctgcacattaccaaaaccatcaccgctcgaagtaatagcctgaagcttaggatcggatccatccctccgtggggcagacgagaatgtgatgcggattgggtacatcaacgttctcctgccagaagacacaccatcaatggcaaagggaggctcgacaatccaaagctctcttgaagcaggcaccaaggacgtgtctaaacaccaagcagaacaacggtaaacaaccacatcctttagctccagggtgtcaggatgaacctgatgaacactagcaaagggactaagcaattgttccacagttatggtttcccaagcatggatggggataccctgaagctctatgtccaacaagataagtaacacaacacccctggagttcagaaaacgggaccatttcctgcaggtgatagtgaacgtggccgccctgagaaaaggccaattgcccacaagtatctccaccatgtcacagccaggcaaaaataggatgaagcttgactcggagtactgtcgaattatcaaggacctctcttccaactccagcctaggagcaattaactcaacaatctcttcaattgggactctctcacgatcgctgataacagtaatcaccactgccttctgaagatcatcctcggctctggtcatctgctgagtccacctcaagatgcaaggtttatcatcttcagcaggcgacgccggtcccgcaggtttcttaaccaaatcagaaaccggtttggctctacgtcgtctcttgtgaatccgctgcctttttgattggagaccgtcagcatcatgagaaatcaagcccccgccatctccctccattgatgatggtttctagtgtcgaacagcaatatctgtatcttttggaggatgttgattatctttccttctccacaccattttcttcaccttgatcactgaagatgaagagaggctcctccagaccgagatctgtgtctcaggtcgaggctgcttccttagactatctccactgatcgcacttggctccggaaggttgatcctcctccaaaccgagatcttagtctcaggtcgagaggcaacactgttgttcaccaccaccttcccagactcaatcctctaccacaccggtcttttaagcagactgcattcaaaagaacgatgtccctgttcccggcaccgaaaacacctcgtcttctgcgtacactggaaggaaaagtgatcttgagagaggcagttaaagcatctgccagccaagtcttctgggacgggccgccgttgtcgttgcggctccagcttcaatcggcgccgttttgactgtttggattccaccaactgccatccaccgactagcttctctgcgctccgagcaacctgagccatgcccgaagccgtcgacgacagaccatacacgctcctcttctggacgctggaactgcatccctcctggctgcagacaggtcgcgcaacaggagcaggtgccgtcaccttcctggcagccgcagccacttcatagaacgatttggtcggaagctttctccagggaaaggaatcggactctgccgaacgtggggaggcatcccgccaccgctcaaatcgggagcgaccgcccgaccgagaaggtgatgcctgccccgatgtcggcaggcgaagggtgtccgccgagcccggagtggacgccggcgtgggttgtggggggaaacgaagcgtcggggggagggggcgggagcaggggaggggagcgggaccgtcatccttgaatcccatctaaactctatctagactaacaaattgattatccatctaaacaaactaattgatttaactctatcagactaacaaactgatgcttatccatctaaagaaactaactgattctattagggctgctgggctgccggtcataacacacacatcgttcatttgagaaattgcatcgtccacgtcagcaagcgaccatctctctcaggctgacatagcgggagtatgtggccatgtccctctctgtctttggcctttgtgtatgcagtctgcgcccatggttgcctggccaagtccagacccactcccatcgcagcagcctccattttttttcttgaacgtgcaggagaactgcacatcattatattacgtagaaagaaagagttgtggcccagcaggaccagcagcctccatgcaccagtctccttttgctcacaggctgtgtaccatatgtagcattgaataatatttacttgtcaatcaagatcatgtttacttttctttagagaatataatctacaaattacatactactactacattctactatctgctagttttgcaattaactactccctccgtcccagaaataatgcaattgtagtatgcgttatgttttacagttttagtatattaagtttgaccaattattgatttggagccataataaataccattaggaacttggtcaaacgcgaaccgctttaactgacacagaagccatagctacatttttcccaggatgaagtagtactttgcaattttgtaggtacaaattgcgccccccccccccccccccccacacacacacacatattggttcacgctccgccactgcccagttgtctgctactctgctatattgtgcacctctggcctttgtcttttgtgagttgattggttgtttatatgtagacatgttgtctgtgctctgtgcatgcgcctgtgtgtgcactggtctggagccataccaaccttctgtgtcttgtgcatctctaaacctagccctataattaaagtgccatttttatctatttggctgatctatattactacttttggcaattgatacag

SEQ ID NO: 598 - DNA, 26304 bp, Zea mays
  Intron number 1 from transcript GRMZM5G805780_T01 (locus G RMZM5G805780) derived from phytozome v7.0 (chr-ID 6; pos 4 2405925 to 42432228 reverse strand)
cacgagctcgtttggcctttcgtcgctgttgcaaggtgggcatcgtctacgcattagtaaccttgtttcaccatgtcgcacgttctaaataactaattatatttttgtctaactaacgttagttaattagacttttcaattaaactaatttatagtagttaacttacgctttataaatacatgtcgatgtaattaatagaaactcaaatgttttgctctaatatttgtttaatataaaggcgatgactatttaattttatcgtgtttcacgcacgttgttcgcgcatgtcgcgcgagctactcacccgcttcgtcgcgcatcgttcgcatcttgcgtgttggcccgcgctctgctcgcgagttttctcacgtgccgctcgtgttactcgcatgtgtcgtcgttgctgttcgcgcgccatcagcacgatgttcatgcgtgttggtcgcgcatgcttatcgtgcatatagtcgtcgttcatttgctggttcgtgcgcgcaccgtgtgtccggttcgcacctcgtttgaatgttgtttcacgtgtgcaaattcacatgctgtccgcacgcgtcgtcgttcgcgtaaatcactatttggacgctttagtaaaatcatttcgctatatcgttcatgtgtggcgctcgtcatcgtcgtgttgttcgcatgttgttcgtgttgtttcgcatgtcgcgcgtgctgtttcgcgtgtcacgtgtcgctcacgtacttcgcgcactgtccatgcgcgtaattaaattgtgtcgcttataatcgttcgtgttagttaattaattaattacttgtttaatccgacaactattagaatagagaattaatcgaaactaagtagtagttttaatctacatttaataaaggtagattaatgtaatcatgtcgaactaaatgttatagttaatacctgtttggcgtaaacgcgataacttctcgatcgtagcttcgaccgtcgtgttcctcatccccgcgtgaccgtagaagcgctctcttatttttataatgtttgttttgataatattttatcttgtatggtgtgatgttcttttgcaagtatatgttttcttgtgtctgtttgtatttgttgcgcgtcacgaatagattgcgatctattcctgagcttcgaggaatcgacgatcaagatttggtgaaccgctggtcctgagatcaagttcttcagttctacaacgttgaagaccctgagcatctgtttggtgaaggcaagtgtcctctgacctattatgtcctatttactttataattcatcaacccgcataccatgatcaacctaaggattgactagtattctgttttcctgtccttgtttaccctttgggaattgattattatgattagttctgtgacggaacctcccaagtcattaggcccacctacagttggccttgtccaatggacctcggacaaccccgtagatgcacctgatcacttgacaagttcggtatcttacttccttacctttcccaagagcgtttcacccgtcacgcagatattacaacacatcagaggaacgaatatgcggaagcagttacaacaacttattttatattgaagtatagaaagagtattattattacagaccagaaatatataagagtgcaggagtaatattattacagacccgggaggcaaaaacccctcccgctcaacagtaaaaagtttttaaaggatgacacttcctcttgaggcttcaatcctgattttcttcctttggcaccaccttggaacaaaagcaacaaaaatttgctgcttcctcacctacaacaacatgggttcaaaaaccctgagtacgaagtgtactttcgcaagtcttacccatcaaaaaaaaagattctcaaggatatgctggctgaagggagtcaaggtaaggctttgaacaagaatcaaaactctgtttacagaaatgcttactaatagtggatccttaaaaatccagttttattagcaagttaagtcattacttgaatctagagttctttctatcctagttcaagcacttggcctatactagccatcttcttattaacccttcttgttcactggaatgctacatgtagggcagtgaccaagtcttcatgtccgagaagtagcggcgatccgaatcgattaatacccagttggggatctccaatcacacgacatatgtagcacttaacccttgcatatgtcaactcgccaccgggtttcttaagaccagatcaggttcacgccaactgagagcacagatacaccactgtccagcctcttgccacgaaggatacacgctactcttgccatctctccactcccattacgtgttatcttattctggtattagtctgctcgaggcaaagcttacccatgatgaggcatgtgaccagttcaaaggtcctcgatcatcaagcctacatcgagatggtccttaatcgactcagacggagacactacaccgagactctcttctcgtgcaagtcacccgcctggtcttagctttatcatttcaaacccaaagtttggtacctggcagaggtacatcttttccgatgttgaatccatcaaggcctttgacggattcaccatcaagttttatttttgaaaatcatcccttcccacttgaagcatcatcttttgttgaaaacaaaacattttgtttttctagagcaagactaagcatcagaaaaaccttttcataaaacaggtgatcaaggaaaggcagtcaatcttccaaggaaggaaatgcagcaagtgtttagcacacaactcctatcacctaatgcatcaagcaagtgagaaagattttaaaatagcaaggaggtggcaaatgcaccggggcttgccttgtgttataggagagtcgggctctactccacaaatattgaaataaaagcagttcccggtaggtgggtcttcaggtggtggtgtagctcttccttcttcaacttctacttcttcttcgttttctatatatatcatatatataaccatgaatgctcatgtaatgcttatgaaaatgcaaagataataaatgtacatcatattaggtcttgaatacaattttccttcacggtactccaggaaactagggtttttgaagtcagtatttgatttcatagggcaggcactattagggctttggggtttaggtaccaaacattgtccaaatcatgccaaactttacccaaggtttctaaatatcattttaagcttatccaaaaagtttagggatttttggagttattaatcaatttctaaaattccaggagtataggttttggctattttaaatactccataattccttatttggactagaaatcataaaaccatttttattaaatactatagaaatttaggagcctagcaaaattggtctcatatttttatcatttttctacaattttctagaaattctctaatcctggaagaaaaagaaaagggaaaagcatgaatagtactgggccgaaactggcccaagtcagcccgtgaacaagcaaacgcgcccgcgcacgtgcccttggtggacagtttgcaccgaggtccttaggggtttgaataactagcgaagaaccccgcgcattatttgtttgggtcactgacaaaaggcagataggccctcacacttctatttcttcacagcccgcggtcctagacggacgaacgggcgccaggcccgagctcccggtgaacctgtaccggccaagacacgcaatggacggtgctctaacttggttgatacctaattcaacatctaaccaacgtttcccctcgatcaattgcacggttcgagctcccaacctctctgctcacggcgaccgcacgatcaacggataacacaaagtgttcccggcgatcaaatgggctctagcctaatcggtcgggtcgagaagcatcaggagcacataagggtaatgaaacaagagagcagaggacatgatcggacctgaagcgcactggccacggtgagagccttctcacggcgatagaaaaccgatttgggggaagtgagcaattcgggggctctggtgaacaattgaaggcacgagttgatggattgggtgcttgactaccttgcggaaccgacgatatgctgaatttataggatccccgagcagtggcccgtgaatttgagatggcgtggtggtgatcggagaatgaaaagagcaatgtcgcaagagattggtggctttcaccgtggtgggctcactggcgatcaccggacatgtgtaatatgagctactgtgatgtggtcagacaccaaggcacgtggcgcatgatcgttgaacggctaacgccggtgaggatgatcccgaccagccaccgtccaagtgggtacgacgggcacaacggtgagcgagctcgagctaatacgagcgccaagatttttactcctctctgttatccacatgcgctgggcacgaatcacagcgggtggcgcgaatccgggcgcacggctcgtcggcggcgaggttcagtggattggggatattttcagtgcactgtaccattggattctcattcagtcagcctgacaaagcaacttgcagggagatttgttcccaatttcatgtagtgactcgacctgctctctgtgtcaaagttgtagccctatgatccagctacaaccttgctatagcaaccatagccaaacaattactggatcatagtcgaatcccatctcaaaggttgcccaacttcactgttagacaatattcagtctctgcattatctgatagccagacttcagacccatttaactcctaattttgtacaataccaaggctcaatcacttaagcaaagttgttctcctttcctagctctacaagtttgatgtgttgaccctaggcaaattccttgtatttttagaactacagagctccaaagtcagccctgttcactggttttgggacttaggcatatgagaggtatagagtggatttttgcaaataagcccaaatctcatggcttgatttggaaatcctcaaatatgtgaaccatatgatttgaggtgccctaataccttggtttttgcacttgggtccaaaagtctatcaatggtgatatcttatgaccatttctaatgagttttgagattttaacttatttaggctttattgtcactcctaagcatagtttagggttaagtaccttaccctagggtttcacacataacaagtcacattaatacaacttgtttgaaattgttgcctagtgaatgcattctagatgtgacaatcacatgatatgctaatgctcatgatggtatgctcaaattttagtgacagtaacaccaggggtgttacatccttccccccataaaagaatcttgtcctgagatttaaaagttctagggcaagtagtggaaaaggaaacacgacatatttttatttccttatttcttgtacaaggcagggggtggtatggggtctattcctctactacaacaattgtacatatctcataatttacatgaagctaaaaagtctggaaagttcttttctaaaaagtcttgggtttcccatgtagcttcatcctcagtgtgttggttccattgtatcttataaaatttgagagttcttcttcgggtaaccctgtccatttgatccaggactcgaatagtatgttctgaatatgtcaagtctagttccaagataacatcagtcacttcaatggttcgatctggaacccaaagacacttcttcaattgagacacatggaacacattgtgcactacagacaatgtttcaggtagttggagtcttctgtcacacccggatttaagggacaaatccgggtgcatctcatatgtgcgccaaggaagaacaacacacataataacagagtgcatagtgataaatgtcataaatatcataaatatacttattacatagcgaaagtcttacaaaaataaatgataaagtaaagcgaactaaatattattccctggcgccacaaagctgactgggagacgccacctagatcaagtcgaatgcctcagtgttaggcggctcctctccgaccacctgttcttctcctgtgggggggtgtgagacagcaagagtgagctcacatacgttcatagctcaacaagtcgtggggaataatgtgcatgaactcaccaaaggtgggagttcatgtgaagtgtaaggctgatcaacaaaatagaggctgaagctgagcattgcttttataagttggtcaaaattttattagcaattactaagtgtaagtaaataccaaaccttaataataataaagaaaagtaataaaataatcccaaatgcgatgcaaatgtcaaattaaatttaagttccataaattaatcatgtgagggtccgagctgctcatgaccgtgagcacgactagtataccagttttacactctgcagaggttgcgtatctttacccacaagtcatgttacccatctgccaagagacggccaatcccatacacctctaccgaggaggcgaggcagggtaacactacgaggcctttacaaagttccactagcttcagaaatcccgctacagtgtataggaagctccagtgtagtaatccctcgcctgaccgccatcgcagcaaaatcaacccaaggacctccctacactgaccactcccctactgcccttgcccctttcgggtaaggaagacatccactagctttcctagttaatcagccaagggcgtcccaataaaaccttctggcagcactgttttcccgggtggtcgcttaatgttcccattaacataacgatcttaacatgaacagtaataataaaaagataataaaagtgtaattatgaataaagtatctccatacccaaatccacataaaagcaatagcaggtactacccaaaaatatttcagtggtaaacaaggtataaagataaccaaaactggggtaacctattggatcccatcaaaattaacctatgcagatcattataattaataagaacatggctgggaaaaagtaagtgaacaagggcacaacttgccttcaatgagctcctgctcagctacttctacttgctgaacctcagaatccacagtggcttgctcgtctactcggatcaacacaatacatacatagtatagaaaaaattaacattgcaccaaacatgtgaataaaatacacaataatgatctaaacattaaaatcagatcacaggaactggaatcattaaatttggagttatagattttaagttaggaattttccaaggttttatgtgcttaatataagattaagtaatagataaattttggtgtgtctttcatgccaaaacagtgacacaatttgatggagaataatattacaaatttataggaagtggaatggattaatttggagcaagtatgaattttctaggaatttaacaaattctagcaattgtttttgtattaaaaatgcatttactaattcatttatccattttaaatcagttctgggctgggcgcataaaaacataaatccgcaggggtctcagtgcaatgtgtactaagactcagtaaacattccccctagacgtcgggtttatttttgtgaaaacagggggctcatttgcataattacctgcagacgacggaacagggacacatggcgcccaaccactggctagagccaggccacacacgggatcccacagtggggcgcactggatcctgttcgcaccaaattcccgccactagcgcacgtgccattacaaagagatcaacgcggaccgccagattcgcgacttatggccgggattcaaaggtgcgaaagggtatttacggcatctaatcagaaccgtccgagtggagatctacggttcaacgatcgccgactcctcacagtgtgttcgacggtggtgtcatcccaccccacggtggagctaccgccggtgcggtcgattctcggcgcttggtgccccgcaattcaatctacaacttgctacgcgatgtggtgcacatccccaatacataccctgccatcatacctccgatttcgaagtatcgcgctctgtcgataaggactgacggcccagcggtgcaaatcgatcgtcggtgagcaatccgccccacagcgcaggtgatcagcccgaaacttcctcacgtatgcacccgccacactccgtggtcttcctccaggccacaatcgcggccaaactcccccggggccacgaatcaccaatggcgagcctctcttcacgttctctgcgcagcactctcgctcacggcgctatcggtcaatggctatctcggaggtggaagaggagtcgtctagggtttgcgtcgcatcttatagaggcgagttggagaaggatttgacctcgagtccgctcccaactacaccgacgcacccgccatgcgcggccatggttgttgaggttttttggctgacttctcgggtccacatggcatagagaacaacactggttagacgcgtctgtgagtgaatggcaagctggaccaggttgtcggcgccccagcgtgtagattagaactaggccacgcggagggatagccaaatgggccggctaggccaaattgacccaagtgaggcattcctattccccccttttttcttttatcctatattttcttttctttcaaatttcgaatttaaaccccaaatttgtatttataagtgtgaagttcatacttaaatcaattgtaattccaaataccaatataagcctgattggattattttatatatttatttgatcttatgtgtaaatattatcttctcttgtttcaattctagcattttcctttaggatttaaattctaatttgggtattaacatatttatttttacattattgtcacaaaatgcacacaaaaggaaaaaccagcatggtgcatgatttagttgagtgtcttttgttacttatttatttgtgtaagtaatgtgtccacatgaaatgataaacactagtagtacatatagaggtagagtgatataatttctcttttagatctttcttacaaagtgggtattacaaatcctaccgcccttaaaaataatcgcgtcctcgagatttaagaagatctagggaaaagatggggaaaatctacgcgaagctcttcttctctctcctaagtagcttcatcttctccgtggtgactccattgcactttgcacatctttatcaccttattccttgtgacacgagttagtgtatcaagaatcttgatagggtactcagcataagtcagatcctcttgaacactaaggtcctccattggtagctgttcttcaggtacccttagacatttcttcagctgagatacatgaaagacatcatgaacatccgcaagatgatccgacaactccaattgatatgccacctctcccactcgctttaagattaagaagggtccaataaagcgaggggacaactttcctttgactttaaatcttctcataccccggagtggtgacaccttcaaatagacataatctccctccttaaactcgagcaatcttctccggatatcagcatagcttttctgccttgactgtgcagttctcaaattctcccttatttgctggacttgctcctcagcctcttgtataattttaggtccaaatatgctggactgtgcatctcttctcgctcctggtgcaactcctcgcgtatctcttctcattcctggcgcatctcctggcgttcctgctgcttctgagcacgcatatctgccatagtgtccgccatttgttgcatcatcctcatctgagctgcaaccagtgggtgaactccgcctggtggaggattcatctctgctggttgtggctggggttgtctaaatatcctccgagtgtgtcgtctgggaggtaaatcaattccaccacccctcctggtattgaccatctaagttagatacatatggtaagagaaaagtagacaaggtaggtagttactgaaagggaaataggcttacaccttctcctatatgaattttggtggttgaattgcccaaacaaattaattggactaactagtttgctctagattatgagttctacaggtgccaaaggttcaacacaaaccaataaaaaagtccaagaaagggttcaaataaaaagagccgaagacaacccaaaggcagccctggtctggcgcaccggactgttcggtgtgccaccagacagtgtccggtgtaccaccggacagtgtccggtgcaccagggaacccaactccaaacttgccaccttcgggaattctgagagccgctccgctataattcaccggactgtctggtgtgccagcggagtaacggctacacaacgccaatggtcgtctgcaacggaacagtaaaagtgaacactgcgcgcctgcgcgcgcagaagtcagagcagcgccacaaggcgcaccggacagtgaatagtgactgtccggtgcaccaccgggtgtccggtggcccagttgtcagaagctccaatggtcggaacccaacgacctggtgacgtggctggcgcaccggactgtccggtgcgccatacgacagaagccctcaccaacggtccctttggtggttggggctataaatacccccaaccaccacacttcaatgcatccaagttttcagccttcaaacctcatacaagagctctagacttcattcaaagacacaaacaagagatcaaatcctctcccaagtccaaagatcattccaatcaaatagtgactagtgagagagacaattgtgttcatttgagttcttgcgcttggattgcttttcttcttccttctttcttatttccaactcaattgtaatcaaggcaagagacaccaattgtgtggtggtccttgtggggacttagtgtcccgtttgattgagaagagaagctcactcggtctaggtgaccgtttgagagagggaaagggttgaaagagacccggtctttgtgaccacctcaatggggagtaggtttgcaagaaccgaacctcggtaaaacaaatcaccgtgtcatccactcttactcgcttgtgatttgttttccccctctctttcagactcgtttatatttcttacgctgaccccgacttgtagttgtgctttaactttataactttcctgcctattcaccccccctttaggcgacttttagttacgaatcatgttactttggggagattattagctaagcagattaatgttttacctaccatagctaattcattactttatggaggtacatgctaagatgtccgtctataaaatttcaatcagtcaaagaagcaaatcaagcattgatcatcagaacaatcaaccaacatttttagtagagaaaataattttaatttttgtcttaggtctcctatctcttaaaaaggtcataaatgtaggattcaaaggtgtgaaatccatcttgtctcagagtagaaaaggtaagaatcatcagagtagaacagtagaaggtgagacagaatcaagataagtatagaaagaattagagtaaggtaagtaggtgaccgtttgagagagagaaagggttgaaagagacccggtctttgtgaccacctcaacggggagtaggtttgcaagaaccgaacctcggtaaaacaaatcaccgtgtcatccactcttactcgcttgtgatttgttttcgccctctctttcagactcgtttatatttctaacgctaaccccggcttgtagttgtgctttaactttataaaattcagatctgcctattcaccccccctctaggcggcttttaattggtatcagagcctggtacttcattagagcctaaccactcgaagtgatgtcgggagcatctgccatgagggagatcgggaccggcggtgacaagtccgcaagctcggggagatcacactcaagggagtccacccacaagcacaaggaggaatcctcttcctctatcaagtcccaacggaagggtgacaagaagaaggagacgaagaaggtggtctactatgagaccgactcttcgtcaccctccacctccgactcagaatcggcatccgccacttctaagcgccatgagcgcaagaagtatactaagatgccccttcgctattctcgtatttcaaaacgcactccattactttccgtcccattaggcaaaccacctatgtttgaaggtgaagattattctatgtggagtgataaaatgaggcatcacctaacctcactccacaaaagcatatgggatattgttgagtatggagcgcaggtaccaaagaaaggggataaggattatgattccgaggaggtcgaacaaatgcaacacttcaactcccaagccaccactatactcctcgcctctctaagtcgagaggagtataataaggtgcaagggttgaaaaaagccaaagagatttgggacgtgctcaagaccgcgcacgaaggagatgaggtgaccaagatcaccaagagggaaacgatcgagggggagctcggtcgatttatgcttcaccaaggagaggagccacaagcgatgtacaatcgtctcaagaccttggtgaaccaagtgcgcaacctcgggagcaccaaatgggatgaccatgagatggtcaaggttattcttagatcactcgtatttcttaaccctactcaagttcaattaattcgtggtgatcctagatacaaactaatgtctcccgaggaagtgataggaaaatttgtgagctttgaattaatgatcaaaggctccaagaagatcatcgagcaaggcgcctcctccatacccgaggcacaacccgttgcattcaaggcaatggaggagaagaaagaagactctacaccaagtagggtccccatcgatgcctccaagctcgacaatgaggaaatggcgctcatcatcaagagcttttgccaaatcctcaagcaaaggaaggggaaggactacaagccccactccaagaaagtttgctacaagtgtagtaagcccgatcgtttcattgctaaatgtccattatctagtgatagtgataggggcgacgacaagaagggaaagagaagagaaaagaagagatattacaagaagaagggcggcgatgcccatgtttgctgggagtgggactccaacgagagctccaccgactcctcctccgacgaggacgctgcaaacatcgccgtcaccaaaggccttctcttccccaacgtcggccataagtgcctcatggcaaaggacggcaagaagaagaaggtaaaatcaagatcctccactaagtatgcaacctctagtgatgaggaaaattctagtaatgatgaggataacttgcttacgctttttgccaatcttaacatgcaacaaaaatagaaattaaatgaattgattagtgttattcatgagaaggatgaactcttggatagccaagaggactttcttattaaagaaaacaaaaagcatgttaaggttaaaaatgcttatgctctagaggtagaaaaatgtgaaaaaataactagtgagctaagcacttgccatgacactatttccaaccttagaattgagaatgctaatttgattgctaaggttgagaagtcaaatatttgtgatgattcaattgccaatcttagaaatgataatgctagtttaattgctaagattgaaaaattgaatgtctctcttgctagccttagaaatgagaatgaaaaattaatttctaaggctaaagacttagatgtttgcaatgcttctatttccaatcttaaagatgagaacgctattttacatgctaagattgttgaattaaaaacttgcaaaccctctacatctaccgttgagcatgttacaatttgcactagatgtagagacattaatgttgatgctattcatgatcacttagctttaattaagaaacaaaatgatcacatagctcaacttagtgccaaaattaatgagcatgacttagaaaatgaaaaatttaaatttgctagaagcatgctctatagtgggagatgccctaacattaaggatggcattggcttccaacagggagacaatgtcaagcttaatgcccctcctaaaagattgtctaactttgttaagggcaaggctcctatggttcaggataacgagggttacattttataccctgccggttatcccgaacataaaattaggagaattcattctaggaagtctcactctggctctcatcatgcttttatgtataacagtgaggcatctagctctaggcaatcaacccatgttaaattgcctaaaaagaaatctcctattgcatcaaatgagactaacatttcatttaagacttttgatgcttcttatgtgctaactaacaaatcaggcaaagtagttgccaaatatgtcgggggcaaacacaagggatcaaagacttgtgtttgggtacccaaggtgcttgtttctaatgtcaaaggacccaagaccgtttgggtacctaagaacaaggcctaaatttgttttgtaggtttatgcatccgggggctcaagttggatcattgacagcgggtgcacaaaccacatgactggggagaaaaggatgttctcctcctatgagaaaaaccaagatccccaacgagctatcacattcggggatggaaatcaaggtttggttaaagaattgggtaaaattgctatatcacctgaccattctatttccaatgtttttgttgtagattcattagattacaatttgctttctgtctctcaattatgcaaaatgggctacaattgtctttttacggatgtaggtgttactgtctttagaagaagtgatgattcagtagcttttaagggagtgttagagggtcagctatacttagttgattttaatagagctgaactcgacacttgcttaattgctaagactaacatgggatggctctggcatcgccgactagcccacgttggaatgaagaatcttcataagcttctaaagggagagcacattttgggactaaccaatgttcattttgagaagacagggtttgtagcgcatgtcaagtagggaagcaagttggtgttcattatccacacaagaacatcatgacgactgacaggccactcgagctactccacatggacctattcggcgcgatcgcttacataagcatcggcgggagtaagtactgtctagttattgtggatgattattctcgcttcacttgggtattctttttgcaggaaaaatcacaaacccaagagactttgaaaggattcttgagacgggcttaaaatgagttcagcttgaggatcaagaaaataagaagcgacaacggaacggagttcaagaattcacaaattgaaggctttcttgtggaggaggggatcaagcatgagttctcttctccctacatgccacaacaaattggtgtagtggagaggaagaatagaactctattggacatggcaagaaccatgcttgatgattacaagactttggatcggttttgggccgaggcggtcaacaccgattgctacgccatcaactggttatatcatcaccgaatcctcaagaagacatcatatgaactcctaactggtaaaaatcccaatgtttcatattttagagtctttggtagcaaatgctttattcttgttaaaagaggtagaaaatctaaatttgctcctaaggctgtagaaggctttttactaggatatgattcaaacacaagggcatatagagtctttaacaagtccactggactagttgaagtttcttgtgacattgtgtttgatgaaactaacggctctcaagtagagcaagttgatcttgatgagctagatgatgaagaggctccatgcgtcgcactaaggaacatgtccattggggatgtgtgccctaaggaatccgaagagcctccacaagcacaagatcaaccatcttcctctatgcaagcatctccaccaattcaagatgaggatgagtctcaagatgatgaaggagaagatcaagaagatcagccacctcaagaggaggacaatgatcaagggggagatgctaataatcaagacaaggaagatgatgatgatccaagaccgccacacccaagagtccaccaagcaatccaatgagatcaccccgtgaacaccatcctcggcgacattcataagggggtaactactcgatctcgtgttgctcatttttgtgaacattactcttttgtttcctctattgagccatacagggtagaggaagcacttcaaggttcggattgggtgttggcgatgcaagaggagctcaccaacttcacaaggaatgaggtatgacatttagttccacgtcctaatcaaaatgttgtaggaaccaagtgggtcttccgcaacaagcaagatgagcatggtgtggtgacaaggaaaaaagcccgacttgtggccaagggatattcacaagtcgaaggtttagatttcggtgaaacctatgcacccgtagctaggcttgagtcaattcacattttacttgcctatgctacttaccatggcttaaagctttatcaaatggacgtgaagagtgccttcctcaatggaccaatcaaggaggaggtctatgttgagcaacctcccggctttgaagatagtgagtatcctaaccatgtctataaactctctaaggcgctttatgggctcaagcaagccccaagagcatggtatgaatgcctaagagattttcttatcactaatggcttcaaagtcggaaaagccgatcctactctctttactaaaacaattgctaatgatttgtttgtatgccaaatttatgttgatgatattatatttgggtctactaacaaatctacttgtgaagagtttagtaggataatggttcaaaaattcgagatgtcaatgatgggggagttgaagtatttcttaggatttcaagtcaagcaactccaagagggcaccttcattagccaaacgaagtacattcaagatattcttgcaaagtttgggatgaaggatgccaagcccatcatgacacccatgggaactaatgggcatcttgacctcgacacgggaggtaaatccgtagatcaaaatgtatatcggtcgatgataggttctttactctatttatgtgcttcacgaccggatataatgctttccgtatgcatgtgtgcaagattccaagccgatcctaaggaagttcaccttagggccgtaaaacgaatcttgagatatttagtttatactcctaagtttggcctttggtaccccaagggatccacttttgatttaattggttatttcgatgctgattgggcagggtgtaagattgatagaaagagcacatcagggacttgccagttcttgggaagatctctggtgtcttgggcttctaagaaacaaaattctatagctctttctaccgccgaagccgagtatattgccgcaggccattgttgtgcgcaattgctttggatgaggcaaacccttagggactatggttacaattaaccaaagttcctctcctatgtgataatgagagtgcaatctgcatggaggataatcctgttgagcacagccgcactaagcacatagccattcggtatcactttttgagggatcaccaacaaaggggggatatcgagattgcatatattaacactaaataacaattagccgatatctttaccaagccattagatgagaaaacctttaccaaacttaggcatgagctaaatattcttgattctaggaattttgattgatattttccacacatagctcatttatatacctttgatcatatctctttcatgtgctatgactaacgagttttcaagtgtatttcatgctaagtcatagattgaaagggaaatggagtcctcggcgaagacaaggcttccactccactccatcgatttattcatccttcgccgtggctccacaccgctctctaaatttggtataatcttcactcctatattatttaccaaagggggagaaagtttgaataagggcttatatttcactaacaagtatccgtttttggcgattcatgccaaagggggagaaagtattagcccaaagcaaaaggaccgcaccaccacaaatttcaaaaatatagtctttcaaatttgtgttaagaaaagatttttcaattagtatcttattattgataaaattttcaaattagtataaaccctttcaaaattaatatctaaaaccctcttgaacactaagaggaggatttcattaagggggagttttgtttagtcaaaggaaaaacatttgaaacagggggagaaaatttcatatcttgaaaatgcttctcaaaatcgtattcatatacctttgactatttgcaaaatactttgaaaagaatttccaaaacatttgcaaaacaaaacaagtggtgcaagtgtggtccaaaattttaaataagaagaaaaccatccatgcatatcttatgaaatgaatattggtctaattccaagcaacctttgcacttaccttatgcaaactagttcaattctgcacttttatatttgctttggtttgtgttggcatcaatcacgaaaaagggggagattgaaagggaaataggcttacaccttctcctatatgaattttggtggttgaattgcccaacacaaattaattggactaactagtttgctctagattatgagttctacaggtgccaaaggttcaacacaaaccaataaaattacaagaaagggttcaaataaaaagagcaaaagacaacccaaaggcagccctagtctggcgcaccggactgtccggtgtgccatcggacagtgtccggtgggaacccaactccaaacttgccaccttcgggaattctgggagccgctctgctataattcaccggactgtctggtgtagcaccggactgtccggtgtgccagcggagtaacggctacacagcgccaacggtcgtctgcaacggaacagtaaaagtgaacactgcgcgcctgcgcgcgcagaagtcagagcagcgccagaaggcgcaccggacagtgaatagtgactgtccggtgcaccaccggactgtccggtggcacagttgtcagaagctccaacagtcggaacccaacggcctagtgacgtggctagcgcaccggacagtgtccggtggcgtaccggactgtccggtgcgccatacgacagaagccctcaccaacagtccttttggtggttggggctataaatacccccccaaccaccacacttcaatgcatccaagttttcagccttcaaacctcatacaagagctctagacttcattcaaagacacaaacaagagatcaaatcctctcccaagtccaaagatcattccaatcaaatagtgactagtgagagagacaattgtgttcatttgagttcttgcgcttggattgcttttcttcttccttctttcttatttccaactcaattgtaatcaaggcaagagacaccaattgtgtggtggtccttatggggacttagtgtcccgtttgattgagaagagaagctcactcggtctaggtgaccgtttgagagagggaaagggttgaaagagacccggtctttgtgaccacctcaatggggagtaggtttgcaagaaccgaacctcggtaaaacaaatcactgtgtcatccactcttactcgcttgtgatttgttttccctctctctttcagactcgtttatatttctaacgctgaccccgacttgtagttgtgctttaactttataaatttcctgcctattcaccccccctttaggcgacttttagttacgaatcatgatactttggggagtttattagctaagcagattaatgttttacctaccatagctaattcattactttatggaggtacatgctaagatgtccgtcaataaaatttcaatcagtcaaagaagcaaatcaagcattgatcatcagaacaatcaaccaacttttttagtagagaaaataattttaatttttgtcttaggtctcctatctcttaaaaaggtcataaatgtaggattccaaggtgtgaaatccatcttgtctcagagtagaaaaggtaagaatcattagagtagaacagtagaaggtgagacagaatcaagataagtatagaaagaattagagtaaggtaagtaggtaagggttttgtccatttctatctaggtttcgtcctacagtcaacattttcttctaataccacttctgtcacacccggatttaagggacaaatccgggtgcatctcatatgtgcgccaaggaagaacaacacacataataacagagtgcatagagataaatgtcataaatatcataaatgtacttattacatagcgggagtcttacaaaaataaatgataaagtaaagcaaactaaatattattccctggcgccacaaagctgactgggagacaccacctagatcaagtcaaatgcctcagtgttaggcgactcctcttcaaccacctgttcttctcttgtgagggggtgtgagacagcaagagtgagctgacatacgttcatagctcaacaagttgtggggaataatatgcatgaactcaccaaaggtgggagttcatgtgaagtgtaaggctgaacaacaaaatagaggctgaagctgagcattgcttttataagttggtcaaaattttagtagcaattactaagtgtaagtaaatagcaaaccttaataataataaagaaaagtaataaaataatcccaaatgtgatgcaaatgtcaaattaaatttaagttccataaattaatcatgtgagggtccaagctgctcatgaccgtgagcacgactagtataccagttttacactctgcagaggttgcgcatctttacccacaagtcatgttacccatctgccaagagacggtcaatcccatacacctctaccgaggaggcgaggcagggtaacactacgaggcctttacaaagttccactagcttctgaaatctcgctacagtttataggaagctcaagtgtagggatccctctcctgaccgccatcgcagcaaaatcaacccaaggacctccctacactgaccactcccctactgcccttgcccctttcgggtaaggaagacatccactagctttcctagttaatcagccaagggcgtcccattgaacccttgtggtagcactgttttcccgggtggtcgctccatgatcccattaacataatgatcttaacatgaacagtaataataaaaagataataaaagtgtaattatgaataaagtatctccttacccaaatccacataaagcaatagtaggtactacccaaaaatatttcagtggtaaacaaggtataaagataaccaaaactggggtaacctattggatcccatcaaaattaacctatgcagatcattataattaataagaacatggcttggaaaaagtaagtgaacaagggcacaacttgccttcaatgagctcctgctcagctacttctacttgttgaaccttagaatccatagtggcttgctcgtctactcgcatcaacacaatacatacatagtatagcaaaaattaacattgcaccaaacatgtgaataaaatacacaataatgatctaaacattaaaatcagatcacaagaactggaatcattaaatttggagttatagattttaagttatgaattttccaaggttttatgtgcttaatacaagattaagtaatagataaattttggtgtgtctttcatgccaaaacagtggcacaatttgatggagaataatattacaaaattataggaagtggaatggattaatttggagcaagtatgaattttctaggaatttaacaaattctagcaaatgtttttgtattaaaaatgcatttactaattcatttatccattttaaatcagttctgggctaggcgcataaaaacatacattcgcaggggtctcggtgcaatgtgtactaagactcagtaaacattccccctggatggcgggtttatttttgtgaaaacaggggactcatttgcataattacctgcagacgacggaacagggacacatggcgcccaaccactggctagagccaggccacacacgggatcccacagtggggcgcacgggatcctgttcgcaccgaatccccgccactagcgcacgtgccattacaaagggatcaacgcggaccgccatattcgcgacttacggtcgggattcaacggtgcgaaagggtatttacggcatctaattagaaccgtccgagtggagatctacggttcaacgatcgccgactccccccagtgtgttcgacggcggcgtcatcccaccccacggcggagctaccgccggtgcggtcgattctcggcgcttggtgccccgcagttcaatctacaacttgctacgtgatgtggtgcacatccccaatacataccccgccatcatacctccgatttcgaagtatcgtgctctatcgacgaggacttgcggcccagcggtgcgaatcgattgtcggtgagcaatccgccccacagcgcaggtgatcagcccgaaacttcctcgcgtatgcacccgccacactccgtggtcttcctccaggccacaatcgtagccaaactcccccggggccacgaatcaccaatggcgagcctcccttcacgttctctgtgcagcactctcgctcacggcgctatcggtcgatggctatcacagaggtggaagaggagtcgtctagggtttgcggcgcatcttatagaggcgaggtggagaaggatttgacactgagtccgctcccagctacaccagcgcaaccgccatgcgtggccatggttgttgaggtgttttggctgacttctcgggtccacatggcatagaggacaacactggttagacgtgtctgttagtgaatggcaagcgggcccaggttgtcggcgccccagtgtgtagatgagaactaggccgcgcggagggatagccaaatgggccggctaggccaaattcgcccaagtgaggcattcctattttccccctttttttcttttatctcctatattcttttctttcaaatttcgaatttaaaccccaaatttgtatttataagtgtgaagttcatacttaaatcaactgtaattccaaataccaatataagcctgattggattattttatatttttatttgatcttatgtgtaaatattatcttctcttgtttcaattctagcattttcctttaggatttaaattctaatttgggtattaacatatttatttttacattattgtcacaaaatgcacacaaaaggaaaaaccagcatggtgcatgatttatttgagtgtcttttgttacttatttatttgtgtaagtaatgtgtccacatgaaatgatgaacaccggtagtacatatagaggtagagtgatataatttatcttttagatctttcttacaaagtgggtattacaagtcggtacgccactggtccacacctttcaaggataggaaaaggaccaatgtgcaagggtgcaagcttcccttttaccccgaaacgagatatacccttcattggtgatactttcagatacacatagtcttcaacttgaaagtacaagggttggcgtcgtttgtatgcataactcttttgtcgagcttgtgcttctttcaaattatgtataattcgttgaactttttcctccatctccttaaccatatcaggcctgaaaaaccacctttcccctggttcagaccaatttaatggagtacggcatcatcgtccatacaaagcttcaaagggtgccatcttgatacgttcttgataactgttgatatatgaaaactctgccaatggtaaacagccatcccatttctgcggaaattctagaacacaggctcgcaacatgtcttcaagtatctggttcaccctcttagtctgcccacttgtttggggatgataggctgaactatgaagcaacttagtacccaaagatttgtggagttcttcccagaatttggatacaaattgtggtccacggtctgacataattgttttcggaatcccgtgcagactgagaatacgagcaatgtaaacttccgcatatgtgattactggatactttaccttaactaggaggaagtgggcgatctttataagtcgatcaatgataacccagatggaatcaaacccttttactgtcctgggtaatcccacaatgaagtccatgctaatgtcctcccatttccaggtcgggataggtaaagattgcaatggagcagcagttttcatgtgtatggctttgacacgtctacaagtgtcgcatcttgccacatagcgtgcaatttcgatctttatttttgtccaccaataacgttgctttaaatcatgatacatcttagtgctttcgagatgaatagaatagcgactaagatgtgcttcatctaaaatttgctggtggacatcatcattcttgggcacaactatgaggttattaaaccatactataccttgatcatcctttctaaaacagtttgctttaccggcctttattttctcatgaatgtgtttcataccctcatcacttctttgtgcatcaattattctttgcagaagaatcgactcaggcttcaattgatttaatgtttcatgctgaatcattcccaggtttaatttctccatttcttggcataatgtgatgtcagaagtcttcatcgtaagacaatgacaggaagccttgcgacttagtgcatctcccaccacgttggccttacctgggtgatagtgaatttccaattcataatccttaatcagctcaagccatctcctctgcctcatatttagttctgactgggtaaaaatgtacttcaaacttttgtgatctgtataagtgtatatatatgatagatatttcccaatagataatgatgccatattttcagggcatgaaccacagcagctaattctaagtcatgagttggataatgttcctcatgccggtgcaactatcttgaggcatatgctataactcggaggatctgcctggattacctccagaaagagatgtagagtttgtgattgaactaaagctcggtatggctcctttttctagaaggtcgtatcgaatgcctccaaatgagttggcagagctcaagacacaattacaagatctactggagaagcatatgcctcaagttttatttttgaaaatcatcccttcccacttgaagcatcatcttttgttgagaacaaaacattttggggtttttgaagtcagtatttgatttcatagggcagacactattagggctttggggtttaggtaccaaacattgtccaaatcataccaaactttacccaaggtttctaaatatcattttaagcttatccaaaaagtttagggatttttggagttattaatcattttctagaattctaggagtatagattttggctattttaaatactccataattccttatttggactagaaatcataaaaccatttttattaaatactatagaaatttatgagcctagcaaaattggtctcatatttttaccatttttctacaattttctagaaattctctaatcctggaagaaaaagaaaagggaaaagcatgaatagtactgacactacaagaaactgataaatgttcgtgggtaaaattaagaacgtgggtaccgacgttcttacttgagttaagttcatgggttatgttaagaacgtgggtaccgacgttcttaatttaaattcgtgcgccctggctaaaaccatcgaacttaacgagttaggaacgtgggtacccacgttcttaagttaagttcgtgggccatatggacaccatcgaacttaatcaaaaaaacctaaatcccctaacccacccacgcgcgactctctctctctctcacgtgctgcctcattcccgcccatcgtgccgccgcaacaaaaaagtgctgccaccccacccctatcgtcgcgctcgccgcctctccttgcgcctcccagatcgccgccgcgtgtgaagacggctcactcgagctctggctcgtctccccgggctccgtcaactggcacaaccagctcgtatgcttcccatagccctgctgtgtcctgcgaggagtctaaggattgtctctggcctgatcgggtgtttgcttgggtgcagactaaggatattcttttctatcttacttagagcaggtatgcagaagatcatatccaccattttatctttacctcttttatacttgttgtaaggttcaagctaccggtatctttgttaatgttctcattatcttataccctagcttacacatggagtggtacatttaatatggttcttcatatcactctctgaatttacgtgtgattggtttctgaagaaacatcttcctgacattttccctaattcttatac

SEQ ID NO: 599 - DNA, 1381 bp, Zea mays
  Intron number 4 from transcript GRMZM2G154509_T01 (locus G RMZM2G154509) derived from phytozome v7.0 (chr-ID 10; pos 95765308 to 95766688 reverse strand)
aagattgaattagttatttcttcccctttactgaggtatagtctggtcttaatatatttttgtgcacttttactgttataaatcctctagtagtcttcctagtatttgagaaatagttttctttagttttggcattgctaactttttggaacgcatgttgtcagcttataagataacttgtaactctgcttaaagcaattgactaggtttttcatattaagatatttccctttttcttgaacttaatatggtatttggatggtctttagatctgtctgtatccagcgcccagcgggccctaggccctaggcttctttgacttgtatgtccgcggtttccacagtgaaacgaacagttgtacaataagctacacgcaattggcattggtaatgcatacaaatacacgactttggccccatttgttttcccttgctaaagtttagcactgcattttttactaaagtttagctactaaagaaacaaacatggtggctaaaagtgttgtgctaaagtttagcacccatttagcactttagcccccaccaaaggtgttactgtgctaaaagttgtacctaaccacattctctcttttttctctctccttcccccaaccgaacgacccttgaatctcctccaaaccagccatcagcaccttttagcattaatgtagcattaattagaggtagtttagcatcctttagcaattgtatccaaacacctctcaagtgctaaagtttagcatgcgctaaactttagcactatataaacaaacaggccctttcagatagagtcaaaactgtgcagtgccgcatcaggactgatggctagtaaacttctatgatttggacttatattcttgtttataaggttgtactgtgtataatgagtaaacatggcgtttgggatttcatttgtttatttatgaactgagactatgaaacaatttcagtagtttgattattatatttgcatatggaatgtctacactttaaccaacatttcagtatagccatgctgcattgtttgtgtgctcgactactacagataaatttatgaaacaactgttcatgaatatagtttgaccactttgattagcatatatgcatatggaatgtctacaaacaatgaaatagaatgacatatctgtataatcctgctgcttggtttgcatgtctcatgtatctaagatctggttactatattctagtacagctaaatggtatactttcctttcatgtgaatacttactcaatctgctgccagttatatattatgcgtaatcagacctccgattgggggcatatattctgtgaggttatatcgcagattgtatgaactactgaatgaacttcaccatatttcacttgaatctgacaggact

SEQ ID NO: 600 - DNA, 17037 bp, Zea mays
  Intron number 5 from transcript GRMZM2G040968_T02 (locus G RMZM2G040968) derived from phytozome v7.0 (chr-ID 10; pos 20384768 to 20401804)
aagcacttctttcaatattccctgaaaaagtcaaggtgagtttaccaaatgaagagtagatgagtcctgtaatcgtaagtttatcacatcctattctgctctccacctaccccccccccccctttgagtatgttattaaccttggggatctgagacgttgaacacttcagtagtagtggggacggctgttactaaccttggagatttgagaagtgagtactacagtagggagatgactatatatataggagcctcatggaccatatagtagatggaccttcaaacactttaacacttctcatgaagtttgctagccctagctgactcaagcccttagcgccagccaagatccagcaagcaagttcatcactgaaatgctgctgcattttctgaatggagggatgatccccataaaaaacagttctattcctctgcagccaaaagcactaagcacccaaaatgatggcaatgttgatccgttttctcctgtctttccttatgcattggatggtcctccaccattccgcaaacgaatcatcatcagccctaggggagaggtgacacatcccaaaagaagcaaagagatggtaccagaactggcgggcgaagacacaattagtgaggatgtgttgcaccgttttgctttcctggtcacacaaggggcaactgtctgggttctgctggaaaaacttgcatttctcatttctaaccaaaggaaaaacttgcatttctgcggagcccaagacctcaaagtcttttctaggtttcaaaagtgatagaccccctgaagaaggcctgataacatgatttggaggaaatggtcccagaaaaggtatgcctccatagatattgatcatctttagcaatgaggactgaggagacattctccaataaattccaaaggagaagacactgttggatacctgttatggaaagcacctgtttgatatcaccgacccaacctttgttagggatggctttaagcaactgttctagagctagccaccttaggagcaaccacaacaaccacttccggagccatattagtaatggtgcaaccatttagccatcgatccttcttgaaaatcgtgttttgtccattaccaacgaagttcaccattgagatggcaaagaagtcacatgtttttttttctaaaacgcgcaggagaactgcgcattagatatattaagatagaagaaacaccaatggtctaaagaagaccagagtacagagaaacaacaaaaataaaaataaaataaaataaaaataaacatccatctagaagacagccaaagctgcccctaaactaaggccagatggtgcccagatctttggcacccgcgagacaccacctctaagcatcgtctttgatgttctgaataatctggttgccactaggaacatccccctcaaacatacatttattccgctgtttccaaagccaccatgccaccaacatcacaagggagttaatccctttgcgcagcgcataagggaccttatcctccaaattagcccaccaatcttggaaaaccaaatcagcccttgcgggggagaactgccgcagattaaccagggagaaaatcctaaaccacacttccctagagaagacacaagaaattaaaagtgatggaataagtcttgagcatctagaggacaacagtcgctttttactgtcctctgtagtcctttagcatctagaggacagcttgactgtcctctgtagtctctttagcatctagaggacagcagtcgctttttgactgtcctctgtagtcgctttagcatctagaggacaacagtcgcttttgactgtcctctatagtctctttagcatctagaggacaatcctgttgtgtagtgtgtgtgagaaggtgtggtagtgcagcctctagggctataaatatgggtctccaacccttagatgggtatggcattgtgtagtgtttgaggaaataaacagaaaattgcctcaactcatagtgtcatcctcttgatgagagttagagtccctctacttacaattggtatcagagccaaactatcctgcagcctaaacatctcgtgctcatctgcttcccgcgcctctccccacactcagtcggcagcaagagctccaactgttccttcctcccctgttcagacgagcagcctttcgtctgagacagcctcttccacacgcagcgacccctcactagcccaccatgtccctacactcggccacttcgagtgcgcggcgccagcaggaggccgaggtcgccgcggcacaagaacgcgatcgagcagcagcagcggctgcagcgacagcggtgagggcagcacggttggcggcggcggaactggcagcggcgagagcggaagtagaagcagcggaggcggcgaatgctgcacgtgcggcggcaacagagctcgaggttctgcgcggcagtagagctggcagctctgcttctgtcgacgacaacaccgacgaagagctcaggctggcgagggaagcagcgagagagcaggcggcacagtgggcagccgcgcatccccatgggggcgcgcgtggcggcatcccagataggcgccgacgcgctgacggcgctccaggcgagggcgcacgcggcggcagcccagacgggcgtagacgcgccggcggtgctcccggcggcggcgaccgagtcgacggagatcgcggcctctacaggcggcgcggttctccctccccggatcggtaccatggtcgccgcatggcccaggccattgtcagggacatcggtcccggcggtgggtggcgtaccctcaccaagaccaactacgtcgagtgggccgcggtgatgagggtacgactccaggttcgccacatgtgggaagcagttcgttacgacgacgtcgactaccacgaggatcggcgggcgctggatgccctcattgctgcagtcccgcccgagatgcagttttcgctttcccagaagcggactgccaaggaggcctgggacgccatcgctgcgacccgcatcggcaacgatcgtgcccgcaagaccacaccgcaggcacttcgcaaggagtgggagaacctggccttcaagccaggtgaggatgttgatgactttgctctccgcctcaacactctgttgcagaagatggtgcagttcggcgacgacacctacgatgaggagagagctgttgagaagctcttccgttgcatccccgagaagtacaggcagattgctcgctcgatcgagtctctgctagacctctccacgatgacgatcgaagaggcgattggtcgcctcaaggtggtcgacggcgacgaaccacaggctctctctgggcctatcactatcagcgggaagctacatctcactcgggagcagtgggaggcctgccagggtgacaagaagaagggggagtcctcctcgacacgaggccgcaaacgcggcaagccgcgcaaggcgcgtggaggcgcccaggccggggcgcgaggacatgctgagggtggtgcccgtggaggtgcccaaggcggcatcgtcggcaacaagaagccggcacgagacgacggctgtcacaactgcggcaagcttggccactgggccagggattgtcggcagccacgacgtggccaggccaacgtcgcacaggcggaggcggaggaggaggccctgctcctggcacatgcaagcatcgagccatctccagcggcaccgggccacagcggcactcctccaccttgatgagtcgaaagcacgcgctttcctcggcgacggctccaacaaggacatgatcgaaggatggtgcctcgacaccggggccactcatcacatgaccggccgacgggagttcttcaccgagcttgactctagcgtccgaggctccgtcaagtttggggatgcctccggcgtagagatcaagggcgccggctcagtcgtcttcaccgccgcgtctggtgagcacaggctgctcaccggagtctactacatccccgcgttaaggaactctatcatcagcttgggacagctggatgagaacggttcgcgcgtggaggtcgagcacggagtcatgaggatctgggatccctctcgtcgccttcttgccaaggtacgcaggagtccaaatcggctatacatcctcaatgtgaaggtggcacaaccttgctgccttgctgctcgtcgagacgacggggcatggcagtggcacgagcgcttcgggcaccttaacttcgaggccctgaagcggctcagtgccaaggagatggtacgaggcctgccgtgccttgaccatgtggagcaattctgcgatgtctgcgtgttgacaaagcagagacgactcccctttccccagcagtcgagcttccgagccaaggagaggctcgagctcgtgcatggggacttgtgtggcccggtgacaccagccacaccaggaggacgacgctacttcttgctgctcgtcgacgatctctcccgctatatgtgggtgatgatccttggcagcaagggagaggctgcgaatagggatgaaaacggtcgggaacggtcggaaaaatacctcatatttaacttgcgggacgaaaacgaaaacgggatatatcggtaacgaaaacgaacgggataaatacaggaatcgaaaaacgataggatccggtcggttaaacgtcgaaatcggacggaaaccggtatttttgttcggtaaaatcacatcatgaaaccatatattcaaaacttaacaaaaaattctagtgcacgcatagacttacacccaatgcttatttgctcacatctctaaataaacataagacacattgctcatggagaggagtcacttgctacatcttcgttattctaaaaaaattctagtgcgtcttcatcctattaatgcacaaaaaaagtcagctagaaaattctagtgcggcaccttcattattgtcaacatcctattagtgcgtcttcatcaatttagaaaattctagtgctgcatcttcattattctcaacatcgtattaatgtgtcttcatccctggaggcctggacggtggaggctagcagcccctagaggtctggacggcggaggcctggtcacctggacggcggaggttgggtgccgtgttgcctgctggtgcagtggtgcagcgaggagccgtcgacagcagagcagactctgcacgacggagggcagagggagaggtcagagggagagggacggcggacttgggagagggatgtgctgccctgctgggacggcggagggccggtgggccggaccgccggaggctgggacctggtactgggagaggaatgtgctgccgacctgtcctgctgggcgacgggcgtttggactttggagagagggcggcggcgtgtggagagcaggagggacggcgtgtggaggactggaggctgccaggcactaggttagctggttagatttgggcttagatgggctgagcctagtgctcccgaattacaaaatacggtaacaaaacgggatcatcccgattaaaaacgggatcctggttaaacggtcgggaaaacagctctaccgtttccgtttccgtttaccgttttgtatatcccgttttcgttccattttcgttttttacatcgggttcgaaatcgatcgggacaaaaataacaaaatcggttatacgataacggtcggttcgggattttcccatcctactttcatccctagctgcgaacaccatcaggcgtgtgtaggtcgctgcggaggcggagtgcggccgcaagctgcgcttgctgcgcaccgacaacggcggcgaattcacggcgtctgagttcgcgtcgtactgcgcggatgagggcgttcagcgccactactccgcgccgtacagcccgcagcagaacgacgtcgtcgagcggcgcaaccagacggttgtggggatggctcgggctctcctcaagcagagaggaatgccagctgtcttctggggagaggcggtggtgacagcggtttacatcctcaaccgctcgcccaccaaggctctcaacgggatgacaccgtacgaggcttggcatgggcgcaagccggcggtctctcacctacgggtcttcggctgcctcgcgttcaccaaggagcttggccacatcagcaagctcgacgataggagcaccccggggggtgttcattggctacgcggagggctcgaaggcctaccgcatccttgacccaagaacacagcgtgtgcgcacggcgcgcgatgtagtgttcgacgaagggcgaggatgggcgtgggacaaggcggtggacgacgacacgactccgacgtacgacttcaccatcgagtacgtctactttgagggagctgggggagtagacaactcttctccgagcaggtctaccccagcccccaagtctccaccgactccagcgccaaactctccagctcctgctacaacgagctcttcaccaccacgcactccagccacgactccggctacagcaagctcttcgccaccacgtactccagcaccgacggtaccctctccgggaacgtcctctttgacaccagctcgtgtcgaggacgacccagtggagctcgtgacccctctgtcccgcgacgaggagcgcgtcgatgcgtgctacgacgacgagccgttgcggtatcgaagggtggagggccttctcatcgacccgtcggtgccaggccctgcatctcgcattctggcaggagagttgcatcttgcatgcgacgatggtgagcctcggtctttcgcggaggccgagaaacatgcggcttggcgtgccgcgatgcagtcggagatggacgcggttgagacgaaccgcacctgggagctcgctgatctccctcatggtcatcgcgcgatcacccttaaatgtgtgttcaaactgaagagggatgaagccggcgccatcgtcaagcacaaggctcgcttggtggcacgcggtttcctatagcaggaggggatcgacttcgacgatgctttcgcccccgtggcacggatggaatccgtgcgactcctccttgcgctgtcagcccagcatggctggcacgttcatcacatggatgtcaagtcggcgtttcttaacggcgacttaaaggaggaggtctacgtacaccagccgccaggttttgcgatccctggcaaggagggcaaggtgttgcgcctgcgcaaggctctctatggcctgcgacaggcaccgagggcgtggaatgccaagctggattccacgctcaaaggaatgggtttcacgccaagcccgcacgaggcggccatctatcggcggggcaatggaggaagtgccctgctggtgggtgtctacgtcgacgacttggtgatcaccggcgccaaggatgcagaggtggcagcgttcaaggaagagatgaaggccaccttccaaatgagtgacctggggcatctctccttctacctggggattgaggtgcaccagggagactccgggatcacacttcgccagaccgcctacgccaagcgcattgttgagctggctgggctcaccgactgcaacctagctctcactccgatggaggagaggctgaagctgagtcgcgacagcacgacagaggaggtggatgctacacagtatcggcgtcttgtggggagccttcgctacctcgtccacacacgacctgacttggcatactccgtcggctacgttagtcggttcttgcagcgaccgacgacggagcatgagcaggctgtgaagaggatcatccgctatgttgcggggacactcgaccacggtctctactacccgaggtgccctggggaggcacaccttgtcgggtacagcgacagcgaccacaccggtgacatcgacactagcaagagcacaagcgggatcctcttcttcctcgacaagtgcctaattagctggcagtcggtcaagcagcaggtggtggccatgtccagctgcgaggccgagtacatagcggcgtccactgcttcgactcaggcgctctggctggctcgactgctcggtgatctcctcgggagagacactggagcggtggaactcagggtggacagccagtccgctctggcattggccaagaaccccgtgttccatgaacggagcaagcacatccggctgagataccacttcatccgagactgcttggtagaagggagcatcaaggcgcgttacatcaacaccaatgatcagcttgcagacctactcaccaagccccttgggaagatcaagtttgttgagctttgctccaggtccgggatgacccaactttctcacaagacgacgcccaagacttagggggagagtgatggaataagtcttgagcatctagaggacaacaatcgcttttgactgtcctctgtagtcctttagcatctagaggacaacttgactgtcctctgtagtctctttagcatctagaggacaactgtcgctttttgactgtcctctatagtcgctttagcatctagaggacaacagtcgcttttgactgtcctctgtagtctctttagcatctagaggacaatcctgttgtgtagtgtgtgtgagaaggtgtggtagtgcagcctctagggctataaatatgggtctccaacccttagatgggtatggcattgtgtagtgtttgaggaaataaacagaaaattgccccaactcatagtgtcatcctcttgatgagagttagagtccctctacttacaaaaagatgatgcaccgtttcatcctcttgatcacaaagggggcattgaacaggatggtccaaacccctcttcgccaaacgatctgcagtccagcacctatctcgagtcgcgagccaaagaaagaacttgtttttggacaggaaacttcaatccgttccggggttagaggggtctgttttttaaaccaaagccatctaagctgcaaggcccaatccatataacaaagattcgggacacctaagcctccaaggcttatgtcacacccggttttaagggcaaaaccgaatgcgtaacatatgtgtgccaagatctttttccacacatatgttgacatcataagtgtaatatatcaaaagaacaatgcataaaagcgtaaataaagattatattaacatattatacttcaaacagacataatgtcttaacctttattattcatcaaagtatagcagaacatggacatccttccacaagaagatgatcgggggtatcactagactagcatccatcgagttcaccatcaaaatcttcatctgcaaatttctgatcaaaattaagcaagagtgagctcacttatgttcggggctcagcaagtggggtgaaaatgcaaggttaacaaggtaaggctaaagtttaatgcggttagcattttagttggtcaacattttattatcaacacctaattactaagtataagtatataccaaacccaattaagaataattcataatcaacataagctcaaaccacttgagcaagtaccataaacataaagctcaacctcttgagcgaacctcttaagcatatcgcttaaacaaaaccgatcacgatttatttccatcttcaagtttaattatcatttgagggtccaggctgctattaccgtgagcacgactgatatatcagttttacactctgcagaggtggtacaactttacccacaagccgtgtatccccctctagcctgggtcagccaaacccgtaaacacttccaaggtgaatggttagggatccactatgaggtaaggtttccaagtcggagtggaggccctcttggcgaggtagcttagccaagactaggtctccatgttaacgtgagctgccaacatcaaccgctccccctcttgcccatatttcaggtaaggttgctaggcactaagcatataaagctaatcaccaaagccagagccatgatagcactcgtggttgcactgttttcctgggtggtcactccatgttccaattatcacaatatgatcttgcttaatcatcagattaacaacaataatgtaaacttaccatttggaacattaatatcatcagtaggagtaccagcttaaagttaaagttgtagcaatagcataaggaataaggttggaaaggttaggtgtatctgaataggtaacccatcaaattatgcacatatccaaaagtaatctttattgaatgtattgtatgagatcagacagaatatgcaggggagaagtccacttgccttgcttatagaaaactcgagattcttccacgaaatagatattgattgtcaactactggatcaatctctaaacatcacacaaacaaacaagaagaaacaaacaccactcaataacatacaccatttaccatagacaaagctaaaagcaagtataacgaaaggatcatttgctttcaaaaacaccacaagcaatgattataacataaggatgctctttttgaaaaaggtttgatttatatttataaaacaagacctaagcttgaaaatatcttaattacaaatatacaaatattaggtttaccattttaatcttttataaaagacatgtgtgttatgtctaagattaagggttcataagacgataaaacacattataataatattaaacctttttaaccttttagaaaagatatatgttatatatctaagattgatgagctacgaaacacattattaatttttgaagcattatggaacatattctaaaacatttatttataaagaactttaagatataagcctaaccatggtttatgtgaaaatgtgactaaaccaaatattatctttatatttttattaagaaacatatggtctacatattttttttaaatttctatttaaggcggctgtacttaaagatctataatgaacattgttaaattatgaaaacatgatattcattgaaaaggccaatttaatacttcttgtataacaaccataattcaaattcaactatgaaagtacatgaactattgaaaacactaattaaaatgcttatcgcataattaatgaaactaacaaaaccatttataatttatttaggttccaatatacatgttattaacaaaaactgtaataaggatcaaaacataattaaaggtagactaggaggggtagttaatacatttacactttttttatatagatgtcattatacataactatttctctttttttattataaaaacaagagaactaatcaaaggctattttaatatggttaccacataaattatggagttaacaaacctttattattttttatttggatttgacacatattttataattgaaatcaagtcgcatgaatttatacggtattaaccatatacactagtggtagcatataaaatttacttgtgttctaccttccgacagacgatgagcagagcggggaaagagcagggaacgagcgattgcgggctcgttgggcaagctcgagcgcagcgatgacgaacggtgacgacgtcatggcttcgcgaataatgctccggtgagggaatttcacgaacagcagggcgtcgtggcaaggagtctccgacgagtagcgcgtgcagcaaggagcaacaacaccgattagagacacggtgcggcgaacccggaacagggcaagctaggcgcaggggcggatctcctggcggtgacgacgacgtacttagtaaggcgcgagtagcagcttcagctggcgagggacgggtcgacggcgcgaggtcctgacgatgtgcacagggctccggcgagctgcgaagatggctggcgacgaatggcgcctggtgctggtgggatcgagattgggcaagtaaccgacacgacgacacactccagagaggggactcgtagacgtagaaggcttcggcgaacttggcacagcggtaggagtcaacagcgtcagcggcgagaacagatgatgacgcagtgcatgcaggcagctcgagcgagagaaggaacgggcgagtagagacatgaagggccgagcaggggtgaggcgaggtgagaagtgtgggcggaggtctgctcttataggcgaggggagggaggagaaattaatcggcgttgatggccaacgttgatggccattaatattggcattcaacgaacaaaaaacggctgcgggaatgggaaacaggtgaggcgtagcgagatgagcgcgactgcgggcgcatcgtagcgtgggtggcagtgacgcagcgcggtgcgggcaggttggatgcgcgggcgcagaggagagtgatcaagggaacatgagaagagttcgacgtgtccataaatagcccagggagaaggaatggcgacctcggaaacgtctgcacgaaccaaatactattaatgaccgccatcgagcagacgtgaatgcgggagggaaaacgacgacgcggtcagtgaggagaggaaacggacaggtgcgggcataaggctgctctactcgcggctagggcagggaggcgtagaggtggccgcgcagagccaaaagggtacgacagcagacgtcccgacggcggctgcgctgtccttgcgtgcgggtgaggagccggaagacgaccagtgctgggaggggtgagtggggtccacatgccaggaatgagggagggaggcgcgtggcgtgatgggcttgcatgtgctggacgtgcgtgagcatgattttttttatttttttttagtttccatttccaaaatatacatacatacatacatacatacatacatatatattccaaaattaggataaactcaagtttattatgaacaaatcaaaatacatacttaccaaatttattattttaataattcattattatttgaacaaatgagattctcttcacaagattaattccaaaaattggattcaaaattcacatcaatcaaaacacatgtttcagaatgaatgcatcaaacacttgataaattttattgctaaaaaattacttatctttgtttatatgactatgttattatttgaaaacataaatgttttcctttccactgaaaattaataatataaactaagttatctttaattgatggatttagggtgtcacagcttaaaggcctagacaccttatcccaagccaccaaacaactacctccattgaccccctttctttctaaaggaatgcccttcagactctttgatcacccaattgggaacattcaaagcaattaacaggtataccgaaatggttgataaaacagatctaactagggttgttcatccagtaagattaagagtagccttctagctaggaagtctatcaacaattttctccacctagtccaagaggttcgatctccttagcttcaggtttgagatggggagcccaagatagaaagtcacaacccttttcatggatgtctagtgcctagcctagtggtcgtttggtttattccttaattgggcctttctttttttttgtttctggccaccttgaaatggtcggctcactttggacctggtactactgcttctacttaatataatgatgcgtagttctcttgcgcatttgagaaaaaattgagaactgttaggaggatgaaaccctaaccctaactaggttaactagggttgagctgctatattaatagatgaaatagtatataagtgggcctaagcctgttacagttaaggcacacacatgtctaacacccccgtagtcgcaactctaggcattacaaatgttgagattggatcaaaactccgagaacaccgtagacttgtagaggggagccccttggtgaagatgttggcgaactgcgaagtggtcggtacgtggaggacgcgtacatcgtcaatgacgacacgctcatggacaaagtggaggttgatctctacatgctgcacggggttggtggagaggtgtaccacgttgacattttttatcgaaaaaactgtgggggaggttcccataatgaaattttaatcaaaagagataaaaagatacttatagctaacaacttagcaatattcaccacgatctcccaccagaaaggagagagaaccgaaataaaaaagaaaagaaatgaagatccgataagcgagatctcaaaaataagattacatgttgtctagccatgatagaaaggtgggttgataaatttctctaaatcttggactttgtagacgagcttcttttttaaaacatagagcccagaggctgagggagtcttcattgctgtaaaaaatctttctgtttctcattttccatagctcccataaggtcaaaagaagtagaaatatactgcatgtctgcactaaccgttggtgaataaaaagcctaacatcgcatcggatattaagaagcctccaacatcgagttacgaagccgcaggtaaaaaaagatgatcaatgtcctcatcctcatcccgacacataacacaatgggaattatgttcttgcagcagatttttcctgagcaacataacgctggtattaagtctgttcatgagcagtagccaaccgaaaaacttgattatcattctacatttgcacttccaaaactttgagaataccctagaaacctgggaaagtgggaagtcttatgtttgattttgtagtatttcctgacaaagaactttgttataccattattcgaaatccaaatatccttttgggcatctagcaaccacaacacgagtggtaaggtctcgtatggtgagcccccagggaccgaactccacagaatagtggttgttagtggtgaagcaacgaatcaagagaaggttctagatgatgttgtatggtgagcccccagggaccgaactccatagaatagtggttgttagtggtgaagcaacgaatcgagagaaggttctagatgatgttggggggcaacaaggatgttgttgatatacaatggactaggaagaaccgtgtcacctactaactactaaggtaacaaacatagtcgacccattatcgataatgatggaagaagttaaagtggggataggggaatgaggtaaagaaacaatattgtggtcaggagtggtgtggtatgaggcgtcgaagtcagcaacccaattggtgggagtaggagtgggcggcgatgacattgggggaatgaggagagaggtaccagaggcacccccacagagcaaccgggaggggcgctggggcctcctatggcgagcatgatgacaccgaacatgggttgtgaagacaatcgcggaactgcgaaacactaacaacccagtagcgtggtggccctcttgagggtgggtggaggctggagggtggtgaagctcgatgtagtcatggaacacagggttcatgacccgatcaaagaccacaaaggtgcctcggagaagctggctgtcgtgaagggagacgcgcacacaatagggaggcatgtggattctggcatggcgaaggacgggcgtcaacagagcaggtgcgagagcggacatgtcgctgccaggaaagtgccctacgcgtgtgccggggtggggttagggaaaccgaagtttaacagtgctggggaaaccgttgggcacaacgggcgtcactgcggtcgcgaggagcagtggaggccgacaattgttggggagaggccaaccaccaagccgggcgtcgtgaagaagctggggagcatcgccgcaatcgaaggaggacatagggtgctgcgggtgccacgactgcagctaggataacgtttgaccgcaccggcgaagcagggagcaacgtcgcctgagaagaggtgagtgactgcgcgtgtggcgctgcaggcgtagggaaggaagcggacaccgaacaaacctgatgagggcgtcgcgaccgatgcagaggtataaaggaccgacgtggagctgctgatggccagagtggagatgtagggacttcccatgactagggaacaccgtcgagtgggtcagcgtggttgctggtggacggagtgtgggcgcaaggtgggaggcagcgtggtgagcgaggagatggatgtgggcttgctgtcatgaagagacgacggagaagacgacagtggccgtcgagaccaggggtcctgactaagggaggtggaaagaaggctggaagacgaggtaggcacggagcggtgtgaagggtccaggagccgcacgcgggatcgacaccaagacgcagagatgaggcatgagttcgacgaggaaggggatgaggaggcgtgtccgagccattgttgaagctggtggcgtcgatcgaggagttggtcgtcgtcggagaagagacctaggggagccgccgtaggcaggggatgaggtggcgcgcaggcgaagtagggcaggggaggagcgcgcacaactgtgcggtggtggagagatggcccccctgcgtagcagggggtcgtcggtcgcccgcgcagcaagggaggtgagaggcgtgcagagtgaaggggaggtagtggcagcgcgaccacaggtgtccgcgacggctggggaagggtccacgacggctgggagagtggaggcgcaagctgttcaggcatcagcggcggcggcagccgcaactatgtctggcagaagaggcttgccgacgggagggggtcgctggcggggagggtagaagaccggcagttaggggagggagaaggcaggaaagaggaggctctataccatgttggggagtgaaaccccaaactctaattgtgtaggggacatattatatgtctaggaatgtgggctaaggcccattacaatatacatgacacactaacactcaggtcttgggttcgactccctatggaagcgaatttcaggctgtggataaaaaaacctctagttgtcccacgccaaagcaaaggtctaaagcccggccccagtcgtggtcgttctcacatgggctacggtgccgttgtgtatgggtggggtaggggttcaggatttttctcgacttgtgtgagaatgtcttcttaatataataccatgggggcaatcttacccccacaggtcaagttgtttttatatgaggaattccaaaaaaaataaagtacaaaaaaactagagaccaatttcaacactttaagcaaatatttccatttatgctgacactctaagatttcttgtgaattgtgggtaaattttcagattaattgtctacgtgtgtaggttcttgggaaagcccttggaatacccgagaacag

SEQ ID NO: 601 - DNA, 13012 bp, Zea mays
  Intron number 1 from transcript GRMZM2G065388_T01 (locus G RMZM2G065388) derived from phytozome v7.0 (chr-ID 3; pos 7 2868595 to 72881606 reverse strand)
attggctgaaggtatgtatccgctgctaatatttttcttctacagttactagatgtgtcttagccaatattattaaattgactagtcaattctagctgccatggtaccaatcaggtgaatagtcgcgattaatggacggccaggtccactaatgaaccctggtcggtcatcctagtcatctttatagtcttcttgtacataccaggaagtataggggcttgggccaaaacacaagctagcccaggagttgatgtttgcctgtatagtcttccaaaacaaggtagtcggatgattaattgtgagtaattatcgattaatcagatgacccggtttctgattactctgatcgagtcggagtgcctaaccgagtgcagcagacttttttttcttgaacacgcaggagagctaagcatcattatattaagaaggaagcaaagttcaaggtccaaagatggaccaaatacaacacctccttatggaggcaagtaacaagcatacacaaaaggatccatttgaaagaaaaaaaatagttagacgacccctcccccattcactgaactatggccataaggcttcattgaaattcccttggttggtcgcaaatatacttggtcgaacgggcaaaataaccccaccttggtacatctggataggatgttctgctctacggattgggaggatctttttcctggttttttgcttcagagtgctgcttctcaagattcagatcattgccctcttcttctgggtttgcaggatgtcaatagagcaaaagggtgtttcttctttcaggctttctgggtcaagttggaaggttttcatgatactgtggctcaggcttggagtttggtggcgccaggcccctgtccttttgtcactctctccaggaagttgcaaggtactgctagagttttgcaaagttggagtgcgaaaacagtgggctgtttgaagatgcagcttgagatggctaggtgtagaagtgtgaattcctggtatattgataggagatggggtacatatatagggactcaaccctaaccctaatgggccggcagcccaacagtggtgccgacccacacactctcacacacacacagtctaacatccccccgcagtcgcaacgggggcaccacacacgatgagactggagtagaggccgaaggtaggagccgacgggttgaaatccccccgtagtcgcaacgtcgtgatagtgcgaatgttgcggctagagtagagaccggtgtgtgctctaagaagacgatagcccctagatgccgaggtagccgaagtcgaggtggtcgcggtcgaaagacgcgcagcaaaagcctgatcttcgggaggggtcgacgttcgagcgtcaacgatcggcagggcgacacagcaaaagggcaccgacaggccgaccttcctgcttcttcgatcgaccagacgtcaaggagccccgccagggaggccgacaatagcgcacgcggctgcgctggtcaaggtgtccgcgcccgcagcagaaaagaaggggaatgtcggatccggccgggaaggccacggcagcgacggatccggacgggcggagaacgcagcggagagggagcaggcggtggtgggcagaggcccagcgcagcggcgggcagtgacgagtagggcgcgcatgaaggcccgggagaggggagggccgcgcccacgaccaggaggcggacggggtgggggtgcggctggctggatggaggtggaagaaggctgggaggaaggaggccgccccccggagggaaggatgggcctcccgggggcagcgatgggaggcggtggctgggtggtggagagccgctggcggctgcagtgggaagggcggccgcgccgccagggtgctggtgaggggcggtcgcgacgccggtgacgaggggagtggctgctgccagccagggaggtggagctccggcggatgcgagcctagcgtcgagcaccaggggctgcggaaggacgcatgggcacttaggtctctggccgacgtccagaccagagaagaggcatcaggctccaagggaggcgttggggaggagcagaggacggtaggggacgaggtgcaggagctcggcatgaccagctgcgcgcgtgctggtcgcagcagcggcgacggcgtcgctggatgcggaactggtggggctgaggcgacggatcccgcggctgcgcctgtggcggcagcgccggcgaagggagggccggtcgcacggccgtgcgccagcggggaggggaggggcggagccggggaagggggacccggccgcggctggagatgtggccgccccccgggagggaaggatgagcctcccgggggcggtggcggctgctgtgggagagaacaaaaactaacctagtctgataccatgtagaagtgtgaattcccggtatattgataggagatggggtacatatatagggactcaaccctaaccctaatgggccggcagcccaacagtggtgccggtccacacactctcacacacacacagtctaacactagggaactccttcatatgtttgagatggctcaggagcttcaggttctgtctcctgcggaagactggttccggcgtgctttgatgaagcgcattcttgcgctctcctcatgggctagatcagtggcgcggcttcggtctggtgttacttggttgagagatggagacgccaacacctcactcttccatgctcaagcgagattcaggaagaagaagaattttattacttccctaacttccaccgagggtgaaatcttgacttcacacgatgacaaggcaacaaccctattcgacttctacgacagtttgcttggtattgctattcagagggatgcctctatcaatcttgataagatggggttgcaatcctttgatctcggaagcttgaatgtgcctttctcgaatgatgaagtttgggacacaattaaatcaatcccgtctgataaagccccggggacggatggtttcacgggtcgcttttataaatcttgttggtctattatcaagcttgatgtgatggtggcagtctcaccgtctcacgtgtttggaattgcaatttcagaaattttgggctgctcaattcagccctcattacccttttgccgaagattgagggtgcaacacttgtgaaggacttccgtccgatcagcctcatacatagcttcgccaagctggtaacaaagatgatggcaaataggctggctgggcacttgaatgcaatggtttcacctaatcagacgacttttatcaaaaaaaggttcattcttgacaacttcatattggtgcagcgaacggccaggtatctccatcaacaaagacaagttcgtatcctcttcaagttagacatatccaaggcttttgactcggtgtcatggccgtttctcattgaggttttgaggaagatggggtttgggcagatttggtgtgatgttgttagtgggttgttggctacttcctccacaagaatcttgctaaatggcgttcctggggagatcatttcgcaccaaaggggtctaaggcaagcgacccactctcccctaggttgttcattttggttatggatgttctgaacttgctcattcaaaaggcttccgatgaagggttacttcagcagctatcatctgggactttgcatcacaggctttctctctacgcggatgacgctgtggtttttcttaggccggtggcttcagacatcaatttggtcctggagatccttcggttttttggggaagcctcggggctcaagaccaatgtccagaaaagtagtgtgttccccatccgttgtatcgaagatgatttgatgcgggtccaagcttttctcccctgcaccatttcagatttcccgtgtcaaagcgggaagagctgtttatgttcaatttgttctcacaacaaaaatgatttatgctgcgatggcttttggacctccctaattggaccatcaaagctattgacaagataagaagaggtttcctttggaaaggaagaaaacaagccaatggtggtcactgtttagtggcgtggggtaaggttactaggcctaaagatctaggcgggctcgggatcactgatcttcggcttttgagcgtgtcgcttcgagctaggtggccttggctcaaagaaccgatcactctaagccttggtcggtcctccctgttcaggcctgtggagcggtggaagccttgatcaatgtggcagttgtgtctcaattgggtgatgggcatgacatccttttttggaaggatcggtggctgaatggtagatgcatcggcgagatggcacctgaggtccttgagcatgtccctaagcgtgtcgcttccaaaaggctggtaaaagatgctctaacaaatctgaattgggtggctgatataaggggtgcgctttcagttagggcgcttgcacaggttttggatatctgtgacttgctggagggcttagttcttcatcctaggattcctgataagcatatttggaggttaagcgcgtcgggggattactcctctagttctgcctaccaggttctactccttggagctgttgtgtttgggccggctgaacggatttggaagacttgggcaccagggaaatgcaaattttttatgtggctggttgagcaggatagatgttggacagctgacaggttggctaagaggggaatggatcatcccgactgctgtccgctttgtgaccaggctgatgagactattaatcacttattggtcgagtgcagctttgcgaagcagttttggttccttttccttcggtcaggggacttccaggtgctctgtccctctacaggtgatgactgctttgactcttggtgggagaagagcgccgaggtggtgggcaagcctttgtcggatggtttcaattcgctggtcatattgggtgcgtggtcgatctggaaacacaggaataggtgtgtatttgatggttgtagcccgagtgtttaggtcgccctttcggcagctagggaggagatgatgtgctggcgtttggctggtgctaaaactctctctttcttccatctagaggagttgtcttaggtgtgtgagtctgtaaatggtggtgtgcgtctgtaaaactgctgcttgtgttctggggctcaacccctttttcttcttaatataaaaatacgcagacctcctgcgtattcaagaaaaaaaaggcttgaaaacctgcagccccagccaagccccaaagtttagcatcatctttgatatcttcaatatttctagagatgcttggagatgtcccataaaaaacacaagtctttctatgcctccaaagcctccaagccactaacagcacaacagaattgaagcctttcctttggagtttaggaacagccatttcagaactactccaaccctgaaaatgagcagcatcccttcctggagaaaattgctgcagcccaatgaaagaaagaatatgatgccatacttcccgagcaaagacacactgcaaaagtgtatagaaaattgtttcttccttttgatcacacaggagatatttttcaggatggtccaatcctcggcgagccaatcggtcagctgtccaacaacggtttagggaagcaagccacataaagaatttacattttggaggcacccagtttctccaaatcctttctgctggttgaaacaagacggctgaaccaaagaagcaatcataggcagttttgaggaatactccgcagaggcagagggcgtccaacggtgctgatcgggaattccattctgaagctggtatccctgcagcacatcccaaacaatgaaaaattccagcagcacctgggtggataaatgtcccgagatatctcttacccatctattacgatccagagcttctttcactgttctgttcagaagaaattttttggcacctgagaggtaaagggctggttctaaataactgaggacctgaccatggagccaacgatcagtccagaaacaagtttgggtgccatctccaactaaagaaactatcgaacaagaaaacatggcagcagcattagagttgattttaatatccaagtcactccaaattcgatccggccgtgttttttttcaactaaagccatctcatgttcagggcccacccgagaatctcaagattatgaattcctagcccccctaaatccggtgatctgcacactctttcccatctgaccaaacaatgacctcctttgatatccttgtgacccttccaaagaaatcttctaatcttgtcaatggccttgataacccacttggggcatcggagagcaattaggtggtgaactgggacagcagtcaggactaatttcaccaaaattgtcctactagccggttgcaaacaagctgctttccaaccgggtaacttatctgctatcttatcaatgagaccaagaaaatcattcttggaaagcctgcgcacagaaagaggaagccccagatatttgcaaggaaggactccagtttgcaaggaaccaaggtttgtgccatattaatgtgctggtcgctgcattggataggtgtcatagagcacttgctaatatttgttaccagactggaagcttttccgaagatccttaggatttctttggtcagacataattcctcttccttcggctgcagaaataaaatcacatcatccgcatagagggaaatgcgctgaccattttccctccgcaagagaggttgtagcagcccctgttcacatgcacttgagatcaaagaattcagaacgtttatgaccaaaaaataaaaagcctaggagacagggggtcttcctgcctcagaccacgccagtggtagatgatatctccaggttcacctgttgtggactcattcttctacaggaacatttatgggtgcagatacaagaagggaacctccaccaataaggcacctgagctagaagagctggaagaataggaaaggaagcaggcaatcaggcagccaaattggaagcaagggaagaggatcaggtgagtcctatctccagtatatcaatcagtagttgattgggtgtgttccctgccgtctatactataaaggttggctgctagtttgtaagtgggcatcgaagaataatacagttacctcctagaggtgggctattcttcgacggtggcgccttcagccatcggcgacgacagacctcctcgctacgttctgctttcttgttctcaagccactctcctccactctcccctgtattcccctcgttgaccaccatgcagcagccacaacaaattggtatcagaggacaagttccccgaccatgtccagcgtcacgggtaatcctgagcctgattcggtgaagatggaccgcatcatcgcgcagctcacaaccatgaacaaccgcctgaacgcacatgaccagcgcatcgtgcgcacggagaagtttcactccggtgatgaagaggaccacgagccacagggttcgcctgatcgtcgacgacacggaggcacagaggaaggcatcttcagtgggggccgcgggaatggccctcgacgtcatgaccgcatcggcccacgcgagcccaacctcaacttcccgcactacgatgatgagttggacccgcttccatggttgaacaagtgtgaaggctatttccgcggctacctcacgttgttggaggataaggtgtggatggtacgacgacgcaatggtactaccagttgcagcgtgatctcggcatcatcacttagtcgcgctttgtcgaatgcaccaacatgcgcttcagcccgcccatccgcaccaacgcacttggggagttgaaggagctccactgcactgacacggtggaggagtaccagagccagttcttggccctcctgtgccgacgcgacaacctaacctggcaggaccaaatctacttgttcactgtagggatgggtctgctcttgtcatccgacgtcgagatgcaacatccggcgaaccttcagatggccatgagtctggctagggcctttgagcaccattccgctgaggcggctcacgccgtctactcgtccacgccgcgccagccttcccgtcctcgtccaccgtcaacgacaccagcactgacaacggaggaaccacaacgaccccgcgttcgtcggctgtcgactgaggaaatcgccgacaaacgtgccaagggagaatgttatttttgcccagagaaattctcccggttcacaagtgtgcggcgcggggcggcgttttctgcctgtccttggacgacgctgcgccagaggacgaagacatcacggaggaagtctgcatatcgctgaacgcgttgacgagggtccctgctggtcataacatccatcttcgcgtcaagatccaaggggaagagctgaaggcgctcgtggactccggctccacccactccatcaactagggcgtcacccatcgattcagcctcgacatcacccatcgcccaggtctggtagtcactgttgctaatggacgacagctacacagttctggcatctgtgcagcaacgacattggccatccaggaccagacgttctccatcgactgctacacgttagctctcgagggcttcgacgtccattggctcaagacgctgggacccattacatgggacttcatggcgcgatccatggctttctggcaccatgatcgtgccgtcatgtggcatgggatcggtggtgatgaagttagccttgctgctatgacggcgaccagggacctcatgaattcaatactgcaagattatactgacctgtttgcagaaccgcgtggactgtcgcctgcgcgacgccatgaccatcacattcatttgctgccgggtatggctccaattgcagtccgacagtaccgatacccgcaacttttgaaagatgagattgaatgccaatgtcaggaaatgttggcacatgggattattcgggaaaccacatcccctttctcctcccctgttctcctggtgaagaagcatgatggtacttggcgattttgtatggatttccgggccttaaatgactagacggtcaagaacaaatttcttattccagtggtcgacgagctccttgatgagttgtcgggcgcttgtttcttaatcaagattgacctctgcagcgggtaccaccatgttcggatgcttctagaggacatcgcgaagaccgcgtttcgcatgcatcatagccattttgagttcctcgtcatgcctttcggcttgacgaacgcgccagcaacatttcaagctctcatgaatgacatcatcaagccatttcttcgctggtttgttctagtcttttttgatgatactcatctatagttcttcttgggagacacatgtgcagtaggtcaggatggtttttcagttgttacgcgccaactgcctcttcctcaagcactctaaatgtttcttcagtgaaccaatggtggcctacctgggccatattatctccaaggatggcgtggccatggacccatccaaagtggtggttgtggaggcatggccacaaccacggactgcacgggcgctgcgggattttcttggcctcacagggtactaccgcaagtttattgtggggtacagtgcggtggtcgaacccttaactactatcctcaagggggcggcttctcctggacttcccaagcggcattggcctttcaagccctgaagaaggcgctggtgcctgctccactgctccgactaccagacttctccaagcgcttctacatcgactgcgatgctttgggcttcggctttggcacagtgctgcattagggagagggcgtcgtgcttacttcagtcgtgcggtggctcctcaccacaccaagttgctcgcatatgaaagggagctaatcggcttagtcaaagtcgttcgcaattggagcccatacttgtgggtaaggtcattcacagtccgcattgatcatcgcagcttgaagtgtctttgataaaatctctccttgtgtggcaacgatcatcagaagggcaggggaagagcgggagctctgggagatggcaggggctaggagtattactcttctatgcctctcttaggattgtaatcagctcccttgtcatgatctgtcagccttagatgcaccattcactgagaaggaggtatgggacacaattttacaccttccttcggacaaggctcctgggccggatgggttcacaggcaaattctatagagtctgctcggagattattaaggctgatgttatggctgttttctcggcggttgggagcagaaggttcgctaattttcagatccttaacactgcttatatcacccatatcccaaagtttgagggggccgatcaagttaaaaatttcagacctatcagtctagttcatagtgttgcaaaattgctcactaaactcctcgctaatcggttggctggaagacttcatgatatggtttctcctaaccaaagtgcttttattaaaggccgcttcattcaggataattttatgttggtgcagcaaaccacccgctatctccatcaacaaaagcaacctaggatgcttctaaagcttgatatctcaaaggcctttgattcagtctcatggcccttcctcttggaagtcttgcaacatttgggctttggacaggtctggagagacattattagtggattgccatggacttcctcatctcaggtgttacttaatgggttacctggacaacctattcttcatcgtcgcggtctccgacagggggatcctctatctccttttctgttcatcttggtcatggatactctaggcttcctgattaataaggccgcacaggatggaatgctgcagccccttgctcctcgggcactgcaacaccgggtttctctctatgcggatgatgtggtgatctttcttcggccggcagccttgaatatcaacgttattttggattgtcttcagctgtttggagatgcttcaggtttacgtacgaatgttcagaaaagcagcgtgtatcctattagatgtggagatcaggaccttgctttgctgcagaatatgttgtcttgtgagttagctgaattcccttgccgctatctgggtttaccgcttgccattaaaaagctttcaaaactccaagtacaacccatcattgataagattgcaaatcaactatctggatggaaggctgagttattgactaaagctggtcgtaaggtgcacgtccagcatgtccgcacagggatggtgatctacttggccatggctgttgaccttgcttgggcccttaaagccattgataagattcgtcgaggttttctgtggcgaggccgaaaagatgtaaaaggtggtcactgtcatgtggcttggggaattgtttgcaggcctcgcgaattgggtggtctaggcatttccagcatgaaagaacttgcatggtctcttagaatgcgatggctttggctggctaaaactgagccatctcgcctgtgggcctctcttgctatccaggtccctaaaaaggtcaaagatttcttctccatggctatgcaaactgagcttggtaatggggctacaacctttttctggactgataggtggttatcgggtcacagaattgcagagttagtccctcgattatttgggatcattcctaagagacgggttagcaagagaacagtggtggatgctatctctaatcagagctggatttctgacattcaaggagctctttttgttggaattatcaatgaatttctcattttgtgggatttaattgactcaattgttttaagacctcaagttgaagacaaacatttcttccgtctagctgcaaacggaaagttctcctcaagggaagcatataggggtttctttttgggatcttctgagtttgaaccttttcatagaatatggaaaacttgggctcttccaaaaaccaagtttttcatgtggttggtcgcacacaggaaggtttggacagcagacaggctgcagaaaagaggtatggaccatccagagagatgtccactatgtgaccaggatcaagaaaccttggaccatatgttgatcggatgtgtctttgctcgagaattctggtttaaattgcttcttcaagtgaacctgcagtttcttgccccccaatctgaggatagtgcttttcttgaatggtggagaacgttatgtaccaaagtctctggaattgcaagggacggcctcaattctctagtcattctgggagtttggaccttgtggaagcaacacaatggctgtgtttttgacaataagagccccagtattgctgatgctattagaagagttgagttggaggttcacctatgggagatggctggtgcaaagaagttatctttgctcaccgcccccattccgggcatccctgctagttagctagcattgtggtaacttgtgttagtttcttatttagtcatggatgggtttctgtatgcctgttactagccgccataggcgcctcagttgttttttctgtaactgtccttcttctttaatataatatcgcgcagttctcctgcgaaaaaaaaataatcagctcactagtctttgcatggttgttgtagtttagtttctcttgtggaccctttcttgtattttcatttttgtcaccgcgaggaggcctttttcctttcctctttctttctttctttttttcttttgtttcgttttatgttggacccctttttcttaatataatgatgcacaactcttctgcgcgatcgagaaaaaaagatcgttccaacttgtttgttcacgtatgtggaaaggcatatttgccatctgtgagcctatgggtatgtgagtttaatcaggattctttaccctttgtattataatgatacaccactctcttgcatgttcatgaaaaaaatatttgaggaaaaaattgatgacatgtaataaggtatctgtatttaatcactagctgcaattacgtttgctttttgttatcgtagtcaatgtatttatttatttgtcctttacagtattgttctcaattctgcataaaatgctacaacatgatacttttactgatctggacagttggaggacatat

SEQ ID NO: 602 - DNA, 7433 bp, Zea mays
  Intron number 1 from transcript GRMZM2G146741_T01 (locus G RMZM2G146741) derived from phytozome v7.0 (chr-ID 4; pos 5 5617678 to 55625110 reverse strand)
ccgcagcgagctctacccgatctgctgcgcctgcgcgccatcgacctactcgattgttggggacttgttctcaagtgctaagaattaagaacaagacaacatagaaaatgttaatcgttaatatccttcgtcctccgaagtattatttctcttaggatataatgacttgcggacgaaggtcatgaaggacataccttcataggctcgtcaaataatgacgaaggttgaaatataaagaatgtaaaagaaaacatgaacaatcatttattattattgagcataaacaaaaatattattgaactacaagtgtaccttcaatcggaaggaaatgacggtacaagcgtgacgcaaaaagcgaatgacaagtcagcgtgaacagtacggggatactgttcacctatttatagacacgggacacagcccttacaaaattacattcatgccctttacatttgataataactctatagtagtctattgaggtctgaatagccttttcatctttaagtcggttccactctttgctgtcgcgccgaagctttcctgctcgcaccttcggctctgagtcaaccttcgtattattccggtccactgcaatgccgactttagtccgaggatacctgtttacacattgtactgcaggaatactgttaaatcctgtttttgaggaccttcagacgccgaaggtccccaacagtagcccctcgcaatattaatttgttcgaaataataaatttagattgcgatatggacgaaggctttacgccgaaggtccgaaaaaacaccttccctttgctagaatagcaacattcaatgacaagtggggtctttcagctttcaacgcaccgagcgtataaatacggccataccgcaaactcattttgcacgctttctggccaaccactctcgctcactcaatttttagctcttgtgcactgtgatttgctaagcttttagctttgaagcttcggctttgaaaacagttttttagtgtttccgaagatgtctgaagctgctaagaaagctgctgctgagatgaagctgagtcttgatgaagagaagaacttagggtttcttatagagatgtcgaagaccaacacagagaaaatcaccaaggagattctggaagggctgtctgaagatactggtgacagtgaaagttatgatgtggacagcggtggcgaagactccgaagatcgcccctggcgaccaagccattcagtttatggtaaatcaactatcaaagagaatcatcttgttaacatgagaggaaggtatttccgggatttgtccgttgtgagggccgatgaaggggagaagacttgtccacaccccgaagagaatgaagtcgtagtgttccgaagctttttgaaggctgggctgcgattgcccttgagcagcttcgtcgtggaggtgctgaagatctttgaagtctatcttcaccaacttacccccgaggcaatcataaggctgaatatcttcgtgtgggccgtgcgaagccaaggtctgaagcctgatgcaaaaagtttctgcaatatgcacgaattatcatacgagacaataccttggggtaaggaacagtatcacaataactttggctgctacaattttgtttctcggtctgggtcaagctgccccgtgccaacttttcggaaaagatggcccagcggctggatgacagaatggttctatgtaaaaaatgatctgaatgcacgagaagacatcaagggtataattatgcgccctatttggcaaagcttcggccttcgcaggccgaaggttgaaatgaatgaagctgccgaagaatgccagagggccttcagaattgtctgttcttttataggaacaagagacttagtacaagagcatatcgccttcagggtgtggccgcttgcggagaaatgggaaatgccacaagaaaccattaaagaggccgacgaaggtggacttatcaggtttaagtacacttttaagttcggagataaatttattgagccagatgatgagtggttgaaaagcattgacaatttaagtgatgagctgcttgggacctactcgaaggccgaagatactgcaatgtcagcagccttcggaggccgaaaaaagaagaggctgaatcgggtatttgatgccatcgggtttgtctaccctgactattgctatcccacccgaagacagatgagaaaaaacacaacctctacaaaggaagaaactgcagctgctcctagcgagccagaaccgaaaaggaagaaaataaaggttctaacgcatcggccgcgctatattgaaccagcttcggtgcctaagtttaccggagaaacttcttcggccaccgaagctgaaaaaccagccgagccaactttgctgccagaagttgcagaaacggccgaagtgccaacaaagacagaattggagcaatcaaagattttggcaccagaaacaaaagagaaggccgaagcgccatttacagaaaaaatggaagagataaaggaaacatctgagggctccaaaacatcagaagtgccagccgtaactccgaagagaaagagaatggctaatgtgctagatgtactagaaacgatcatatcttcgagcacacctccgaagaaggctgttgttactactgaaacaacagctgaaatttctggttctatagctccagagcaagaaattgaagccgaagctgggccctcagagcccgcaaaggcaaaaaccttggaaagtgaggcagaaaaaataacaaagccaacttttgttgaagaaactggtgttgttacccccgaagcatcccccaaaattcgtgattatatttttcgtcatgcttcggggaaaaaattatcagaaaaagaagaacaagaggcccagcactacgcccaaaagttgaaatatccaaagggggcgttgatatttaatggcagtggagaagaagatttcttgtattgtctccccgacagcaaggaaatttctgtctgtcgggagatgagcagaagcttcggattcccaactttagaagacggactttcggtgctgtcaaagaacgatctggctgacagcctagcttacaacagtttaaaggtgcgacaaatggaattcttgtattttttgttgagttcaaaatttttcgtttgtttaaaactattgacacagacatattcctgtttgcagggcctgatactcagcaatgccctcagggcacagaaagatgctgaagacgaaagggtgtactatggccctgagcaaccttcgttccgaagtaattgaactgaggaacgaaggtctcgaaaaagacaaaatattatactcattgataaataaaataaaagaggacgaagctgcttttaaaagtcaagctgaagctcagaaacgcgagattgaagaccttcggaaacaactggccagagccaaggaagaacgcatacttgaagaaacaaagcgtgaactcagcgatcaatgggcagatcacctagaagtgactgttgaagagcttcgttcgtccaaaaagagatgctacaataaatctatagattgtgtcaagaaattaaaggctagcttcgccaaggtcggcacattctcaagtgaggaaaacttttcaagaggcaatcccgaaggtgtcatcgaatggattaaccacgaagccgaagccttcgaagaaattttaaatagccgaggggatatatgtgccttctctggcgccagagggattgccactatcttagagaagaagggctgcgaacatgtaaaaattctagcacagtccgaagccgccttgtcctttgaagatacaagagatccatcggccgaagctagcataattggtggaaagttttttaccgatatctgggataatagtggccgagaaatggccagagaaattattcgaagaagtgaaaagggcattcacgatgctagagaagtagctgaggctgctgacaagagcgcagaagccgaaggtcaattaggtactaaataatagtttttatcgtgttgtaatctttaggcttttaagatctgtttgcgatttgtaatagcaatgtagtggtgtcctgcttcagatccgactaaagcgctttcggaccctcagccgaagggggacgacgaaattaaaaagatggtcgaagatattatggacgaagtcgtcaaccggctcctgaatgaggctgcagaagtcgttttgaaagaggattaaacatttttgtaaaaaacttctgaaatgtaatataatgtatcattttgtaaccccgaatgtaatatatctatttttgttactcaattctttacgatgcatgaaactttacacacgtaccgtttttgagtctttggcgaaaaaacactttcccttcttttcatgcttcgtgaagaaaaattaccatttatcacaacaatatccgaagtatcctgaaagagtgttgaagcttcgtagaaacatgcttcaaggctatacttcagaaatcaatattgttgctccttgtgatttggcatgatttgcccctttttcaaagcgttttcccgaagattgatatcatatttctttcttatgctacatgcagtatgatgtatgatgcttatgttatgcaaagatgatgtgatgatgttatgctatgtaaggtgatattccgaaggtacacgcatatctgcgcgataaaacacataatctttttcgctataagcctcccttaggagcttcttcgccttttacttcagcggaatcagcgttgacttttcgctgtaagctctgcattcccttaggaacgtctttggagcttcttcgccttttacttaggcggtatcagcgttgacttttcgctgtatgctctgcattcctttttggaacgactttggagcagaaaacttacactgcgctcccttcggagcggctttctgtgactttgtcaaacttactctgcgttcgttagaacgactttttgttgcttcgaagaatttttgatagttcgaaggtccttcttattatcacaagtttttgaatttcgatcaatttaagcctatggagaaaacaatcatattttttgtaggaattaacgaaactaattatacgaagcctaaacaatgtcctttattacagaaaataaaactgaatgaaaaagatgctagtaaggtaggaaatattgtcgaatggtgtgcttgacgctacgcgatgctaagactgtacgagcttcggactgctctctgaagtccctctggtttggagtatactggctcccttctggctgctggccttgttgcaacggaggtggaggcggaggctgttgccaggaagcttgaggctgactcgccgaagcaacagaaactgcaggatgattacccacatattctgggatgtagggcgaatgatacgaagctgtatgcatgacctgcttcggctgagcctgttgtgctgctgcttcagctatttccttttgcttctgaatagtaacgtggcacatcctggtagtattgcctttgttctcaccgcagaataagcaaaagattcttctcggttggtcgccaaatcttcctccgaagcccctggcgcctctgcctcttggagctggaggtcggaaggaactttgctgttgaccagaagcctgtgaggagcattgtggcctttgctgttggcttcctctgtcatcattttgtgtagaattgtgaattgatctcacatgcctcgggtaaaacctccctccgaagcccctggtcatttcagaaaacctgaaagcctcctcccttctttggcgaaaatcattgtcggcccgaatgtattcatccattttctggagaagcttctccaaagtttgaggaggcttcctggcgaagtactgagctgacggacctggccgaagccccttgatcatggcctcgatgacaatttcattgggcaccgttggtgcctgtgcccttaaacgcaagaaccttcggacatatgcctaaaggtattcttcgtgatcttgagtgcactgaaacagagcctgagcagtgaccggcttcgtctgaaatccttgaaagctggttaacaacaaatccttcagcttctgccatgaagtgatcgttcctggtcgaagggaggaataccaggtttgagcaacacttctgacagccataacgaaagatttggccatgaccgaagcattgccaccatacgaagacactgttgcttcgtagctcatcaaaaactgcttcggatctgagtggccatcaaatacgggaagctgaggcggcttgtaggacggaggccaaggtgtagcctgcagctcagcggacaggggagaagcatcatcaaaaacaaaattcccatgatggaaattgtcataccagtcatcttcgttgggaaagccctcctgatgaaggtcttgatgctgaggccttcggtgttgctcatcctgagcaagatgacgaacttcttcagaggcttcgtctatctgcctctgcagttcagctagcctggccatcttctccttcttgcgttgaacctgctgctgaaggatttccagattttgaatctcctgatctagatcatcctccggaggtgttggactggtagccttcctcttctggcttcgtgcctctctaagagaaaggacgtcttgattggggtccagcggctgcagcgtgccagcccctggtgctgaagccttcttcggcggcatgacgaaggtgatgcttgccgaaggtgttgaaaagctcaagaaatggaagtgagttcaccggaggtgggcgccaatgttggggacttgttctcaagtgctaagaattaagaacaaggcaacatagaaaatgttaatcgttaatatccttcgtcccccgaagtattatttctcttaggatataatgacttgcggacgaaggtcatgaaggacataccttcataggctcgtcaaataatgacgaaggttgaaatataaagaatgtaaaagaaaacatgaacaatcatttattattattgagcataaacaaaaatattattgaactacaagtgtaccttcaatcggaaggaaatgacggtacaagcgtgacgcaaaaagcgaatgccaagtcagcgtgaacagtacggggatactgttcacctatttatagacacgggacacagcccttacaaaattacattcatgccctttacatttgataataactctatagtagtctattgaggtctgaatagccttttcatctttaagtcggttccactctttgctgttgcgccgaagctttcctgctcgcaccttcggctctgagtcaaccttcgtattattccggtccactgcaatgccgactttagtccgaggatacctgtttacacattgtactgcaggaatactgttaaatcctgtttttgaggaccttcggacgccgaaggtccccaacatcgatggaatgccgcagcgagctctacccgatctgctgcgcctgcgcgccgtcgtcgaaatccccgcaaccgtgtt

SEQ ID NO: 603 - DNA, 20163 bp, Zea mays
  Intron number 7 from transcript GRMZM2G141185_T01 (locus G RMZM2G141185) derived from phytozome v7.0 (chr-ID 3; pos 1 75353086 to 175373248)
tgttttctactattggttcatactgttattttcaggtaagctacttttctatgagttatttcttccttagtcaccctgagaagtcgaatattgatccactctattaaatattgatttaaaaactcgacttgcacgtgcattgtattaagaataccttctcacacatgtcgagaaaactcccgctccacccatacatagcggcattatggtccatgtgagaactgttgaagtgtataagtagattggctaccttctttcatcagcttaagcttttgagttgaactggttaatgtgttcactctaacatggtatcaaagccagaggtctcaagttcaaatcctgtcagaggctttatttgtgcctccactcatttatttacatgtttgtgtctttctctctagctgcacatgagtgggggtgttgaagtgtataagtggattgtctaccttctctcatcggtttaagcttttgggttgaactggttagtgcgtccactctaacaagaacgaccacgatcggggccgaaccttagacctgtgctttagcgtgggacaaatgaggagatttttttaaccctagcctcccccactaagagtcaaactcaggacctgagaagtgctattcataccacctaaccaactcagctagaggtcctttcgcttaaatattgatttaagacaatcatgcacttgctttgttagtcattcttgttaggttgttatgtgacgggtctagagcccggcccaagaggctcatttgggttaggatatgtaacctatgttctgcattgcatacaatcacaatctctcctttcatggtatcctgagcctcttcttggagccttgtaaccgctgacgccaccatggtcggcatgcttccctcctccattgtcgtcgcctccccatcccctcttctgttggcacactgctaagggccgctatcgtgggagtcgtgggtgtgcgcacacgggtttaggcacagtcgtcgccgcgagcataggtgtgtgcgagcggggctgaggtgcacgctgctgctcccatgggcacagatgtcgtcgaggcgtgcgtcgccgctatcgaagacgacaccctagccagtcccgtcgcgaatgcgggcacagctggcctaggcgcaacttctttccccgtactcccgttgtatctcccttcttccgttcttctctggtgcgatggtgcccttcccagtgccgctgtgggccactatcccctcgacgatgttgttgctgctagtgtcgccgccaagtttgtcgttgccattgcttgggagcatgagcgggctacttctctcgctttggagcaagagtgtgccaccaccgatgttcttgctcaccagcttgcggaggccgatcaaaagcttgagggtgttgtggtctctgactccttccccgaatttaatgatattgaggttttctatgtaagtagagggactctaactctcatcaagaggatgacactatgagttggggtaatttttctgtttattttctcaaacactacacaatgccatacccttagaggggttggggacacatatttatagccctaggggctgcactaccacaccttctcacacacactacacaacaggattgtcctctagatgctaaagagactacagaggacagtcaaaagcgactattgtcctctagatgctaaagggcctacagaggacagtcaaaaagcgtctgctgtcctctagatgctaaagagactacagaggacagtcaagctgtcctctagatgctaaaggactacaaaggacagtcaaaagcaggctgtcctctagatgctcaagacttattccatcattctccccctaagtcttgggcgtcgtcttgtgagaaagttgggtcatcccggacctggagcaaagctcaacaaacttgattttttccaaggggcttggtgagcaggtctgcaagctgatccttggtgttgatgtagcgcgccttgatgctcccttctgccaagcaatcttggatgaagtggtatctcagccggatgtgcttgctccgttcatggaacacggggttcttggccaatgccagagcggactgactgtccaccctgagttccaccgctccagtgtctctcccgaggagatcaccgagcagtcgagccagccagagagcctgagtcgaagcagtggacgccgctatgtactcggcctcgcagctggacatggccaccacctgctgcttgaccgactgccagctaatgaggcacttgccgaggaagaagaggatcccgcttgtgctcttgctagtgtcgatgtcgccggcgtggtcgctgtcgctgtacccgacaaggtgtgcctccccagggcacctcgggtagtagagaccgtggtcgagagtccccgcaacatagcggatgatcctcttcacagcctgctcatgctctgttgtcggtcgctgcaagaaccgactaacgtagccgacggagtatgccaagtcaggccgtgtgtggacgaggtagcgaaggctccccacaagacgccggtactgagtagcatccacctcctctgtcgtgctgtcgcgactcagcttcagcctctcctccatcggagtgggagctgggttgcagtcggtgagcccagccagctcaacaatgcgcttggcgtaggcggtctggcgaagtgtgatcccggagtctccctggtgcacctcaatccccaggtagaaggagagatgccccaggtcactcatttggaaggtggccttcatctcttccttgaacgctgccacctctacatccttggcgccggtgatcaccaagtcgtcgacgtagacacccaccagcagggcacttcctccattgccccgccgatagatggccgcctcgtgcgggcttggcgtgaaacccattcctttgagcgtggaatccagcttggcattccacgccctcggtgcctgtcgcaggccatagagagccttgcgtaggcgcaacaccttgccctccttgccagggatcgcaaaacctggcggctggtgtacatagacctcctcctttaagtcgccgttaagaaacgccgacttgacatccatgtgatgaacatgccagcccttcagggctgccagcgcaaggagtcgcacgaattccatccgtgctacaggggcgaaggcatcgtcgaagtcgatcccctcctgttgcaagaaaccgcgtgccaccaagcgagccttatgcttgacgatggcgccggcttcatccctcttcagtttgaacacccacttaagggtgatcgcgcgatgaccatgagggagatcagcgagctcccaagtgcggttcgtctcaaccgcgtccatctctgactgcatcgcggcacgccaagccgcatgtttctcggcctccgcgaaagaccgaggctcaccatcgtcgcatgcaagatgcaactctcctgccagaatgcgagatgcagggcctggcaccgacgggtcgatgagaaggccctccacccttcgataccgcaacggctcaccgtcgtagcacgcgtcgacgcgctcctcgtcgcgggacagaggggtcacgagctccaccgggtcgtgctcgacacgagctggtgtcagagaggacgttcccggagagggtaccgtcggtgctggagtacgtggtggcgaagagctcgctgtagccggagtcgtggctggagtgcgtggtggtgaagagctcggtgtagcaggagctggagagtgtggcgctggagtcggtggagacttgggggctggggtagacctactcggagaagagttgcctactcccccagctccctcaaagtggacgtactcgatggtgaagtcgtacgtcggagtcgtgctgtcgtccaccgccttgtcccacgcccatcctcgcccttcgtcgaacactacgtcgcgcgccgtgcgcacacgctgtgttcttgggtcaaggatgcggtaggccttcgagccctccgcgtagccaatgaacacccctggggtgctcctatcgtcgagcttgctgatgtggccaagctctttggtgaacgcgaggcagccgaagacccgtaggtgagagaccgccggcttgcgcccatgccaagcctcgtacagtgtcatcccgttgagagccttggtgggcgagcggttgaggatgtaaaccgctatcaccaccgcctctccccagaagacagctgacattcctctctgcttgaggagagcccgagccatccccacaaccgtctggttgcgccgctcgacgacgccgttctgctgcgggctgtatggcgcggagtagtggcgctgaacgccctcatccgcacagtacgacgcaaactcagccgccgtgaattcgccgccgttgtcggtgcgcagcacgcgcagcttgcggccgcactccgcctccgcagcgacctgcacacgcctgatggcgttcgcagcctctcccttgctgccaaggatcatcacccacatgtagcgggagagatcgtcgacgagcagcaagaagtagcgtcgtcctcctggtgtggctggtgtcaccgggccacacaagtccccatgcacgagctcgagcctctccttggctcggaagctcgactgctggggaaaggggagccgtctctgctttgtcaacacgcagacatcgcagaattgctccacatggtcaaggcacggcaggcctcgtaccatctccttggcactgagccgcttcagggcctcgaagttaaggtgcccgaagcgctcgtgccactgccatgccccgtcgtctcgacgagcagcaaggcagcaaggttgtgccaccttgacattgaggatgtatagccgatttggactcctgcgtaccttggcaagaaggcgacgagagggatcccagatcctcatgactccgtgctcgacctccacgcgcgaaccgttctcatccagctgtcccaagctgatgatagagttcctcaacgcggggatgtagtagactccggtgagcagcctgtgctcaccagacgcggcggtgaagacgactgagccggcgcccttgatctctacgccggaggcatccccaaacttgacggagcctcggacgctagagtcaagctcggtgaagaactcccgtcggccggtcatgtgatgagtggcgccggtgtcgaggcaccatccttcgatcatgtccttgttggagccgtcgccgaggaaagcgcgtgctttcgactcatcaaggtggaggagtgccgctgcggccggtcccgctggagatggctcgatgcttgcatgtgccaggagcagggcctcctcctccgcctccgcctgtgcgacgttggcctgaccacgtcgtggctgccgacagtccctggcccagtggccaagcttgccgcagttgtgacagccgtcgtctcgtgccggcttcttgttgccgacggcgccgccttgggcacctccacgtgcaccaccctcagcatgtcctcgcgccccggcctgggcgcctccacgcgccttgcgcggcttgccgcgtttgcggcctcgtgtcgaggaggactcccccttcttcttgtcatcctggcaggcctcccactgctcccgagtgagatgtagcttcccgccgatagtgataggcctagagagagcctgtggttcgtcgccgtcgaccaccttgaggcgaccaatcgcctcttcgatcgtcatcgtggagaggtctagcagagactcgatcgagcgagcaatctgcctgtacttctcggggatgcaacagaagagcttctcaacagctctctcctcatcgtaggtgtcgtcgccgaactgcaccatcttctgcaacagagtgttgaggcggagagcaaagtcatcaacatcctcacctggcttgaaggccaggttctcccactccttgcgaagtgcctgtagtgtggtcttgcgggcacgatcgctgccgatgcgggtcgcagcgatggcgtcccaggcctccttggcagtccgcttttgggaaagcgaaaactgcatctcgggcgggactgcagcaatgagggcatccagcgcccgccgatcctcgtggtagtcgacgttgtcgtaacgaactgcttcccacatgtggcgaacctggagccgtaccctcatcaccgcggcccactcgacgtagttggtcttggtgagggtaggccacccaccgccgggaccgatgtccctgacaatggcctgggccatgcggcgaccatggtaccgatccggggagggagaaccgcgccgcctgtagaggccgcgatctccgtcgactcggtcgccgccgccgggagcaccgccggcgcgtctacgcccgtctgggctgccgccgcgtgcgcccccgcctggagcgccgtcagcgcgtcagcgcctatccgggctgccaccacgcgcgcccccatggggatgcgcggctgcccactgtgccgcctgctctcgcgctgcttccctcgccagcctgagctcttcgtcggtgttgtcgtcgacagaagcagagctgccagctctactgccgcgcagaacctcgagctctgttgtcaccgcacgtgcagcatccgccgcctccgctgcttctacttccgctctcgccgctgccagttccgccgccgccaaccgtgctgccctcgccgctgtcgctgcagccgctgctgctgctcgctcgcgttcttgtgccgcggcgacctcggcctcctgctggcgccgcgcactcgaagtggccgagcgtagggacatggtgggctagtgaggggtcgctgcgtgtggaagaggctgtctcagacgaaaggctgctcgtctgagcaggggaggaaggaacagttggagctcttgctgccgactgagtgtggggagaggcgcgagaaggagatgagcacgagatgtttagggtgcaggatagtttggctctgataccaattgtaagtagagggactctaactctcatcaagaggatgacactatgagttggggtaatttttctgtttattttctcaaacactacacaatgccatacccttagaggggttggggacacatatttatagccctaggggctgcactaccacaccttctcacacacactacacaacaggattgtcctctagatgctaaagagactacagaggacagtcaaaagcgactattgtcctctagatgctaaagcgactatagaggacagtcaaaaagcgactgctgtcctctagatgctaaagagactacagaggacagtcaagctgtcctctagatgctaaaggactacagaggacagtcaaaagcaggctgtcctctagatgctcaagacttattccatcattctaggcatacaaagtagttgtcatcgctaacctacatgttaaggcggctggtgtccaaaacatatggttgttggttctcgtcctcctcgacccgacttccacttacgccctctggcgtgacctcgtcctcaccctgcaacgctacaccctcacaaccgtcttggtgctggatggacaacatcatcctttcctagatccttggcaccatcatcgtcgagttgcaagacatcgtccacaagcccgcggacattgctcgttaggcctaggttgccattgaggagcactccatcggcagtcgtgaggcccacgccctccacctcgacgtagccttctgtaactttatccacggggacatctccatcaccgagtactattgtcacctaaagggcatggcggactccctgtgacctcagcgagcccatttcagatcgtaccctcatcttaatctccttcaaggcctcaatgagcatgacgatcatctatggggctgattactcagttcaagccgtttccctccttccacactgtcaacaatgatctcagcctcgagttcacgaaggaggcacaggtcccctttaacaccaccacaacaccttagaactccagctcttgtgggaagcctcaccacaccactccatccactacaacacctggggcttgctctcatgcttgtctgctccatcgtcgagagtccctcgtcgtcctactggctctggtgcttgtggtagccgctgccagtggaggggtggttatggtggtggtagcgggaagggtgatgctcccttgccatcactctacaaccagtggattggccacatctctctgtggcctgactcagccatggtggttcttcactacgcctacaacaactgcaatcgtcaaccctcctcactatgcccatgttcaacaactttgggtgtcctggaccacctcgtatggctcctacaacaccatactagccttcacttattccacaccatacccacttagtttggtcgtggactttatggactgatgggtgggatcaatagtcgcttgctaactcgtttagcacgatgactttggctcctcccgttgtcacagactaggtgtccgactccagtgcctcctacgacaccactttggatgctagtatactcctcccataccccacccttctatcattgtcagaaaatgatatcattcttccggttgccttagcagacaattcggttttcctggttgtttccgccttaaggacgttgttgttgcctccaatatcatgtaaatctattatttgtttgttagtttactactgataattcttgttctatggagtttgatctttttggcttgtccattaaggatcttgccacttggagtcttctcgcttgatgtgatagctctaggccctgtatagtctgtggcttcctgcttctactatttccgctactccctctagcacttggtatcgtcgactcggtcatcctagtcctgacgtgttgtccaagttgtctcatagctcagttatctcttgtactaggtgcactcatgagcatctatgtcgtgtctgttagctaggttgtcttgttatactttccttccctagttcctcttagactgtgcatgcttatgatctcattcactgtgttttgtggacctctcctcttgtcagtgttttgggatataagtattatttggtggttcatgatgattgtctcattactcgtgtgtaagtagatggactctaactctcatcaagaggatgacactatgagttggagcaattttctgtttatttcctcaaacactacacaatgccatacccatctaagggttggagacccatatttatagccctagaggctgcactaccacactttctcacacacactacacaacaggattgtcctctagatgctaaagagactacagaggacagtcaaaagcgactgttgtcctctagatgctaaagcgactacagaggacagtcaaaaagcgactgttgtcctctagatgctaaagagactacagaggacagtcaagctgtcctctagatgctaaaggactacagaggacagtcaaaagtgattgctgtcctctagatgctcaagacttattccatcattgtccccctaagtcttgggcgtcgtcttgtgagaaagttgggtcatcccggacctggagcaaagctcaacaaacttgatcttcccaaggggcttggtgagcaggtctgcaagctgatccttggtgttgatgtaacgcgccttgatgctcccttctgccaagcagtctcggatgaagtggtatctcagccggatgtgcttgctccgttcatggaacacgaggttcttggccaatgccagagcggattggctgtccaccctgagttccaccgctccagtgtctctcccgaggagatcactgagcagtcgagccagccagagcgcctgagtcgaagcagtggacgccgctttgtactcggcctcgcagctggacatggccaccacctgctgcttgaccgactgccagctaatgaggcacttgccgaggaagaagaggatctcgcttgtgctcttgctagtgtcgatgtcgccggcgtggtcgctgtcgctgtacccgacaaggtgtgcctccccagggcacctcgggtagtagagaccgtggtcgagagtccccgcaacatagcggatgatcctcttcacagcctgctcatgctctgtcgtcggtcgctgcaagaaccgactaacgtagccgacggagtatgccaagtcaggccgtgtgtggacgatgtagcgaaggctccccacaagacgccggtactgagtagcatccacctcctctgtcgtgctgtcgtgactcagcttcagcctctcctccatcggagtgagagctgggttgcagtcggtgagcccagccagctcaacaatgcgcctggcataggcggtctggcgaagtgtgatcccggagtctccctggtgcacctcaatccccaggtagaaggagagatgccccaggtcactcatttggaaggtggccttcatctcttccttgaacgctgccacctctgcatccttggcgccggtgatcaccaagtcgtcgacgtagacacccaccagcagggcattttctccattgccccgccgatagatggccgcctcgtgcgggcttggcatgaagcccatcctcttgagcatggaatccagcttggcattccacgcccttggtgcctgtcgcaagccgtagagagccttgcgcaggcgcaacaccttgccctccttgtcagggatcgcaaaacctggcggctggtgtacatagacctcctcctttaagtcgccgttaagaaacgccgacttgacatccatgtgatgaacatgctagcccttcagggctgccagcgcgaggaggagtcgcacggattccatccgtgctacaggggcgaaggcatcgtcgaagtcgatcccctcctgctgcaagaaaccgcgtgccaccaagcgagccttatgcttgacgatggcgccggcttcatccctctttagtttgaacacccacttaagggtgatcgcgcgatgaccatgagggagatcagcgagctcccaggtgcggttcgtctcaaccgcgtccatctccgactgcatcgcggcacgccaagccgcatgtttctcggcctccgcgaaagaccgaggctcaccatcatcgcatgcaagatgcaactctcctgccagaatgcgaagatgcagggcctggcaccgacgggtcgatgagaaggccctccccccttcgataccgaaacggctcgtcgtcgtagcacgcgtcgacgcgctcctcgtcgcgggacagaggggtcactagctccactgggtcgtgctcgacacgagctggtgtctgataggacgttcccggagagggtaccatcggtgctagagtacgtggtggcgaagagctcgctgtagccggagtcgtggctggagtgcgtggtggtgaagagctcgttgtagcagaagctggagagtttggcgctggagtcgatggagacttgggggctggggtagacctgctcggagaagagttgcctactcccccagctccctcaaagtggacgtactcgatggtgaagtcgtacgtcggagtcgtgccgtcgtccaccgccttgtcccacgcccatcctcgcccttcgtcgaacactacgtcgcgcgccgtgcgcacacgctgtgttcttgggtcaaggatgcggtaggccttcgagccctccgcatagccaatgaacacccccggggtgctcctatcgtcgagcttgctgatgtggccaagctccttggtgaacgcgaggcagccgaagacccgtaggtgagagaccgccgacttgcgcccatgccaagcctcgtacggtgtcatcccgttgagagccttggtgggcgagcggttgaggatgtaaaccgctgtcaccaccgcctctccccagaagacagatggcattcctctctgcttgaggagagcccgagccatccccacaaccgtctggttgcgccgctcgacgacgccgttctgctgcgggctgtacggcgcggagtagtggcgctgaacgccctcatccgcgcagtacgacgcgaactcagccgccgtgaattcgccgccgttgtcggtgcgcagcacgcgcagcttgcggccgcactccgcctccgcagcgacctgcacacgcctgatggcgttcgcagcctctcccttgctgccaaggatcatcacccacatgtagcgggagagatcgtcgacgagcagcaagaagtagcgtcgtcctcctggtgtggctggtgtcaccgggccacacaagtccccatgcacgagctcaagcctcaccttggctcggaagctcgactgctggggaaaggggagccgtctctgctttgtcaacacgcagacatcgcagaattgctccacatggtcaaggcacggcaggcctcgtaccatctccttggcactgagccgcttcagggcctcgaagttaaggtgcccgaagcgctcgtgccactgccacgccccgtcgtctcgacgagcagcaagacagcaaggttgtgccaccttcacattgaggatgtatagccgatttggactcctgcgtaccttggcaagaaggcgacgagagggatcccagatcctcatgactccgtgctcgaccaccacgcgcgaaccgttctcatccagctgtcccaagctgatgatagagttcctcaacgcggtgatgtagtagactccggtgagcagcctatcctcaccagacgcggcggtgaagatgactgacccggcgcccttgatctctacgccggaggcgtccccaaacttgacggagcctcggacgctagagtcaagctcggtgaagaactcccgtcggccggtcatgtgatgagtggcgccggtgtcgaggcaccatccttcgatcatgttcttgttggagccgtcgccgaggaaagcgcgtgctttcgactcatcaaggtggagtagtgccgctgcggccggtgccgctggagatggctcgatgcttgcatgtgccaggagcagggcctcctcatccgcctccgcctgtgcgacgttggcctggccacgtcgtggctgccgacaatccctggcccagtggccaagcttgccgcagttgtggcagccgtcgtctcgtgccggcttcttgttgccgacagcgccgccttgggcacctccacgtgcaccaccctcagcatgtcctcgcgccccggcctgggcgcctccacgcgccttgcgcggcttgccgcgtttgcggcctcgtgtcgaggaggactcccccttcttcttgtcaccctggcaggcctcccattgctcccgagtgagatgtagcttcccgccgatagtgataggcccagagagagcctgtggttcgtcgccgtcgaccactttgaggcgaccaatcgcctcttcgatcgtcatcgtggagaggtctagcagagactcgatcgagcgagcaatctgcctgtacttctcggggatgcaacggaagagcttctcaacagctctctcctcatcgtaggtgtcgtcgccgaactgcaccatcttctgcaacagagtgttgaggcggagagcaaagtcatcaacatcctcacctggcttgaaggccaggttctcccactccttgcgaagtgcctgcagtgtggtcttgcgggcacgatcgctgccgatgcgggtcgcagcgatggcgtcccaggcctccttggcagtccgcttctgggaaagcgaaaactgcatctcaggcgggactgcagcaatgagggcatccagcgcccgccgatcctcgtggtagtcgacgtcgtcgtaacgaactgcttcccacatgtggcgaacctggagccgtaccctcatcaccgcggcccactcgacgtagttggtcttggtgagggtaggccacccacccccgggaccgatgtccctgacaatggcttgggccatgcagcgaccatggtaccgatccggggagggagaaccgcgccgcctgtagaggccgcgatctccgtcgactcggtcgccgccgccgggagcaccgccggcgcgtctacgcccgtctgggctgccgccgcgtgcgctcccgcctggagcgccgtcagcgcgtcgacgcctatccgggctgccgccactcgcgcccccatggggatgcgcggctgcccactgtgccgcctgctctcgcgctgcttccctcgccagcctgagctcttcgtcggtgttgtcgtcgacagaagcagagctgccagctctactgccgcgcagaacctcgagctctgttgccgccgcacgtgcagcatccgctgcctccgctgcttctacttccgctctcgccgctgccagttccgccgccgccaaccgtgctgccctcgccgccgctgctgctcgctcgcgttcttgtgccgcggcgacctcggcctcctgctggcgccgcacactcgaagtggccgagcgtagggacatggtgggctagtgaggggtcgctgcgggtggaagaggctgtctcagacgaaaggctgctcgtctgagcaggggaggaaggaacagttggagctcttgctgccgactgagtgtggggagaggcgcgggaaggagatgagcacgagatgtttaggctgcaggatagtttggctccgataccaattgtaagtagagggactctaattctcatcaagaggatgacactatgagttggggcaattttctgtttatttcctcaaacactacacaatgccatacccatctaagggttggagacccatatttatagccctagaggctgcactaccacactttctcacacacactacacaacaggattgtcctctagatgctaaagagactacagaggacagtcaaaagcgactgttgtcctctagatgctaaagcgactacagaggacagtcaaaaagcgactgctgtcctctagatgctaaagagactatagagaacagtcaagttgtcctctagatgctaaaggactacagagaacagtcaaaagtgattgttgtcctctagatgctcaaaacttattccatcatcgtggacttctcctttgcgtttgaagtctgacacatccaatgattgcaattcgcctggtcgatccctgggaccgaccagacgactaatcgcgattagggacgaccagggcgactagtcgacccctagtcggttcctggtcatcctagaccttttagactagtagttatacttatataggtatatacatatataaatatacctatatacattatataaattagaacaaacagttagcataaacaaaatagcagtttggaaacacagatataggtacaagtcactactcatcactggcttaggattacagcaatcatccactagttccgcactggcagaactccagagaaggggagaaggggggagcaggaggaaccttgagatgacgagctcatcttgtcaatggtgttggagtagccactggtatctagactagagcaggcgagcagccaagcaggctgaggggcgcaaccggtatttggactggcaggcgagcagccaagcaaccagaggggcgcaaccggtatctagactagagcaggcaagcagccaagcagacagaggggagcaggcgccgttgaatggagcaagacaacagggggcgcgggtgagcagccgccggtgctggagatctggggcgtagtgccggtgctggagatctggggcgcaaccaccggtgctggacgttgggcaaaagagaggaggcacagactagactgggttttggcggctgcatattggcaaaggagaggccaggctaaaagatcatatagatgggctaaaaatagcccaatactaaaaccctagtcgtggtgaccagaaattattaatcgggcgattagtcgccctaatcgacgactagtcggacgactagacaggctaatcgagtcgtccagctagtcgagtacaaacaggcgaccagcccgactaatcgcgattaatcgcgactagtcggacgacttgaaatcattggacacatctaccaccctttctcacttattctcttgggtttccaatcaattcagtagcattatcaatgttgttcggtgcaacagtaaataggagagtttgataacacttcgtcgcgtgccttcgtccttctccactgtgttcagtttcggatgtcttgctcgtacacctctccccagatctacaaggctgagcacatgattcgcaccactaacaacattatgtgatctctgttcttttcaacatgtccctactctctactgggttgaaagtcttcacacggccacctaattaatcaccttcccaccaagacgatcagtgctcccacctttcacttcgcgttgtttgccaccactcctgcttacgagcacttccttatctttggatgcacctgctatcctaacctttctgccacaaaaccttaaaaacttgcatctctcgacccattgtatctttcttgggtactccccttataggtgtacattcaggccacccggcccggcccaagcccaaaaaggcccgatccgtttaaatttcgagctggaccgggccggcccacgacttgtcacgtaattgcttaaacgtgtcaggctcatttcggacagcccgaaattcaatttttggcctaaaattcacatcagggcccaaaattcacatcagagcccaaaattcaaaacagatttaataaaacaaataaaagagtataactagcatcgtctctaactttgtgttctttatcaagtataatcattttgttagaaggaaaaagagtataatcagctatatacgtagttcgtaagttcagttcattatctaatgttcacatactctaattcaaagctacaaaaaatatctaactagcatcatctctagctttgtgttatttatcaagtacatgaaagtgtggaatgaaatgtggttttaataaatatatggaccttttcgtgcttctatatgggccatttcgtgtctgccttaaacgagtcgtgctcgtgcccgcccatgggccgcgacctcggcccaaatccggcccaatatattgtgttgtgccggcccgacacaaaaatgtttcgggtcatgccatgcctgggtcgtgcttttttcgtgcttcgggctagcccatcaggcccgacccaaatgtacacctataactcccctggtcctaagggatacccatgtctcgatgttttcacccaccgcctattgatctctcgacccctcactttcaacgagtcagtattcccttctccacttctccctccaacctcgtccaagaggtggtttcctttcttgagattggcaccatggcgccctccagatagccaccacttcttttctccatgtagggttcttctcggtgcctctgaccacgccactcacgtccttggaacgattgatcgtgccacgcacggccccaacgtccccttctacgccgcttgcggccccaacctcccatactgcattttatgcggccccaatgtcccttgttgcacctcacgcttgatcaccatctttggctgagctacgtgtgccaactcatgccttgatttgcttcgccacactggtgcatgtctatcagcgtcgtgcacaagaaggtgccctgatctgctcttcggtcaagccgtcaatgtacatccttctctacttcatcatgaacctcgtcatgtccatccaatgatgactcgacaggctgttgggatccttcgaggtgttgacctcatacttccctcgacttcaccactggtctcccccatactatcatttgtccatcatgccttcgtcgatccttatcggcaccacgctatagaggaagagtacgaggctctccttgtcaatcattactggggcttggtgtcgtgtttatctggcggtcacatggtgattggcaagtgggtagtgggtctggactcacaagaggaagggcgacaaatcattggataagtacaaggcccaatgggtccttcaggtttgactcagcgtctcgatatgaactacgatgggacttttagtcttgtggtgaagttgtctactgtcagcacagttttgttgctggccctctcgtagtcttggttggtccatcggttggatgtcaagaatgtctttctccatggcaccttgactgaggtcgtgtattgcaattagtcgtccggtttcatcgactcggctcattcctacatggttcgctgtatgatctgaagcaagcaccctgtgcttggtatagccggtttgcttcgtttttgctctcgttaggtttcaccgaggctaagtcggacaccttgttgttcatttattggagacgcaatgacattgtctacctcctctatagcgatgatattgttcttgtcgcctcttgtacagtggcggagccagagcccggcgagcctgggcacgtgcccaggctctgccgttgaccgcctgaaaaaatgaagcacttcttaccgcggtcgaccatgccgtccttcaccgtttcgccccagtcatcacgtcgtgcagcgctcaccaacttctctccactgacttgattggcccgtccacatgcctcgctacttcgatgctagtgctagctgcgtggcgaggaacgatagattttttgaagcggcgaggtgagggacgtcacaattaactaattcggtactggcctcacagtagggtagggttgaacagattgggtggccacgattcgttgatgcggttcatttacgtttttgggctttttggttgtgactggacaatttgggccgcttggttcgtatcaggtttaaacccttgatggatattggttaggtttaaatcgttgacctgacatttgcaattgcatttgttagatttgacgacattaattttttgtgatattctataataaataatatcaagggtattgatctgatatacggggaacatacgaccacaacgccaagacacgcacagtgggtcaatggcgcaacagcacaagaagagaaagatgtttagaaatgggaagcatgacatgccgccctgccacgccgggtgtcgttcgccgtcgttctaagactgtgcccaggcttgtgttccaagctggctccgccactgctcttgtatgaccatcttgtagcacactatttcagcaatgcaacaggagttcgctatgaagaatctggtcagcttcaccatttctttggcattgcagttgagcactgccccgaacattgttccttcaatagcgatagtatactctatacatacttgagcgtgctggcattatggactgtaagctttgtgctactccagtggatgcttaggcgaatgttttctcaggcaccagtgcttcagttagtaaccccattgtctatcgaagccttagcccttcagtacatcaccttcaccattgcggggggatgggggcttcaatacttcaccttcatcaggtcggatatctcctgtgttgttcagttggcatgcctccacatgcatgattcttgggagctgcatcttactgctgtgaaacggtataccttcgaggcactcttgactatgaccttcttctccggcggtcctcgccgaccgagctcgtcctccaccgatgctgactggaccggttggctggacacacgtaagtccacttgtggctacgttgtattccttaggggtaaactcatctcctggtcattgaagcggcagcctatggtctcccgcttgagcgtcgaggctgaatattgtgagtggcgaatagtgtggatgaggtgttctagctccgctagctcctacaagaacttcacagccccctcaccaggagtatccttgtttgttgcgataatgtcagtgcagtttacctctccatgaaccctgtccaacacctgcgcacgaagcatgtcgattgtcgagattgatctcttcatttgtgagtgtgtcaccatcagggatgttcgagtcctccatgactttgcactttgtcgatttcactcagtctcaacatctatcatgactagagtttcaactgcggggggtgttaaactgttatgtgacttgggcctagagcctggcctaagtggtctattagggttaggctatgtaacctatcttcagtgcaatacatcacaatctctccaaattacgtcctggaatgcaatgaaatcatttgtctttcttaatgttcttatgatagatacgtggagatgagtttttgttggttaaaaatgttcagagtgaatcatatttccgcatattctatgtctgtttcctccaactatgctgccaggccttttaagattgggatcgttcttttttacatctatgcttactttaacttacaggaacatgctttcttatgtatttcctttcaccttgatgacgatggccctttccatgcttgctgtcaaaggactgaaagaacaaggccggttaggtagatctttt

SEQ ID NO: 604 - DNA, 4569 bp, Zea mays
  Intron number 1 from transcript GRMZM2G123966_T01 (locus G RMZM2G123966) derived from phytozome v7.0 (chr-ID 5; pos 1 63888031 to 163892599 reverse strand)
gacggctcccacaggtaatcgtcatcactcaaaatgctagatctggttgctaggcctaggactgtttcctgaactccttacgtgatctaggacgcagcgggactatttttgtttcggctctgtagtgaagaatcgggcgtggcttgtaatttggtgatgcctttctcagcttgatcctgaactgaaccattgtgtatttgtgtttctgaagagttgacctgaatgatttacgaattttgtgtgcaaattggaattggtatttgctctattccatggtttctctcgtatgaattgttactgtgtgccggttcttatggagcttggaccgtgtttccatgattcttttctctagttagtgtacttagctacaagtagaacaatgctcttgtagctagagctatccaattacactagccacgttaagttaatctctgactcatttagggcctgttctgtttgatctcaatccatgtggattgagcgggattgagtgggtttaaatcccaaacaagtcaaagactcaaagttcttcatattttttttccaatcccatccaatccacgtgaaatgggaataaccgaacaagccttagatggaaaaaagggttcatgttaactaggctgcatgtgagtgtgtttacaagctgtttcatggaaatctgaggtgcacttagctgttttcaatctatgtattttactgttttgttatgctaaatatcgaagttactatctttaacccattcaatgaggcaatgagccacaatcggttttgttgatataccatttcttctcacatctcacaataattttctgatagtagtgatgacccttattggagcttccatgtactacactggtccctgaacttgtattgctatatgatatcaaaaggtactttacaattcgagggagctatgtcagacagctatggaagttcggtttactctttttcgtagtactgaagagtttggtttactcaaatattgtgctagttgtgtcactcttctcacatgggcctcataactattagatgtgtccatttttttttggcattttctggtttgtacttctattgcctgtggcacaaagctctcatcccctgcgtcactatcactcttgtttcttgttgttctgcaagtctcttcactgaacaaccttaactttcctccactacaatagaactgattccggttgggttcatgttcatgtgggttatctccaaagaattcctccttcaacctttttttttttctaattcgtggtaaataagaatatactttttctgctcattaggtctacccataaatatttcgtagtaacagataaaactttctcctcttgcaccttgtttacccttatctagttctttcatctataacaaaaggaatttttagtacctgaaattcatcattactctgttctttgctttctatacagaacgatccttatacgggacaagcacatgctgaatgggcttatcaatatattcttttggctctgtcacttaatgccaatatatgtggatcagtgtttcatcaacatcaagtgggaaaggcctaaactgaggccagaatgaaaacactaaccggaacagcaataaaacagatcatcgtaatattttgattgtaacgaaacctttggtttttggatgctttagagaatattttttctttaggaaggggtcaccatggttacttcattggaatttctgtagtagaaatactagtaaaccagtttctgagatgataaagatgtttgacggatctattgttttagttgcttattaacatgaggtcaccagcatcaggcaactcgaagtacaaattcaaggttttattttttttcctgattcctttgtgcttattaacatgattcctttgtgctatattattagtaagcctgtgtaggcttttgaatggtgttgaacagagttccataaattgttttttttctcgaatgagagttccataaattgttccataagattttgctgacttcttacctggaacacatcttaacaatttaatttggctaatgagaatatatgcagtttcacatgagtaaccaaattaaactgttattggtgacttaacatttagcttttataatgttagttgaagttttagattctgagcatggtaacctcggaagtttgtgcattctagaatctagaatgaactgctatggattgctccccatgaatgatactgtgcagtgtttttacggcttctcctaggcgacgaggcgcttgcagggagtaaggcatccttgatacctagccaaaagtagcaagatatccatggaatggagcctggaggcaaaacagaggaaaactatagggaaaggccatgcagctgcctccttgctcatctccactaaatctggtgctgcctgggtcatctgcaactgaggcggcggttgattgagatggggatctgaaggagagcggagggcaggctgagggtgtgcagccaagagcatcaccgagggagggagagtggtgctgcgcgcctgcacctgtgtgcgtggttgcatgaactgagggaggagatgcagcagcgctgcatgtggcttgtggctcacggtcgctgctggacagctgaccgcctagcaaagaaaggactgcctcaccctcaattttgtaccctgtgtgatcaagaggaagagacactaaaccatttgctggtctcctgcgttttctcacgggaagtctggtttcagattatgaaatatgttgggttgcagcaccttgctcctaaccttgagagctcttccttggaggattggtggggaggagttgccgcacctcctgctgatccagcatacaaggggctgcacaagggcttgggctatctggaatcaccgcaaccgttgtgtatttaatggtgtgcagcctaggttcagcatggtcatcaattgggttaaggatgagtctcatctctggtgtagggctggagccagtatgagtctcatctctggtgtagggctggagccagtgatttatctagcatccttatgctccagtgaacccgtcggtaatctttaggtcacgggtctagatgtcttttgttgttaattgtcttcctataatctagtgtatgtgggtttgtgtggagttgtacgaggtttctttttgcctcacctatttttcttaatataatgatacacaaatctcctgcgttttcgaaaaaaaagatgacctgagaagggataagtacaagagggcactcgcgggctaaggccaatcacttatattttcatttgcccttttctggtttgtcttttttccttttttcttctatttttcttgtctattctctgctgctattttcctatttcttagaagggaacgtataggagccttcatgctcatatgagcacgtggtgcatttgtaagcaatccaacaagaccggcagtttttcacttactcccttccacctcggctttggtagcacatgaggtaagtgaaaatttattggtattgttggattgctcacggatgcaccagatttgtagtgctcatataagtataaccatgaaagcttcatgagcacagaatacattccaaaacgttgcctcaccttgccttatgaacacctaggtgttgcctagacgttgtaaggtgggtagatctgcactccttgctgtaccgccttaaaaaccatgatacgtgtgcctactggactgaggattttgattttattttctgcaaactaaatttaatgctgaaactgtttttctgctagacttgcgctcttatacataagtataccatcaaactctctcatctgttgtactccatgccgtttttttttgttgaatgtcatgtttacatcactatatgtgtattttattttaggtaggtgtctcctagtggtccatgtgtttttttttcatatatttttttcatcataaggttgccttctactagaagctgtaaacatttgttagaataaagttgtgaattatagtttctgggtggtatatctccttttactctgaacatgtagccttaccacatggcatggacctcaagtgtagatggattgagaatctctattagtgttaaatcaatgatctttgttggtgattttttttttgtcttagaagtcgccgtgtgtgatctgtgactgcttaaacacataatgatgcttgtgaacttgcctacccagtaaatctatctatcatctgcacaccttgccatttttacgaaaaataatgcatgagttgcaaaaataagcactgctatttcataaaaataagacttagtcctgacttgatcaccattgggtctatccaatagacaccactgtaccttattattccaccccccctctgtttaagcaactttgttctggacacatgtgaatacttttcccccaccagaaaccaacttgctctaaggtatcatcaaaaggaatttttagatttgcaccaccttgtacttgtactgtaataataatgtccatacgctgtatggtacctgttaggcaaggctggatttgatctcagcgtaaatttgtgctgtttgcagggcttccagctgagacactcgtggaccggtacgtg

SEQ ID NO: 605 - DNA, 368 bp, Zea mays
  Intron number 2 from transcript GRMZM2G081826_T02 (locus G RMZM2G081826) derived from phytozome v7.0 (chr-ID 5; pos 1 83482142 to 183482509 reverse strand)
agagaagccacgttctggcctttgctagtgcagatgtatgcatcaggcatttcgagtaggccatctattttttagggttggtaggattatgacatataataatgtttattgaacataactttatgtgcttttgaatttttttagaagtttaagttcaatttcttaggcctatatcccaaccaggataccgttattccttagtactctttactttatgcattatactaacccaggtcctggagaaagttattcaactttctttagtgccagttgctgcattcttattctgtataatacattctctcttggtagctatattgtttttttaatgaatcaggcatcacagggtaaaagaagctcaggtgaga

SEQ ID NO: 606 - DNA, 1630 bp, Zea mays
  Intron number 4 from transcript GRMZM2G150256_T01 (locus G RMZM2G150256) derived from phytozome v7.0 (chr-ID 6; pos 8 8903866 to 88905495 reverse strand)
ccgtctgcagcgtccgggacgggacctgccgtaaggtaaaatctgatgcctcggaccgactgccgggcctctttgtttcagcgtttttgctgattctgagtatcagaaactgccgcggacggctaaacatccagctttttagcttgtttctatgacaatcgtaaaatcatttaaagtcaacttaaaaacacaatcgatcaagtcgtcatgataaaagaaatttgtcacttcttagattccaaagccgatgaatcttttatctttctttgtatgtaatccctatgatacttatatttttctcaaagccagattctctctacagccatagtatttgactctccacagccaagccatagtatttgactctccacagccagagtattagaaaggatcgttagagaaaagctaaaccaaacagacccatcgtttcttgcccagattctgcgcccacggaactgtgtgtttcatgtatagataggtattcttagggcatgtataaactagatactacgttgtggttctttaagcactagatacacctaaggaacctcttcatacaacctaatcaaggtttaaaatagcgggttatgcaaaatagcggcgtcatttttttaggctacatggctattgcccggctatagcgcagctatagcaaatagcggatttataaaaaatattaaaaatatgcatgatttatacaaaaaatatatgtaagtcaagatatttaactaagaccaatatgtttccaaggctctaggagactagagccagtacacaatacatgattcctggaattcaagtgtttggcacttcaataacatagttagccactaactaggttgctgcacaacatgataattaattggtttacttagttctaaatactatagtagtaaagaatttaccaactcgctaacatggtagcaacacaataccatgatttagtacataccaaaaaacttactagtgcaatgtattgatcaagcatagagtcatctgaataagaagaatgaacacttgaggactattgatccatgtcaatatcatgtgccatgtcgatatcatgtgcgtcattttattatgtgtaaagcaagtttaggttatatgtatcaagcaagtttagatttaccttcattacaataattaatattattgagcttcatcatccttcttcattacattcattaattttttggaccaccatgaaaagtagaaatagcgtggctatttagcgctaaaactacgacatttagcaaagctaaatcgggctatagcggttgtagctgaaatagtgtttaaaagtgaaatatcgtagctttaggtcctctaaaatactatagctgccgctatagcctgctattttaaaccatagacctaatgtatctaagtcttatatattatttactagaacctctcaagatacaactcatttatgtgggttgtataactaaaactgtatatagacttagaaaaccgtgctaaagacgttccttcaccgaaatgctgtctctttttttacacttatccccttaatatcacgtaagatagatatgagacatttatgtgatttgtacatgtgcttacacgttcggaaactgttctggctgatatgcagagcgccaacagcccg

SEQ ID NO: 607 - DNA, 14378 bp, Zea mays
  Intron number 3 from transcript GRMZM2G064107_T01 (locus G RMZM2G064107) derived from phytozome v7.0 (chr-ID 3; pos 1 57741536 to 157755913)
ttccaaaaagactggtatattgttgttgtacatatccttgatatctatattcatgcaagtgcgttattactcatgttcaaattgcggtgttagttatcatcatcacaaatatgctaacaacttcatgtccatatctatgcgcttactttaggggcaaggttattagaatggtgatactctttgggtacaagatatatagaacatacatgtgtccatgaatagtatttttagcatctaagaatgtgtgaaaaaaacaatcatgttccaacttcactcctctcaatcacttttttctcttagggtttgtttggatgtagatattggagatattagaattgaattagatccaataccaaatatgtctagtattgaaaatgggttgcaatacaaatttgttgtttggatatatctggaattgtaattctagctaatacagagggtctaggctctgaattgtgaaagacgacttctagttatagtttaataccgagcaattgagctttaattccaactctaaattcattagacaaccaaacaacagaacttaggaatcctggttccaattcccaattctagacttcaatatctacatccaaacggggtgttaaagcaattggggttggggaattcggtgcttgtgtcacatgctggtgatgaagaaaggtggtgtgaagtatggagaacatgaagcatactattcgccttaacttcgttggaatgtccttgattcaaaagttggcatatccattgtcatggttgtcattgtgtttgggactcatgccaagatactttgacagagcatggtgctaatgatatgagcaaggctgacgatggttggtgggatttttggggtgggggtcgggaggaggagggggggggggcgagaaaagggcaacataactctctccccccccttcctcgctcccaatccctcactctgttggtatatgttgttgaagagatggtcataggaagcaagcctcgacgtggcacatatgctaacgctaggatgagacaaccgaggtagaaggggcgaatgacattgcaccatggaactcgcttaacactggcctatcagggggctcacagacaaacccattgtgtcctgttgttcaatgccctaggttcaatgtctccataacttgaatggtgtgggttgatgtttggaacgatagctgcgatgacatcttaaatgttgccatgacagagctaggttcatactctagatcccaattaggtggacaactttgattatgttggagcgcttgcatgtctctaggtggcacatggttgggggtggcacgctcgttggaagaagggttggcaataatggcatgatatcctcttatctatatgtgggtgtgagatctcggttcttagtgctgacatcacacatcaatgattagttagtgctgagcccaataaatcaagtgttgcttggatgtcttgtctgttggacatgcaaaggctagattgcaagttttttgttgaaaagcaaaggagatgaaagagtgtttattgcggttgctcctttttttttgacaagaactttcttcatgaatgatccacaacttctattttgattggtggttaatttgtttgataggcttgcaggcggtgcgggtaattaccggaacccgctacacctgccccacaatctcacgtttgtggctcatgtgaagtagttacaattgttttgtgggccaaattaccaacttaactgtttgctttggtccgcaagcaatcgttctcaaccattagaaagccttcattgatgtatgctttgcctacttaactgtcggagagggaattctccggccgggtggcggagtgcacccgccctaaatcctaagatgaggaaggagcttaagcgttttgcctgttagttggaaaatgggaagaacacaagaacacacgaggatttagagtggttcgggccgccggagcgtaataccctactccactgtgtgttggattgctgtggaaacttgggagtctaagcctccagattgagcttatcttgtaacgtcgcatgcctccccttttatagctaaagggggacatgtacaagagtgctgagccccgacatgtgggcccaggaacatagcggatgtagctactgatatctcctgctggagcaatcttcttgcgccctgacacccgagatcttgtatagtctcggcgtgcaggggaagcttctcgcacaagggatgagtacagtgcaccgcgcagcacgagcgtactgtttcgacaacggactggacaggtgcatcgtctgcagggtggccctggcgccgtctgccagtggaatggacaggacgtaataaatgtcgtgggggcacatcgcctgttagaagggcggacaggccgcgcgtcctctccgcaataaatgcggagatcgcgcggcccagagccctcacgtcatgcaccgcccgctggcctacgtcacggacaataagccatgtggcagtattagacccctggccgagtggggagcggaggtgctccggatagagcctggacacgcgtcaataccggacccatgcctaggtcacggtacttcccctcccgggtccttgttacgggtggtccggagctctcttggtggggtccgaaccctatccaatggctccgggctgctttacttcgggggtccgggttgtgcgtacaggggtcccgtgccttctgggtccgacgacgttgcctctgagaacgccaactgctcacgagatacccctggggttgttctctgcatggttaagggtagctgcgcatgcatcatgcctttataccgtagtaaggggtacccctaatccagggtaccgacagatcctattaggttaacatgctctcgggttgcttgaaaccaacacatgagcatggaagctgaacatatgttcatagatttgttgacatgcgatggggcgagggcgagacacttattggttcaagtgtcttaaccctttaggggtcggggtagtcgctgagcctctagttcaggaggcactacctgcaaacttgcaactggtgcaaggcccgactatgtgttattgtactaacatgtgacagatcaagattatgcgcatgcacggaagtgcaacgacttttgtgctcatccttttatggcgtttaaagtaatgaaatctattgtatcatgatagattcttgtttcaccgaggaaaaacaagccatgccaatcccaagcccaagcccaaatattaccatgttgttgatgggggaatgatcgctaagctcactcaagcctcggcgggccagagcgaatttgttgatgttgcacccacgaagtatgggacgtgccaaacattgggaactacatgaaacaagaatactttcacgtggtgataaagacaaagttgctccaaaatataaggttcatgttatggatcctttgcttttagtaagtactagcttttccccaccctatggggccaggaggtgcatactgtagtagtcgctccttgctatgatccctcctactccttgctatgatcccttctgtcgagaagggttagagaagtgacttcggacgtcggcaaatgttttggaattgaaaccggccacagaagaaaccgaatccctaactcaccattctttctatcttacatcgccatcgagccttggctgcagagtcatcggtttctaatcgcaatgggtttatgttttctttggcttttccatttgctgtattcaaccctgatctagatagatagtttgacttctattagctgagaatgacattctcaagttatgagaaagaatgggttttaatgtttttcatttaaaaagaatgaagaatatttttacctcttatctgaaaaccaatcaaagcatttgaattgcccaatccaaacaattttgttcgctctttgaaatagcaaaattatgtgcatctcatgtgtttgtacaacaattggaggtacaactacagagtgcatgaccagagaattgggccctttaaaagtggtaagatctttggtgcaagaagggactatccatatcatcttgacttgcttctgcttgccctctttttctttaagaatatctagtcgtgttcttcttttatcagtatcaaatagaacatgctaaacaatatcttcatggaagcccatggtttagaggaaaatcgtattgatttttttgaaactatgtgctgtggctcgaatccatagtcaatcctattttcgataggacaagttgacaattaaatccaatttttcccattatttgattgtccataatagtgtggaaagaaagcccggaggaacaatggcttggccttgtgtttctcgcccctttgccttaggattcgttaattctctttctcgatggaacgaggagggggtagaacttagcggttgagtgtcaccttgacttggtggaagtcatcaattcgagcctgattatccctaaaccgtgagtttttctattttgacttactccctcgccatgatcgaacgggagtcgggaatgtataagaggcttgtgtgattgacgtgatagggtggggttggctatactgttgatggcgaactctaggttaataatctaaacctcatggatacaagttatccttggaaggaaagacaactcagaatctactttgtctatgaataaggagttcgaaaaggcgtacacataacagactcggtacctaggtcaatgagttcagtggagaattccgtacgaaaaggagcaagaaaacatatgcgctttagcaacaaagcactcgtccctcgtttttttgcttgggagctagatctctacctcttattgatcgaaaactagtgacacttatttcttttcttgataattgaaaagttagtttgaattcattgatttgttgatgtctgtgtatgccacatttcactggccaacaaaaatgactaaatgctaattgctaaagctagaacgaaaaccgaggaagcaaaaaggataacttgtatctagcagaagtaatagaagtgaggattcctcgtacctagcaatgctaggctctacagaaaggacatcagcgagcccttcggagatggtgttgatgatccatttccgcatgacgtaatccatgcagacccaatcgggtacagaaacgttggagacgacatgaccctcaagggataacacaaattaatgtattggttaattggacacacacgcacatgcacacgctcgcgcgcacgcccgccttatcttctggtttggtacttttctacttcgagagctcacatgatttacatggatataataagtagggctgggcaaaaaacccgtaacccgaacccggaatacccgaacccgaaatacccgaaacccgaatttcgttcgggaatttcgagtagcaagttgcaaaaccagaatttattttgggtaattcgggtatcataatcgggtacccgaaatacccgaactttcatgtgtcatgtactcatgtcattcttaattattaatttgtgcatctataattatgtgtaagtgtgcatgacttgtgattgtagattgcttgtgttttttatgtccatgtatatcattattcaaactgtatttttatactaatttaatagggtgcatgtgtttatatgaagttgacacaaccgttcgggtagttcgtgaatacccgaacccgaaattccaggtacccgaattttcgggtattgtaaaacccgttgtaatttcgggtattgattctcaaaaaccgaaattttaaatacccgaattatccggcccgaaattttcgggtaacccgaacgctcacccctaataataagtcacgcttgggttgctttaatggtagtctttatattttctctttcgctagattagataattaacttattttgcttaacccaagaagaaattggattgactcatttttcattttctattggtgccgaccgaaagaaaatgaaataaagtgaggattaacaagagcagcgaatagattctagaatttcatcttttctttcacctccctgatcgaggtcaaggttttcttctgaaaaatagaaacacttacactttcttgcttggaaaagaaagaatatcgtcgaagtaaaccaatctagcttgtatttgcctaatctagatgatggctccctaaagccaacaaattcaaatcatttaacctatgatgagtagtagtttcaaataggattgaatcgatgtacttaagctacacttatgagattgaaccacctagtggaaattaggagagctgaagtttaatccaagaccaggaaagcaccatctatatcggatagactgtgatggtgtagcttatgtgtcacactaggtttttttcctgtcgtagtaaagaatcgtcaataatggtgttctagtgcattgtagattctaaaaaaaactcgacctgtgcattgttctctctctcgaatacccaggagagctacatatcattatattaatagaagatgaatgtacagagtaaacaaggccaataggccagaaccgaagaagagacacaacagaaacgacctgtgcattgtagattcttatccaagacttgtatcatttgatgggttgttatgtatcgatgctaaagccatacttgagaacacaatccctagcaatcaattctacttagtttaggtattcaactggctgatggggccacacatgcaaaaaatggcatgcatcaagaagaacatgaacgctccgtgggggaggccgtgggcgacaacggcaggatgatcttaggtgaggtcacattagtgttctccaaggccatcgtcatggtgttttgatctagagaaattacaacggaaaatgacgctacgtattattgagaaagggctgcagggtaatgaaaggagttgtctaacatacaatatcagtggcaatgcaatccttactaatactacggacgctgccttggggatgttgcctcccttccctccggcgaacaatcaccagcccaggaattatgatgatcatgagaagagggaattggcgggattctcatcctcggtgttcgggcgatccccctgataggcggcggtcgatccatctccggttaggaccacaaccgccacatgggaggggaggagtctcgcgtgccactggggtgtcggacgcgttgccccctgttcccttggtggcaccgccgggacattcattcatcttgaagggcgcgggacaagctgctgaggagatcctgagagaggccacgacttttcgatgcagtttgccgggaccccaggaggaagacgaacatttccctagaagtggaccccgatgacaatgggagtggttcacacgggttgctgatccccccaggataatttcgccccaacctttggtgactgggccgctggaattgcttgggctaggatcgcctctattattggcccttcctgtctccgctctccccccggctggatctgtccttgggccgcctgagacggtctgctcgtctgaagcttgaacgataatttgaacttatgttccttgtttttttctcaagcaagcttgcatttatctgtttatctatagatttttttctcattatgataatatacatttcagttttttattataaggcgtccaaaggttatgaacttgccatagaaaaagtattccaaataatcttgacaaggtgtgtgtatattgatagttttgccttccgttctaaacataagcaacaaaaaacataaacaaacaatctacttgtaccagggttttcgtattggagggaatcacgccaaatgtgttagatgtttatgcatgtgtccttgttgtattcgttctcatatatagagtccttctacacggtctctatcctgtatcagtgtatatatttgggcctagtaccctcatatattgaatataatgcaattcgtaacatggtattcagagccaatttttagggttaggattttttccttctttatgatttttctcacatgttgcatttgcacgtgttacagtctcacgcaaggacgctcgatgctctgctgtgtttcgcttgtgtgtatagtcgctctcctagatctggttttgatcagatctggttctaacagttttcgttaggtttcagtaaaaattgcagtttggcccacttttcttttgcgctcttgtcgtcgtccgtagctgctccactttgcactcccggcgtcaactgctactatggccccttctttgacctcttcgcctggtgctttttaattgcactaattaccatgatgaggtaccatgcatgcgtatgcacatgcgtggtttgcacctttgggagttcctcactggtgatctaccatgtccttcttgttctactgctcctacatcgcatataatactagggaaggctactaatgaggagttgcttccatactatgaggtgttgccgataagtttccattagcgtccccacgatgtctctctcagggcagcaactatggtcatggcgtcagtgacggcaccaactttcggcggacaccactactactgtgagccatggtcgccatccgtgccatttggagctcaaatttcctcgttgtgatgagaagtctgatcgcttgccttggctcaacatctgtggctaatggcaacttctttcggggtcaccgaaccctggaggatgaaaaggtgtgtctcttcacctcccgatgatacaatgggtgaatgatactactagatggaacatgatttttaggatcatgtcttggctgtgtttcgtcaaatgcgtgaacctatgcctcgggacacccatgtgctcaaatgctttgggtcgatggaggactattggcaccattttcttgccctactttgccgctgtgagagcctcacacccttagtaaccgggaaccgggaacttgaccacgttcctcgttcctggaacgttcgttccgtttcggggatgtgggaacaatctcgttccagtagtgttaaatcctagtttttgtagcgtaccgcgtaccacgttcccgttccttgaccccatcgatccggaaacctggttactaaagtcacaccgcaacatcagcctgatctcgtcatcactgatctagggcagccgctgtgctctgttgcaccactaaaaaaagatcgaaaccgttcctttgcacatcattttgcgatccctcttagatataggtgcaattgtgcaagttattatcaataatccgtccgaactccgaccaagtatcaattagctggcatgttagcacccatcctactatctgcattattgtcctgcactttagcatctatcctactttctgcattattttttcttgtacttgccctggggaaaccttgtgcaaaaatcagaaagtggttgcatactcatgtaagttttagctccatagtactcaatcacttgtgatgataacctgtggatttatacttgcttcctaacatttttttgtttcatcttgtcaagggcattgagccctcgagcggctggacgcgactacgtagtttgtagccgctatcagtcttctctggcgaggggttccttagccgcaggcttagagaatgcaaggagataggagattagagataatacttttcttattcctcatgtctcacggttccactataaataggccacctgcttgaccaactaggcaacaactaattaggcacttacttatttggtaaccaatccccctaccattaaggcctatcaatttagccatcaatctagccactttccttagtcgtgcattccttatgcgcactgctgttcgcgcccaccgtggatgcccgcgcctcagctctcctggcgttgtgggcctgctgttggcgcgcataggtgcggcccccacatgacctctcccccctcgaggtctagctcgtcctcgagctgaaaatctgggtacgtggcgcgaaacttgtcgaggtcctcctagattgccgaagtcgccggttcgccccgccaatggaccagcacctgttgaacaccacgcgccaagcgagcgtggttgacctgagccggctccggaacaaccgccccatgatggatgtcgggcaggggtggtggggctgatggcggtgtgcccacatacttcttcaaggtgcccacgtggaatacaccatgaatgcggccctgtgggagcagctccaggcgaacggtgacgtcgttgatgagctcagtgacgtggtatggccccaggaagcggggcttcaacttgcccattgtctgttggggcggcaaggacggggcgcgttggcgtagacgaaggagcgcccagtcaccgaccgcgtaggtcactggcttgtgttgcttgtcatagcggtgtttctgcactgcctgtgcctactcgaggcgatagcgcacatctgcgaggaagccctcacgctcctccatgtcgcgtgcgaccgcatcaacccttgtcttcccaggctcatacgagcggatggagggtgggtcacgaccgtacaccacccggaacggtgtctcccggagcgaggattggtatgccgtgttgtacacatattcggcccatgggagccagcgaagccattgtcgaggacggtcgccggtgaagcagcggaggtacataatgatgacgtggttggtcgcttctgtctgcccgtctgactggggatggaaggcggatgacatgtgcagcttagtgcccatgagtcgaatgagctcacgccagaacgccgaggtgaacaccgggttgtggtcggacaccatggactatggcaatgccatggaggcgcacaatgttggtgaagaaggcctgcgccactgactaagcggtgtatgggtggtcgagggcgatgaagtggcagtacttgctgaagtggtcgacgacagagaggatcaccgacttcccgttgacacggggaagtgcttcaacgaagttgaggccaatgtctgcccagacgatggtggggattggtaggggcacgaggagacctgccgggtgaaggtgctcagatttgtaccgctggcaagtgggacatgcccgcacaaagtcctgcacaacacgacacatgttgggaaaatggaagtcgcgtcggagccgttgtagggtgcactggacgccctcatgtccatcttcatggacagttgccacaacctcctgcagaaggggcgaggacggtgggatgtacagacgcctgtcgtagaggaccatgttgtcggccactgcccatggagcagcgtgtgtgcctgtgttgatttcgtcgtggagggcggccagggcggggtcaatggcctaggcgtggcggagccggctgatgaagtcgaagcggggcgccaagatcgcctgtagagccccgtgtcgtccttttcggtgtcgcggcgcgagagggcgtcgaccatcgtgttcgttgctcccgacttgtattcgacggagaagtcgaaaccgagaagtttgcccacccaatgatgctgagggatggtggctaggcgctggttgaggaggcacttgaggctgtagtggtccgtcttgacgacgaagaggcgccccccacaggtacgacctctaatgccgcacgacaagcacaagcccgatgagttcccgctcatatgccgctaaagagcgatggcggggtgccatcggtcggcttaagaaggcaatcggatgagcctcctgtatgagtacgaccccgaagccatgggtcgacgcgtcgcactcgacgacgaaagacttggtgaagtccagtaatgttagcattggtggggacgtcacagcccctttgagggcgctgaaagcggaggtcgcgtcgtcggaccatgcgaacccctccttgaggagggccgtgaggggtgctgtagtggcgccatagttgtggacgaacttacggtagtagcccgccaaaccgaggaatccacgcacggtctgtgctgaccgtggttgaggccagtcgtggatggcctggacctttgcagggtccatagcgacgccctccgccgagatgacgtggcccaggtaggcgacggagtcgacgccaaatgagcactagtacctcttcacaaagaggcggtgctggcgcagggtgtcgaggacggcgcggagatgcctcaggtggttcgcccaagagttattatctatcaaaatgttgtcaaagaaggcaagcacaaactggtgaaggtaggggcgcaatacgtcgttcattagagcctagaattttgctggggcgttgcacagcccgaacgacatcaccaggaacttgtagaggccgtcgtgggtacggaacgcctttttttggacgtcctccggccgcatccgtacttggtgataccccgaccgtaggtccagtttggtgaagaggcgcgccccaaggagctcgtcgacgaccgggatcggaaatgcatccttgaccgtgagcgcgttcaacgcgcgttagtcgacgtagaagcgccacgactcgtccggcttcttgacgaggatgactggagatgagaatgccgagtcgctgtggcggacgatgccctgcacaatcatggaggtacactgtcgctcaagttcgtccttgtgagctgcagggtacctgtacggtcgtaccaccaccgggaatgagccaggcttgaggacgatgttgtggtcgcagctccgcgtcggaggtaggccgatcagctcggcgaaaatgtcggtgaaggtgttcaacaccccgtcgacgagggtgtcatccgctgttgcggcgaggagaatcggcgcggatggagggtctacgccactccatcgaacgtcgcgtccctcccactggaacaccatggtccgagcgttgaagtcctaggcaataggcccgagtgtggccatccattgcgtgccgaggacgacgttgtacccggctaggggcattacgaagaggtcgacgcagaacaccaagccacttatgtcgacctgggcccgacggacttccgggcagtccacacgctcatcattggccaccattgccatgagtcgtggtcgcagctcgatggtgaggcccgagcgccgtgcagcccctccccaatgaagctgtgagtcgagcccgtgtcaatgagcgcggcgaaagtagcggcggccacttgcagttgtacagtgttgcagacggccacctcggcgacggcgtgtaggaagaacaccggcgactacgtgttctgatcatccgtagtggtggcatcgtcggcaaggtccaactcgacgccatggatgtagaagatccgcttacagacacggttgtgcccctgcatgtaacactcgttgcagttgaagctaaggccttgtcggcggcgctcctcttgctcctacatggacaggcgcttgcgcccatccgccatgatcgcgggcgcggctgccctgtcgactggtggagcaggtagggcgactcgcggtgccggggctactagtaggccacgtgacgcgaccttgggagatgtttgtgtataatgctcccggagctccagctggcgcgccaggctcatggcagccgcgatggactgcgggttgtggacctggacgtcgaggctgagcggaggaaggagaccccatgtgaagagctagacccgttgcgcctcctcgaggggtcctgcacgggggaggagcgcctggaagcggtcctgatagtccgcgacggagcccgtgcgacggcaatcagctagcttgaagaggggcgtggcgcggagaggggggccgtagcgcaggttgagccactccttgaaccggcaccacgatagagtaccctcgtccgactggacttggatgtaccacatctacgccccgccatccaagttgtaggaggccatccagaccttctccatgatgcgctgctgatgaaagtatgattcgcagcggttgatgaaaccaaggggatcggtcttatcatcgtactggggaaagtccagcttctggaaccttggtggccggtcattatggtgctcgccggagccgatcttgatgccgggggaggacgtgccgtcgactgtgaggttggcgatggcctgggcattggctgcgacggacttctgtagcgacttgagggcctcagcgtgggccttgaagtcgttggcactactcatggctggatcgcacgttgcaacagcggctggggttggtgatgaggtggccgcaggcttagggagataggagattagagataatacttttcttattcctcatgtctcacggttccactataattaggctacctgcctgaccaacttggcaacaactaattaggcaattacttatttggtaaccaatccccctaccattaaggcctatcaatttagacatcaatctagccactttccttagtcgtgccttccttatgtgcactgctgttcgcgcccaccgtggatgcccgcgcctcagctctcctggcatcgcgggcccgttgttggtgcgcataggtgcggccccacatgacacatctcaattttttttctcaatgttacagattgacat

SEQ ID NO: 608 - DNA, 18562 bp, Zea mays
  Intron number 5 from transcript GRMZM2G376708_T01 (locus G RMZM2G376708) derived from phytozome v7.0 (chr-ID 2; pos 1 13406148 to 113424709 reverse strand)
cagcagcggtcaaagctctaaccacccaagtggtggttatctctaaacacttgaactcgtgctcgttatgtattttaacttgtggacgttatgtttgtgtaaccactctcgtatctgaaatatttgtgatgtgtgaattatatcaatgtgtttgtgatgtgtgatgtcaatgtgtatgtgtgatatcaatatgtttgtgatgtgtatgttttgtgtatgttatgtgtgcaattgtgaagaaatatctaatttagtgttgctgttgcagaattataggttaactcccgtcggcccagttaattcccgtcggtttgaccatagccgacgggaattaactattaactcccgtcagcccaattaattcccgtcggctgacctggccgacgggagttaatagttaattctcgtcggtagacctggccgacgggaattaattaataactcccgtcggttgtggtggccgacgggaattagccgtaatttccgtcggctagctattggccgacggggattaattattcccgtcggcagccgacgggaataaccgtatccccgacaagggacgcctgacggctgacaaccgacgggaataagacctaaaccgacgggaattacttattcccgtcggtttattgcttattcccgtcggtttctggccggcggaaattaactgttttcctgtagtgtctcctccctgacaggtccctctcgggggaggggcgagatctaggtaccattggtgaacgccgccgtcctgcgcacgcgtggaccgtctgggccaccaggcacggatcgttcggctctcagggaaccccgctcctgctgtccatgttgtccgccctaggccgcagaccgtctgcaccgacgttgagggccccgccgagcgaaacaactctcaatgatttacgcccagatccgcgccaacagattcatttcataattttgtagagagaaacgtttttcattctttcaacgtttaaagggatcaagaaacaatttctcttccgatgaccctgaacccatgagcatgtgtgtcgcaatagtcgttctccccttgtaatttcttcaatcgatattcttggaagacgttttggcagtatccgtaggtatgtttttttttcagacttgggtcgttgacgagatagcgtagtgatcactttattagtgttcagatctgcttgattaacatgacatttttagataaaaaatgcgcgtgcatgcataggtttacataaaaattagtcctcaagagcgtctacctactatggagtattatatcactgggataaaaacaaacagcttttttgaactcacgctgggaagagagagggatcggaggatataagcatgaagggtttggcagcaatggagtaggaagactagcagcagctgagcagttcgaggtcctacaaaataacaatatctatcgacgagatcggcgctcctttacacccactacatgtgctcaagtggtgtgatatcaaattaaagcctgtgtacaatcaataggtagaggtggcagtgattctagattttacactataaacttttatgatcgaatcggattaggatcgaaccttatacctattcatttttgaactaaaattatttaagaaccctaattttttatgaagagatatttagatcataatttattaccacccctaccccacccctacctgtatgacgatcatttgtttactaacgatcgagcatctagtaatgatatatattttatttatttactaattaacgagacagtagacgtaagttatcatctagtactacttttttttaaactaaggtatattaactttcaagatcagtcttgaaacaacatagcggcttctgattcatatgaatcagccacgtaaactcaaacacagacaagtgatactcaatccaaaaactggaccgtcgtccatgtgctcgagaggaaattccgtagtcactcgagccaacagacactgatccattgccaaatcatgtaagtccgttctctgaagaatagaccacgaatgcactcattaaactgccgcaaagataaggagaacaacatgatatgaacagtacaattgaaaatttccgaccgccttgggcctgtttggttcagcttttttctgaccggcttttccgagaatctagctgtggggagaatctggctatatagagaatctgagtatcattagaattacgtgcggaggaagataaagttgttcatggggctcaggatttataaagtgacggattactactattgcgacaactcaaccgattatatgtttatattgattttgaatgatttttactcaaatgaattttatagaagctagctgaaaagctgagtgtttggcagcccaaagcggcttttggtggccagaagctgcgaaaagccgaaacaaacgggggctcatcagatataatctgtacacaatcggacataagttatcttcattggcttagcgtttatctcccatgacaagtgtctgtcagttttaaaaggtcagaaataaagttatttctgacagcggacatcagacaagctatgtcctacagcctctaggggtcgtcgacagttaaatcgggtaacgacagtgaaggcgtctagtggaccccacaaacgttatgtcatatgtcctgcatgtataccgttggacatcacataattatgtctgacggcgcatatgcagaccatcgtacataagagtataacgttcgatggccatagctaggccgtcgatcataatgaattctatggaggtcaaaattctctctgtttttttgtttattcccacaacatatattttcactgccacaaatatccatatttcacaatcaccgacatattcacagccgcatacatccacaagcacaaacacatacattttcacagccacaaaaatctagatttcacaaccatatgcatattcacagccacgtacatccacaaccacaaacacatacaatttcacaatgtcaaatatccagatttcataaccaaatacatattcacatccacaaccacaaacacatatattttcacattcataatacacattttatcgacaaagcgacattcacaaccacaaacatgtatctcacatttaattcacatatcacaaagttccacacattggacttagtcaacacacattcacatagttcaaaattcattcaaatgtcatcataaaattactaaggttctaaagtgcaatggaactaactaggtctgccatccatcacctggttggttagagttatggccacttccactggctggactttgggtggtgaaaagttgtgcacccacgaagttgcggtatcgtcttggccagattcctctcaaggtgctgcaacctaagtgggaggtgtctaaaagccctctaacacataagctgagatattaaacactaagttcttaatttctatcacacacgcatatatgtacgtatgaacaaatacctaatctagacaagtcaaagggaaaagtgccggaggtggaggcggcgatgcaggtgctggcagcggcatcccaaaggtcgccacctggatgcccatttgttgtgccagttgctacaaattagatgcaagtaaattttgaggaagcataaaatgaaacaagtttgtacttgttacaaataagatattacttcaacttaccgaaaggaaagcctactgctgggcctagaggttcgcaaagtacttgtccttgagagcacctagaggggggtgaattggtgatcctacaaaaaagatttaaaacaacacaaacttggtctaataatgaagttagagtaaattaaaaccaagtttgagttaaggagaagagagaaaagtttccttcacttgattgatattccaagatatgaattatactaagagcaatatcacaagtgagaaaagagaacttaggagtaaagaaaatcgcaagaaagtaaaggagacaagtgaggcaacaatttttatcccatggttcagcaaaagcctaccttgatccacattgtggtgtcctcccttggacaagggttgcaatcaagccctatcaagtgatcatgtagatcaaacttgagtgctacggttcttccttatatctcaagtattcccatttgcaaggaatctccacaacttagagtaacttgcatccttacaaaagatcactatatcaacttagtaagggagggagagaaagtacacatacaagagcaatgagcagcaacacacacaagaataaagaagacaagggcacaagaacacaaatcaacaagaagagctcaaaactgacactcagatctcacgaaatagctagaatgcattgttgcagcgtgtcggagtgttggtgtgctcttaaagtacttggggtacatcggtgttttgggtctgaccgcgcacccggggttgcccctcgaggtgctttttggagtaggacggtgttaccgaccgtagctcgatggttcgtgctagatgcacgagagaaagtggacaattttatacaggttcgggccgcttagagaggcgtaacaccctacttcctagtgtggatcttttatgtggtgggttacaggggagttctctggtatgagggatactagagagttgagtagacggctacatgcggatatgataacaacgtgcgcctaagtaatagtgaaccgactgagcctatcttcctataattctgccgacttatcgtcattcagttccaacgcttgagggcgcggcacgggagaatcggatcactgcagtggataatgcttaaatttattggactgcctgggcttgagttgatccaatcttgcgtcgacctactctgccagacattcctccctaggcccacgaagggatggccttgcgaaacaatgggcccaaggcctttcgtgaggtcttctagccttctagtggacccgggggatatctatcccccacaagcccccaatctttgagttgattttgaaataatcggcccaaagattccaggtctagcttgcagttttgattttttttaaatgtggatgctttgacagtacgcttgtcaagtcattgcttctaagctttgattggtcagcttatgctttagagatcagcacttcgtttttggaggttggagattcattgggtgcacccaatgggtgtagcccccgagctttgagtggattactgaagataatccactctaaggtctttatttcctgccttttagaagtcgttggtttatctttgtcttatgctttagaaatcaaaatttcatcatcagttcatgctttagagattagcatttgtcttctgggattaatgattcattgggtgcaccggaggtgcacccaatgggtgtagcccccgagctttgagtggattactaaaaataatccactcaaaggtcttcatctcatgcttttagaaatcaatcattttatcttcctcgaatgccttagaattcagcattatatcatcagctttatgctttagagatcagcatatggttttgcctttgagattagtaatgcggtctacccatgtcctgttagatttgaaatttatttgatcggcgacagattggacgtccgatagatggctctttggttggtcttcatttcactttgtgcttcaatgcttttgttgattagacttgtacttcagcagctatttttggctttcctccgatctctatcgatatcttccttttgtcttgatacattcattgcgtatactgtatggatgcgactgcatgggaaaaatctattgaaaattcctggacgtcccccccaatgggtgtagccaagggacgacttggtgccctgagcgtttagcaaactgcccctgagtagtaacttgacgtgaccgcggggtgtaatcatatcgtccaagcagttgacttcagtcccaatgggtgtcgtgttacatgaaacggcgtctgccacctgacttgtttccagacgatttgaattgcatattgaatatttgtttactgttcagtgaccatggtaggagatgagcggttgcctcccgtccacaccttcacacatctcttggccatttgttgcttattctcctcttttctcttctcttctactccaccatgggcaagagcaagaaaggcggaagttcatcgcaccactccggcgacaagcggaagcgcgagccgagtcccccctccgaggacttcggtgactccgagtacttggaggaggagttctcctccgagtctgaggggtcgccagcctacgcctctgccccggtgtcgtccgatgactcggacgattcccaggggatcgctgtcgaggtgtggacgtacatccgggccgtcgagcgctccgggcacgagggctcggatgagtcggagatctcctcggacgaggaggactcctctaactcgtccgaggaggggagcggtggcgacggtgatgatgagggcgacggcgacggtggcaagggcgacggcggcaacggcaagggcgacggcagcagcggcaaggacgacggcggcagtggcatggccagtggaaaagtgcagctggcttaaatattagtatagataagtagcagtagaagtagtattagtaatagtggaataatatagtagtagttagtagtatagagtagcgtaagtagtgtggtagtgtagtaatgtaatgtagcgaaaaagggaacaaaggtcggctcataatgagttggtctttgagtttgtggaaggacttcccttatccatatattgaagaaaatttctacttgttctgagtctctcatctttgtttttccatcgctcttttatagtcaatagatagcttgtattcattcccagcgttgtcgttgttcttagaggtaacacccgagtaatgactggtaattgctgagtcgcatttggttctgctggcgtttacatggaggaaacggttgagttatgcattgccggcaatttttagagataactgtcaagctgctctggaccatgtcggtgttttagaggtaacggccgaactatattgggccacgtcggtgctttagaggtaacaaccgagttaggctaggccacgtcggtgctttagaaatagccgtcgagttatgttgggccatgtcggcgctttagaggtacctgccgagttagactaggccacgtcggcgctttagaaatagtcgccgagttatgctgggccacgtcggcgctaaagaggtagctgctgagttatgctgagccacgtcggcgctttagaggtagctgctgagttatgcgaggacgtcttgctttttccgagtgatgacttgacacttttagaaacggtgtctgacccgagaaaaccccatttatatcacgtcgtcgcacgcctctgcgttctgagccctaacttcacctttctgcctccaaatattactctgcttccgtctgatttcgcttcccttcaatccgctaacgagattgcgatggcgcccaagcggaagaaccaaaattctgttgcagtggtcattcctcccatcgaccccaacagccagttgccttttataggtaaccacatgtctgttgtcttggaatcagatctccttcaccttgttgatgttggaattcttcctccgaaagagctttgttcttggcggacttgccgtggggttactgtcccaacagaggatacccacaagtccgttgtttatgttccatttcttgttcgcggccttgctcttcccatttctcccttcttccgtggcctccttgacttttacaatctgaacctaactcatctgaatcccaattccattctgcaaatctctatctttgttcacctgtgcgaggcctacctcggagttcttccccactttggtttatggaagtatctgtaccattgttgacctgggatggctgggggtcagcaccaacttgtgggtggtgcgagtctggaaatgcggcgcggaaggaaaacggaatatcttgatattccgcttaaggacaccattaaggggtggcgtcttgaatgatttattgtggaaaactacggcaagtccctccccctcggtcgggaagacagccagatgtgcgcactccaagttggattgagtctcccactgccttggaagtaatagaggctaaggttctgcttgctgaagtatgtctgctgaaggaaagaggtctgactgccgaagctgtggttgctgattttgtttttaagaacatccagcccctaaaggacagagcatacccggcttacttgtacagtggtgttactgactccacttgggttatcaataggagaattcctgctaaggatttggtgagccggctagacatgatcttgattggcaaagtatcaaatgttggtgctcctgttgcctactcttcttggaatctgccacctcctaagtcctttttcaattttgtgtctaatcctcctgcaggtgatagtggcctgggtcttagagtgcgaccctctcccgaagatattgaggtcttggttgcttctctttgtgatcttcccaatgatgagaggcaagtttattttgagatgccagcgagtccagatgatgcagaaatgaatgcaatgcttgacatgttggctggagaatcatctgactcgggccctactgaaacaatggttgttgctgccataccagagcttgacaaagcaacggacgcccaaaagcctgagggtactcgcccaaagcgtcgtcgccaggtcagtcatccagctgcgcctgctgaagaaaagaagaagaaaaagagacggcttcggcgattgtcatgcttggactagggtgctggcccttctgctcctgttgctgaagaagtaccgggagaggtctttactagagttgatcccactggtggtgtacctgctgaagctgaccccaatgggtgtgacctacggccttctgcttaggaaaccatagctgaaaccttggaaggcggtctacggtatcccaaacctgaatattatatcttgtatgaattccactaccttggctgaggttagagaagcaatgagtttgtattctatccatttggtgaatttgtcaatggcgaccaacacgtgagtgtatcctccctaagctttcttgaagggtccaatcttgtccaatccccagcacgcaaatggccatgtcacgggtatggtctgcagttgttgtgctggtaaatgctgttgctttgataagaattggcaagcttcacacctctggactaactaggctgcatcactctttgctgtcggccagtagaaactagacttgaagacctttccaaccagagtcatggatgttgtgtgtatcccgcactgtccgtcgtggatctcatctaacagttgcttcccagtagccgaaagaatgcacctcatgaggactcctgttgcgccccttctgtatagtgcatccccaatgagggtgtagtgggctgactgccttgcgatgcgttctactgcagctttgccatccggttcctcttcattctttatatatctgatgatgggatccctccagtcattagagtctgactctggctggctcaaaatgttgcactcttctgcttgatctgaggaaatacttgggcgtggcacctcttggacaaaaactccatgtggaacctgggtccgattggatccttgtttcgacaacgcgtctgccgtcgcgttgcgatctctttccacatgatgaatttccagcccttcaaatttgtcttccagttttcggacggttgtgcagtacttgcccatagagtaattcgagcaatctcattctttatttatctgacttatgaccaccagtgaatctttgtataccatcaacctcttaatgcccagtgatatggcaatgttcaatccgtggatcaaagcttcatattctgctgcattattggatgctgagaataacaactgaagagcatatttgagttgctcacctccaggtgcaatgaagaggatccctgcacctgccccctacatctttagcgagccatcgaaatacatccgacatacttctgcagtctccgggttgtctggtacttgttgctcggtccattctgatacaaagtcaactagtgcttgagtctttattgcagtacgaggccgaaactcgatgtcgtgagctcccagctagaaggcccacttggctattcttccaatggcttctttgttgtggagaatatcccctattggaaacccggtgactactatgactttgtggtcgtcgaagtagtgacggagcttgcgtgcagttagaagtactgcatacaatagtttttgaacttgaggatacttcttcttagatggccccaaaacttcgctattgaaatagatgggatgctgtactggatacgcgtgtccttcctctactcgctcgactaccaacacggtgctcaccacgtgagttgtgcaagagatgtacaacagcagatcttctgtcggctggcttggcgtggctcggcatggcggcttcagcactggcggcgtggtcaggaacttcttcagtgcatcaagagcttcctgagcttctaaggtccactggaacttatccaccttcttgagcaatttgtagaatggtagacctttttctcctaaccttaatatgaacctgcttaaagctgccatgcatccagtaagtctttgcactttcttctatgactgtggtgcttccatcctcatgatagcctcgatcgtttttgggttagcttcaatccctcggtggctgacaatgaatccgagcaacttccctactggcactccaaagacacatttttctggattgagcttccaccgatatcgcctcagactgttgaagaccagctgcaaatcttcaatgaaattttttgagttttctgtcttgatcaccacatcatcaacataggcttctacccgcttgccccagtgacatgctaagcatgtttgaatggctctctggtaagtcgctcccgcattcttaaggccgaacgacatggaggtatagcagaaagctccaaacagggtaatgaatgttgttttttcctcgtcttcttttgccaagctgatttgatggtatcctgagtagcaatccaagaatgacagtatagaacatctggcggttgaatccaccacctgatctattctagaaagtctaaagggatccttcggacattgtttgttgagatctgtatagtcgacgcacatgcgccaatccactttattctttttgagtacaagaacagggtttgctaaccactcaggatgcagtacttctctaatgaaccctgctgcgactaagcgagctagctcggcacggatggcttctctcttgtcgggcgtgaaacgacgcaacttttgtcggatcggtctcgcctggggataaaccttcagtttgtgctcggccagttctctcgggactcccggcatatccgcaggttgccatgcgaatacgtctcggttatcttgcagaaactggacgagcacgccttcctatttgtcatccaaggtggagctgatgatggcggttttgcgttcatcagtgaacccgaggttgattctttttgtttcctcagtcggcctcatagaggtcacggcttgagcttcatttgcaggtaccgcgaggtcctcctcaggctttgagttcacctgcgcggaagaagtcgtcgatggtttggtggtgagggccgcctgaatggccactcggaagcattctgcggcgccttggaagtcaacacgcacggtgatgatcccttgtggtcctggcatcttcaatatcatgtatgtatagtgtgaatggccatgaatttcgccaatcccagcctgccgatgatagcgttgtatccgcagtcgaagctcgctacctcgaaccttaggaactcggttctgtagttttccggagttctgaaggtgaccgatatgtagatgtgtccgagtgggtactctcctttagtcggcacaatgccgaagaaaggagtgtctgactcatggagctctttgagtgcgactcccaagccttggagtgtccgggggaaggtgacgttgatcctgcttcccccgtccactaacaccttctttatcctgctctctcggatcaccggatcgacgaggagcgggtatttgcccgagtgatcgaagttgagccactgatcttcccgagtgaaggtgatcgggtgttcggaccatcgatacggggcgggaggaccggtggctgccaccagtatctgacagtcgttgagcttctgctgcctcttgctctcttgcgacccatgtccaccgaagatgacgttgacttctccgtcgatgcacaggaatgctctgcctcctcccccttcctgttgttgaggttgtagaggttcttcgggtcctcctcacggtgggggaggtggcagaggttggaaggtcggtcgttcccgacggagtgcttgaagtctctgtagttccggagggtgtggtgcatgtccttatggtatggacattgggcgtcgaggctgttgtccaatgtacgttcgcctccgcagggtgctcctcgggcgcgagaggcgggtggtccggtggcgtggacttcttcgtgaggcctcttctcccaacgcttgtcgggttgttggttcgcgtcgagtcgtggtgccggcggtgcaggctttgctcctccgatgaggtcctaagctcgttcgtcggcaatgatgtagaggtctgcttccctgaatagttgctcggaggtagtaggcgccttttgcagtatggctcaaacgaaggccgagtcattagatccccggtagaagtcctcgatcaatgctgcttccgcaacctcggggatacgatttctcatggtctgaaaccttttgaggtatgactagagagtctcatcccctcgacgtttgatggatttgaggtcccatggctgcgccggcttgtcagagagggattggaagttggcgataaaacatcgactgaagttgctccaaccgtcgatgcagtgtcagggcaggtgtcgtagccactgcagcgcatcttgcccagggacgatgggcaaatatgcagtcatcacatcttcagttgccccagcggcgcgggcagtggtggtgtagacagccaaccagcctccagggtccttcttgggctcgtacttgtcgatgttggagaccttgaaattagggggccacggaatggccctaagacatggagtaaccgccgatactccacacgtatcctcctgtcgacgattgtggtgtcggtcccagggaggggagttatcgatgtgctgcctcgaccatccccgggtcgtgccgctagttgaagctgttgccgactcaaccctggtggcctgacttcgtctagggatgccatgatcccgatcatactcttctcgacgccgaatctcgttctcatgtcgtcgttcgtgcgaagcattgatggagcttcgtgcgtctcgtcgactattgatggtgtgtcgtagatcgcttggaggatgagcgagaggaagaaggtggttggctgcccgagtaagcagccgccgatagccctcggcgtctggagtccgtgggaggccatcggctatccgagccaacactccaccgacctcgctcggtgtgttcatggctcgggcgaagtcggggttcagatttcgcccgaagagaggattctctcgacgttgtctcgcctcctgcttggcttgctcttgagcttgccgacgatcacgtcggtgggaattccttctctccctgaagactcgttcatctggagtttctcccacctccaagatttcatctcgtgacacaggctgcgtcggatctcgttcttcggcttcatgatgtcgtcgggcgttacggcatcagttccttcatcaacgagcttcccgctgaggggattcttccctaggcacagttggttcatcgtcggagatggggaacgattccactctccccccgataaagaggacgtcggggtagaacggagttgtcgtgacgacaagcttctttctgttctcctttgagggcggaggctccagaagggcagcttgatggatccttgtttcttttttcctcgtaatccgtgtccactcttctatggatgaggtggacaacggggttcttcgggtgaatgaattttccgctcctggcttgtaggtggtagtcttcgctcggagcgctggaggttgcgctatttcctgctttgctccgactttcccggagattatcgaggaaggttttctctctgacagatccgctatgcaatgtagagttccttcttcatctgccacggatgagatggttccgaagcagaacatagatccagggcgaagagcgatcttgtgctggaaagtgacggccattgagctagcttggatcagtgacacaccccgtacttggcgcaccagctgtcggtgttttgggtccgaccgcgcacccggggttgcctctcaaggtgctttttgaagtaggactgtgttaccgactgtagctcgatggttcgtgctagatgcacgagagacagtggacaattttatacaggttcgggtcgcttagagaggcgtaacaccctacttcctggtgtggatcttttatgtggttggttacaggggagttctctagtatgagggatactagagagttgagcagacagctaatgagtgagttgttgtttgagggggtgcccctaggccttatatactcgaccgtgggtcgttacatgcggatatgataacaacgtgcgcctaagtaatagtgaaccgactgagcctatcttcctataattctgccgacttatcatcattcagtttcgacgcctgagggcgcagcgcgggagaatcggatcactgcagtggataatgcttaaatttattaggctacctgggctcgagttgatccaatcttgcgtcgacctactctgccagacattcctccccaggcccacgaagggatggccttgcgaaacaatgggcccaaggcctttcgcgaggtcttctagccttctagtggacccgggggatatctgtcccccacagggtactagttggaggcacatagggggtccttttatagccccaagaagcatacaagttgtggcctccttcatctggaagttgcaaaaacatagtgtctacgggaacactggaccgggtccgtgtgccccaagtccgggatctgattagtgcctttccttagatgggtggcaccggaccgccagtgacgtcagctagccattgacaccagagagagtcattgaagaagcagtctggtgcataccgaaccgtgaacaatagtggtctagtgaattttaaaattaaatttttgagagtgtactgttcacatacgaagacagtcatttacagcctggactagtccagtgtgctagcctatgtggcacctaagtacaaacccccccacagataggtccggtgaggcccagaccagcacaactttggatattttgaggcaatcttatccaaacctttttggttgtctttggtaggttccctacgacttagacaaacataactagcacttaatccaattgactaagtgtaggaaacatacctctttaccatagtttcttcagggtgtgcaatatggcttatctcaagcccaaaaagtgtttttctcttcaaaatatgttatatcccaaacacaattactagaaacattgtaacagacccatgcaacatatctaaaggtggaaacctcccaaatataccattttactccaagtctcatatatggcccctatttgagctctttggtactttatctttataacctatgctcatactcatatgaagatagttagttcaagatggtgtgttgagcagttaatcaccaaaacaggtagaaatggtgttatggcacatttctctttcacttatccctttggtgctcaacttgttgcctttgatactctgcatgttgccttataactccttgcatcctagcaatatcgatgtaatgggtagaggtgtgagaacgagacacctgcaaggacaataatacaaactgttgtcctcagtgtctcagctccctagagtgaatcgacgaatcaaatatacccaacctatagtattgaaccatagaattagtacaatcacacacatatgaccataacctagaaatcaaaatgaaacactctcactatccatgtgcttgtcctcatgcgctagcatatgccgcctctaggtcaattggttggctcccctagtcatagtcctacccatggcgctcaaccatctgctccccatatgctacctggagaaaacacaccaaatagtaatacatcatcaaggtgatacaaaagaatactagagtaaaaaaatcttaccatgtggtcggtggttgtctgagtgcacaagacattaggattatgtggattagaacccctatgcccttgcaaaaacacctcgacatctatgggcctagtaccagatttggcttcctgtacatacaagttacaatggcatacttttatttagtttgaagttaggacataatataacatatcattctcttagccaagcacacatgtccatccctcttgtagttgtggaacaactcgctaccacagtttccattgtttctttcggaaatggtgcaaaacttagggaaagcccaccacctgcataaggcttgataaccatttgatcggatggccatccaaggaacaaacacctaaatgaaatgcttctcgattaggtaacttgatgcactaacatgtacccaaaacaagaatcagtcaaaaaacaaaagagtcaataacttgttagctcaagatattgctcctccgtaaggtaaaccgatgaccagtctgtcttggtctttgccatgggtcagtcatcaatacttgccctataccatgcctttataacctgaatttgggcatagtacattgcactttcatgagaaaatgactcatctcttccatgttgttatacatgtagagcaaaacaaccttcctttcatcattggtgaaatagtatgccatgatgtgtcctacagttttgcccctctattgaaaaatttcaagatccaagggggattttcattgacatggtaccgcaatgtaggtgtgttaacgttgtgttcctatgtaaagtatatgtccatgaacaatgttatctctttgtatttgaattcctcagtgatgcacccttcaacttgtctcttattaccatccattgcatggagcttctttagtgttctttcgatgtgatacatgcatatatctatactggaaaggataacatacggacctaccttagcttcatatggaagatgaataagtagatgttgcattggattgaagaaactaggaggaaatattttttcaagcatggataccaaaaccgatatttgctgctccatcatctatttcttcatttacttagcacaaagatgtctataaaagtagcttagctccactaatgccttccacacatcatttttcacaaaaccacgcagcataacatgaagaagtttttcaatgattatctggtaatcatgaatcttgaacctagaaaatttgtcggtcttcacattcacagatcttctaaagttcaccgcataactatcagataactttaagtttttcaaccacctcatcaattttttataccttttagtttttaggttgtaaggagcacgtggtcttgaactcaagaaacaaggaggatggtaagccatttgtgaagatcagcatactggggtgtggtcggaacatactgaacacgaacttctctagtagcaacccgctcccaaacaaaatggagaacaatctctacatgcttcgtttaatgatgctgaagtggattggtagacatgtagacatcacttatgttatcacaatagacaagggtgcttctacaaagaggattatgaagttcgagtagatgttgacgtagccaataggcctcagcaacaccattggcaccaactcaatattcagctttagcactagagcgagaaaccactttctgctgttgaaaaccaagaaaccaaattagcactagggtggtagctggttcgggcgtgcgggtgggcgcaccaaccgacacgaggctggttcagacggacgcgcagggtggtcctatgatggaccgttgtgtccatcgccctagggaaatgccaacgatccatcactggaccgctttgtggcacgcatgcccgaacccccctgcgtgcagctccgccctgcacggctcgcgacacgcgctattaagtcatttgccttcagttttagacattctagcgtacataagtcattctgtcatttttatgtatctcagacatttcttattattggttcagtcattctaggcaatattaagtcattctaacgtctagacaacattaagtcatttcagagtccaagcaaaggcattcaaccatcagacaacgttaagtcactccaatgaacatttagtcatttcaatgaacattaagtcattttaattttcagacatttttcatgttttctcggacattcatttgttttttagtttagtcattcttgtttttcagggaaacatcaagccatttttgagggaaacattaagtcattcttttttgttttcagtcattctccatatttttctcagtcatttctggtttttcagtcattccagagtctagacaatatttagttattttttttattttcagtcatttatc

SEQ ID NO: 609 - DNA, 2007 bp, Zea mays
  Intron number 2 from transcript GRMZM2G175284_T01 (locus G RMZM2G175284) derived from phytozome v7.0 (chr-ID 3; pos 2 6096068 to 26098074 reverse strand)
aatgtgagctgctaggaggattggtattgctgatttgatcatcttagtttgtttagatatggttgtggatgtaccccgggaaggagtgattttgacatctgctgagtatgagtacatcagctagctgattgcttacattttcttggtccctatacctgctcaccttgcgggtcattacagagatgaagacgaagacagtttccaggttcgtactggctattagctgcgttctctctccctattctccttctatcgaatcagtgttttgaagaaaaaaactgatttgaccatgcagtgacaccacattttttcgcgggtgctggatttctttcttggggaaccaggagagggaggcgaacaaggagatggttgtctaccttgtcgatgcctcgcccaaaatgttcacccctgccaaaaaactaatttgattattttatgtgttattgctttgtatctatagcagtttcaatgctcattgtggtttgaaacctttgtttgatatattgtctgaattgatgtagagaaagcagaaaagatctaaaaggatgggttaaaagaaagtctatctgcaactatacgaagcaatgaaggtacttgtccacatatgccgagacgagtgaaggacgattgggcctcaagatcgagccatcgtcttcgttgttgtctagcaaaaatggcctcctcaacttcacaagagctggtaggctccttttgtctatcgacacttcaaacaggtacctgaattttttttgaataaatcaaggattcttggtactcggtactttctgctatgccaaattctctataatgatatatgagtaatgatgagtaccaagtaacaattgtgtgatactcataatttcactaatttgaaacgatcattgttggagctcatatttcggatgtggttgggcctcttaccattctttcttcaagtgcctgatgtaatgatgtagtgtattgtatcaatacgtattgacatttactgcctagcttaatatttaccactgactacagcagcagcaagccactgatgcagcaaattattgtagcagtgactagctgcattgtagctgaagctagcagaagcgagcacataaaaatttataggcaatttgtaccttgtgaattattcatatcatcagctcatttttccttatggatttgtgaatatgaatgttgtggatgtagataattatgttatgtgcccctagaaataccacaatgttgtaacaggtgaactagagcagagagaatacattattacattattctagattaacaacctttcctttcctgtccacctcaagataaaaacggtggcgccacctggagacaaaaatcaagaccatatgaccgcatgtggagtttagcttgttgtttagacaatgcaatttagtccttccaaacatgattgacccgcttgggcagacacgactcagtctcagattttggatcttggaatgggttcctttgggatggagcggaaccagcatgcctccgtgttgtaggattgggagaatttgccttatgtttctttgggacctcaggttttttgtttttagtatcatagcaaaataatgatttttactcattctctctattttagtgcttgacaaagcttgcagtcaaagaaagaactgtgcagaatttgatctgcatgtgaacccaattattccaacacacgaatttgatctgcatgcttgaatagagatcatctctactcctttaatgcctaaacctacagctgtgtgacatgaagaacttgtgaaccaaaatcacggcacaactgaagacatagctaacaggaaaaatgacttttttattttcaagaactataacagaatccagtaacattgcagcaacccctgtttccccgacttagaaccagtgaagctcgctaatttagaggatacaccatttatgctaaccagtgaagccaactaatttaaaggacacaccatttatgcaggctcaagatcacaaaggcttaacagaattagctaa

SEQ ID NO: 610 - DNA, 2102 bp, Zea mays
  Intron number 1 from transcript AC193419.3_FGT001 (locus A C193419.3_FG001) derived from phytozome v7.0 (chr-ID 1; po s 58032937 to 58035038 reverse strand)
ggaggtaatggtagacgtcgtcatcataatcctgaaccagaccatgatccatttgctaagattaagttctctattccaccgttcatgggttcttatgatgctgaagcttacttagactaggagatgacagtagaacaaaaaattaattcccatcttgttcttgagcagcatagggttagacaagccactagtgaatttagagattttgctatcatttggtggaatgaatttgttaacacacgtgctgcaccacaaacatggaatgcgttaaaagaggagatgcgagctcgctttgttcccccttcttatagacgtgatcttcgaaaaaaattgcaacgcttagatcagggagacatgtcggtacaggaatactaccaagagcttcagaaaggtatgctacgatgtggggtagttgaggatccggaggatcaaatggttaggttttatgggggattgaggcgggagattcaggatattgttgattataaagaatatcattctatacaacacttgtttcatctttctatgttggcagaaaaagaattgcagggtcgtcaacagcggaggagcagcactttcgcgccacaccagccaccggcgccagccaaggcgtcatcctcttcgagcgtacggacgtccacatcttcctccaccagcaccacacgcagcaccgcaccttcggcatcacagggacacgacaacagcaagtccttggtgccttcgggtgttgcagcaaaacctgctacgaccacctcttctataggctgttcctccgacatcaagtgccaccgttgctagggacttggccatattcagtgagattgccccagcaaacagggatacattgctactggtgatggtgggtatgttagtgcttctgatgtggaagatgaagatactgttggagctaacattgcagagacttatgatggtgatgaagaggttcttggtacaacagtgaccgagacctataaggccttgattgtgcaacgagctttgagtgccacggctagtgacgacgacaacagacagtgctacaacctcttcaacatgttcctcatcgtcaaggactgccgtgtacataccatcattgacggtggtagctgcaacaacttggtgaacgttgaggtggtcaagaagcttagcttgaccacacgacagcatccccacccttatcacattcaatggtttaacaacaacggtaagttcaaggtaacaaaaacagcaagagtgcatttttctattggctcttaccatgactttgctgatttcgatgtggtgagtatgtgtaacacccctggtgttactgttactaaaacttgagcataacatcataagcatgggaatatcatgtgtttgtcacacctagagtgcattcactaggcaaaactttcaaacaagttgtattgatacgacattttgtggataaaaccctagagtagggtacctaaccctagattgggcttaatagagcaaacaaggcttaaataggagaaaacttcaaaactcaattgaaataaccatattatgtcaccatgaatagacatacatggtatttaaaccctagaatccccaaaaactctaaaaagaaccctggaaagccctagacttaaaccctagggggcaaagtgcaaaattagtgcacttttggaccaaagtgcaaatagcaaagtaaaagtgtacctcaaacccactatctttcatattgaaggatctacaagttgaatagtgggatttggacctttttgtaaaaaaagacctacgaaagctatgtaattaagtctgaatttcagtaggttgagaccatctttggagctgtatatctcttcactcatgaggattctgtcctaaattagtacatcaaaatggtagagctactgtatgggtataagatcaattgagagacccaaccctaaaactctatgaaatctcatgaaatcataccccaaaatagagccagtagaactctgaattttcagagcaaaaacagtaatccgaaacctataatgaaatgtatcgagctaggtttggagtctttttgtgaccaatctagtgggttaaagtctgtgtagataaattaaagaccattagaaggggattaa

SEQ ID NO: 611 - DNA, 3292 bp, Zea mays
  Intron number 1 from transcript GRMZM2G115757_T03 (locus G RMZM2G115757) derived from phytozome v7.0 (chr-ID 7; pos 1 37455365 to 137458656)
gcgaagccgcagcttcttctctgtttcctactcgccgcctccgcgccgctaatcgtcggtgagtagaccccctcccccggcctcgattttccgtcgaggcacgacccgcgcagcgggctctgatccgatccgatccgatctgacatttgtgtttcgcagccacggccaagaaatccggggacgtgtcggagctccagatcggcgtcaaggtatcctactaggactgttttcccccactcatgtgcgatatgttatgtttcattccctatgttatgtttcattccctccattcattgttggattggactgggccaagcagagcagtatggaactgttgttttaatcagactggagattctgcttacggggacagcatagtttttactttctagaacggatcgagaattgtagaaacacgatgttatgggagtgatgatctatgaaaataaggaattgtggtgaaagtaagctgtgcaggagaattcaatcatttttgtgggattgactggaccattgggcaaaaaggttatatgcttgctcgatataaaattcgtgtgtttattttgatgggaaatttggatatttgagactccaaataatgcattttgcagtttccaattaacgctgccttagcaaaaacacgacatgttccacttgattacaatgtcatttcgtgtattttcttctgttcctattttctcctcgtacttggcgtttgaaaggatattttttgccgttatgcatgtttatgtgtcgaattgcaatggatggctgcccgctcgctctagcctagagatggcaatgggtacccgcgagccgatacccgatgggtatttactccattagggtatgtacgtgggttaaatattctatctgtgggtctgttatcgggcaaaaatcttcacccaatgggtaaacgggtattagaacgttccaccttcactcatacccgttaacccgtgggtataaaatacccaatataaacttagccaagcatgaatttagactttagtcatccatcttttttaatatttaataatcttttaggtcattatgtcatagaaggcttaacgacaatttaatgaccatgtaatggaacatgtaattcactcattgtgtgttgaatggatggttaaatgatgctagaaattttgtaatggtatttagatggatatactcgatgtttgtataatataatattttgatagatgtttaatttttgtgggtacgggtgacccgatgggtgacccatacccacgtgggtatgggtatgggggtaaatccatacccaccagtgtacatgggtgactcggtggggttatttttttatcgtgtgtatgggtatggggtagtaatacccggtgggtatttacccattgccatctctactctagcctctagccatgaccgccaccggtctgcccctgtcgccccagcgttggccacggcaacccttgcgctagcagcgctcgctccccgcttggccccgcccggccttacgctggccacacctgttgcctgcctcgcgcttgccctcgcactggctgtgtctaaaagtttttgaactgcgcaaaaaaaaacttttcacaacaccacacaataacacataatagatatataaattatgagcatatcacacaataacaaacacaaatgagttcatcttataaaactacgaatttagcctaaataagttcattaaaaaactatatttttgttccaactgagttgcatatcataccaaaaatattatgagtttatattttatcacaaaataaaacattcatatatcataaaaataccattcatccaatatgtagcctattctttgaagtttgaagttatcttaattgatgtagctagaataggaattctcataggacttaatactagtctgtatagaattgtcctctctaacaagaacgcaactcggttgcacagaaatatagtatgacaattacatatatgtaaatatattctatatggtagttgtgttaatatttcttatattttaatgatacttattggaccatctcgtattatttcttcaatagtttgcttatgtagtatgctaagttctcatgacttagcttttgtaacattcctactaggatgatttcgctttctacaagtaaaataaataaattttataataatataatgcctcaagttttagatgaagaaaattaatacttgtcttttttgttgtcctattgagtgggcatttggaactatcttgcttgtgatctttttcatcacatctcatgcaagttatacgttctcttatcattttctttccctttgtattggttggagcagtagtattatcatctccgttgataccgttattatcttgacacattttcgcttgtggccacctttcatatgtccttttagtcttaattttcttcgtcttcctgcagtttttttagcaagtggtgcaacaacaacaaaagatagtttgactttggccattagattttgtcagtcaatggctcaatttctaacataagcattctttaatttattcaccgagttatactcatacacaaattattcaaggttaacttaacttactgttgtctggttacaaaggtcaatacatattaacatggcttaccagtatgttaccattcaagacaagtgcatgtcatttgatttaactttataacatgtctttcaattttcttgctatggtctcaaaactttacactgcaatcagcaaatggtacaattttcaagtccccgaaacctcagtatttgctctaaactgaagtataatatttggaagtatcattcttttaggtagtctatataatatttcatttttttccataattgcatgatcatttctttaatcctatcaagaagcttaacaatatgtaagcctttaatgtctcatctccgattattgaagatctttttctgtattcaatattgacctctaatgatattgaaccttagcaagaggtcttcaataacaagatataagatattcaagacttacgtgttgctgagattgctgataagattatagaattgaacatgcaattatagaacaagagaataaatatttgatacagactacctgaaggacggacactttgaactattattcttaagatcaaagaaaataatagagatttgggacacttaaaattgtaccatatgctaattggagtgcaaaaatttaggatcgcatgtgctgccatcatttgcaccaattattttaggcaggttcttatattgatgctatgcctgggtattttaaaatgcagtacaagccggaatc

SEQ ID NO: 612 - DNA, 19662 bp, Zea mays
  Intron number 1 from transcript GRMZM2G487629_T01 (locus G RMZM2G487629) derived from phytozome v7.0 (chr-ID 1; pos 2 19772006 to 219791667)
ggcccaaggatcagacttacaagtcaaatcatcaggtacttacccaagttctgataatacaataagtatgggcataaacttgagttatagcccatgatgtacctaacttctatttttaaacaaaccctaactttaaaagtttcagcggtatttcgacaccgaagttcaattctcttgtcattcttttatgttcaatccagctcccctgtcttgcttcaaggtgctgttcttcaggcatcataaaaagtttatcaaatcaagcatcaagttttaatgtgatcaaatatcgaacttaggtataaaatttgcctctttgctgtatggaaaaagttaagatgcataggagaaggcttgttcagcatatattcgttagttggtaggttatactttttacgaaccagtctgacttctgtccagagagtggaagaggagagccaaatgaaaatggagtatctcgtttattcagataatagatatccactcttggttttgttatgtttatatcatagttattaaggcggtaagacgacataaacctgccacacccacagccgctctcccgtcccttagccgccagcacagttgacagctcttctctctccctccacacatccactctcctctctctctctctcctgtgtctgtaacaccccgtccactttcggactagtggtacttactcctgccagctctctaggatcatatattgtccccacaaaccaacacgggccttttgtgcgcattttgtcctcactcatgcacacccgagaaaacttcccggtcggtcacccatcccaaattgctccaagccaagcacacttaatttggaggtttttttacgagataggcttccgaaaaagaagatgtacctcgttggtatggatacatccttcaaagagcacccttaattcactaaaaatttgttgtccgtgatagccctcccaagttatcaggcccacatgcaccgatctttgccattaacggtcttagattggctatacatgtgtaccatggaacttaacaaggctttcgagttcaacaacttgaactcattatcccagagatcttccgcaaaacatgtatattacagtaatcacattcgatacacacacttcggagatagggcggaagactttacaaaacattatttattccaaaactcaagttttacatgctagaaagagttataattattacaagtcttgatagaactcaaagtgcataacttacatacaaaaccaggaaggtagaacccttccaaagctcacacataaacctaactaatctttcttcaagactggaagcatcttccagccatagggacacctaggatactcctgattacctgcaacaacatgggtttttgaaccgatactctattaattctattaagccttggtctaggatatcaccatcacagggccaggatatcacaatccaccccccttagtagaccgacgtcctcgttggtcaaccccaatctaggaacctcctctcttacccatgtctgtgtgtctagtgtcatcatatgccatgccatgtgaccactttgggtccacatgcgccatgctccatatacctgaacccctaaccccacacgcccatgaaaccgcgaggttcggctttgataccacttgtagcaccccatccactcctggaccgacgatacttactcctggcagctctctaggatcatatattgtccccacagaccaacacgagccttttgtgcgcactttgtccccactcatgcgcactcgagaaaacttctcggtcggtcacccatcccaaattgctccaagccaagcatgcttaacttgaagattcttacgagataggcttccgaaaaagaagatgcacctcgttggtatgaatactctattaattctattaagtcttgggccaggatatcacatcacttctctctctccctctccctctcctccgcgcctctcctctctccgtcacccctgcgcctctctatctctcctcccctacgccgctgtcgcacctctctaagcgccgccggcgctgctggctgtgtcgccccgtcgccgccgggcctcctcgcgctttatcctcgcaacaaggtgagaggatgccttacgactcgagcgcgccttaccgcctaagcttcgctttagcgacgccttaattactaaggtttatatatttctatcatggatgtcctctactcagtttcatggacccttttacaaagataactacttaaccaaaccccttatttaatatattttcccttgtagttcatggctacttggctacactactgaatcaagattcaatattcatttgagtaatgctacacctcaatgatttcaagtcgcctggtcgaaccctgggaccgactaggcgactagtcgcaattaggcgacgactagggcgattagtcgatccctagtcggtccccatttgtcctagaccttttagactagtaggtatacttatataggtatatatatacataaatatacctatgcattatataaattagaacaaacaactagtataaacaaaataacatattgctttattgtgatttgttacttacctgaacctgactacctagcaatggcttaggagtagagcagtaagccagcaaccatccactagtttggcactaggcactgccagaaatacagagaagaggagaaagggggggaccttgagatgacgagctcatctcgtcaatggtgctggtctgctggagagtgtagacgtcggtagtctgtcacagtcgccgccggtgctctatcacaggtcaccgccgtcgttggtactggtcttctagactgcagcaggacagcagccgagcaggcagaggcgctggtggaacaggccagcaggggcaaaggtgagcagccgctggtgctctgtggccgccggagctggatgtccggtctgttgcgcaagggcagccgtcggcgaccaggtatgaaggctggaggtcgggcaagagaggaggtgtatgtgtatgctggttttggcggctgggcagctgggtatgggcagaggagagaggaggccagactaaatgatactgtagatgggctgaaaatggcccaataccaaaaccctagtcaggcgaccaggaaacactaagcggacgattagtcgccctaatcgacgattagtcgaacgactaggatgaccagtccatctagtcgagttgtctgcctaatcagacacaaacaggcgaccatcccgactaatcgaccatctcgattaatcgcgattagtcggacgacttgaaatcattgctacacctacaaaaatgttttacaaaaaaactcgacttgcattgtatgctaacattgacaacaatcgtgcatgctgattttaacttaattaaaaggttatctgtgctggttggtggtcgaaaaaaaacctttgaccagggggagacatatccctcggattttgttttatgaagtttgtgccatccttttgaaattgaactggtgacaggggtttcattgacccctggacttccgcgttcttaccagtgtaagtcaatcgggagaattcaaccgtggtgcgaaagggcctctagctgagttggttaggtggtctgagtagcactcctcaggtcatgggttcgactccccgcgggagcgaatttcaggttgtggttaaaaaaatcccctcgtatgtcccacgccaaaacacaggtctaaggctcagccccggtcgtggtcgttctcacatgggcttcgatgccgttgtgtatgggtggggcaggggtttgggggttttctcgacctgtgtgagaaggtcttcttcttaatacaatgcccaggggctgtcttaccccccacagttcgagatggtggatcatgttagtagagcacaagtagaatttgtgtagaccattttgttagttagcatcttgagcacatttgacagtatgaggtaaactctattcttgaggaaagggttgttggtcatctgcttcgattcttgaagggagatcaaaacatggcaacacaattagagatacaatacatttgtcccttcaatctatctcctaaaggagagcaggttgaggggagaagaccatcataattatgattctgaagtagttaaaataaacaaacataattaatgaaaaatcattactatcatattctcttccttttaatacaagtgattacaattatacctccgaaggctgatacaacagttctaaggtgataaggaaaagtatcttcagagtttgagcagtcctgttcctaagtgtcactcgtgcatggctctgtacctctatttatagtggcgaattggtatacaactttgcataacgttacaaccatgtcttcagttcctatacacataaactgcgaaattcatgaatggcatcaccgtcttttcccttatagacgtgctgaacaagccttcagaatctcccttcatgtggttagccgaagacctccttcatccacccggttgagggtttcatttctggatagcagaaccgaagcctccaaaccaccttcgtgcacatcactaggacgaagatgactccattgttccttcaaagcacttgaagcaaacatagatactgtcagaggaataacccttggattaactgggccaaccctagagggtggctatatagagtttatacatgggccacatgggcttagcctcatgggcctaatccatataatctaacaccccccccccccgcagtctgaacttccgtcgcaacggagtttacagactggactcgaaaagaagaagtacatcacacaataggatccccccacagactcaactagccactactgatgttgaggctggagcgaaactcggcgaaggtcgaggacggaagacccttttttttttctcgaacgcgcaagagacatgcgcattttttcattaagtaggaatagaaaaagatccaaaatggatcagtacaagaagacccccattacggtggtcgaaaacaaagaaacagaaatacatccataaataaaaggaaacagaaactactatgacctaaagacctgggattggggctgttaagagatctaagtttgtagcccctcctaacacccacaggtccctttcctactcagttctcttgatggcttcattaaggcagggagaaaggccgtcaaaaacacaggcgtttcggtgtttccacaatatccagaggccgagactgataagcgagtttagtccttttctggcaattccatgcaactgatcactacatcttttccaccagagcatggtattctcttcatagacataaggcgtgaaattctggaggttaacctttgtcagcagcttgaaccagtaatttcttgcaaacacacagctcacgaggagatggtcaatggtttccatttcctggtcacaaagggggcacttatcagggtgatcaagccccctcctctgaagtctgtcagctgtccaacatctctgcagcgccacaagccataggaaaaatttgcatttgggggggaccaagaatgccaaaccctgtcacagtgctcaaaatatgttgatccaataaataaactctcgtaggctactttggcagagtatttgccattatgggcaaacctaaagatgtgtttgtcctctctctgcgggtttatgttaactgtgataatagcatcccaaagatcaagataatcagctagtacctccacagtgagagctccttggatatcattaagccaacttctatttgctaaagctgtctgaacagttctactgttttgaattcgccttggcacagctagtagcaatctgggagcaatatccatcacatttcgtccatgaatccatctatcttcccaaaagagtgtcgagtgtccattgccaatttccgtgtgagtggcatcatgaaagaaggatttcaccttggaaggaaaatgcatagggagtcctgcccaaggtttatcaggttccactttagtcagccacaaccatctcattctcaaagcccaaccaagttctttaaggctgaaaatgcccaaccctcccaactcaactggcctgcacactctaccccaagccaccaggcagtgtccccctctgacttctttttttccacgtcacagaaatcctttcctgattttatcaatatccttgagaactcttggatgtaagtccactgccattgcaaggtagatgatcattcctgtcataacgtattggacttgtacttttcttccagctctagtcatcaagtcagctttccaccccgggagctggtcagcaatcttgtcgattatgtattgagtttgatttctggaaagtttgctcaaagacaggggcaggccaaggtatttacaggggaaagaagagatctcacaggggagacactcctgaagggtcgccacttcctcttccccacatctaatggggtacacactgcttttttggatgttggttttcagcccagaagcttttccaaaaatctctaaaattttgagaaccagttgaatatcagattcttttggatgcaaaaacatgatcacatcatcagcatacaaggacactctgtgatgcaaaggtctagaagccaatggatgcagcagattttcgagatcagcttttgaaattaaccatcctagcacgtccatgacaagtatgaacaacataggtgagagggggtctccctgtcttaagccctttttgagctgaattttttcgccagcaacaccattaagcagtacttgtgtggacgaagtagatagcagtccacacagaacattcatccaaatctgcccaaaccccagtttttgaagaacttcaaggaggaaaggccaagaaactgagtcaaaagctttagtaatgtcgagcttcaaaaggattcttgcttgtctttgctgatggagaagtctggcagtttgttgcacaatcataaaattgtcttggatgaatcgacctttgatgaaagcattctgcctttgggagaccatagattgcagcttattccccagtctgttagctaggattttagtgactagcttggccatgctatgcactaaactaataggccgaaagtccttgacttggtcagcaccctccttttttggaataagggtgatgagagctgaatttaatttgtaaaagtgaccaaacttcctatcccaaattgctgccaaaacttgcatcacattttctttaatgatagaccagcagactttgtaaaatcttcctgtcaacccatcaggtccaggggctttgtcagacggtagctctttaatggcttcaaaggcttctttttctgtaataggtaagtccagatcctccaaattatgagagggcagccccaggtagttaagattaatagtgacagttctatccagtcttgttcctaacaagcttctgtagaagttatccaccagcatggctttgtcagcatgatcagtaaatacattatctccagagaccagttttgccacaaagttcttcttctttctatatctggcatgcatatggaatagtttggtgttagcatcaccctctctgagccagttgattcttgatctagtacgtgcaatggtgcgcttaaatgaggcaagggctaaggaatgctttttcagtccacatctcagccaatcctccaaaggagacaaaagcctgaaatcttgggctacttcaagcctgtgaagaatctcccttgctaaagctaactgtgaggtcacatgcccaatcttttgtccactccatttctgcaaggatctagcagtggcttttagtctcctatcaaagcttagaactgggcagactccttcatcaatagaaatccaagcatcattgacagcttcctggaatccatctaactttggccaaaaggattcaaaatggaaccgcctcttgccaaaacagttgctctgcagacctagtacaagggggcagtgatcagagtcctccgaggcagcgctttggaggaggttattgggaaaaatatcttcccagtcacttgagcacaggactctgtctaatctaaccaatgtaggagacacttggtgattagaccaggtatatttgcgccctattagaggcaggtcaataaggcttgtatcatcaataaatttcctgaatctccccatcatggctctattgcaaaaagcgttgtttttgtcatcctctttatatataagattgaagtcccctgaaacaacccaaggcccatgacactctgctctgatctgtctgagttctagcaggaaggagatcttgtcttcattgctttggggaccatagacatttgttagccaccaatgctggccattggagtttttgaactgcacagatacgctgaaattgtccactctactcagccctgtgacttgtaaatgactcttccaggctacaagaattcctccgctggcacccaaagagggcaagtagacataatgctcgaagtttactcccagaatggctatcacttttattcgggtaatttcctgcatcttggtctcttgtaaacaaacaatgtctactcccagagaatcaataaaactgcgaacagaactctgtctcgaagtagaattcaggcccctaacattccatataaatattttttttggatccataaattacatattcagaggaacaacaaaagagagaagtggacactcagcaggcagcagccctatgcgatgaagcctctgccctcagctcatccggcaccttccacccaaaaaaggctgcaagagcctctatgtgattgaggggaagtctttcagaaaatattttttcataatcttttctggtttgctgatctatctcttccagttcccccaccaccttgagagccttcataactttctttgttgctcttgaggaaaggtcttgcctgccaatttctgctcccattccagcaatgcggcgactgcgacgaagggacacagcagtggaccgctcagacccttggtgaagatgttggcaaactgggaggtggtcgggacgtggaggacccgaacagcaccgacagcgacataatcgcggacgaagtgcagatcgatctcgacatgcttggtccgttggtgctgcactgggttggtggagaggtagatcgcgctgacgttgtcgcagtagaccaacgtgctcctggagaggggactgtgaagctcggcgaggagctgccagagccaggcagcctctgccacgccgttggctacgacacggtactccgcctcagcactcgagcgggaaacgatcggctggcgcttcgacgaccaggacaccaggttgccgcctaagaagacggcgaagccggagatggagcgccgagtgtctgggcacccggcccagtcagcgtcagtgtaggcgaccagctcggaggaggtagaccggtgaagaagcagcccgtagtcgacggtgccccggaggtagcgtaggaggcgcttgagagccgtgaggtggggctcccgggggtcgtgcatatgtagacagacctgctgcacggcgtaggagatgtccgacctggtgaaggtgaggtactgaagggcaccgacaagactcctgtagctggtggggtcccgattgggtcacccgtgaccttagagagcttggcctgcgtgtcgactggggtggagcagggcttgcagtcactcatctgggcccgctccagaatgtcaagagtgtactgtcgctgctgaaggaggagtcctgaggggcgaggctcagcagtgacccccaggaaatggtgaagtacacccagatccttgaccggaaactcccgctgaagtgcgtcgacgaggcggcgaagaagtgacggactggaggcggtgatgacaatgtcatccacgaagagaagcaagtaggcagtctctgctccatgaaggtggatgaacagagacgtgtctgacttggcctccacgaagcccagtgccaccaggaacatagccagtctggagtgccacgcccggggggcctgcttgaggccgtagagggacctgttgagccggcagaccatgtcagggcgagaggagtccacgaaccccgccggctgacagcagtagacggtctcggtgattctgtcgtgcaggaaggcgttcttgacgtcgagctggtgaactggccaggagcgagcgagggctagcgagagcaccgtgcggacagtggccggcttcacaaccgggctgaaggtctcatcgtagtcgactctggggcgctgagtgaagccccgaagaacccagcgagccttgtaccgctccagggtaccatcggcccgccgcttgtgcgtccagatccacttgccggtgacgacattggtgtcgggcggacggagcaccagatcccatgtctggttggcgacgagcgccgcatactcctcctccatcgcccgacgccagtgggggtccagcagggcggtgcagacggaggagggtaccggagaaacctgggagtctccgatcgtggccgccaggactcggggcggcagggtaccagccgcgtgccgcgtcaccatcgggtagacgtgccgcgggtcgaggtgaaggagcggtgggtggtacaccggcgtctcgacacatgccgcgggtggtcgcggcggaggtgtaggtgtccctggcggggactgggccaccggcggtgccgccggaggagaggtcgccggtggggacgaggcggtggaggcggtggaggtgcgaaccccggcggcggcagccggcgctggtagacgcgcaccggctgggcgaagcgtgccgaagggaccggcggtggcggtcccgcggccggcgacatgggcagcaggggctggcgctggtagacccgcaccggctgggcgaagagggccggaggggtcggtatcgacggccccgcaggcggggcgatcggagacggggcccgcagagaggcgacaccaccggacccgggcaaggcaccgggtcgggagtaggaccgtcaggcggtgagcgagtacctgcagagagaggaaggataggtggctcgaccaccgcgttagtcggaaaaagagtgaagaggtcaaggtcagggttggatgagggtggtgtggtggtggaggagtagggaaatacagactcatcaaacaccacatggcgagagatgaggacccggcgagaggagaggtcaaagcagcggtagcccttgtggtccggggagtacccgagaaacacacagagggtggaacggggtgcgagcttgtgaggaccagtggcagcggtgttcgggtagcaagcacacccgaagacacggaggtggtcatagcgcggaggggtaccgaaaagtgcctggtgaggagtgggggccgggcacgtagtggaagggagacggttgagtaggtaggtagaggtgtggaggccctcggcccagaagcgtgtcggtaggtgcgcctggagaagagtgcggatggtgtcgttggtcgtacggatcatgcgctcagccttgccgttctgggaggaggtatacgggcaagacatccgcaactgcatcctgtgggagagaaagaagtcgcaggaggtggagttatcgaactcccgaccattgtcacactgaacggccttggattaactggaccaaccctagagggtggctatatagagtttatacatgggcttagcctcatgggcctaatccatatattctaacagatacaactggtgcatcactttgcaacagacttgtgaggtccaggggcaccacaataagcaacaaagctgcgcctatggaccgtcaggtacgtcccttcccctcccttcccgcgcgacccctcccctcccctaccgacgcttgcactccccaatgccccacgccggcgcccactccgggtccggcggccaccttccaggggagcgccgccgctcctccctcctcccatttagcccccctgcaggcggccgctccctcccatcctcctcccctgtccgcggctccgtccaagactggtgggcggaccaagccggatcgctggcgcgaggattctggcgggtcctgcagctccgctgggagcgcccctgctggcccttccttccgcgacgtggtcctgcgctctcagccctcttctccggccagctggattcccaggtctgagccacgggcgtcacggtgtagggagctccgggctgcggctcttcagccgtcggtcgtggggggcactgtgaaggacgccggcgctgctgatggttggaagactgttgagtcccggcgttcccggcggctgcgcctgaaggttgccaatttccagcgccctgcacctaccaatctttccgacagatgcttcaactgtttctcaccaaatcacctggtccgtgactgccgttcaaggacaagatgcttcaagtgctgtgggcttgggcatagggcgtcccgctgcccggaggctccagatcgtgctcagttttccacagctgtttccaagcagacagtgtggtcacgtcttggcggtgtcgctccagaaagagcctctgtctggtcccgtcttcgaaatcagcaacctcctgggatcttgaagtctgtttggagcaggctttcctatccgtcttctggtggtttgtgccagacgaggcaatctattcaccctgcagcgcctcggaaggtttggcggaggaagacttcggtggctgcaatttcaggcagccagtatttgtttcaaggaatggcttctgaccttgctgggggcgctgatgccgtcactatcaggggccgttctcgccggcgtcactctcgcaaaagacggaaaccccccacccctcccagagatgatgggagcaggatttatatgcagccccatctgccttcttcaggacttgtacccccatgcttgctgggttggaaccacgccatgactgttgccgaggaagatcttcgtttggcagtggttgtctcggtgatcagcaaccgtgactcagtttctgaattcgaagtggcatccctgctctcaccaagattggaaatcactgaagactccattgttctccgtcgcttatcaccaaatagttttctgctggttctcccgtctgaagatatggctcaaaggctcgactcgaggtggtccattcagcgggctgcgactttcacagtggtctgcaagcgatggtctagatttttcaactcttctggcagaactcttcctcagctggttaacctggaattagatggcatcccagtgcacgtgtgggagacggctacggtggaacatttaataaatccttttgcttggctatttaaggtgcactcggatacctctggcctgagtgacctggtttccttcagatgttctgcctggtgcattgatacatccatgattccggagtcacgggagctctggattactgagcctctgcaggcgcctactggagatttgcaaggggttatctctctgggttatacagtgaagatcagatggtctattccttcttcagctgctgctgctcctttggtctctgcctcaccgccgtcgcctcgtgatcatgatgatggccctcggtcataccggcggtcccggtcacactctccacgagggcgaccacgggaagacatcaacgctagcaatcttggggagctgagacagcagcgtcgttcagccaaagaaagactgggtcccagatgcttggattccaaacaaatgaatcctaacccttctgagctggacaattctgtggatggcccttgctgcgatctcaacggagaacaccgcgcgggcctagagactccccacggggatgactcggctccggtgcacattgaagagcaagcccaacatgctgttttttctgatcaaatggactgcaatcccattgggcagcagaatttcactagagatttgtgcttgggtccaaatctcaatcaccgtgcgggccttgaggctccctttggagaggcttcggctccggtgcacattgaaaaccaatgcagcgaccacacttctgaacaccgtgcgggccttgagaatccccacgaggatgactcggctccggtgcacactgaagagcaagctcaacatgctgctgctgttttttctgaccagttggactgcaatcctagtgggcagcagagtattaatagagatttgtactcggtaccaagtgtcaaacaccgtgcgggccttgaggctctcttaggagaggcctcggctccggtgcactttgaggaacattcccatcagcattgtttccaaagccagggcgctgcaacatcagaaagaaggctcataaaggcaccaaacctgctcgtttatcatagaaaaaagaagcataataagccgctagttgaaattgctgaggaaacaacggaaaataataccattccagccctgcagatggatggcgtggaccctgtaacagccaaaaaagaggtatttcttaaacaaattgtgaaagaagtatctggtattctgccagcaccagcaaatccaactccaaagcccataatctccgagcggtctactgctgtgtcccttcgccgcagccgccgcattgctggaatgcgagcagaaattggcaagcaagatctttcctcaagagcaacaaagaaagttatgaaggctctcaaggtggtgggggaactggaagagatagatcagcaaaccagaaaagattatgaaaaaatattctctgaaagacttcccctcaatcacatagaggctctcgcagccttctttgggtggaaggtaccagatgagctgagggcagaggctccatcgcatagtgctgctgcctgctgagtgtccccttctctcttttgttgttcctctgagcatgtaatttatggatccaaaaaaaatatttatatggaatgttaggggactgaattctactttgagacagagttctgttcgcagttttattgattccctgggagtggacattgtttgtttacaagagaccaagatgcaggaaattaaccgaataaaagtgataaccattctaggagtaaacttcgagcattatgtctacttaccctctttgggtgccagcggaggaattcttgtagcctggaagagtcatttacaagtcacagggttgagtagagtggacaatttcagcgtatctgtgcagttcaaaaactccaatggccagcattggtggttaacaaatgtctatggtccccaaagcaatgaagacaagatctccttcctgctagaactcagacagatcagagcagagtgtcatgggccttgggttgtttcaggggacttcaatcttatatacaaagaggatgacaaaaacaacgctttttgtaatagagccatgatggggagattcaggaaatttattgatgatacaagccttattgacctgcctctaatagggcgcaaatatacctggtctaatcaccaagtgtctcctacattggttagattagacagagtcctgtgctcaagtgactgggaagatatttttcccaataacctcctccaaagcgctgcctcggaggactctgatcactgcccccttgtgctaggtctgcagagcaactgttttagcaagaggcggttccattttgaatccttttggccaaagctagatggattccaggaagctgtcaatgatgcttggatatctattgaggatggagtctgcccagttctaagctttgatagaagactaaaagccactgctagatccttgcagaaatggagtgggcaaaagattggacatgtgacctcacagttagctttagcaagggagattcttcacaggcttgaagtagcccaagatttcaggcttttgtcccctttggaggattggctgagatgtggactgaaaaagcattccttagcccttgcctcttttaagcgcaccattgcacgtaccagatcaagaatcaactggctcagagagggtgatgctaacaccaaattattccatatgcatgccagatatagaaagaagaagaactttgtggcaaaactggtatctggagataatgtatttactgatcatgctgacaaagccatgctggtggataatttctacagaagcctattgggaacaagactggatagaactgtcactattaatcttaactacctggggctgccctctcataatttggaggatctggacttaccaattacagaaaaagaagcctttgaagccattaaagagctaccgtccgacaaagcccctggacctgatgggttcacaggaagattttacaaagcctgttggcctatcattaaggaaaatgtgatgcaagtattggcagctatttgggataggaaatttggtcactttcacaaactaaattcagctcttatcacccttattccaaaaaaggagggtgctgaccaagtcaaggattttcggcctattagtttagtgcatagcatggccaatctagtcactaaaatcctagctaacagactggggaataaactgcaatctatggtctcccaaaggcagagtgctttcatcaaaggccggttcatccaagacaattttatgattgtgcaacaaactgccagactcctccatcagcaaagacaagcaagaatccttttgaaactagacattactaaagcttttgactcagtttcctggcctttcctcctcgaagttcttcagaaactggggtttgggcagatttggatgaatgttctgtgtggactgctatctacctcgtccacacaagtactgcttaatggtgttgctggcgaaaaaattcagctcaaaaagggtttaagacagggagaccccctctcacctatgctgttcatacttgtcatggacgtgctaggatggttaatttcaaaagctgatctagaaaatctgttgcatccattggcttctagacctttgcaacacagagtgtccttgtatgctgatgatgtgatcatgtttttgcatccaaatgaatctgatattcaactggttctcaaaattttagagatttttggagaagcttctgggctgaaaacaaacatccaaaaaagcagtgtgtacccaattagatgtggggaagaggaagtggcgacccttcaggagtgtctcccctgtgagatctcttctttcccctgtaaataccttggcctgcctctgtctttgagcaagctttccagaaatcaaactcaatacataatcgacaagattgctgaccagctcccggggtggaaagctgacttgatgactagagctggaagaaaagttcaagtccaatatgttatgacaggaatgatcatctaccttgcaatggcagtggacttacatccaagagttctcaaggatattgataaaatcaggaaaggatttctatggcgtggaaaaaaaaaagaagtcagagggggacactgcctggtggcttggggtagagtgtgcgggccagttgagttgggaggattgggcattttcagccttaaagaactcagttgggctttgagaatgagatggctgtggctgactaaagtggaacctgataaaccttgggcaggactccctatgcattttccttccaaggtgaaatccttctttcatgctgccacttacacggaaattggcaatggacactcgacacttttttgggaagatagatggattcatggtcgaagtgtgacggatattgctcccagattgctactagctgtgccaaggcgaattcaaaacagtagaactgttcatgcagctctagcaaatagaagttggttaaatgacattcaaggagctctcactgtggaggttcttgctgattatcttgatctttgggatactattaccacagtaagcataaacccacatagagaggacaaacacatttttaggtttgcccataatggcaaatactctgccaaagtagcctacgagagtttatttattgggtcaacatgctttgagcattgtgacagggtttggcactcctggtcccccccccaaatgcaaatttttcctttggcttgtagcgctgcagaggtgttggacagctgacagactacagaggagggggcttgatcaccctgatcagtgccccctttgtgaccaggaaatggaaaccattgaccatctcctcgtgagctgtgtgtttgcaagaaattactggttcaagctgctgacaaaggttaacctccagaatttcactccttatgtctatgaagagaataccatgctctggtggaaaagatgtagtgatcagttgcatggaattgccagaaaaggactaaactcgcttatcagtctcggcctctggatattgtggaaacaccgaaacgcctgtgtttttgacggcctttctccctgccttaatgaagccatcaagagaaccgaggaggagagggacctgtgggtgttaggaggggccacaaacttagatctcttaacagccccaatcccaggtctttaggtcaaagtagtttctggttccttttatttatggatgtatttttgtttctttgttttcgaccaccgtaatgggggtcttcctgtactgatccattttggatcctttttctcttccttcttaatgaaaagatgcgcatgtctcttgcgcgttcgagaaaaaaaaacagatacaactggtgtccttgtgttttaaggaccttctaataaaggtcatgtagggcatcctctcccagcttattatgtgacatgtgccactggtatcaaacagtcagagcactcagccctcatacagccacctaagaggactatgagcttgtggctgcattccgttgaagtgtctccaagttatctttgatctcccttctcttttcttgtgcctctctcctatttgcctctgaccccttgctgttggcattctgttgggcacaagttccatccagtaccatcaatattcaaggggatgtgggatctcagcgctacctctcattttttatttgttgctttctaaacttatcctgacggttggtatttgttctgacatgatcgtctctggttctgagataatgcgttaaggagcaatacctacaagataatcatgatgatcaccacctgcatgatgatggccacatttgccctcctgaaaattgattgacatgacaacagtggacatggagcctaggagggcttgtgccctcgttatctaaaataaaatatcatttttcgatgtttcaaaaatcatcataaagatcatgtatctagtacatgtaaagttaagtatagttgcattgaatcagtttaaaattcatcatagatgtcaagaaacaaagtagacaaggagaaactggcactgttcatcaagctgacagtgacgtgtttttttgaatcttcacacagaagataaatttcgaactgaatttttgcggctatacataactttaggtgtactacataaatgatatttgtgatgtttttttttcaaacattgcaccatggtgttggctgccgtgccagttgccataaggctggttggggctgcctgccgagcctgctacagagtactagttgatttttcaagaatacagggtcagacaaagcaaaaatgagccttagattgagcaagtgcttgttatgtatgtttctagtttcgaggagagtttgagcatgacactgaaccaggatctcatgccagatttgatattgtcttggttattttgcttacaaagtgaacttgtgtcagatgagcagctcatctgctggttcattgatttcttgctgtctaattcaaaacgtaacgagcaaccctgcctgcatgtgcatggaacctctatctatatcttgtctgccatttgttctgagatattatccctttttcagg

SEQ ID NO: 613 - DNA, 502 bp, Zea mays
  Intron number 3 from transcript GRMZM2G038313_T01 (locus G RMZM2G038313) derived from phytozome v7.0 (chr-ID 7; pos 1 9492423 to 19492924)
ggatcattgatctgttcttccaggacaggtttgtctgttaaaatctcaagactcgtcgtatgctgacataaaattatgatttgtgatttgtagcattctggcaatagtagtttaggaagcaacaacttattatcaacagttctcaagatattaaaatatacttccacatttccttatttttgtttagatgcacattgatatttcgattcaataattagtgaatagtgaatgctttatttcagttggagttcttcctcataaatgtattaggtggtatacatggaagtctaaaactacactgttttccactagtaggtttttataatcgtttctttctccagaaaaaaaaaactgagtttgattcagattcaatttttttataactgtaatccagtatgatgtcactactattttttgtctttgaattgatgtttaatgttataaatgttcagaatataccagtaaatttgcatactcatttgtttcccttgcaggtacttga

SEQ ID NO: 614 - DNA, 10603 bp, Zea mays
  Intron number 1 from transcript GRMZM5G876374_T01 (locus G RMZM5G876374) derived from phytozome v7.0 (chr-ID 2; pos 2 2660651 to 22671253)
tggcaatcatcacaacctgcggtattgctcagattgtatccttttgattgtcattatttttatgtggcatatctgtcacagtatctagaacaatttgcatacaaaaaactttgcatgtgtttgaggttgttaatattacaaaaagggggcaaatcgctaatatatgaacgatagaaggtagttctttctctattgtattatttagtttatgtgttgagcataaatttcaaaagtgatattgaaagtcgcctagaggggggtgaataggaaaatctgaaatttataaagtttaagcacaactacaagccggggttagcgttagaaatataatcgagtccaaaagacagggcgaaaacaaatcacaagtgaataagagcggatgacacggtgattttttttaccgaggttcggttcttgcaaacctactccccgttgaggtggtcacaaagaccgggtctctttcaaccctttccctctctcaaacggtcacctagaccgagtgagcttctcttctcaatcaattgggacacttagtccccacaaggaccaccacacaattggtgtctcttgctttgattacaaggaacttggaagcaagaatagaggaagaagaaaagcgatccaagcgcaagagctcaaaagaacacaacaaaactctctcttctagtcactattgctttgagtggaattgggacttggagagattttgattcactctatttgtgtcttgtattgaatgcactagctcttatattgaatgtgttggctgaaaacttggatgccttgaagtgttggtggttgggggtatttatagccccaaccaccaaagtggtcgttggggaaggctgctgtcgaagggcgcaccggacagtccggtgcgccagccacgtcacccaaccattagggttcgaccattggagcttctgacatgtgggccaccggacagtctggtggtgcaccggacaggtcctgttcactgtccgatgcgccatctggcacctgctctgactctgcgcgcgcagtcggcactgttcactgttcacttttgcagtcgaccgttggcgttgtagccgttgctccgatggcataccggacagtccggtgctacaccagacagtccagtgaattatagcggagagccattttctaaaacccgaagcttagcagttggagggtattctccctggtgcaccggacagtccggtgcgccagaccagggcagccttcggttttctttgctcctttttatttgaaccctttcttggactttttattggtttgtgttgaacctttggcacctgtagaacttataatctagagcaaactagttagtccaattatttgtgttgggcaattcaacgaccaaaatcatttaggaaaaaggtttgaccctatttccctttcaatctccccctttttggtgattgatgccaacacaaaccaaagcaaatatataagtgcagtaattgaactagtttgcataaggtaactgcaaaggttgcttggaaattaaattggtttaatttttcataagatatgcatggattgcttttcttcatatttaacatttttggaccacgcttgcaccacttgttttgtttttgcaaactcttttggaaattcttttcaaagtcttttgcaaaatagtcaaaggtatatgaatatgattttgagaagcatttttaagatttgaagttttctccccttgtttcaaatgtttttcctttgacaacacaaaattcccccttaatgaaattctcctcttagtgttcaagagggttttagatatgaattttgaaagaggtcataccaatttgaaattatatcaaaaataagataccaatttaaaaacttctttaatacaaattgaaagactacaaatttttgaaattggtggtggcgcggtccttttgctttaggctaatactttctccccctttggcatgaatcgccaaaaacggatacttgtgagtgaaatataagcccttctcaaactttctctccctatggcaaacaatataatgagtgaagatttataccaaagtggagagcggagcggagtgacggcgaaggatgaataattcaatggagtggagtggaagccttgtcttcgccgaggactccatttccctttcaatctatgacttagcatgaaatacacttgaaaaccacattagtcatagcacatgaaagatatatgatcaaaggtatataaatgagctatgtgcgcaaaatatcaatcaaaattcctagaatcaagaatgtttagctcatgcctaagtttggtaaaagttttctcatctaatggcttggtaaagatatcggctaattgttctttggtgctaacataagcaatctcgatatcccccttttgttggtgatccctcaaaaagtgataccgaatggctatgtgcttagtgcggctgtgctcaatgggattatccgccatgcggattgcactctcattatcacataggagaggaactttggttaatttgtaaccatagtccctaagggtttgcctcatccaaagcaattgcgcgcaacaatggcctgcggcaatgtactcggcttcggcggtagaaagagctatagaattttgtttcttagaagcccaagacaccagagatcttcccaagaacgggcaagtccctgatgtgctctttctatcaatcttacaccctgcccaatcagcatctgaatatcctattaagtcaaaagtgaacttccttaggatcggcttggaatcttgcacacatgcatatggaaagcataatatccggtcgagatgcacataaataaagtagagatcctatcatcgaccggtataccttttgatctacggatttacctcccgtgtcgaggtcgagatgcccattggttcccatgggtgtcttgatgggcttggcatccttcatcccaaacttggtgagtatgtcttgagtgtacttcgtttggctgatgaaggtgccctcttggagttgcttgacttgaaatcctaagaaatacttcaactcccccatcatagacatctcgaatttttgtaccatgatcctactaaactctccacatgtagatttgttagtagacccaaatatgatatcatcaacataaatttggcatacaaacaaatcatttgtaattgttttagtaaagagagtaggatcggctttttcgactttgaagccattagcgataagaaaatctcttaggcattcataccatgctcttggggcttgcttgagcccataaagcgccttagagagtttatagacatggttagggtactcactatcttcaaagctgggaggttgctcaacatagacctcctccttgattggtccattaaggaaggcacttttcacgtccatttgatacagcttaaaaccatggtaagtagcataggcaagtaatatacgaattgactcaagcctagctacgggtgcataggtttcaccgaaatccaaaccttcgacttgtgaatatcccttgtccacaagtcgggctttgttccttgtcaccacaccatgctcatcttgcttgttgcggaagacccatttggttcctacaacattttgattaggacgtggaacaagatgtcatacctcattcctcatgaagttgttgagttcctcttgcattgccaacacccaatatgaatcccttaatgcgtcttccaccttgtatggctcaatagaagacacaaaggagtaatgttcacaaaaatgagcaacacgagatcgagtggttacccccttatgaatatcgccgaggatggtgttcacggggtgatctctttgtattgcttggtggactcttgggtgtggcggtcttggaccctcatcatcttccttgtcttgatcattggcatctccccctagatcattgtcctcctcttgaggtggctcctcttgatcttcattttcatcatcttgggttggtggagatgcttgcatggaagatgaaggttgatcttgtgcatgtggaggctcttcggattccttagggcacacatccccaatggacatgttccttagcgcgacgcacggagcctcttcatcatctagctcatcaagatcaacttgctctacttgagagccgttagtctcatcaaacacaatgtcacaagaaacttcaactagtccagtggacttgttaaagactctatatgcccttgtgtttgaatcataaccaagtaaaaaaccttctacaaccttaggagcaaatttggattttctacctcttttaacaagaataaagcatttgctaccgaagactctaaaatatgaaacattgggctttttaccggtgaggagttcatacgatgtcttcttgaggattcggtgaaggtagagacggttgatggcgtagcaagcggtgttgattgcttccgcccaaaaccggtccaaagtcttgtactcatcaagcatggtcctcgccatgtcaagtagagttctattcttcctctccactacaccattttgttgtggcgtgcagggagaagagaactcatgcttgatgccctcgtcctcaagaaagccttctatttgtgagttcttgaactccgttccgttgttgcttctaatctttttgatcctcaagccgaactcattttgagcccgtctcaagaatccctttaaggtctcttgggtttgtgatttttcctgcaaaaagaacacccaagtgaagcgagaataatcatccacaataacaagacaatacttactcccgctgatgcttatgtaagctatcgggctgaataggtccatggggagaagctcaagcggcctgtcggtcgtcatgatgttcttgtgtggatggtgaacaccaacttgcttccctgcttgacatgcgctacaaaccctgtctttctcaaaatgaacattggttagtcccaaaatgtgctctccctttagaagcttgtgaagattcttcatcccgacgtgggctagtcggcgatgccagagccaacccatgttagtcttagcaattaagcaagtgtcgagttcagctctattaaaatcaactaagtatagctaaccctctaacactcccttaaatgctacagaatcatcacttcttctaaagacggtaacacctatatccgtaaaaagacaattgtagcccattttgcataattgagaaacagaaagcaagttgtaatataaggaatctacaaaaaaacattagaaatagattggtcaggagatatggcaattttaccaagtcctttgaccaaaccttgattttcatccccgaatgtgatagctctttggggaccatggtttttctcgtaggaggagaacatccttttctccccagtcatgtggtttgtgcacccgctatcaattatccaagttgagcccctggatgcataaacctacaaaacatatttaggccttgttcttaggcacccaaacggtcttgggtcctttgacattagaaacaagcaccttgggtacccaaacacaagtctttgagcccttgtgtttggccccaacatatttggcaactactttgcctgatttgttagttaaaacatatgatgcatcaaaagtcttaaatgaaatgttatgatcatttgatgcaataggagatttctttttaggcaatttaacattggttgattgcctagagctagatgcctcactcttatacataaaagcatgatgagagccagagtgagacttcctagagtgaattcttctaatcttatgctcaggaaaaccaacaggatataaaatgtaaccctcgttatcctgagtcatgggagccttgcccttaacaaatttagacaatttcttaggggcattaagcttgacattgtctctcttttggaagccaatgccatccttaatgccagggcgtctcccactataaagcatactacgagcaaatttaaatttttcattctctaattcatgctcggcaattttaacatctaattttgctatatgatcatttttttgtttaatcatagcaatgtgatcatgaatagcatcaatattaacatctctacatctagtgcaaatagagacatgactaacagtagatgtagagggtttgcaagcatttaattcatcaatcttagcatgtaaaatagcattctcattcttaagattggaaatagaaatattgcaaacatttaaatctttagccttagcaattaatttttcattctcaattttaaggctagagagagatgtattcaacttgtcaatcttagcaattaaactagcattatcatttctaagattagcaattgaatcatcacaaacatctaacttctcaaccttagcaattaatttagcattttcatgtctaaggttggaaataatatcatggcaagtgcttagctcactagttaaattttcacacttttctacttcctgagcataagcatttttaaccttaacatgcttcttattttctttaattaggaagtactctttgctatccaagagctcatcattctcatgaatagctcctattaatttatttaatttttccttttgttgcatgttgaggttagcaaaaagagcaagaaattatcctcatcatcactagagttatcctcatcactagatgttgcatattttgtggaggctctagattttaccttctttttgtcgtcctttgccatgaggcacttgtggccgacgttggggaagagaaggcccttgttgatggcgatgtttgcggcgtcctcgtcggaggaggagtcggtggagctctcgtcggagtcccactcccggcaaacatgggcattgccgcccttcttcttgtagtacctcttcttttccttcttctttcccctcttgtcgtcgcccctgtcactgtcgctagaaataggacatttcgctataaagtgaccgggcttaccacatttgtagcaaaccttcttggagtggggtttgtaatccttccccctcctttgcttgaggatttggcgaaagctcttgatgatgagcgccatctcctcgttgtcgagcttggaggcgtcgatggggagtctacttgatgtagactcttctttcttctcctccgtcgccttaaatgcgacgggttgcatatcgggtgtggaggaggcgccttgctcgatgattttcttggagcctttgatcattaattcaaagctcacaaattttcctataacctactcgggagacattagcttgtatctaggatcaccacgaattaattgaacttgtgtaggattaagaaaaatgagtgatcttagaataaccttgaccatttcatggtcatcccatttggtgctcccgaggttgcgcagttggttcaccaaggtcttgagccggttgtacatggcttgtggctcctccccttgatgaagcatgaagcgaccgagctccccctcgatcgtttcccgcttggtgatcttggtcacctcgtctcctttgtgcgtggtctttagtacgtcccaaatctctttggcactcttcaacccttgcaccttattatactcctctcgacttatagaggcgaggagtatagtggtggcttgggagttgaaatgccagatttgggctaccttgtccgagtcatagccttcatcctccacggatggttcctatgcaccaaattcaacaatgtcccaaatactagcgtggagtgaggttagatggtgcctcattttatcactccacatacaataatcttcaccataaaaaaccggtggtttgcctagtgggacggaaagtaaaggagtgcgtttggaaatgcgaggatagcgtaaggggatcttactaaacttcttgcgctcatggcgcttagaagtgacggacggcgcgtcagagtcggaggtggatggcgacgaagaatcggtctcgtagtagaccactttcttcattttcttcttcttttcgccactccgatgcgacttgacgcggggaggtgattcctcccccttcttgttgccggactctcccgatggagctttcccgtggcttgtggcgggcttctcgccggtcaccatcttcttcttggcgtgagctcccaacatcacttcgagcggttaggctcttaatgaagtaccgagttttgataccaattgaaagtcgcctagaggggggtgaataggcaaatctgaaatttataaagtttaagcacaactacaagccggggttagcgttagaaatataatcgagtcagaaagagagggagaaaacaaatcacaagcgaataagagcggatgacacggtgatttgttttaccaaggttcgattcttgcaaacctactccctgttgaggtggtcacaaagaccgggtctctttcaaccctttccctctctcaaacggtcacctagaccgagtgagcttctcttctcaatcaattgggacacttagtccccacaaggaccaccacacaattggtgtctcttgctttgattacaaggaacttggaagcaagaatagaggaagaagaaaagcgatccaagcacaagagctcaaaagaacacaacaaaactctctcttctagtcactattgctttgagtggaattgggacttggagagattttgattcactctatttgtgtcttgtattgaatgcactagctcttttattgaatgtgttggctgaaaacttagatgccttgaagtgttggtggttgggggtatttatagccccaaccaccaaagtggccgttggggaaggctgctgtcgaagggcgcaccgaacagtccggtgcgccaccgaacactgtccggtgcgctagccacgtcacccaaccgttagggttcgaccgttggagcttctgacatgtgggccactggacagtccggtggtgcaccggacaggtcctattcactttccggtgcgccatctggcgcctgctctgactctgcgcgcgcagtcggcactgttcattgttcactattcacttttgcattcgaccgtagccgctgtagccgttgctccgctggcacaccgtacagtccggtgaattatagcggagagccattttctgaaacccgaagcttagcagttggagggaattctccctggtgcaccggacactatccggtggcacaccagatagtccggtgcgccagaccagggcaaccttcggttttctttgctcctttttatttgaaccctttcttggactttttattggtttgtgttgaaactttggcacctgtagaacttataatctagagcaaactagttagtccaattatttgtgttgggcaattcaaccaccaatatcatttaggaaaaggtttgaccctatttccctttcagatatacatcgtcttggttagcattgtcatcagcacatttgtggtaatgtggtgatgtgcatattttccagtgcattttattaaaaaaggagggggttgttgccactaaagcatcctttaatttgagtattagtgttctgtggcgtataacttgagtccttaacaagccatctgaaagtcgcctagaggggggtggataggcggaatctacttaagcacacactacaagtcggggttagcgttagaacgaatatcaagtccgagagagagggaaaaacaaatcgaccaagaaataaagcgaatgaacacggtgatttgttttaccgaggttcggttctaaagaacctagtccccgttgaggtggtgacaaagatcgggtctctttcaaccctttccctctctcaaatggtcacttagaccgagtgagctttctccttaatcaaccaggtcacttagacccccgcaaggaccaccacacacttagtgtctcttgctttgattacaagtcacttagagaaaaagaatgaggaagaagaaagcgatccaagaaacaagagttcaaagaacacgaacaaaacactccttctagtcactaggagtttggaatgaatttgggacttggagaggctttgattcttttgaattgtgtctaggagtgaatgcactagctcttgtattgaatgtgaagtgctggaaacttggatgcttggagtggtggtggttggggggtatttatagccctcaaccaccacatagctgttgggggtggctgctgttgatgggcgcaccgaacagtccggtgcgccagccacgtcacccaaccgttatggttcgggtgctatcaaccgttggaggctttgtcttctagtggcaccggacaggtactgttcactgtccggtgcgcctctgacgggcggctctgctctgccacgcactggtgcgcactgttcctctgaatcttcagcttttgcagtcgaccattgcgcgaaggagtcgttgctccgctggtgcactggacagtccggtgaattatagcggagcacacctagagaaacccgagggtggtgagtttggagttgtgcggtcctggtgcaccggacactgtccggtggcacagtggacagtccggtgcgctagaccagggcacactcgatttcttgctccttttgaatttgaacccctttcttcaattatttattggtttgtgttgaacctttatgcacctgtatatcatataatctagagcaaactagttagtccaatatttgtgttgggcattcaaccaccaaaattaatattgggaaaaggttaaccctatttccctttcaccatcag

SEQ ID NO: 615 - DNA, 10180 bp, Zea mays
  Intron number 3 from transcript GRMZM2G542753_T01 (locus G RMZM2G542753) derived from phytozome v7.0 (chr-ID 7; pos 8 1129077 to 81139256 reverse strand)
aggtgaccaagtaccaggccgcacataactgcaaggtacgtatgcacgcatggttacatttactatagaactagagttattttttgatgcaaaggctgccagatcatggtgatttcacgtccgtcaggctcgagacgtggactcaaacatccaagttttgcaagttttgatgttggatgttaaatttctatgctcacccctcgtttggttattgatgtactatttccatctcatgtcacaaatttggcataaggaatgggtattggtggctactgactgtgtttgtttctgttgggaccatgcttcgtcgccgaaggtcctacagaaagaaacagcttcggctgaagctgctcatacgtgacgccgaaggcaccattcatgaagctttggtattacagcatatccgaagatgaagggtcgaaccgacttaaatgtagaatgaccttttagtccataagggtctgagtcattgttgtaaacttttatgaggggcatgattgtaattcctcacaggttgtgtcctgtgcctataaatagtgaacagtattcctttactgttcacgcattcctgtaattgcaaacgcatcactcgggaattattgtttgtcaaggcaaaggtataaatgtacctaaacgttatattcaaacatcttaaattcatataataagatatgtgaatgatgtcatttatttctaatatattcatctttgatgtttcacgttttacattactctgtattatttttataagtttaattacgaaggtgaaaccttcgtaatattatgctcgtaaccttcgtccgaagttcattaaatccttgtggagataatgcttcggcggacgaagggtgttgatatttaacattttatgttgccttgttcttaattcatagcatttgagaacaagtccccaacattggcgcccacctccggtgaactcacttccacttttttgagctgatggcttcgttcaacaatcaagctggagctgcttcggctccgaagctggtactcccgataacaggcggttcatgctcagagccagccaacaagaagcagaaggaggcacagagaagggtacaacatgtcggggtgcaaggacccttcatcaagtcaagatggtctcacattccaattaccttctctcaagaggatctttaactcaaggattacccactcaacgatgctatggttatctcttgtgtgatcaaaggatttctggtccataatgttttggttgatacaggcagcgcaactgatatcatatttgctaaggccttcagacagatgcaagagcccgaggacaaaatccatgatgccacacatcccctttgtggcttcggaggaaggcagatcgtagcacttggaaaaatcacaatgccagtaaccttcggattcattaacaacacaaggactgaacaagttgtatttgatattgttgacatggaatacccttacaatgcaatcattggtcatggtactctcaatgccttcaaagcaattcttcatccagcttatctttgcatgaagataccctcggaccaagggcccattgctattcatggaagtcaggaagctgccagaagggccgaaggaaattggacagactcaaaagcaatccataatatagatggagctgaagcttgtgagcaatacaagttcagaagggaaaaagctgcttcggctgatcagccgaagcccatgctcttgtgtgaggacatagcagagcagaaggtgctgttgggatcacaactgtccgaagaacaggagaaaaccttgataaggtttttgttcaacaataaagatgtttttgcttggtcagctaatgatctttgcggagttaacagggatgttattgagcactcgctcaatgttgatccatccttcagacccagaaagtagaggcttcggaagatgtctgatgacaaggccgaaggtgctcggaatgaagtgaaaagactcctcagtgccggagttatcagagaggtaaaatacccagaatggctggctaacactgttatggtaaagaaggccaatggtaaatggaggatgtgtattgattttactgatctcaataaggcctgtccgaaggacgagtttccattgccaaaggatagattccctagttgatgcagcagcttcatcagagcttatgagtctgctggattgttattcaggttatcaccaaatttggatgaagaaggaggatgaaccgaaaaccagcttcataacccctagtggaacatattgttaccttcggatgcctgaggggcttaagaatgctggaggaagcttcagcagaatgacagcgaaggttcttcattcccagataggcagaaatgtgctaacttatgttgatgatatcattgtaaaaagcacgaagcaagataatcacattgctgatctgcaggagaccttcgctaattttagacaggctggtttaaagttgaacccagaaaaatgtgtcttcggagtgaagaaagggaaattttttggctgtctagtctcaacaaaaggaattgaggctaatccaaacaaaatcgaagttatccttcgaatggaaccaccaagtacaaagaaggggctcaaagattgataggaagactggcatctctcaacagattcatatctagatcaacagagagaaatttaccatttttcgaagtgctgaagtcagccgaagtttttcaatggggaccagtccagcagagagccttcgaagagctgaagcaatatttgatagatctaacaacactaactccaccaatgccaggggctcctttgttgttatatgtggcagcttcgcactcagccttaagtgcaacacttgtccaggagaagcttgaaggccaaatcaaaaagcaggccccaatatactttgtatccgaagttcttagtttatcaaagaaaaattatacagaattggagaaggtactgtatgctgttttgatgacctctaggaagcttcggcattattttcaagcttacaatataattgttccttcttcacaaccgttgaaggatattatgagaaatcgagaagctactggaaggattggaaaatgggctgcagagatcaatgaattttgtattgattatatgcataggtcttcgattcaatcccaagcgttggcagacttcattgctgactggacgccaggggctcaagaggaagaaacgaataaagatgccgaagtatggacagtgttttgcgatgggtcttggggaaccttcggagcaggagcagctgctgtgttggtttcaccttccaaagttaaaacttgttatgcgacaagacttgatttcagttgcacaaacaatattgctgagtacgaagctctgctcttgggtcttcggaagttaaaggcaatgggaatcagaagggccattcttaaaactgattcccaagttatttctggtcatattgacaagagctacaaagcaagagaaccgaagcttgaaaaatatttagatacagtccaaaggattgaggcttcctttgaaggattctatgttaaaaatattcctcgtggagaaaatgaatatgctgatctattagccaagtcaacagcacaggggctgcccttaccttcagaagtatttttcgaaacaataaaagcaccttcggtcgagcttcttgaaagagcagtcctcaccaaatcccctgtctatagtgaagattggagaactgagatcatctctttccttcagggtaattttctttcagatgacgaagcttataacaggaggatagaagcaagagctcgaccatatgtcataatagaaggggaattatacaagcggggggtctgttccccgttactcaagtgcttatccagagccgaaggcatagaattgatgaaggaaatacacgcaagcctgtgtggatctcacattggatctaggcctttgctcgggaaagtttttcgtcaaggattttattggccaaaagcagcttcggatgcagcggatttagttcaaaaatgcgaaggttgtcagaaatgtgcaagagatcaaaaacaaccttcgtctttaactcaattaatacaacccacttggtcgttgcaaaggtggggccttgatttgctaggtccattaccaccagcacaggggaacttaagatatgttgtagtggtagtggaatatttttctaagtggattgaagcaaagcctttagccacaatgacttcggttactattcaaaagtttttctggcaaaatattgtttgtcgcttcggagtgccgaaggccattactgtggataatgggacacagtttgattctgaagctttcagagaattttgcaatcaaattggcacgaagatccatttcgcatcagttcgacatccggagtcaaatggacttgttgaaagagctaatgggatcataatgacaggaataatgaagttaatcttcaatcagcccaggggaaagtggccagacgaattaatcaaagtggtgtggagccataacacaacagtgtcaagatcaacaggctttacgccattcaaactattgtttggtgacgaagcaataaccccggaagaagccaaaacgggatcaataagaacagtagcttcgacagaaggcgaagatgaagctgattattctgtggaaaaagatgctatagaagggatcaggcttcaagctgtggaaaacatcaacaaatatcaagctgaaacaataaaatggtgtgacagaaaggttaggttgaagaacattgaaccaggacacttggtgcttcgaagagtagccaaccctgagacagtgggcaaattacagctgaagtgggaaggaccttttttggtagtatcttcgtcaagacccggttcctacagattgaaggatatggacggcaacgacattcctagatcatggaatgcagatgagcttcggcgatattatgtttagcttgatgtaactttttctattcttttttgtggcacccttttcctttccaaagggggagaaaggtttttaatggggccacaacatgtaatttttcttttccttatttcaattctataagagtgatatcccccaaaaaatgtaaatgtaaatgcaaaggaaaaagaaaagaaaacagggagaagctcaaaagtcgttcctaagggaatgcagagcttacagtgaaaaataaacgctgattccgctgaaagtaaaaggcgaagaagctcctaagggaggcttacagcgaaaaattaacactgattccgctgaaagtaaaaggcgaagaagctcctaagggagtcttacagcgaaaagtcagcgctgatacaccgaaaagtaaacggtggagccgaaaagtaaacggcaaaaagatttgaatcgctcccaaggggatgaaaggctatgattatggtttttgaatgtgttccgatattcatttgcacgatacattacatcatgtcatttgcattcataaacattcatttagacatatatagaatcatcatcatcataccacacaaaaaagatagatgcttcagcaaggaggaaaaactttgaagaaagaggaaaattttcatgcttcgttgtgtacgaaaagaagggaaggagtttttcgccttcggctcaaaagtgtagtttcgttcacaacaaagcagattgtacacggataaaggagacaagatatattacaaggtatgtacaaatttacataagttttttccataaattatattacaaggatctctccagaattttttgcaggaaagtctattataacaactattaagcttcaggccgtcatacttcagcttcgtcatacttcagcttcgtcatcctgcacatattaaagaacagaataagaaaggtgcaaatttcaaggagaaggtaaaagtaacaaatataagtttctcactggcttaaggtggctttgagcttcgtcaccagccatttttcgcccgacatttacccaaatttgggtcataaatctatttccgatgcttcgggctaagcttgggatatcaatcaaatctgctgctgacaagcagaagtttggcctattcacaatctttccgtgcgtacagccagccttcagaaaagcagtagctgtgcctcgagaagctaccagggcgcagaagtcggcatgcccaccaataacttcgtcaagagcatcaacctcaccttcaatatgttccaaggtgctgggtaggttttcggctgaaggtgaaaatttttcagaactggctccgatagagtgaaacacatccttcagctgctgcacgcatcggctgccgaaatttaggcatttctcttgaagttccttcaatgatttttgcaaatttgaatttttctcaatctcagtcttgagacttgtttcaaggttcttcttttcttgctcaaatttttctgacttttcgagtaattcattctttaaactatcattttcggcttggacctcagccaaggagccttccatagactgaataacaaagtctttcttttctagggcaccttcgtgttctttagctatgatttcaagatcttgaatggtgaagtccttcttcagaacagcttcgtaattttcaactttttcttctaaatctttgatgatagctttgttcttctcctcttcaagatcttgttgcattctaagcactttacttaatagtatactctgccaaaacaaccttcgtcagaaaacaacataaaaacaataataataataaaataataataatattttcaccttaaaattagcatagagcaggctaccggcgatatgttgtcgctggtatctacaaaggtccgcttctatcttcggcaggccaacgcttttggggaaggtcctaacaactttggcctcggtgcgattccgaaggcaccttagcttcccttcgttgaccccaccaaatagcatagaccctgttttatatccacaggatatagcatattttttcagctcttcttttttagcacctgttaattccttcctccaaaatgtcttcaacctgctcttttcccttttcagtagccgtgttcaccgcagccacatcagcttcttcttcagccattttcagaagtatattgtcaataacttcaagtgtggtttccaggttcgaatcttcggtggtctcggcttcggctccggtagcttcagctccggtagcttcggttctggcagcttcggctccggtggcttcggctccggcgattgcaatttcagtggtttcggccccggtagcttcggctgcggcggcttcggcttcggcggtctcaacaatagcaatttttgacgccgataccggtggcggcatctgatgaatcacatctgtcacttgaatgattctccgttttttcggcttcgcagggctttctgctgccgaagcttctttgtccttctgaaaaaacttcgtcagttccggcgccagcggacttagcttgacaggcaaagattcagtcattaccttcagaatttcttctacttcagcagcagaaggtgtcgcaggaatttcctcatctcggaccaatctctttagttctggagatacaggttttggagatgcagcttttctttttcttggagcaactaccttcggttcaaacttttctttcttcttttttggttgatcttcgtcgtctttaatcaaagtgctagctactcttttccttttctgcccttcggcacccttgtctagccgctcgtagtcagggtattcaaagcctatagcatcaagcactctgtttagccttcgtttcggccgggtgccgaaggctgctgtcatcaattgatcctcttttttagaataattcccaagaatttcagtactcattacttcgattgtttcgagccattcttggcagggtgctttaaaatatttcttgaacttatagtggtagggcaggcggacaagctccccctccttcttctctctttcgagcttcggcatagcccattccttcatagttggaaatattttgaacgccataaattcctgcactagatctctagtgccaatgtgctctgcaataatcctgaattcggccaacgccgtttgggttggaccttctggtgtcatactacattggggtctggtctctccgaagatcagttcaagcggactctgtaccagcttctccttgtcatcatcaactttcacatagaaccattccgatttccagcctgccggccacttgcttcggtagctgatcacaggaaattttgtacttttccgataggcaaaattataacaaccaaaattttcatgtaacccatcctgtctggccttggtttggtaatgtagctcgtgtactcggcagaaaccttcggcaaacggttccacccctggcttcggagagcccaaatataaatactaagcctaacaatagcgttaggagttagttgatgaaggtagatcccaaatttctttagcacatcagcaatcatcctattcaaagaaaatctcaaaccagctttgaggaaactcttgaaaatcattatttcatctttctgtggcttcggggtagtttcttctccaccgaagcaaatcagctttttctcttcttcgctaaagtagcccgacttcaccatattaggaaaatcagccttggagacggttgactttccgaagtccaggtggctgggcttgctcggtactgcgatactgtgatcaccttcagaatcagtctcttcaatatctgcttgttctgcttcagcagtagggatgtcttccgatgtcatcaacccagatcgcttcattgcttccgagataggaacaatttccatagcttcggcttcgtctccttcgcgctcaactctagcagtagagcgcactctggccatttggtttcgaatttcttgaaaatttcttggaaattaataacctttcttccgaagctcttcttctcacgaggcagacaccaaactggagcttcgtttgaatgcgaaagtcaagcttcggctatggttaaatttttagcagcagaacagtgcaatagcaatgaatgctgtggtaacttcacacctacctgtctgtttatatagtgctgcaggtaagaaggtgaatcgtcaggatttttacaccaggcaaacagttgctcgcacccgctgcatggtgggccgcaaaaaccaaaatagtgaacctgcatggtgggaccgctacgcgctcgaaaactgtatcgtttctcgacaacgagctcagggaaggagtttttcggaccttcggcttcctgaagcctaagaaacttttttcacggatcaagctcgttacgaaaaacgatctagcaccgcgaaggggctactgttgggaccatgcttcgtcgccgaaagtcctgcagaaagaaacagcttcggctgaagctgctcatacgtgacgccgaaggcaccattcatgaagcttcggtattacagcatatccgaagatgaagggtcgaaccgacttaaagatagaatgaccttttagtccataagggtctgagtcattgttgtaatcttttatgaggggcatgattgtaattcctcacaggttgtgtcctgtgcctataaatagtgaacagtattcctttactgttcacgcattcctgtaattgcaaacgcatcactcgggaattattgtttgtcaaggcaaaggtataaatgtacctaaacgttatattcaaacatcttaaatttatataataagatatgtgaatgatgtcatttatttctaatatattcatctttaatgtttcacgttttacattactctgtattatttttataagtttaattacgaaggtgaaaccttcgtaatattatgctcgtaaccttcgtccgaagttcattaaatccttgtggagataatgcttcggcggacgaagggtgttgatatttaacattttatgttgccttgttcttaattcatagcatctgagaacaagtcctcaacagtttccacatattatacatgtacaatggaacagttgataaaagttttgcataaactattggcgttggctatctaaaaggacagaaaggcagacatgagcaacagatcccgctccatggtctaaaactaagattcgtgattgtcagctaagcataccttcgccttcaaatttgcatagcttcttttttattctgcaagttgtttggtctgtcgttcaaatgccttattattctgcgagctgatttaagactgggcctcaatttttttttccaggcagaaagtgctactgccgctctcaactatagcgg

SEQ ID NO: 616 - DNA, 1645 bp, Zea mays
  Intron number 1 from transcript GRMZM2G104481_T02 (locus G RMZM2G104481) derived from phytozome v7.0 (chr-ID 9; pos 5 9153953 to 59155597)
cagattctagcggcggtgacgcttcggggtgagttgcttgctatgtagttttttttcttcatatagtccggtctgttggattggattaggcgtggctgatagctctggtttggtgcatcctcatatgtgcttttgcaggaaggttttcgtagggggtgtagcctgggagacaactgaaggtagcgagcaattcttttgaatctaactatgaatctattttggtttatatcacgtgaagtgttgtagcaaaacacaatatattctgggaaaacaacacagtacaaatgagaattagttcttagctgtgttctgttagcataaaagaaaaatacgttgcaacatgttgcgctgcaaaagatatagctgtttctgtttttgtgagttactgatcaatttctgcattgagttggatcttggatgagtcactgatgcacttcgattttccttagctagtctaatttatgtggtaaaagcttagagttgggagctactgctgcctccattatattgatgatggaaccaatcttatattttgtatatctctctccatcatattgatggaagcaaccctatactttgttttcttgttggtgtattctgaattattattataaaacattgctgtttggtgatttgtgccagcctacttaatggatttcagaaacatggcaattctgaacatttagttctttttttcatgactgttgctacataatctgtctaattactaatctggttatgagatgctgttccatgtttgtctgctccgttattttttgtgctgatcagctacttattgtgttgcgatgatgatcatatcaatacatccagacatgctataaattattaatcagtatgctttattttatgcaattattctggaactgtatataatttgaccaatacagattggacttcagttggcgcattggtaggagatgttctgctttgatctgtttgataacttagaactgataattgtgactcattgtgcatagatgtgtgaactagaaaacagtaaatgaagttcatttcaataatttagtgacaatgtgggtgaactggaaaaatagagttcttttatttgagaaatcgaatgacaattaagtgtgtgtttgcattgatgttctagaattgtttgtcagtttcttgtgttcctaacttacggattataggagcatcatggtcttaatgtcacattattagttcgcaatctcacatggtactgcactgtagctaactagctaaccatagttgtcttcaagatgaatccttcgcattaatgatcctccaaatctactccaaaattgtatgtgaaccttttacgagtcatgttgttcattcacacttattttagtatctagtagtgccaagtatctgcagctacaaaagaaacattagaatatagattgctgatctcatagagcaataagtttttgttagattagattgtgttaacttgtttatttcactcatcttttgttacatgcaccatttgcatgagcagaaacattcacaaagcattttcagaagtatggagctataactgattctgtgatcatgaaggacaagcatactaggatgcctcgtggatttggatttgttacattttccgatccgtctgtgcttgacagggttctagagg

SEQ ID NO: 617 - DNA, 5985 bp, Zea mays
  Intron number 1 from transcript GRMZM2G036186_T02 (locus G RMZM2G036186) derived from phytozome v7.0 (chr-ID 10; pos 121508765 to 121514749 reverse strand)
tcggcaacacctgctactgcaacagtgtccttcaggtatggatacgtgccagctagtagatttgacgattggttatgctaagcttgatactagtaaggccatgtttggtttctttagtctagggactaaagtttagttaggagactaaagtttagtccttaacatgtttggttctaggggctaaaaatagtaagaatatactaaatgactcataagaagactaaaatgacctttaacattctcttgctattagtacaattgaactaaatgaggggtaaatgtggaattaatatggtttattcccttttagcacatatgtgaaggactaaagactaaatcattttagtccatattttagtcctagtgtttggcaaaaaaaggactaaatgagactaaaaactagagactaatctttagtccctctaaccaaacaccccctaagtgctgcagtgtggtgaaaaatgtcctggttgggtgcctttatttatttgtttaggactttaggtgtgaggtgtgtatacgctagatagtatgctattccagctcttgcttgccagattcgagatatgctgttgcagtgtgatgtatgtgctgatatgattagaatcctttgacaaaatcgatcgaaattgtttgtgtagtagttgctcaatgcattcgatcgatgatagaagagtgacttgaagacctaggttggaaccaacccacttggaccaggttgtcatgctagaagagtgacttgaagacctaggttggaaccaacccactttgaccaggttgtcatgctagaagagtgacttgaatacctaggttggaatatgccatctactcaattcatttaatcaaaactttgttttgaaaacctgtctacatgttcttataacatattaggtagccagcaattcgcagggtcttcttttcttactggacaaattgcctatatgccagtcacagaactgttttgcaaacatatcacttcccgtatctggattactactttagcattggacaaggttttaaagtcgtctgactaatcgtgattagtcgcgattagtcggccttatcgctagagggagatcgattagggtctccgactcgactagagcgactaggaagcgattagtcgtcctagtcgccgactaggtatagtggtcgactagttttgcctgttttgggccactaatccggtctctgttacatgggccgacccaccatctgtacatcacaaacaatgttttgccctacttgtaccgatacggtacacgcattacgcagcgcacagtcgcgctcgcgcgtgcacccttctccagcgctgccgcaccttctccatcgccgccacaccttctccatcgccgccgccctactctcctgccgccttgctgtgctccggcggccctctgctcgagcgtcagctgcgccccctccatcacgcggcgactgtagtctgtagaggcccccctccagcgctgttttgcaaaaaataaataacatatagtatatgtatgtatgcaacactatctctactctttaaaacttcctccacgatcttatcagacccattagtttctgccttccacggctatcctcccgatccactaggccactacggcaatgtccctaggacatctcttgatctcacatacctagtcaagaaatcttgggttcgccactgaatcagtgtgctgctgaaatctgtgtactgttttcctgctacagctagtgtactgttgtattgcagtcctgctacaactttatatattgatatatatattgatatatacatatggtcttgttataggtggacgactataggacgactaggagtcgactagactcgactaatcgagcaaatcgacgactaatcacgattagtcaccttatcggtgctcaggcaactagagttgactagtcgactttaaaactttatttggaccatctccctgttcaccatctaccaccatctcattggcgagagaagcaacagcaggaaggctaggggagcctggctctggcaaacttgcttctcttgtttgtgtccttccattggcaccacatgcgctccattccgtggaatccatccttctcgcatcgtcttccttctctctattcttgccctcctgaacccttctctgcgggcttcgacaccatggggaaccatgtccttccactgctcccaatcatgttcggaggggcacaccttttgccactcctcaccactgccgcaccacagaaactcatcaattcaagtgtttccaaggaatcaagagtacagaacatactgaaggccatgctgcagctgctggttcaagcttctacccttccgctgtatgtggcagtagcttcgtgggggattgccagatctggcagtggcagctgcaggaggtgtggataaatgctgcatgcaggagaagtgttgggaaagaaggggactttgggagagatgaaagtagtgttgattggattttagacctaacctgttctgttgattttcaatcctatatatatatatatagtatatgtatttagagccctaggctctatttaactataggaagccccgaccacgtaccgaccaggtgcgcgaccgcaccggaccctttttggcttattgtacctaactgcttacgccaaaatataatacgagttatgctgatgtgtgtatcagtttatgcaaatatagtctgcgcatattacgtgcatcgggcccacgatccggcccacgccaccactataaaaacacccccacgccgccaggaattaggttttagcggcggcggcggttctctagggcgtgcgagcggcggtgatcctgggggccagcagcggtgtcacctcgaggcaggcgaccgacggtggcgctccaccaggaacgagcgacaacgacgctccgaggcaggcgagcaagcggtgacggcgctcttgaagcggacggacgacggcagctcaccctaggcccggtgacaacggtggttgtcccgtccgtctctgcgatggccaccgccaccgccgctccagcatctgtggcgcgacgacggatctggggacacgctcgcgacagcggatccctgaggcgcgacggcggatctggtgacacgctcgcgatggcggattcctgtggcgcgacggctaatctagggacacgctgcggcatcggatcccgagggcacgcacgcggcggcggccccatgaggtgcgcacgacggcgatgtgccagcggtcgcgacggcggatttccctaggcgctagcgacgacgacatcctcgcctaggcacgaagtggtggcgcatcccagatgcgaggcgctggttccgcaggacggcgatcctatttttatgctattttgtatacatatttatgccaaatgtcaataggattttatgacctatatttacgttgttttgggttcacgatttacacttaaatccgctcgagccagaacccgcgcacgatttttacgccgtaatttgtccccatttgccgttacgaaatcaatcgatgatttacgctaaaattcatactcatttacgctgttttggttcacgttttatgccgaaatccgcccgagacagcgcctgtggcgattttcatgccgtaattcgagacccatttgtcgttacgaaacaaatcgatgatttacgataaaatttgtactcatttacgctgttttggttcacgttttacgctaaaatccacccgatccagaacccgcgcacgatcgggtgcacacgatttttacgccgtaattttaggctccgtttgctgttacaaaacagattttggaattacgctaaatttcgtactcatttacgctgttttagctcacgttttacgctggaatccgcccgagccagaacccgcgcacgatcggctgcatgcgatttttacgccgtaattttaggcctcgtttgctgttacaaaacagatataagatttacgctaaatttcgtactcatttacgctgttttaggtcacgttttacgctgcaatccgctcgagccagaaccagaaccagaaccagatcgagcgcgcgtagatatacctgactggggcttcccatactaatggaagcccagggcttcaattaccatcaccctatatatatatatatatatatatatgaatgtagtatgacagagaaaaaagtggtaaaataggatccagtaggaaggagtgttgtgttatatgagagcattttttctttcttaatacaagtattaggtggcaaggtaggcagttctgcagttcagtgtctttgtccactttagaatatttgtattatttgattcagctcctgaacatacacctatttgtcttttttatgttgctgatttgcatgtagcctaccccaacttgcctgttaatagaaggctttattgctgcaatgctgctgttgataatttgcatgtaaggagtatgagatgtaatgtgctagtgggtttcctgtttgtcttttaattggataaattgtagcaaattgctagccttctggagctagcagtgaaatcaatgaaccaattaggtttacagttttgttcgtccgtggttcaacagtacattgcaacaactagctaggcttgtaataactaacatattattgctgtgaagttatcaccatcggataagatgttttgcttccgagttaccagcattgatatttgttcattatatgatgaaagacaatagcaaccaatcctgttcagtgttcttaaggcgcctaggcgagcaagtggaccagaaaactgctttagcgcctaggcgacgcctaggcgggtatggcaagcgagggggccagttttgcccgggcgcctggacgcctaggcgtcgccttaagaacactgatcctgttctttttcaatttgctgtatcttctttctcaaactctgttgctgtaccagcgacattttgttttgtgtttagcgtaaaaaccagtgtttcacaaggttggttccgtggccacccagacgtgcctatgcactaggcgacggggtatgtggagccggggggggggggggggtaattggtacctagccgtctgccatggcggcaggacatggcgtccctggtgttcctacgtgcagacccccgaagctaaggagctgggggggtgaggtgggaacaagtgggcggaaatggcagaggtgcggcgttggggacgtcagccatgtccacgaggtgtcagagacggcagccgggaggtgcggccgtgcatcgttggagatggcagccgcggccgcccaacgttgaagacgacagctgggaggacgctagtggcagcagagatggaagagaggaggcgagtggagactgaaggagtctgggtctccgcgagtctgagaaggacaagatagatgtgcagctgggaaggataaggtgggctgggcttttttgggcctttatgttcaactttaagtctacagtatcttgtttatacttttatttacgataatatatgtatacatatagaatgcctagagaacacctacacacgcctatgcacgcttaggcagtaggtcgctgcctagcaccttttctaaaagggcagacccagtgctagaggtttccacataagtgaggtatagggaaggataaaccgaagcaagcctcccgccctcccccgcaaatgcggagaggctattttgaacctgtgacctggtgactcagtgagacagctctcaccactacaccaggcccgccctttgcctagcatcttctctaactttggtaaaaactaagagacgatgtttaatgtgtattgcaattgccgtctttagatgatccaagaccaggtggatcagtgtaacataacattgtctaatggtcattattttctacttctcatgctagttcagtgcaaaatattgtatttaacatggaataatttcttacatatgcattgtttacataaatctgatgttgatagcctgatactcttatttcaggcactttatttttgcattccattcagggagcagttactggaatatt

SEQ ID NO: 618 - DNA, 11875 bp, Zea mays
  Intron number 1 from transcript GRMZM2G559145_T01 (locus G RMZM2G559145) derived from phytozome v7.0 (chr-ID 9; pos 3 0985363 to 30997237 reverse strand)
ccagactgcaccagcaggtgggcaggtgatggcagagcgactttgggcgcccattttcgttgttttctgtaggaaatatctttccttgatgtacactctataaatcttgtacaacacttgaggtgattcgagcaatggttagagagataaagacccacgaaaattggtttgtcagtggcttataaaacagtggaaacttgtgaaaactgagtgtcaaagcatgtcaaacggaatcggatgaatgccatcttttaatatactgtgcccctattaattattaacaacttttatatttgaggaaactttagttgttcaacaaaaatttgggaacgcgagacgtcgacccgaacgacactgatttcagacttagaagaattcgaatcctgaaatcagatttttattctgtcttggtggcactgtttgagatacttagagattgaatcaaggcttggttgaaatatacaatttattgtataacacaggttctacaacttttattaaaggtcaaacctcatatcttgaatataagttaaagtttcactttggtcaaagtagtatcattataaggcttcaaattatattttaaggcaattggggtgttttctcgacatttccttggcattttctccacatgaacccttaataaattttgttgcagagttgatatagagttgtttgagcaagatgacaaggtttttttgaatttcaaaatatgcatttgttcagacgagcagtttcaagcatgtataggatttacctttttatgtgtgtatttggttcaaacttctagaaatctttaggtacacttgatagatagagatgaatgatgatatagatataacaagtccatttgaataagatttaattagaggttgacataaagagattctgcgggagaatgcggattcggattaagtatttggacgtagaccaactatcgagaaagcggattcggataccaattggataacatagcaactatcgagagttcgaataaatgagtctagacaggagttgcgagacgagattgactttcgaatttgcctttgctctgagaaataaaagttctaacaggctccaaatttggttgttcttgagatcgaataattccaaacttggtgaaactttcatgagtaacttaataaatggagataaatgtgataaagagttagaaattttcactaagcatccaagattaggataaatctcccgacataacacgaaatagacacctggggtgtcacatatatgaacttttgttctaaacgatgaatattataacttagacacagacacatatgatggagagttcttccaagaagatggcctagaaggacgaattgagatagacttaactgaaactattggaatagaagtagattttgaaatggttgttgatgaggaggatgacgaggtgcaaaatgagaatgatttagtaatacttgaaggcaatgacattaatgacgaacttgtgcttttagatggtgttgtctatgaaatggttgatagtgatgctgagacttatgatccggctaaccccgacacatatgaagtttatttttaatcgatgcaatactatatttcatttcgcacctatttctaaatacatcttttttatatgtgcttatttgtttactcttaattgcaggttgttggacaaagatggtgggcggtgggatgaggactaggagggggagggggaggagcacccacaagacggtggaggaggcacagcaggacgacgatgtccagcagcaggtgcatcagcaggccgctgtcgatgcgacacagcaggacgacaacgacactcagcaggacgccttaggttcgaggaacatctaccggcgaggtctcacgagtctcccttagcgtcccatacttcgtgacaggcggccgctgattcgtccggatggggagaggcatgtaagtttatgttctctctgcttgttcgttttatgtgttcaaattcataatataaactaatactttttatttatcacttgggcaggtcttggaaggttgtggagaatgcagggggtcacgactgcaaccctaatggcatcctcggccttctgtgcagggaacactttcttggactagttgagtatgctcgagtgtcaggcctagcctacaccttcgaccactacgccgtcgccccctgatgcagtagaccaggacgacagggaattcaacaacaaggcggagcgggtgaagcaagagctttgggtaagtcttactatattgtaaaatatgtcagattcgttgcacattcttgaaataagtctttgtatgcaggatttcttcagatgcaaggctggtatgaggccagggcggatgtggtggccaccacgagctgtaagaagctcgtcgtggacatgcactacaaggcccgaatataggccatcgtcagttaccaaggctccatccttgggaagaaggtgaccaagcaggacacccgaaccatgtcgttgactagggaccaatacttacaggtaaatacatcactttaatatttgtgacaaatttttccttaattttatcttctgatattcagtgtacctattttaatttgtagatgattcctaaatggtgcgctgcgcattctcagtgctgggagcatatggtggataggtggtgctcatatgatatcctggcccctgtgatggtgatatcctggcccaagacttaatagaattaatatagtatccataccaacaaggtcttcttttttggaagtctagctcgaaagaattggaatcatcatgagtgaggacaaagtgcgcacaaaagactcatgttggtctgtgggaacaatatatgatcctagcgagctgccgggagtaagtatcgtcggtccaagaattggacagggtgttacaagtggtatcggagcctgagagcacctagatcgaggtgaataggtgatcctgtaaaattcaacactaaatagcccaaacttggttataaaatgttagcacgattaaaaccaagttgctaaagcgagaactctagaagaaaaccaatcacaatgaaaagagacacgagacacaatgatttttatcccgtggttcgaccaatgcctactccacgttgtggtgaccttcgtcggtcaaggattgcactcaatccctctcaagtgatccaatgatcaatcttgagtaccacagttttcttccttagcattcttttcccgtttgtgaggaatttccacaagttggagcctctcgcccttacaatgttgatcacaataaaagcacaagagtaagggagggaaataaaagaactagaatcacaacaatcccacgcacacaagtcaagagatgagcacacaaacacaacgcagggagttcacgactcaagaagtgctcaaatctcaaacacgatgattcgaatgcgtgtttgtggagtctaggcatcttagaatgttcaatggaggcttggtgtaatgctccatgcgcctaggggtcccttttatagccccaaggcagctaggagccgttggagctccatttggtaggcaattcttgccttctgttcgtcgttgcaccggacagtgaacagtacgagcataggacgcggcaaagaatcccatgattggctaatttccttttttgtggggcatcggaccgtccggtgtggggcatcggaccgtccggtgtggggcatcggaccgtccggtgcgccatacgaccgttggagcttgtcgacatggcaggtagtcgttgcacgactggagcactggactgtccggtgatttatagccgatgtaaccaggaaaaacccgagagcgatgagttttgcagaccgtgcaccggactgtccggtgcacatcggtctatccgatgaacagcgtcggaccgtccggtgctgcgtagttagcaccttttcttcgatcctttgtttgtcttcctttgactcttttggcctttacttagctgagtacctggcacttagataagagtgtttagcatataaaactattgacaaatcgtctagatcttacctttattctttatttgcatctctttaatacttggcacacatcacttcaaaacaatgtgtgttaggcatctaatcaccaaaatatttatagaaatggcccaagggcacatttccctttcaatctccccctttttggtgattcatgccaacacatttaagagcaactcaaagtgcaatatcattccttaaagagtgcaaattgaagatcaatttatctcacatagaatttggcatatttggatcacttttgccaccacttggtttattttcacaaaacaaattctttttcctatctctaagtcaaacacacttgtttgggcaaatagagagatatttcaagagtacatttgatcaaatgccacaaactcccccttttcccataattaaacttctcccccataagagaacgattttgcaataaaagagttttgatcaaatacaaagcttctaactctacattttttgaaatttcacaagtggttggtgatccatttgctttggccttaatttctccccctttggtattaagcaccaaaacgggagacctttgtggccctataaccccattgccttaccaaaatgtcaaatcagagcaaaaaggcaatgagagcataagtatgaacttggaacaagatacatttataccggaatgcagtggaagccctttctttgtccaagttcacatttccctttcaatattcctttgagattttgtcacttgtactcaacagacaggtgagtatcaaggtagtcaagttgtagcacatcctccccctaaacatgtgcaacatttgcatagggacttgtgaggtccggggatgacttgtacaacttgagcaccaaacataagtaatttaagaacattaaagcttaaagtaacatgatcaaaggcatagaatagatgtatgctagagatcaatccaagttacgtgaatctaagacatttagctcactatgcaacctgcaaaaccttttctcatctaaaggcttggtgaagatatcggctagctggttctcggtgctaatatgataaatatcgatatctcccctttgctggtggtctctcaaaaagtgatgtcggatgtctatgtgcttagtgcggctgtgttcaacaggataatccgccaagcggattgcactctcattatcacataggagtgggactttgctcagattgtagccaaagtcccggagggtttgcctcatccaaatcagttgtgcgcaacactgtcctgcggcaacgtactcagcctcagcagtggatagggcaacagatgtttgtttcttagagctccaagacaccagggaccttcccagaaactgacaagtccctgatgtgctcttcatatcaaccttgcacccggcataatcggaatctgagtatccgattaagtcaaaggtagacccctttggataccagatcccgaagtaaggcatagaaactaaatatctaagaatccgcttaacggccacaaggtgacactccttggggtcggattggaatctggcacacatgcatacacttagcataatatccggtctactagcacaaagataaagcaaagatcctatcatagaccggtatgccttttgatcaacggacttacttcctttgttgaggtccaaatatctatccgttcccataggtgtctttgcgggctttgcatccttcatcccaaacctgttgagtagatcttgagtgtacttcgtttgggagatgaaggtgccttccttgagttgcttcactgaaatccaaggaagtagttcaactcgcccatcattgacatctcaaacttttgcatcatcaccctgctaaactcctcacaagacttttgattagtagaaccaaatataatgtcatcgacatatatttggcacacaaaaagatcaccatttcaagtcttagtaaagagtaggatcatctttcccaaccttgaaagcattagaaatgagaaaatctctaaggcattcatatcatgctcttggggcttgcttaagtccatagagcgccttagagagcttatagacgtgattgggatacctgtacatcctcaaagccagggggttgttgatgaggacatcacttctatatatacaatgaatggaccgataacacgatctcgtgcacgacagctaaatctccaggtacgttctaccctagtcaattgtgttttagagcttacgcttggggccatggatgttttgatgattaggtaccttggagaggaccaccaaggacttgggaaaggccaaggtgttgaggaggagcagcaagggcgtccacaacaggaaggagatcaagtccgagtcggctgcgactctatctcgggttccaggaccagtctgcactaaaatggacgcccaagatgcatccggactccgattgcgatggactggatatggttggaaagataacgagattatctaaccaaccgaactgattccaccctaaacttcatccggagtcaacgggaatcgtcgaaacaagtgaacgttcagattctgttttggtgctgcgacaccgtctgttgggccgttgggccgtgtatcgcgtcggagcccattaggggcgagtccagggctacgcacgccctaatactctatttattcagcagccgccgccacatttaggtttgggttttgcttagatcaattctgtcatcgaacagtgtcgccatcatcggcttgtgagacctccctcccgtaatcaatacaattttggttgcgtttctttcctgttcttgcttgtgttcttgattgcgcttgtagggataagccttcgtggcgaggtcattcgtgtgtcacgggtgataaccaacggagccatggtgtacttttcgcgaggaaccgtttgctcggagccttggatcatcaacgtcgagatctccactcaatcaaattatcgtatctcacggaagatcaggccgcgtctactatcaattggtatcagatttccaggttgcccgtgaggtataattctacctttagattagttttgtttcgtcccatagtccacaaaaagccaaaaaaaattacgatcagtttattccgacctaaaaccatcgccttcgcctttgcacaattcagttgtagagtccgcagttctgagttcgtgttctagttgagtttggttgctggattagatttgttttggttcagtttgattatatccatccgcttccatcctataaaaccgaccctatccacaaaacagatcctatctctacaaccgatcctattcacaaaatagatcctatctctacaaccgacaatatccacaaaacatatcctatctctaaaaccgaccatatccacaaaacagatcctatatctaaaccaaccatatccagaaaacaaatcctatctctaaaactgaacctgtgctccatagccgtcgcttcggttcctgccgtgttgtgcctttgaaaaccataacttgaggtaccttccataaaacgggcataacttttcgctcggtgctccgtttgagctcaaatttttacagtagattcttgactccattctggggtgaagtgtacttaggtgtatttcttgactccgtttgagcagattcttgacatcatcatcagaaagttcctcataactagaagaagtgtacttaggtgtatttcatgtacgtaccttcttctccttagccatgaggcatgtgtggagtttgttggggaagagggaagacttgtcaaaggccgaggcagctagtccttcatcatcggagtcggataaagagcagtcggagtcccattcctttccaatgtgcgcctcgccctttgccttcctgtaattcttctttctctctttcttccctttcttctcttgtgcctggtcatcatcattattgggacactgtgctataaaatgaccagacttaccacacttgaagcaggagcgctttcctcttgatttgttcttgttgggatactccttgcatcccttcaaggcggtcttgaaacgcttgatgatgagtgccatttcttattcattgagcccagcagcctccacttgtgctaccttgctaggtagcacctccttgctgcttgttgctttgagagcaacgggctacggctcatggagaggaagtggtccgtttaaggcatcgtccacatatcttgcctctttcaccatcatgcgcccgcttatgcctcgggcgtcatcttggtgtacttggggttctcacgaataagatttacaagatgggggtcaataaccgtaaatgaccttagcatgagtcagacgacgtcatgatccgtccatcttgtgcttccgtagcttcgaattttgttgacaagggtcttgagccggttgtacgtttgagttggctcttctccccttatcatggcaaatctccccagcttgctttccaccagttccattttggtaatcatggtggcgtcattactctcgtgggagatcttgagggtatcccatatttgcttggcattgtccaagccgcttactttgttatattcatccctgcatagagatgctagcaaaatagtagtggcttgggcatttttatgtatttgttcattgataaatataggattatcagtgctatcaaaatgcattccattttcaacaatttcctaaatactatgatggagggaaaataggtgactacgcattttatgactccaaaaagaatagtcctctccatcaaagtgtgggggttttccgagtggaatagaaagtaaataggcattagaattataagggatgcgagaataatcaaaagaatagttttgattaactgttttctttttcgacgaggagtcttcgtcgtcgtcatcccttggtgaagaggaggaggcgtcgctgtcgtagtagatgatcttctttatgcgcctcttcttcttcttgtccctccttttgtgacttgagcctgagtcagagggcttgtcaccttttgattcatcaacgtagagggtctccttctccttgtcgttgatcaccatccccttgcctttaggatccatctcttcgggcgattagtccctaaatgaagagtacgactctgataccaattgagagcacctagagggggagtgaataggtgatcctataaaattcaacactaaatagcccaaacttggttacaaaatgttagcacgattaaaaccaagttgctaaagcgagaactctagaagaaaaccaatcacaatgaaaagagacatgagacacattgatttttatcccgtggtttggccaatgcctactccacgttgtggtgacctccttcggtcaaggattgcactcaatccctctcaagtgatccaatgatcaaccttgagtaccacgattttcttccttagcagtcttttcccgtttgcgaggaaattccacaagttggagcctctcgcccttacaatgttgatcacaataaaagcataagagtaagggagggaaagaaacgcacgcaagaactagaatcacagcaatcccacgcacacatgtcaggagatgagcacacaaacacaacgcaaggagttcacgactcaagaagtgctcaaatctcaaacacgatgatccgaatgcgtgtttgcggagtctaggcgtcttagaatgttcaatggaggcttagtgtactgctccatgcgcctagtggtcccttttatagccccaaggcagctaggagctgttggagctccatttggtaggcaattcttgccttctgtttgtcggtgcaccggactgtccggtggcacaccggacagtgaacagtacgagcacaggacgcggcaaagaatcccctgattggctgttttccttttctgtgggacaccggaccatctggtgtggggcaccggaccgtccgatgcgccatatgaccgttggcgcttgtcgacgtggtaggtagccgttgcaaggctggagcaccggactgtccggcgcctcacgcggactgtccgatgatttatagtcgacatagccaggaaaaacccgagagcgacgagttttgcagaccgtgcaccgaactgtccggtgcacactggactgtccggtgaatggcgtcggaccatccaatgctacgcagtcagcaccttttcttcgatcctttgtttgtcttcctttgactcttttggcctttacttagctgagtccctggcacttagacaagagtgtttagcgtataaaactattgacaaagcgtctagatcttacctttattctttatttgcatctctttaatacttggcacacatcacttcaaaacaatgtgtgttgggcatctaatcaccaaaatatttatagaaatggccctcggtttcacgggcgtgtgtgggttaggggttcaggtatatggcacatggcgcatgtggacctagagtggtcacatggcatatgacgacactagacacacagacgtggctacactacacgacggttgatctttagcgacccttattagggaccgacggttggtcgctaaaagttatggaccgacggttggtcgctaaatgcgtttatagtgacggtctgtgggtcgctaaaagtctagaaatttaacgacttatggtcggtcgctatagaggtaagtgtgtgactaatggtgggtcgctataggggtacgtgatttttgtgtttcttatttactcaccaaagcccatctaaaggcctactaaacaaacgaaaccctattccacgcaccaaaccacaagcgcaaccgccgtcactactgccccatcgcggccccatcccgccgcgaacaatccacatcctcccttctagcgcccgcctccaacctcgagctccctcccgctccactggttcaacctccggcgcatcacctccttgcccagatctgttcgcccctcaccctcttccggactcggcgactcgtggactcactcagctctgttgctgcggtgcgtgctggtgctcgagcatgcgacggatcgcgctcaggcatgcggcgagcagcacttaggaatcgagttgttaggcacgcgctaggcggcgctcgggactcggatcaaggagaatctgatcaaggaccgcctagagatgttcgtcaaagctaattctgtgtacgtgttattttgctcctctttctcttcattcacttgtgcaaggagtttgattgatttccagtgggcactaagacaagattctgcgcacaccaaggtcttggtctcctttggttgccgtcatttctcttatgatgaatagctttttgtcttttcctgatggttaactagtgcggattgatacttagttcctagtgcccgttaactatggcctagactgcaactgactccaagttttgatgaatccaaattatttttaactcccatgtggtttaatttgacaaaagcaaacaacaccaactaattgttctgttgttttggctgagtgtggagtgcagcactgcaagacccatttcgagcagctgttcaaggagattgggagttacaacaagagcttccaatcacaatcatgtactctttcattaagtatcaaaccattagcatgaaaataaaagttttgtgtttctgtgaaactatatagtgacgtgctcgtggtttacttctttcagccgcaaagaatagtccagaaaagttggtcctgagttatggatctgtacatgcatcccataattttttacctacaaatctaacattatgaaattttcaactttacttactatgttaaattctaggataatttgaagcacatggatggtctagctgctttgagaccgacaatattcgcaagtgttccccggttatatagcagtttatactgcataataaaactataccaataacttctatgtttcgtattaattcttgaagtgatatgatttgtttatagtgctaactactagttgcttattggatgtgtaggattacaa

SEQ ID NO: 619 - DNA, 17698 bp, Zea mays
  Intron number 1 from transcript GRMZM2G474153_T01 (locus G RMZM2G474153) derived from phytozome v7.0 (chr-ID 2; pos 7 8699720 to 78717417)
gccgacgaggtatgcgcatgtacctatcttatggtcgcattcttaccttgtcctagctgctctactacttttctcgctcccgatggccgactagtagctagccgacacatgcacataacttgaccgatgcacacgtagcgatccgccagtagaacgcttatttaattattttgtcagctagcacctatccttttacgctgattagaatcggccaacaaaattggcaagcttctcgcggtccactactacaaagtagctctacagtgatagttgtaaacttattttcgctagtgtttcttagaaccgtcggtgttagaggccaataaaaatcattatttttacagacggggtaactaaggaccaccagtggaaatcgatttccactggcagttgagttaagaaaaccgtcagttggaaatcgatttccactggcgatcgacgtaacaaatccgctagtaaaaattattttcagaaacattaaacgggtttttaaagaacaaaaaaattatttgaggagacgactcagcccactcaccgtctctgtcgcatttttcgcgcgctacgcggttgttaagaatcgaaccgtcgacctcaccctcgcacgtaccctccactaccactctacctataacatatttttttgtctagtttgtagttgttttgtccacgtatcacaatcatttgagtgtaaattgtttgtttgagaccgtaaacgaattcaaataaaaaagttgtcaactataaagttgaataacttttgaagttctataactttcattttgacacttttttatccgagttagtttgcaaaatttgaattttaaatttgacatacttagattcaatttttgagaaccgaaatgagttcaaataaaaaagttgtcaactacaaagtttcataacttttagagatctataacttttattttggtggttttaacatacgacgtcgtttgaaaaactcgaaaaattaaggataaaaatgatttctagtggcggctccttaagaaaaccgccactagaaatcgatttctacatgcggtttctcaagaaaaccaccactagaaattatggatttttacaggcggttttattaagtaaccgtctgtagaaatacgatttttagtagcggttttcttaagaaaccgccactaaaaatagcacagatggttgataaccgaattcgtctgtaaaaatatatcgtctcgtagactttggccctttttctactagtggtcttgcccgaagaagcagaaacatgtgcccacgtggaaaaaccaacaattcattcgagtggaaatgccaacatacatagctatacgttcgcagacacgaaaatcaatttatagtttgatacggtctctacatttattattagtttggcactcaacggtttaaatggtctatatatttatgaaacttagctcacactactacagaaatgcgatttttagagagaggcgttcttttctttttatagaggcaactctatcaaattcaacctttaaaaaagattcatgagtcagctcacctcataaatcatttttgagagacgacaatatggcttaggctcttgtgtctcccccctttgtcgctcttcgatttgttcttggttgttgggtggtccttcactgctctatgttggttgtggattgatattgttgatctggtccatttggtggtctcttgttgcggtttacttcggccctaagtctgttttaggccttctatatatcttttggctttctttgggtaactagctttctataatgtagctctttggagcatattgtcgtggtttcggaaaccatgggacaatagatttgtgttcgctagggatgctaacgcggactcactccgaatggtgaatcgttgggactcgaatggcgaacttgagacacagtgttatactggttcaagccggagccctagtccagtgtagtgttgatcgtagtattacaataggatgtattacagcttgtgtgcctgtgtgtgagaggaagaggatccttcccttttatatctcaagggatgggccttacattaatgtctctcttagaaagagagagaaagagagagacagagtagaaggagaaagagtctttcggttgtcgtggtgggccccctctcctggtcgtgtaagtagtgcttctagtatggcgccgcccgttacttccattttcctgtggtggggctgacgtccctgcgatgatgtagggtaggtcccatggtttagcccaagggctcgaagaacactgtgcgacttcctcccatcatcgtggaccctacgtagtccttccatgcatgtggatttgactatttcgtatggtgcctcatccttttgcttccgtcatactggctagaggctccagtgccgaagtcgccttaccggagctgcctcgtcccatcagacaacgcaatatgcttattataagaaaggggtgtatagtcgagcctacgactatcgcccgggctcctagcgacatgtctagatgtggttgacatatttgacatatgcttgtggctccggcccaacgcttgggctcactcggcggggtcccggttgtccgctccgcgtcacagacttgctcgacggggacttggtcgtccgctccgcttcacagacttacttggtggggaacttggttgtccgctctgcctcgcagacttgctcggtgggggacttggtcgtccgctccgctaacttgctcggcaaggaacttggtcgtccgctccgcctcgcgtacttgctcggtggggatttggtcatcctagcttgcaggccttgcttggcggggatttggtcgttcgttccgcctcgcatacttgctcggcgagagacttgttcggtgggcacttggtcatccgttccacctcatagacttgctccgcagcgatttggtcgtccgctccattttgtagacttgctcggtgggaacttggtcgtcctggcttgtagggccaaaaaagggtttatgcgcttgttccgggtaccccgttcctgagaagccgacagcagccccaagcctttgtgcgaccagttgtggttgcgcataggctttcttttgaggagttgaatttctcggtgcgcgcgagcgtatctgttagatgtagccctcgagcccccgagtactccatgaggattgcttgagggtttacacaatttgtgtgcattttcaggggctagtccttgatggtatcccatgccaggcatgagcccattcgttttaatactgagtcgttgtcttcacgtgtgatcctcctggttgctacttctttctctttggtacacacatctccccttatgtcggcttctctccaaagtcttcctctcaagggcaggccttcctcctccgacctagttggcacggggaggaagggcgacgagcaacaagcgggttatccaagtgagatccaaccaccctccgggagggttagatctcgacgagcgatcccactgtgagcatctcattaagtccttccttattcgatctcgttccggcctctggttggcatgatcaactagagagtgccttgtggctaccccatcagccgggtttccgcaagagagtttgaggtaagaccttggatgtggtgcctagcaaatgatctatgagctagtcacctagcttgtgactcgctgagagttctctcgatccacccgtcactctgcgtgctaagttggagtgtgttcagtttttacctggttggtgcggtgtaactgtcatggcagcacggtaaaatatggggtcatcattacaaagcttgtcgtgggcggctcgatgtgacgcgaattggcccatttgctgtattacacgcaggtggcatgattgggtggctaacctcctgcatgttaccagtgcccttccagtcatgtgctctcttggcggttcgtccgatgcggttgttttcctgcaaaacacagtcttccaccctatttccgaggcatcgttcccccgaagggacggatcttttttgagcggtttgtgtgggcacaccttccaagcgccgcttgggcttccttctcttgagcataaaatagaggggagggtgcatgtgtccagtttcgcttaccacaacctcgtgttcgggcatcttcttctccctctcccttgaagcttccctgcgcacttccgtgttcttcttccttcatcgttcatgctggcactggtcctatggattcctttcctacccgctccttgatccacagtcaactcgaagatctagagaggaaaggatttttgccccctaggtggtctctgggtggcgtcttgaggaaggaggcggcgccccaacatcgtgggacggtgaggtggtggttctcgcctccttctatgagtgcggcttcggatttccctagcatctgttcgttcacgggatcctattttactacgggctggaactgcaaaatctccaccccgaataccatcctccacatagcgtgcttcatcacacttggcgaggcctacctcggcatggcccccactggaagctttggaagcacctcttcagcgcgcgggtgagcccaagctggggtggccagtcattcgtcatctccttcaacgtctagttctgtaaaccacgaatggcgtcgtacctgcctattccccttccttcctcgctgtgcggctacgagggcaagtggttctatgtccggaatctggaggggagtgcgcttgtgttcaccagttgcatcccggtagcccaaccacactggacttacagcgtggagaagaggtttaggccaatgatttactacatgttggccgccattgccaagtagcatgggcgaggcctctctggcgagaggttaatccagaccttcatgcagtgttgccttcagccacttgtggctccctagaggatgatgtcacagttcaccggcgtgggcgactccgatcgccattccgctgcgatcttgacgaaggaggaggtggtggccctcatcctcgacgtcacaccgaatgtgacgttggaattcatggacgagagtggtcccctactttcaaccaggcaaggttgagtgacctagtgagtcttcgattcttctttctctcttctgtctttgttcagtgtttcattatcatgcgcctccgcatgggcttgggaatgtcatggtttctctgccccatcttcatgaacacgtcggtatcaagctagagaggaagtggaagcgggaggcagaggaagcggtggcggcatgctttaagcgtcgtcattagtgaaagaaagagaaaaagcaggttcgtcttgctcgtgtcaggcctggggagagcatcaccctgtccacagatacggaggacatgacctctacgacctccggtggagcagggaacccttcatccgtgggcgtcccctcctgccccaatgatgcagaggcgagctccagcgccctccctagagggagggcaccgccatggcacccattgccctcccaaccatgccaatggtgcctcacgaagggatgtcgaggacggccggaccgtcttccactcccaccgcgctagcagggcgcgacatcgcgttgcctcctccggtgccaactgatctagcgatgtgccacgaggaggtcttgcctccaattgcacccccatctcctcctatgcaggctgttggagtctcctgatcgtggaggagtttggtcactagggcatgctcttcccggtatgctgtcattcacttatttccttcttcctctcccctattcgatgcttgtaattgtgttgattttgttagcgtgtccgtttcgggaaagacggtgaagatcgtggccctcgcggcgaagggggcgcatcggcctctcaagtcctcatccatgtggcatctgctagggtgattcctccagtcgtcccagtcggctcacccacggttgcggcgtccgctactcttgacacaggcacatcattgacgcccgccacccaggaggcgccaagggcgcttgttgctgatgtccttgtcctagaggtgcacgcgtccttgctcgacctcgaggtggtccctgtggccatagtttccgctaccggtgcccctcccatggtggatacggcggttgcctccatgctgcccccactgccactgccattgctgccggccttgctgcctccgggtgctgcagtggcggccgatgcagctggggtgatggcaactgcagcgagcgccgagcatcgggatctattatcgctgccacttgttgtctcctcctctcatgtgcctttgacgcctctccttcccgattctgaaggggggcttcaggaccttcccccattcatccttgaaggctcaaagggggaggaaatggaggcggaggagtcacacttgatcgaggcagcttctaaccgggctgacaggagcctagaggcggtggagcgtttcctcctcaattttggagagacgattttgatcacctgttcgtcgatgacacgagacatcatcccgtgaggccaggtaggtgcctctccctgtccattcttctttgttcgggttcttcttgccatggttaagtttgatcgttggatattcttttcagcgtctctagtctcggtcgttggctcgaagggaggcgctgcaggccacacaacgagaggtggaaatgttgcgggtggaagtggcctgcatagaggagaaggatcacgagctctccaaccttcgagctaaggccgagagtttcgagagcgaggctacgcgcctccggtcagggcatgatgaggcatgcggcaacactaaatgcctccatggggagaggacccagctccagcaagacctgagcgaagcgacttcgcgggccgaagaagtcgagtcgaccttgcgagtggtgaacgctcgtctagaggaggcgaactcggaacttcgacgtgagctggaggttgttggaggtaggcttcctttgttttgagcacacttttgtcagctgtcaatacacatgatcgtgattcgtagatcttcagaataagttctctaaggccaggatgctatgaaggcggttgaataggcgaagaaggcagtggaggatgaagagcacaagctctcgatcacttgcgacgaagtcattattgtgtaggttcaagtgcaaacttcgctgaaggagtacaacatcgaactgcaagagcctcaccaagtcgtgagtgaggtgtgcgaccaccttgctcctccaccaccgacccaggtgcctctgcgtgctagctgcggtgctacccggtcatgtggagcatggggtctttgaaggggtgttccacataggtagcctagccttgggtcagatgatattccacttcgacgagatagacacaggcgtgatcgtggaggggtttgccgccgacctgagtgatgaatatttggacactattgaagagcaagtatgtcctcacgctcaattgctcgccagccaggttgacgtcaagatgcttctaaggggaccctcgagctcagagatgcctccaagcgcctaggagttatgttttttatcatcttgatgttttgtactaaacctattaactagatgggtgaacacttagccatggagattgcttttgtggaatgacttctttttgtgaaggcttagtttgtcgtggtcgatccttcgattcccggcaatgcatcttgaggtacctctctcctagcccccgagcgggacatggcagtttggtcagcatgttccgctttcttgagcgtgaaaacgagggtattgagttcgcttactcatgggtaaaatcttcttaggttctcgatgttccactcgttagtcaataggttgtcattgctatccttgagtcgataggctcccgggtgcatgatctgggcgatgatatagggtccctcccaaggcggcgagagtttatgtttgtccttggtggtcattacccttttgtagcaccaggtctgatgttaaacgaccttccacgtacctaacagttatggtagcatcacaagtcttgttgttacttggcaaagcgaaccacggtcatgtcatgtgcttcgttgagtaggtcaacggcaagctatgtgtcatagttgctcatacatcttcataggccttagtccttggggagctatattctagttccgagggcaatatagcatccgcaccaaccgccaagaagaaatgtgtgcaaccttcctgtcgccctggacggcgtggtccgtaggctccagagtatcgcgggtacctcaattgcccaatgtcaggcggaattttttagcttgtcaaaaatttgtgatttgaggtcttgcaggagtaggccatttgcacgctcaacctgcccattgaattttgggtgcaccaccactgcctagttaacgctgatgttgaagtcatcgcagaattgcaggaacgatttccctgtaaattgggttccatcgtcggtgatgatggagttggccaccccaaaatggtagacgatgccgcagaagaaagtggcggcctccgatgatgtgagcttggcaattggtctggccttgatccatttggtgaacttatcctccgccacaagcaggtgggtgcagcccccaggtgctttcttgatgggcccgaccaagtctagcccccaaaccatgaatggctaggtaatgaggatggtctgaagagcttgagccagcatatgcgtttgtcgtgcagagttctagtagccctcacatgtgcgaacaacctgctcagcattggccatggcgattggccaatagaatccttgccagaacgccttgccgacgagcgcacatggggctacatggagcccacatgttcctcatgtacttcggcgagcaactgtcatccttctttgtatgtgatgcacttttgcttgatgcctgaggcgtttatcttgtagaacattccatcaatgattttgaaggatttttctttttcgagacaaacacctggcctcgatcatgtttttgggtagtgctccgtctaataactggttgatgtggggcttactccagttgtgttggtcagcagtcgtgaccaacttgctaggatggcctagcgaggcatcagggccgtttgaccccttgacactcccctcctccacctgcttgatttttactgagggttcatagaggtcggaggcgaagacccatctaggactggtatttgccctcacgctatggtcgatagctcgtcggcctcgacattgaaacatctctagttgtggtgtggctcgaagcctttgaacttcacctcaagctttcatacctcatcaaagtatacactcatcttgggatcgcgtggctccatcgccttcatgacttggtcgacaactaatttggagccacccctgaccaggagccgccacgctcttacctcggtagcgattcagagcccgttgatgagggcctcatattcggtgatgttattagtggcctcgaagtggaggaaaatggcgtagcagagattgtgtccttgaggttacatgaggaagacacctgtgtcgctttcggtcttcaagtaggagtcatcaaaatacaatattcagtactccaggtcctccatcgacggtgactcatgcgtatccatccattccgcaactgagtcggtgagggcctaggactggatcgtggttttggtgacgtagttgatatcgagtccgttgagctcgaggcaccactttgagatgcgcccgaacacgtcccgattctggacaatatcatcaaggggtgccgtagacaccaccgataaggggtgttggtcaaagtagtggatccacttccgcttggagatgtggaacgcatagagaagtttttgtatcagagggtatcgtgccttgcactccatcaacacctcactgacgaagtacacatgcttttgtaccttgagtacatgtccctcactttctctttccaccactagtgcagcgctaaccacctaggtggtggctgcaatgtaaaggagaaggtttcgcctagttcgggcgcaactaaaaccagcggtgaggtgaggaatactttgttcgaccgagggcctcctaggcttcggtcttccaagagaattggtcacttttcctcaagagcttgtagaggggcattcctttttccctgagtctggacaaaaaccgattgagcacggtgacgcacccaaccagttgttgtacccccatgaggttctagatggggcccatgtgtcagatgacctctattttttcttggtttgcttcgatccctcgatccgacaccatgaagcctagaagttttcccttggggaccccaaaaacacatttcttggggttcagtttgatttggaaccttaggaggttggcaaacgtctcttctaaatccacatagacatctaggttacacccgacttggtcggtgaaccagtggagcatgcacctctagtatgtagctctagcgttctgcagaccaaacagcgtcatgacctagcagaatgtgctgaagggggtaatgaaggtggtggcgtattggttagactccttcatgatgatttggtgatagcccgagtatgcatctagtaaggaaaggaactcacacccatcggtcgaatctacgacttgatcaatacgttgtacagaaaaagggtccttggggcaccgcttattgagccatgtgtagtcgacacacatcctccaactcccattcttcttcttgacaagcacgggatttgcgatccacactggttggtgtacttcccttacaaatcccatcgctaggagtcttgccacctcttcacctatggccttgctcttttcttcatcaaaacggcgaagccgctgggtcaccggcctagctgtagccttgattttcagcgagtgttcagcatcctccctcgagattcctagcatatccacgggcttttaagcaaagacatcatgattggcccataggaagtcgataagggcgccttcttgcttgtcggagagtgctgcaccgattcggacaagcttggaagggtcggcatcgtcaatctagacatccttagtttcttcagtggatttgaatgtgctggaatcggccttgggagcatatggttcggccttggagttagcaccccttcgtagctctgctaattctctcacggtggcttgtgctgaggcgagctcgcagctagcttgctcacatgcgtaggccgcttggaaggaagcgaacaccgtaatgaccccatggggaccgggcatcttcaccttaaggtatgtgtagttgggaatggacatgaacttgacgtagcccgacgtccctaatatggcattgtaggtccctaggaagtccattgcctcgaactgtagctgctcaatgcaaaaattataggggtctctaaacataactggcagaacaatctgcccgagtgggtgggcgccgtggccaggcgtgatgccgtgaatcggcaaggttctagggcgcaacacggagcgtgcgatccccaaggcataaaaagtctcaacatacatgatgttcacaccgctcccttgtccatgaggactatggagagacacttcaggccgacgattgtctcaatgacaaggggtaggttccggtatgcgggaccctgctcgggtgatcgcatcggtcaaacacgattggtacttctagcctcgaggggcacggcgagccggaggaatccaccacgtacacctcctggttgctagactcgtgggggcgcttgttgctgctcttccgctgatggttggccgcggcctcggatgtcagtgatggtgcctgccccactcgccacctaaaggaggcaactagttggctagggcatccctcaagagcagcgacacacttctcgtggtgtcgcttctacgacctgctcctggtggagcactcgggcgccttactcgcgacgacttgtgcatctagttggtgagatggagccctacagcagagttggcgaggaagtcgaggcagtcgaacttgatgctgctcccaggggtgaaaatcccatctctatcagatgctgatgaactggccatcagagcaggtaatgtcacttggcacgctaatgttcccctacctggtgcgccaactatcttggttttagaaactagggggcaaatagtgaatcactagaacttgaatggtaaacatgggacacggggttatactggttcaggcaggagccctagtacggtgtagtgcagatcatagtattgcaatgaaatgtgttacaacttgtgtgcctgtgtgcgagaggaagaggggccttcccttttatatctcaagggacaaaccttatattgttctctcttagaaagagagagaaagagagggagagagtagagggagaaagagtcctttggtttttgtggcaggccctcctctcctggtcgtgcaacgtagtgcttccaatatggcgccacccgttactcctgttcctgtggcaggttcatggatgacctccctatgatgatgcgtgacgggtaccatggttcagccctagggcttgatgaacatggcacgactttctcccgtcatcatgggccctatgttgtccttccgtgcgtatggatttgcctatttggtatggcgtctcatcctattgcttccgtcacatcggctactatggaggctctggtactgaggttgcctcttaccagagctgcctcgtcccattagacaacacaatatgcttattataagaaaggggcatacagtcgtgcctacgactatcgcctgggctcctagcgacatgtcctgctgtggttgatgtatgcttgcggctccgacctgacgcttgggctcactcggcggggtcccaattgtttgctccgcttcgcatacttgcttggcagggacctggtcgtcttctccgctttgtacacttgctcggcgaggaacttggtcgtccgctctacttcttaggcttgctcagtggggaacttggtcgtccgctctacctcatggacttgcccagtggggatttggtcatctcagcttgcaggccttgcttggaggggacttggtcgtccatttcacattgcagacttgctcgctgagggacttggtcatctgctccacttcgcagattggctcagtgggggttttgtcatcccagcttgtaggcctttcttggcgaggacttagttgtctattccggctcgcagacttgctcggcatgggacttggcatccactccgcttcgtaggcttgctcggtggggacttggcagtcctggcttgcagggccaaaaagggtttatgggcttgttccgagtaccccgttcctgggtactcgacacatgtgttcttctcaatttgtttatacacagtttttggagcgactagagcaggccccttatgtagtaactatatagatgccccgctcgaagcccattgatggcatagtgaattgcaatgtgatcttcgacagtagggatctatgacttcagaattactgatctgttctaatactcatggaggccctcagttttttattgcttgcaaagtgataaccatgcaaaggcgtcactatcgagcctatagccttggaagttgagcaagaacctatcatgaaggaaccatagtcacaaagttcttagatcgatagggtcaaggaacatggccaaggaacgtggtacgcaacatatgagataattttacttggtgggaacaaaaatgaccttacgtacctgggtcggggacggcgtttctgggtcaagggttgttaccattgtacttgtttcttgtgattatccgaagggcccaacatgagtgaatggagagtggaggcagtattgtgtaccatgttaaagcttggccttctaagatgatggtacaggacttcaacattgtgttttttacccattagatgagaccattgtatttcaccaattttgagagcgataaatctatggccaagaggtaacctatatggtctcatagacagggacacctctcatctatgaaattaatggggtgtttggtttgaggaatgaactagtccatcgtattctcactcctcattatttttgtttggtttgtggaatagaatgagttgatccatcaccatctcattcctcataattagttagttagtactaatatgagaaatggagtcatcccaccaaatctgaggaatggacccatgatgcaccaccttaatttggatggtatgattcctcaaaccaaacactctataatgttttgaaaggtagtagagtgttgggctggccactcagtgcctccatatgcttcctcatgaaggtccttatttaaggacttggagaatgacctgtgtctgtggctacattgtaagtccactatttcttgctgaaggagttgggacacagaattctccattttcctcttgaatgagccattgcaagtctgcttgagcttgtctatgttgtttcttagtcgctagagcctctgtcttcctctacaagtttttgttttgaatgtgaaggctcttcagcaaaagttgctcttggttgtttggttcaaaatctccattctcttaggaatttgtgcagtcctccatggagttggggtattgagtcatcgaccttttggtggatccctgatactagacatcaaccactagccatcaaagtgaagatgtgtgctaggcttcgccaagttggggggggtcaatgttttacatgcgggagaccatgttaattcagactctggcttcgtaaggctagctgcaggtgttcactagtaagctgtttggtttgaggaatgagctagtccatcatcttctcactcctcactttttttgtttggtttgtggaatggattgatttgatccatcatcacctcattccttatagttatttagttagtactaatatgaggaatggggtcattccaccaaatttgaggaatggacccatgatacaccaccatattttggatggagtgattcctcaaaccaaacactccatagatgttggtgggggttttcgaactgtttgaacagacgctacccacgatgggtcactcgttgggtcactaatcgggggaggggggacagactcgtgatctcattggcgtgggtggaaattgcctctgctcctgctgactttgacactagctgtggcatggtgattactcttcgtggaggcattatgagttggtagtttgaggtcccatgatgggcatcaatgttgggacttaatatagcaagggcccaaacaatggagatgacgacaacacagaacaacaatttactaatgtcttctcaactgttttgtcaccctggccgagtagaggtatttatgggtaagtaaggagtcagccctaaagtttgtacttggccttagttacctaatacatctccaaaatattatgtacaacattgtatttggggtgtttagaattttgtgttatagatactcagttgtgcacccgcaccgacacaactggtgtgtgcatgtattggccctatgtaggaccagtgagacgacataggaggggggtgaatgggagccactaaaaattctccaacttgggagaacaacacttgtgacttgattacctgacccaatccaacctccagggacaacaaaaacactatgtaaaagaacagatcaaccgaggatcgaatgactgctcaaaccaagttccagagaagaggataagttcaacgagacaaaaaatatttggtttgaacccaaactttcacaagaaactccaaagaagaccccaaaggtctagtaaaaattctgggtcaaaacccgagaaaaacaccgagcggcggtgctgcgcatacgagcgacagtgcctgactacaaaatttttccagaatgctcccaaattttgcaggcagcgagatatgagggagcaaagatgaaccgtgaagtttgagcagaaaaggatgaaaactcctagtctggtagtgccgggcttgagagcggcagtgtcacacagtaaaaacttcacagaatttcctaaaattttgcagacagtttgcgcggggtgtaagaagttttctggtgaaatgaaacaagaaatcaagtcgtggattagaaatctcgagaaggatggggttttgatggggttttctcaaaacgaactcaaagagaaatcttctcggatcacgaccaagaactgaatcgtatgagcgtacgtagtgatgcaaagagtctactccacaaatcaaccccaaaaagaacccatatcaaaataactagaagattctccataaaaccacaagagaagggaaagggagaaaccaagagcacaagacttcagattttagcaaggatacaaaactgagattgaagccaaagaacgttgtgggtcagactggcgacccttcctctgattagacttgaagatcaagaacacattcgaagtacaaaatcgttgcggatcccttggcttaactggtgtctacctagagagaaaactaggagctctagaatgagtgctctaaacaaatgtcagccaagagatgctgaactaaccaaccctcctccttatttatagagggttattcttatttcctaaactatccctatttacatagagcctatccactccatcggaggcgaagtggtccaactcctaggttttcgatgcgatgaccacgtccttcacacggagttgcttcaccttgatgcaccctccgtgatcacgccacgtgtcgccatttgtaccctccggaagcaccgccaccgagttttgagtcccaaactcagcaaaacctgccatccgtagcgctgggtggttttgaggcccaaatcaccaaacctgccctgagtaccgcttatcgtgtgcgccctccacgaccagatgcgtgtccctcctgtcctcggccacgccgacaacatggtccactccaccacgttctcgcgcgagtgcgtgtcccaagtgtcagccaccgcagctggtcacccgactgcttcggtctgtcagttaagaaccaacactcgcccttcaccgctcctagtccatcaacacgagcctacatgatcttcacctcagccgtcgaccaccgtccctgtgttcaacatctgcacaccacaagctggccgacatggctgcacaaacatattctcacactctggccagtccactgagtatccaaaagtggtacccattaacaatcactcatcatcaacccgaacataagggacaagtcaaccttgtgtcacattgtaagaccgttgctacctcaaatgccctagtgtctcccttaacgcaaaacataggtcttcatggcctctcggcacttgatggagcagtacatccttcttggagcaaaggggtcgaagtactcgtggcgtcccataggtctcgatgctgcgcttgggatagtgaagtccgggaaccaaacaccctctaagtttatataatctagcacctataaactagagtatatatatatattagggcctttacagacaggaataactaactcaggggggctaaagggaaaaagaagtagaatatcgatatcgtagtggcggcctattccacacgaacgaacaagcagggcataaacactaaatataagaggaatatttccatcgttatctctgattaaacgagcttaaaaggtttcaatgcgcggccgagcacagtatatgtattgcctcttacaatattttgtaggagtaatgttaactttgaatagagcattcgatcacttgttaggttttccactactatgctaattttgtgggtgttcgtttgagctttctgccacagcagctgcagttttctaatttttacctcactctaattttcaaaaaaaaaacttattttcagataccagataattcttggattgtcttccgccgtgc

SEQ ID NO: 620 - DNA, 5048 bp, Zea mays
  Intron number 1 from transcript GRMZM2G363715_T01 (locus G RMZM2G363715) derived from phytozome v7.0 (chr-ID 2; pos 1 67843447 to 167848494)
cccggtgggcggccaacgacctccgcgaggctacggtatcacatcgaatcttaccaccacattatatacattcgcatcgattgctacgaggtggttggggaaacctgtgaaggcgtttgtgtttatactagtggttgggggaatgaggttaattcattcttacaacttcgagactagataggctttcttggattgtttctttcctggattttagattaatggacgtgaaatcaggtacagttggcaatttggaatctagaggtcgatatgtggtacaagaccctgtttgtcaagccgtggtactgtaggagactacactgttaggaaatatgaaatatgttggattcaatgtagtactttagtgcttgtacatctataacaccttttgtagttccaagctacttctatactaggtgctaagaatctaatgtatatatatatatttttattttattgctaaagtgaagttggcaccaattgcaacacttagcattgatggcatttatccaggcatcaggggccatgctgacatccctgctagttttcctcaaagaaaaaataaatgtccctgccagttcattccatttcatctagcttgtctcaagcacacccttggataatatttctcttcgagtggaatatattctgctttgtcatttaacttttttagttttaaaagatcatattatctgaaaatttgatttttttgaatgttctggttatctggttgaacatatattaatggtgtattggtgttggtcaaggtctagtttaattgacaccttttgacacaattccttttattgttacagtgttatttgaatgaactaatcaactgagtttgtcctccgcagctagaattatctattacttaatgtgtgtagtacctaataatgaacaaaaataaggaaaggaaatgatgttggaaatgaatttgtttttaaaggatcattgtttaacttagcattccagcaacacgtaggcaaaaggaatgccccacttgaggctagaccagaaaaaaacttttgtgtggttattaaggctgtaaggcgcagcgcggtgaggcgtttaaggcgtgcggcaagatgatagcatacaaacatcttaatatatatgcctgtagaaagcagaaacaaatcatataatataataccacaataaatagggatttttcaatccatgcccttggttcatcatcaccgcttaggccctgtttggaattgtagtatttttgtagttttgaaacaatactatggtatttgatgatactatagtattggagctcaaaaggtgtttggtttgtacagtcaaaactcagttttaaataccatggtttacccaaaactgtagttttgtccctctctagtagtaaaaacacctcatccattactattaaagaggggtaaaactgaacagtggtggttaactaatggcacggttttagaaatccctaatgacatatctgaagaaaaatagaaaaatagcaaatctgaagaatctcatctcttagtaacataaaattagactctagtgacataatataacttatttagtagtgttgcaagtgcaaaataaaaagtaacataattggtgatctgaaatctctagtcaacaactcaacatcatctaggcatggctattcaagcagtctttcatctccattctaattgcagtggtagttctgatacacatttttgtgtctcccaaagtcacccagatgtttcttcaccctttttatccctccataaaatgaggtacgacatagggtgcatccgtgcatgttaccacattgttttgaaggtttggccagtaggcatacttccatcctggttcctcaaaatttcccttctgagctagatcagtcttcggatcataatcactggtgatgtaaaatggacttgccatagttctgtcagctgtaaaaacaaagatgtacataggcatccatagcagccacaaatagaaagcaacctgcaaccagcacagtcacaaataactgagcagcataagcagcagaagtgcagaggaaagggtacctgtgtaccgtgaacttgaaagacctgcaggggacgtggatcaacggagcagaggggatgagcgaatcgaggtaaattgttggaacagagggaagggtcgtggatggagggagcagaaggggagggaatggctggaaggagacggtccatctgcaacctttcctttactcccacttgtttgatgctggatggctgggtcatggctctgcaggacttgtaggctccactttcctgcaagggtggaactgctgtctgcttcccacggctctttcccgagagcacacaactgtgccttccatttcccgcccacctgtgcttctgcgcctttggtttcccggctgcgcacccatgcagcacctgcctggggcaagtctgcacggagaagacgccaagctgcgcctagaggatgccttttgatgtagggtggacaccatatcatgccaggtcatggaaaggcagacacccagctttgaaaagctccaggacgccatggcaacacattgataaccatgattttttttgcatttgtagctgttatagggtaccgcttatgagtattattaacttggtaaagttgactcctttcaccatatattaaagagtgtagttactgtacatgatatgaagtactgttgtgctaacagtaatgttaagaaagttaaaggggctaactctgctatcctagtttcatttcttcttctatttcaaggatctagttcacatagaagtattctaatttagcgtctttttagtataaaaggtagcagtatgattactcaacttttgtagccataaacatcctaggactatttgatgcatgccttgtgaatatttgtgccactgttcaagtccatgttgtggtattttttatgctagccccattatgtttaaatagatgatgcatggaaaattggaaatggcagtgagagtgcgcattccattttggttatgtttaattatccctctgaaagtttgttgaatatgatgtatccacttctctctctaagtgcttaactcaagcagcttcaaattattattacatgggtgtttgggatggctccaagttctagctccaatgtggagaaatatttttaatctaaataataaatgaaatgacttatctgaatgtcttctaaaggcttacagctccagctccacgattttctggagcacctattgacgtgctccgccaagttttccggagttggagctatcccaaacatggtacatataagcaaggttattaaatcgacgactactgaccaggatgattagtcgacaaccaggacgactagttgaccctggtcggtctagtcgtctatatatttgacctacagatggcaatgagtgaagacccgccaggttttgttagcccaggcccggccccgctagactaaaaactccctgcttcaatacctgtacggctgtacccgtgggcgggtacaattccacactcatacccggacccgccaggtattccatacccgatgggtacccatacccgtctagagtggagttgtgtctgtctgcccaacttagtttatggtgaatgctaggcaccgagaggcaacatccgaccttccgtcttccatcttctaggtctgggcgtgtcgtgtgcctgcatgtggcttggtcgcttcgaatgcacattaacgaggagtcgcatctcagaagcttggagccttggacacgctgttttggctggttatctgcatactgctaccatgtgtcccaaggcctatgtagcatatagttatactcatgagccagaagcccaagacaaatcattgagctaggctaaaattttagagaattgttggctatatttcgattataaaatacctatgggtacacgggtgtgagtttaatgagtatgtacccatacttgttctatccgttgggtcctctttttctcccgttaacagacccgcgggtataaaattgcgaccaaacccgtaccctaatggagtaattacctgccaggtaacgggtaacgggtccccattgccatctttaatttgtcatgtatataccaggacatatatgtagggtatatatcccatatactatattatgcttatatagtagaaaccgagctttaatactatttttctcgttagtaaagtgtccagaactccatattcttgtgctgcaataactttttcataagggatacaacatctggagaagctgaggatgctgaaccaccagcagctgatgcaacggatgagctcatctttgtacccccttggacctgcagatgaggaagagaatcgacgagcttccttgtgtcttgcgcacctgagaccttcctttaacccctgctgctctacagcaggagggaggaggaagcagcagacaagttgctttaacaggcagctgggaaccagaagggcaggaggggaagagatgcagctgttgcacgcgcacagcaactttgtagccgacggctgaatgtttcacgggtgaggaggtgagggaaagagtgggggagagaccataatgggcttggcccaaacaaaggtagcacagtaagctgaagcagcccatctgcttatttgatgtctagtcggtcagggtacctagtctgattaatcgcaactaatcgacaattaatcgaccgacaaggtttctgattgctctgatccagtcagtgtgcctaattgaatgctgggtactgatcagggcaattagtcgcgattaatcaaacaacctgataacattgatataagcaatttggtgaatattctcaactgcaattttcttcactggtacaagcctgcaaggcttgcatttttcctattatatccattgtgattttcctactatatgttcattttcctgcaagactagtttaggtaatatttccttttcattgtgattttgctattgtaatgcatgcttgtatccatatataatgaatgtgcctatattggtttctttactacatgactaggtagcatttatttactggcacttaaatttccagattaagggaaaagcttgtggaat

SEQ ID NO: 621 - DNA, 13994 bp, Zea mays
  Intron number 2 from transcript GRMZM2G023469_T01 (locus G RMZM2G023469) derived from phytozome v7.0 (chr-ID 3; pos 1 96031712 to 196045705 reverse strand)
tgtacaaggaggtaaagatgttcttgccctgaaaaagataactatggtaactgttgtatctgaattataaacccttgcagcaatgtttttcttatcctatgcgcagtttagcgcattgcggtatggtaacaatataagaacttaggaagatgaaaatattcattgtctgtttccctcatctacatcacgaacactcactttattttgtagtagttaggtgcttcattgttggctatcgtttcctgccttgattttttgggggtattgaaagtcgcctagaggggggtgaatatggtgaaactgaaattctcaaaaataatcacaactacaagccgggttagcgttagaaatataatcgagtccgcgagagagagggtgcaaaacaaatcgcaagcgaataaggagtgagacacgtggatttgttttaccgaggttcggttctcgcaaacctactccccgttgaggtggtcacaaagaccgggtctctttcaaccctttccctctctcaaacgatcccccggaccgagtgagcttttcttctcaatcacttggaacacaaagttcccacaaggaccaccacaagattggtgtctcttgcctcaattacaagtgagtttgatcgcaataaagaatcagagaaagaagaaagcaatccaagcgcaagagctcgaaagaacacaagcaaatctctctcactaatcactagggcgttgtgtggagtttggagaggatttgatcacttgggtgtgtctagaattgaatgctagagctcttgtaagtagttgaagtgggaaaacttggatggcttgaatgtggggtggttgggggtatttatagccccaaccaccaaactagccgtttggtggtggctgactgtcgtatggtgcaccggacagtccggtgcacaccagacatgtccggtgcgccagccacgtcaccaggccgatgggattcgaccgttggagcttctgacttctgggcccgcctggctgtccggtgtacaccggacatgtactatagattgtccggtgcaccgtcccgcgcgtgcctgacttctgcgcgcttctggcgcgcattaaatgcgcctgcaggtgaccgttggcgtgaagtagccgttgctctgctggttcactggacagtctggtgtacaccggacatgtccggtgaattatagcggagcaaattcccgaagctggcgagttccagagccgctcttccctggggcaccggacactgtccggtgtacaccggatagtccggtgaattatagcggagcgcctctggattttcccgaaggtgaagagttcagcgtgaagtcccctggtgcaccggacactgtccggtggcacaccggacagtccggtgcgccagactagaggtgccttcggttatcccttgctctctttgttgaacctcatacttggtctttttattggctaagtgtgaacctttggcacgtgtataacttgtacattagagcaaactagttagtccaattatttgtgttgggcaattcaaccaccaaaattaattaggaaaataggtgtaagcctaattccctttcaatctccccctttttggtgattgatgccaacacaaaccaaagcaaatatagaagtgcataattggactagtttgcataatgtaagtgcaaagatttcttggaaataagccaatataaatacttataggatatgcatggattgttttcttcatttttaacattttggaccacgcttgcaccacatgttttgtttttgcaaattcttttgtaaatcctcttcaaagttctttttgcaaatagtcaaaggtaaatgaataagatttttgtgaagcattttcaaaatttgaaattttctccccttgtttcaaatgcttttcctttgactaaacaaaactccccctaaatgaaattctcctctttgtgttcaagagggttttgatatatcaattttgaaatactacttttctcccccttttgaacacaataagataccaatttgaaatttatcaattgagaatcataccaattgaaaaactcttttaaaattaggtggtggtgcggtccttttgctttgggctaatactttctcccctttggcatgaatcaccaaaaacagagtcattagagcccttagaattactttctccacctttggtcataaataaattagtgaagattataccaaagtagaagagtgatctctcctccaaagatggagagttgcttggagcaacggcgaaggatgagttacggagtggaagcctttgtcttcgccgaagattccaatttccctttcaatacacctatgacttggtttgaaatagacttgaaaacacattagtcatagcatataaaagagatatgattaaaggtatacttatgagctatgtgtgcaaatcaacaaaagaagttcctagaatcaagaatatttagctcatgcctaagtttgttaaaagtttgttcatcaagaggcttggtaaagatatcggctaattgatctttagtgttaatataagaaatttcgatatctcccttttgttggtgatcccttaaaaagtgatatcgaatggctatgtgtttagtgcggctatgctcaacgggattgtccgccatgcggattgcactctcattatcacatagaagaggaactttggttaaaatcctcatcccctacgaatggtactgaaagggaattaggcttacacctagttcctaaataattttggtggttgaattgcccaacacaaataattggactaactagtttgctctagtgtataagttatacaggtgctaaaggttcacacttagccaataaaaagaccaagagttgggttcaacaaaagagcaaagggccaaccgaaggcacctctggtctggcgcaccggactgtccggtgtgccaccggacagtgtccggtgcaccaccggacagtgtccggtgcaccaccggacatgtccggtgcaccagaggactccaacgcaaactcgccaccttcgggaatttccagaggcaactccgctataattcaccggactgtccggtgtacaccggacaatgtccggtgcgccaaggagaagcggcctcaggaactcgccggcttcgggaatctccaacggatagtccgctataattcaccggacatgtccggtgtgcaccggactgtccggtgcaactccggagcaacggctattcggcgccaacggctacctgcgacgcaattaatgcgcgcgcagcgcgcacagaagtcaggcgcgcccatactagcgcaccggacaaggaacagtgcatgtccggtgtgcaccggacatccaggcgggcccacaagtcagaagcttcaacggtcagaatccaacggcagtgatgacgtggcaggggcaccggacatgtccggtgtgcaccggactgtccggtgcgccatcgaacagacagcctcccaacgaccactttttggtggttggggctataaataccccaaccaccccaccattcattgcatccaagttttccacttctcaaccacttacaagagctaggcattcaattctagacacaccaaagagatcaaatcctctccaattccacaaaaggctttagtgattagcgagagagatttgccgtgttcttttgagctcttgcgcttggattgcttcttttctttctcacttgctcttgtgattaacactcaattgtaatcaaggcaagaggcaccaattgtgtggtggcccttgcggggaagttttgttcccggctttgatttgagaagagaagctcactcggtccgagggaccgtttgagagagggaagggttgaaagagacccggcctttgtggcctcctcaatggggagtaggtttgcaagaaccgaacctcggtaaaacaaatccgcgtgtcacactcttcatttgcttgcgatttgtttttcaccctctctcgcggactcgtttatatttctaacgctaacccggcttgtagttgtgtttatatttgtaaatttcagtttcgccatattcaccccccctctaggcgactatcaattggtatcagagctcggtgcttcattagagcctaaccgctcgaagtgatgtcgggagatcacgccaagaaggagatggagaccggcgaaaagcccactacaagccacgggagcacttaatcggaagagtcccacaccaagaggaaggaggagaagaagagctcctccaacaaagggaaggagaagaaatcttcttctcaccacaaagagaagaaggagaaatcttcttctcacaagccgcatcggagtggggacaaacacaagaggatgaggaaagtggtctactacgagaccgacacttcatcaacatccacctccggctccgacgcggcatccgttacttctaagcgccaagagcgcaagaagtatagtaagattcccctacactaccctcgcatttctaaacatgcacctttactttccgtcccattaggcaaaccaccaacttttgatggtgaagattatgctaggtggagtgatttaatgcgatttcatctaacctcactccacaaaagtatatgggatgtcgttgagtttggtgcacaggtaccatccgtagggggtaaggattatgatgaggatgaggtggcccaaatcgagcacttcaactctcaagcaacaacgatactcctcgcctctttaagtagagaggagtataacaaagttcaagggttgaagagcgccaaggaggtttgggatgtgctcaaaaccgcgcacgagggagatgagctcacaaagatcaccaagcgggaaacgatcgagggggagctcggtcggttccggcttcgcaagggagaagagccacaacacatgtacaaccggctcaagaccttggtgaaccaagtgcgtaacctcgggagcaagaagtgggacgaccacgaaatggttaaggttattctaagatctctcattttccttaaccccactcaagttcaattaattcgtggtaatcctagatatactaaaatgacccccgaggaagttatcgggaattttgtaagttttgagtgcatgatcgaaggctcgaggaagatcaacgagcttgatgatccatccacatccgaagctcaacccgtcgcattcaaggcgacggaggaaaagaaggaggagtctacaccaagtagacaaccaatcgacgcctccaagctcgacaatgaggaaatggcgctcgtcatcaagagcttccgccaaatcctcaagcaaagaagagggaaagactacaagtcccgctccaagaaggtttgctacaagtgtggtaagcccggtcacttcatagctaaatgtccattatcaagtgacagtgacaggggcgacgacaagaaggggagaagaaaggagaagaagaggtactacaagaagaagggcggcgatgcccatgtttgtcgggagtgggattccgacgaaagctcaagcgactcctccgacgacgaggacgccgccaacatcgtcgtcaccaaagggcttctcttccccgacgtcggccacaagtgcctcatggcaaaggacgacaaaaagaaggttaaatcaaaatcctccactaaatatgaatcctctagtgatgataatgctagtgatgaggaagatagtttgcgttccctttttgccaacctcaacatgcaacaaaaagaaaaacttaatgaattgattagtgccatccatgaaaaggatgatctattggacacccaagaggacttccttattaaagaaaataagaagcatgttaaggttaaaaatgcttatgctctagaaattgaaaaatgtcaaaaattatctaatgagctaagcacttgtcatgaaacaatagacaaccttagaaatgaaaatgctaatttgttagctaaggttgattctcatgtttgcaatgtttcaattcccaaccctagagatattaataatgatttgcttgctaggattgaagaattgaacatttctcttgctagccttagaattgagaatgaaaaattgcttgctaaggctaaagattttgatgtttgcaatgataccatttccgaccttagaagtaaaaatgaaatattgcatgctaaggttgtagaactaaaatcttgcaaaccctctacatctaccgttgagcacacttctatttgtactagatgtagagatgttaacattgatgctattcatgatcacatgactttaattaaacaacaaaatgatcatatagcaaaattagatgctaaaattgccgagcataacttagagaatgaaaattttaaatttgctagaagtatgctatataatgggagacgccctggcatcaaggatggcattggcttccaaagaggagacaatgtcaaacttagtgcccctcctaaaagattgtctaactttgttaagggcaaggctcccatacctcaggataacgagggttacattttataccctgttggttatcccgaggacaaaattaggaaaattcattctaggaagtctcactctggttctaaccatgcttttatgtataagagtgagacatctagctctaggcaaccaacccgtgctaagttgcctaagaagaaaattcctaatgcatcaaatgaacatagtctttcatttaaaacttttgatgcatcttatgttttgactaacaaatccggcaaagtagttgccaagtatgttgggggcaagcacaaggggtcaaagacttgtgtttgggtacccaaagttcttgtgtctaatgccaaaggacccaaaaccatttgggtacctaaagtcaagaactaaacttgttttgtaggtttatgcatccgggggctcaagttggatactcgatagcgggtgcacaaaccatatgacaggggagaaaaggatgttctcctcctacgagaaaaaccaagatccccaacgagctatcacattcggggatggaaatcaaggtttggtcaaaggtcttggtaaaattgctatatcacctgaccattccatttctaatgtttttcttgtagattctttagattacaatttgctttctgtatctcaattatgcaaaatgggctacaactgtctattcactgatataggtgtcactgtctttagaagaagtgatgattcaatagcctttaagggtgtgttagagggtcagctatacttagtagattttgatagagctgaactcgacacatgcttaattgccaagactaacatgggttggctctggcaccgccgactagcccatgttgggatgaagaatcttcataagcttctaaagggagaacacattttaggactaacaaatgttcattttgagaaagacagggtttgtagcgcatgccaagcaggaaagcaagttggtgctcatcatccacacaagaacatcatgacgaccgacaggccgcttgagctactccacatggatctattcggcccgattgcttacattagcatcggcgggagtaagtattgtcttgtaatagtggatgattattctcgcttcacttgggtattctttttgcaggaaaaatctcaaacccaagagaccttaaagggattcttgagacgggctcaaaatgagttcggcttaaggatcaagaaaataagaagcgacaacgggacggagttcaagaactctcaaattgaaggctttcttgaggaagaaggcatcaaacatgagttctcttctccctacacgccacaacaaaatggtgtagtggagaggaagaatcgaactcttttggacatggcaaggaccatgcttgatgagtacaaaacttcggatcggttttgggctgaggcggtcaacaccgcttgctacgccatcaaccggttataccttcaccgaatccttaagaagacatcatacgaactcctaatcggtaaaaagcccaacatttcatattttagagtttttggtagcaaatgttttattcttgttaaaagaggtagaaaatctaaatttgctcctaagactgtagaaggctttttacttggttatgactcaaacacaagggcatatagggtctttaacaagtccactggactagttgaagtctcatgtgacgttgtgtttgatgaaactaacggctctcaagtagagcaagttgatcttgatgagataggtattgaagaggctccgtgcattgcgctaaggaacatgtccattggggatgtgtgtcctaaggaatccgaagagcctccaaatgcacaagatcaaccatcctcctccatgcaagcatctccaccaactcaaaatgaggaagaggctcaagttgatgaagaagaagatcaatcaaatgagccacctcaagatgacgacatagatcaagggggagatacaaatgatcaagacaaggaggatgaagaacaaaggccgccacacccaagagtccaccaagcaatccaacgagatcaccccgtcgacaccatcctcggcgacatacataagggggtaactactagatctcgtgttgcacatttttgtgaacattactcttttgtttcctctattgagccacacagggtagaggaagcactccaagattcggattgggtggtggcgatgcaagaggagctcaacaacttcactagaaatgaggtatggcatttagttccacgtcctaaccaaaatgttgtaggaactaaatgggtcttccgcaacaaacaagacgagcatggtgtggtgacaaggaacaaagctcgacttgtggccaaaggatactcccaagtcgaaggtttggatttcggtgaaacctatgcacccgtagctagacttgagtcaattcgcatattattagcctatgctacttaccatggctttaagctttatcaaatggacgtgaaaagtgccttcctcaatggaccaatcaaggaagaggtctatgttgagcaacctcccggctttgaagacagtgagtacccaaaccatgtctataagatctctaaggcgctttatgggctcaagcaagccccaagagcaaggtatgaatgccttagagatttccttattgcaaatggctttaaagtcggaaaggccgatcctacactctttaccaaaacacttgagaatgatttgtttgtatgccaaatttatgttgatgatattatatttgggtctactaacgaatttacatgtgaagagtttagtaggatcatgacacaaaagttcgagatgtctatgatgggggagttgaagtatttcttaggattccaagtgaagcaactccaagagggcaccttcattagccaaacaaagtacactcaagacattctaaacaagtttgggatgaaggatgccaagcccatcaagacacccatgggaactaatggacatctcgacctcgacacgggaggtaagtccgtggatcaaaaggtataccggtcaatgataggttctttactctatttatgtgcatctcgaccggatattatgctttccgtatgcatgtgtgcaagattccgagccgaccctaaggaagctcaccttacggccgtaaaacgaatcttgagatatttggcttatactcctaagtttgggctttggtatcctaggggatccacatttgatttaattggtttttcggatgccgattgggcggggtgcaaaatcaatagaaagagcacatcggggacttgccagttcttgggaagatccttggtgtcttgggcttcaaagaagcaaaattcggtcgctctttccaccgccgaagccgagtacattgccacaggccattgttgcgcgcaattactttggatgaggcaaaccctgcgggactacggttacaaattaaccaaagtccctttgctatgtgataatgagagtgcaatcaagatggcggataatcccgtcgagcatagccgcactaaacacatagccattcagtatcactttttaagggatcaccaacaaaagggagatatcgagatttcatacattaatactaaagatcaattagccgatatctttaccaagcctcttgatgaacaaacttttaacaaacttaggcatgagctaaatattcttgattctaggaacttcttttgttaagttgcacacatagctcttctatatacttttgatcatgtctctttcatatgctatgactaatgtgtttttcaagtctatttcaaaccaagtcataggaatattgaaagggaattggagtcttcggcgaagacaaaggcttccactccgtaactcatccttcgccgtcgctccaagagactctccattcttgggggagaaagcatgagcacaaagcacaaggactccatctttggtataaacttcactcatttatttatgaccaaaggggagaaagtagttaaaaagggctctaatgattccgtttttggcgattcatgccaaagggggagagagtatgagcccaaagcaaaaggaccgcaccaccatcaccaatttcaaaaacctcgtattttcaaagaattttatcaattggtatcctcttgtgttcaaaagggtgagaaagtagtatttcaaaaatgatatatcaaaaccctcttgaacactaagaggagaatctcatttagggggagttttgtttagtcaaaggaaaagcatttgaaacagggggagaaaatttcaaatcttgaaaatgcttctcaaaatcttattcatttgcctattgactatttgcaaaagaactttgaaaaggaattacaaaggagtttgcaaaaacaaaacatgtggtgcaagcgtggtccaaaatattatataagaaagaaacaatccatgcatatcttgtaagtatttatattggctcaattctaagcaacctttacacttacattatgcaaactagttcaattatgcacttctatatttgctttggtttgtgttggcatcaatcaccaaaaagggggagattgaaagggaattaggcttacacctagttcctaaataattttggtggttgaattgcccaacacaaataattggactaactagtttgctctagtgtataagttatacaggtgctaaaggttcacacttagccaataaaaagaccaagagttgggttcaacaaaagagcaaagggccaaccgaaggcacctctggtctggcgcaccggactgtccggtgcaccaccggacatgtccggtgcaccagaggactccaacgcaaactcgccaccttcgggaatttccagaggcaactccgctataattcaccggactgtccggtgtacaccggacagtgtccggtgcgccaaggagaagcggcctcaggaactcgccggcttcgggaatctccaacggatagtccgctataattcaccggacatgtccggtgtgcaccagactgtccggtgcaactccggagcaacggctatttggtgccaacggctacctgcgacgcaattaatgcgcgcgcagcgcgcacagaagtcaggcgcgcccatcctggcgcaccggacaaggaacagtgcatgtccggtgtgcaccggacatccaggcgggcccacaagtcagaagcttcaacggtcagaatccaacggcagtgatgacgtggcaggggcaccggacatgtccggtgtgcaccggactgtccggtgcgccatcgaacagacagcctcccaacggccacttttggtggttggggctataaataccccaaccaccccaccattcattgcatccaagttttccacttctcaaccacttacaagagctaggcattcaattctagacacaccaaagagatcaaatcctctccaattccacaaaaggctttagtgattagcgagagagatttgtcgtgttcttttgagctcttgcgcttggattgcttcttttctttctcacttgctcttgtgattaacactcaattgtaatcaaggcaagaggcaccaattgtgtggtggcccttgcggggaagttttgttcccggctttgatttgagaagagaagctcactcggtccgagggaccgtttgagagagggaagggttgaaagagacccggcctttgtggcctcctcaacggggagtaggtttgcaagaaccgaacctcggtaaaacaaatccgcgtgtcacactcttcatttgcttgcgatttgtttttcaccctctctcgcggactcgtttatatttctaacgctaacccggcttgtagttgtgtttatatttgtaaatttcagttttgccatattcacccccccccctctaggcgactatcaggtacctatgctccaaactcaacaacattccatatacttttgtggagtgaggttagatgaaaaatcactccacctagcataatcttcaccgtcaaaggttggcggtttgcctaatggaacgaaaagtaatggagtatgtctagaagtacgaggataatgtaaggggatcttactaaacttcttgtgctcatggcgcttagaagttatggagggcgcgtcggagccggaggtagatggtgatgaggtgtcggtctcgtagtagaccaccttcctcatcttctttatcttgtcgccactccgatgcgacttgtgggaagaagtcttcttttccttcttcttctccttcttcttctccttgttgcgggactctcccgataaagctttctcgttgcttgtagttggcttttcgccggtctccatctccttcttggcgagttctcccgacatcacttcgagcggttaggctctaatgaagcaccgggctctgataccaattgaaagtcgcctagaggggggtgaatagggcgaaactgaaattctcaaaaataatcacaactacaagccgggttagcgttagaaatataatcgagtccgcgagagagagggtgcaaaacaaatcgcaagcgaataaggagtgaaacacgtggatttgttttaccgaggttcggttctcgcaaacctactccccgttgaggtggtcacaaagactgggtctctttcaaccctttccctctctcaaacaatcccccggatcgagtgagcttttcttctcaatcacttggaacacaaagttcccacaaggaccaccacaagatttgtgtctcttgcctcaattacaagtgagtttgatcgcaataaagaatcagagaaagaagaaagcaatccaagcgcaagagctcgaaagaacacaagcaaatctctctcactaatcactagggcgttgtgtggagtttggagaggatttgttcacttgggtgtgtctagaattgaatgctagagctcttgtaagtagttgaagtgggaaaacttggatggcttgaatgtggggtggttgggggtatttatagccccaaccaccaaactagccgtttggtggtggctgactgtcgtatggtgcaccggacagtccggtgcacaccggacatgtccggtgcgccagccacgtcaccaggccgatgggattcgaccgttggagcttctgacttctgggcccgcctggctgtccggtgtacaccggacatgtactgtagattgtccggtgcaccgtcccgcgcgtgcctgacttctgcgcgcttctggcgcgcattaaatgcgcctacaggtgaccgttggcgcgaagtagctgttgctctgctggttcaccggacagtccggtgtacaccggacatgtctggtgaattatagcggagcaaattcccgaagctggcgagttccagagccgctcttccctggggcatcggacactgtccggtgtacaccggacagtccggtgaattatagcggagcgcctctggattttcccgaaggtgaagagttcagcgtgaagtcccctggtgcaccggacagtccggtgcgccagaccagaggtgccttcggttatcccttgctctctttgttgaaccccatacttggtctttttattggctaagtgtgaacctttggcacctgtataacttgtacactagagcaaactagttagtccaattatttgtgttgggcaattcaaccaccaaaattaattatgaaaataggtgtaagcctaattccctttcaggtatcttgcaggtccttgcttcaattcatcaaa

SEQ ID NO: 622 - DNA, 7731 bp, Zea mays
  Intron number 9 from transcript GRMZM2G155974_T02 (locus G RMZM2G155974) derived from phytozome v7.0 (chr-ID 3; pos 1 33789213 to 133796943)
tgcttgaaaggtgatcagattttttttcagtgaaaaagagtagtacttcttgaatattcgttccatgtgcatattttgttccagtattgttcaattgctaacataatacatctcataagcccagtgaggatggacgctctccctgtcctcgcggcggctagccccgcacctgccgccgctgccgctccccccgcctactcgccggaaaaacaaccccaacccctccatcaacccattgatcaggcctccatcctccagatccaccctgcctcggtggggattccagcattcgacgcggacgcccgcattcctagatctgagtccgggacttcttcgacgcggtcctgcctcaagcctgccgccggttcgtcgacagctaaggccgcctgcaccaggagagttaggttcaccgaatcagctctgtccgccgaccaatctcatcgttcctgctttgacgcgtctgctgctccagcaaaaatcactccgcacggccgggatgggactgctacccaccgacttcaatacccaggcctgcgtcccatcactcctcaacgcagcaaatccgctgaatccggcgctgaagatttgcccggctggacaacggtccatcggcgactccgcaggagattcaattcgcctgcgacttcattgaagccaacaaccgagcattcaaggttccgccatctggacaacaaaaatcttaaggtaagtctgagaggtaaatgcttccgatgtctggccagagggcactacgccattgattgcagggatccgttgaaatgcttcaactgcggcggccctggacacagagcctggcaatgtcccaagaagattagtgctgctgcttctaccccctctgccttcccaccacctccctgcttcgacaacgtcaacttccctcctctgcgccaagtcaacatggtgaagcctggcaaccccatggagcgcccgcaggagacattcgctgttgccgcgtcctctcgggacatggacagcgagctggcgcggctgagcacccacgcggcatgggcctggctcggcggcgttcgaccggcaacaagcactaacacagtaagaagggctttctgctctaggttcaggatgcgcgaagaagacatcaaggtggtgagacactatccagaggacttcctcgtcacctttgaacaccagcatcaccgggacacggctgtggcgcaacgcgacttcacctacaacaacatcgatatccgcgtcaggtcgtggcagctccccgtccacggtgaccacagcgtcttcggctcccacgtgcgcctgtgcctggaaggcatccctctgcacgcatggaacgatggcatcgccaagcgtgcggtggctaagtcctgtgtgctggactacgttgaagcccagtcgctgcgaatggaggatgctacgacgctcaatctgtgggcgtgggcgcgaaacccgtctgacatacctaaggtaacgtggctgaccattgttgacaggagcaacactgcccacgacgcgacaccggcggggcgtagcggcttaaccttcagggtcatcgtccaccttgatatggtggaagacccccctaccagggatggccatgggcatacacgtgcgtatgattggcggcttggtgttgttgatggcgagtgcgaaccacgtgaccgtcacgaccctccaccacctcgcagcaaccgtcgcagggatgaggatggtgatagtgaccgtcgtggtcgccgcccaggacgcgacgacagttggagctcccggctctttcgtagcatctcgcgggctcccagggaccacgagcgggagcgctcggggtcgcgccatggccagcgccatgactcatccgggcggcgtaaccacctcgacggcgatcagcagcttcgccaccacctccacggcgatcagcagcctcgtcatgccggaggcgcgtcgttggttacgccacatgttggccgtgacccggcgattggtcgtgacccggcgagacgtggacgcagccgtgtgcgccgttccacccgtgttgctgtccggcgtggccgttcagcgacccccccaaggcatcctgctcgccccagatttccaccaggcgcctgcagtcccggcatccgcagctcacgcggtggtggcaacgacggttctccgcgccctgatgtgaaggctgcagctctccttaaaggtcgttaccgcgttggttgcgtgtaccgaaggcgaccgcgcttggtgcctaagggccaagtcgatccggtcccaggggctgctgctggcgacaacaaccttgctgtctgggatggcagcaggatgaacttcgcagacaacgtaagtctcatcccagtgcagcgagcattcacaactatcctcgattcccttccaacatgccctgctatgcagctactgcctttggtgcagtctgaggaggaccatgtgctgttaggctctccctgcagcacggttgctgcgggctacaacgccgaagctgtgacggactccaatgtcgacgcttcctctcggatgatagctgctgtgcatgaaccttcaacagatgttgcagcggtgtcaaccaccgcgcaaagccatctactcaacaccatattcaccaagccctcgcctgccatacttgagcgaccagtgctacatccttcggagggggtaacaacaccagcgaccactctatctactattcctacagcacctgctagaagaatcaagcagcgacacggcttcaacctttcgacggtacatcgtagcgccagacttgccaacggccctcgaacgaatgtcatgcaacgggcccagcgcgtcctctgccgcaagcttggtctcttggcaaaagatgacgctgctgattttaatactgctttgcaggaatttcaggattggttcaagaagccactgactgtggatagagatggcaatgggtacccgcgacccgatacccgatgggtatttactccattagggtatgtatgtgggctaaatattctacccgtgggtctgttattgggcaaaaatcttcacccaatgggtaaacgggtattagaacattccgccttcacccatacccgttaacccgtgggtataaaatacccaatataaacttatcggaagcatgaacttggactttagtcatccaacttttttactatttaacaacaatttaatgaccatgtaatggaacatgtaatgtgctatgtagtactatcatagtgttactactttatccaattatctttggtgtgttgaatggatggttaaatgatgctagaaaattttgtaatggtatttatatggatatacttgccatttgtatagtataattttttgatagttgtttaatttttgtgggtacgggtgacccatacccacatgggtatgggtatgggggtaaatccatacccgccagtgtatatgggtgacccagtggggttatttttgtgtcgtgggtatgggtatggggtagtaatacccggtgggtatttacccattgccatctctaactgtggagatggggacggccctagatgctctgttcaatcttgatacgccagacacagtttgcctcgacaaggccttgatgggaattgctggagatgctatagctgagatccaagaggaggtggacgccatgcatgcagaggccagagcagttgctgcggcttgattgatggctgttttagctccatgttagatgatgtgggtctgcttttgttatgtcaatgaatctcagttcagtttctactacttttgtgagcaccctggactgtattgggttgctgttttgcttcagacctataacagccatgcttgtgttggccctggtggcccctttaagtttcactgtcattattgtgcagtgctgcaatttcatccagctgtcggtaattaatcggggtccttttctcctccatgtctgactttagcatcctgtgctggaatgtaaggggtttaaatttgcaggcgcgccgagatgcagtgcgcgcgatgatctccaccaccacttgccatcttgcctgtttgcaagagactaaattatcaacggtcgacaggtccattgtgacggcgcttggaggaccaaagcttaataaattcagttttaaacctgcggaaggaaatagtggaacccggggtggtattcttttgctttgggatagcgacctactcgaattgtccaattttactatcggagaattccacatatccgcaaatgtctctcttaaggatcgtcgtgcttccttctacctgacagtcgtctatggaccatcttgtagaggccgcaagcctgattttctaagagagatgagtgcacagatgcctccttcaccttcccctggttggtccttggggatttcaactgcacatacaaagcaagcgacaaaaacaattctagagtcaaccctcgcctaatgcttctgttcaggcaagctcttgacatttgcgacttgaaagaaattcctttgcaaaacaggaagttcacttggagcaatgagagacgacatcccactctcgtaagactagacaaattcttctgcaactctgaatgggaggagatgttcggaatatttggtctgcatgcactatcatcctcggtctctgaccactgcccgctgctcctatccaatactactatgccgaggcgtccacgttcctttagatttgagaatttctggaccaaattaccaggtttccagcatacagttgagcaagcctggctggcaccgacccaacatcgtgagccttttcataggctgtactacaaactgcagttcacgaccaaggcgcttaaggaatggagctccaagttaatacctgatgctagactctttatgtatatggccctagaagttattctaagactggacatggcacaagaaaataggggactgtccgacatggaagtgaaccttcaaaatagattgaagatgcgcatccttggctatgcggtaattgaaaggacacgaaacaggcaaaactcacgcatgctttggcttaaattcggagatgccaacactaaatttttccaccggaaagctggctccaggaggcgaaaaaatttcattcaacggttgcggaccggtaatgggtgggtcttctctcacaatgaaaaagcacaagagctacaaaatttcttccataatgctttaaagcggccaacccctagatctgtcgaccttaactgggacattatctctgaccagcagtttgatctatcaagccttgacgcaccgttctccgaggaggaaattaagagaagtattgatcttttaccaggagataaggctccagggccgaacggcttcactggtgttttccttaaatcttgttggaccattataaggcatgatctcatggctgcagtgaatgctttctacaataatcgatgcctcaacctccaattaatcaattcagcaaacatcattctaatccccaaaaaggaaggcgcggaggtagctggggacttcagacctataagcctcatccattctttcattaagattatcaccaaaaccctggctcttcgtctggcaccgagaatgaatgagttagtttcaccttgccaaagtgccttcattcaaaaaaggagcatccatgaaaacttccttgcagttagaagcactgttagacgcttccagcgtatcaattcgcccacgctattcctcaagctagacattgaaaaagcttttgactccgtccgttgggattacttgattgccttactccgcaatttgggattccctgtgaggtggactgactggatcgcttctatcctctccacctcaacatcaagagtgctcgttaacggggtccctaaccctcctattcatcatgagagaggtctcaggcaaggcgatcctctctcccctcttctgttcgtcttggcgatagaccctttgcaaaaaattctaaagatcgccgcggacagtggagcattgaacaagttgggaaacagctcgcccagcattaggatctcgctatatgctgatgatgcagctttgtttgttaagccgaaaaaagaggatattgagacaattgtcaagttgctcaccttatttggcaaggcctctggtctgatgaccaattttcataagtccatgatcgtcccaatccgttgccaggggctaccccttgatgacatccttagttgcttcccagccagaagagcaaccttcccgatccggtacctgggcctccctctcaccccaactagactcaggaaggggcacttccagtttttggtggacaaagtattgaacaaactgagtagctggaatgggagaaacttctcagtggcagggcgcttaactctggtaaaaacagtgcttacctcacaaccaatttgtctattaaccgcccttaatgctcccaaggcaacgattagcctgctagactccaaaagaagacaattcctttgggctggttctgaacgactgacgggcggaaagtgcaaagtcaactggaaacgggtggcgaggccaaaagcccttgggggcttgggagttcttgatttgggcgcttttgcgcgtgccttgcgcgcgcgatggctctggcataattgcacctcatcacggaatatttgggacaacttagagattccttgctctgatgttgatagactgctttttgcggcatcaacgaccattgagattggtgatggttctaaaatctccttctggggcaacgcttgggtgagggggcaaaggccaaaggacttggcgcctcgtctctgttctatatcaagaaataagaggaaatctttggcggaggcggtcacaaacaatgcctggatcatggatcttgcgctgttcgacagaccgattactccccaccacattcatgagttctgcattctttggtctgaagtccaaaagatccagtttcacccagagcgtgatgatgccatcacctggaatttcactgtggatcaccgctacacagtcaaatcggcatatcaggcacaatttttgggctctgttcacacaaattatgacctcatcatctggaagaattgggcgcctccaaaatgcaagtttttcagctggttagcaattcaaaatcgcatttggacagcagatcgattagccgccaggaattggccccatgaaccaacttgcgtcttgtgtcgtgctgcccaggaatcggggcttcacctttttgtggaatgtcgtttcatcaaaagaatttgggaggaagttgctgtttgggtagctgttgagggcttgaagccgtctaactgggggcgacccccctcgctggggcattggtgggaaaagctggcttttttgccgggatgcaacagaaaaggcatcagatcactattgatccttgtaaactgggagatttggcgagaacgaaatgcgagaatctttgatcgcagattctcgaactgccaacaaatcattgccaaaatcaagagtgaggcagcagcctggaatttggcaggggccaagcacctagttaccccttaacaactatttagtggggtcttttttatttctgtttacttctcttcaggttggacctttgcctagtgcttcggtcactgtattgacttaaacctcttgttattcttcttatcaatatatcttggcagacctcctgccttttcaaaaaaattgctaacatataattatcgaatcaattattagtctttagtgtaagatttaaaacttcaccttttacttactgtcatttgttctgtccataggttccttaaaagtgaggaaattgacaaggttcgca

SEQ ID NO: 623 - DNA, 6389 bp, Zea mays
  Intron number 1 from transcript GRMZM5G813055_T01 (locus G RMZM5G813055) derived from phytozome v7.0 (chr-ID 10; pos 126886916 to 126893304)
gaggtaatatttaactttatgtttacttaactaaactagtattggcagactcagcatttagccaagatcaggggcaaaaactaaggtagtaaaacacctatactagtcacacattgagaaatggcaaaataaaggacaaagtctgagttgagatgataacggtgttagattcccagtggcggaggagccattatggctttttttctcgaatatgtaggaaagctggaggagccattatggcttagtgtggcatcagccataccttacttttaaaaactctcatatcttctactataacaacaaaacaagatgtggtctggtggatgtgttgcctctgttctagcagtagatcttaagttcaattctcaattcttgcagattttattttttgagccataccacattttttctttgccctccgctactgtagattcctatgcatatgttcttggtatattaggtctcatatatagaatcctttttagatgtctatgcatgtgttcttgttgcatttggtctcatatatagagtccttgttctatacggtctctatcctggattggtgtatatatttgggctagtgccatcatattgaatatagtagcgaaaggacctttagctgatttggttaggcggtctgagtagcactactcaagtcctgagttctacccttggtgggagcgaattttaggttgtggttaaaaaaatcccctcggttgttccacgcaaaagcataggtctaagacccggccctggtcgtggtcgttctcacatggtctacagtgccactgtgtatgggtgagacaggagttcgagggtttttctgacctatgtgagaaggttttcttcttaatacaatgctcgggggctatcataccccctcgagtttattttatattgaatatcgtataatttataacatggtataaaaggccaatttttagggttagggttcttcccttgtctatggtttttttctcacaatgttgcattttcacttgttacggtctcatgcaaggacactagactctgttgcggcgcgaggccgacttccgctcgtgcctatcgctcgtgtgctgttgtgtttcgctcgcgcatgcaaccccgctccaggcctagttttggtcggatccaggtttgaaaaactcggccgataggggaaagaccgccccacggtattatattaagaagctcaatcggagtcccgaccgagaaaggtcacaaaagctggtccccggtgcaacataagggtccgccccctataggccagatctttactcatgctttgagccctcccagccaggggcgtatccaggggtggggcaacgggggccatggccccacctcaatttttgtaatcttttatacctaagtttagatatacaataaaataatcaaatttttatatagtaagctggaccaaatttaataaaactagactttgttctaatttttctcgaccatccactgctcagcccactctccacctgagtcgttcgattccttcctctagcgctagctcactcgcggttcgctcgctccttcggtcatcgaatgatggtaacctaacttgcccgctaccggcgccaccttacctcctcgtcattgtcagcttgtcgcctcatgctttgtctgagtactctaatattcaccccaacccacatgtattgaggtggattggggtgtaagttaaactaatttacaccccaatctacttcaatacatgtggatcgggatgaatactagagcacccaaataaagcgtaatcaagatcttgcacacagtgccgctaccttgcttcatagtccgcatcagtagatgggtaggctatcggtaggatctttccttggcaccatgacgccatctacgctcactttctcactgggcctcactatgcaacgttgcaacgcggcaatggctgtcgcttgctgccgctgccatgtaccgccgcatcatcgcctgccctcgctaaccctcacctgttgtcacctcattgtcaccgtttcacgttggattcattgacacgtgacacgccacactgacgcaccgaagcggcttctctgccccagcacaccgccaccgacggcctacctctttgccctctccaactctcatttaggatgaccaaaaaggtttttttatattcatgtcattttagaacacttctcgtattatcacttaaccaccgtaaatattattattatgaaactatttttatctaatagtctattctagtgatttgtatcttactgtatggccccacctacaattttgtcctgcgtccgccactgctcccagccctacatgaggatccgctcctataggtcagtccagatatggttctaaccgtttttgttaggttttggtaaaaaataccgtttgttgcttttctttcgtgctcttgccatcgcgcgtcactactccactttgctctcaccattgactgctgctatggccccttctttgacctcttcgtctggtggtgttccagttctaaggtgttcgatgcttttaatggcaccaattatcgtgactgggttccacggatgcgatctgttgtgtcttgcttgtcctactgctcctacatcacctgtgattttagagaaggctactagcgcagactatgatgatccgatgtcctcttatgtctatcagtttagtgtttacaagacttagttgaatggggatgctcgtgttcgtgctattcttgtctctagaatggatgatcgtcttgctgttgatatcgttaattttgagtttgcacatcagatctaggcttttatgtgtgatcgttatgagcctactagccagtctacatatcttgctgctattcgtcatgagcaactcttacgacaaggagattgtatagttgatgtcttgatgagttctttgcacagatgtcctctatttggcgtcaccgtgatactcttggtccctagctatcactagatacttgtaagtcttgccaggttcagaatgttgcacttgagcttcgacatatctacttcttgatcgggcttcgtgacgagtctaagccccttcatgctcagctgctcgcttgtcatccctgcgtctctctgatggatattcttgctggtgtccgtaaccccgtaatgagactcatgcgtgatactggcctgttgtagtcttcgttggtcttggctatgtgcatgggggcatggtggtcttcattatgcttacgtgacgggcatgtggaagcctactattttaggaaggagaaggcttaggcttgccattcttcatagggtattagtagtgctggtactggaggatctcagggaagtttggctacgactacggaggcccaaatactcatgttgctacgttgccttaagatctctacacctataggagttgttggttttgtgactcagtcctctgcacctatcagttcaccatcttccactgagggaccgtctcccccttccacttcaagtacctgttcatggattctatactctagtgcttcctttcatatgactcctcattgcacatgcctttcgtctatgagtcttatctcattctctcactgtccatacaactgatggatctctcctttctgttgttagttagggtactcttctgtcttgttttatgttcctgatgactgatgtttcttttgttcttgatctgaccatgcagctcgtcaccttctctgctggccaaattactagttatgattgtcgtgctattcttgatcttgatcgttgttatgttcaagtcgatgaatgagtcgcctgattgctactagccattgtcgtcgtgactctctgcgtctctaggagcttgattggcttcatcttccttctgttgtggctgtcggtctttttggtctgttttggttgtgtcgacttcgtcttttgctcagtggcatcattgtctatgccatatttacggcattcaattatctactttgattagttgtggtctttcaagtttggtttcaggtcgtgagtctttacatcagtgctagggttgtcggagaggaaagcaggtacaacttccttattgttctagtgagtctgtttctcagcgttcttctgaccttgtttactcttatatatgggtcctgctccttttgtttctaaaggggcatcgatactattttgtttttatagatgattttgctcgtcacatggatttatttcatgaaacattgtagtcaggctttatccatttataagactttctctgttatggtttgcgctcattttgacacctctattcgtgtatttttgtgttgactctccatgtgagtatctcttagcaagggactcttgtctagttttcatgtcctggcactcatgctcaaaatggtgtggctaagcgcaagtattgccatcttgaaacttctctactcttatgtttgcctcttctgttcctcctcactttttgggctgaggctgtttctattgccgctaacttgacaaacatttagccttcctcagctcttcatggacggattccttttgagcatctttgtggcaagacgtctgattattcaagtcttcgtctgtttggttgtgtctgctatgtgctgctcccacctcgtgcgcacaccaagttggttgattagtcatttgagtgtgtttttcacgagtatagtgttgagcataagggatatcgttgttgggatccagttgctcatcagatgaggatctcttgggatgttgtcttcgatgatgctcatcctttttattctcattcttctttcgatgcttcatcaacatccttgactaatcccctttctttttgttcttcccagatgttcgtgcttctactatacctgcctcacgattagaacagtccttgatggagtccttatcttcttcaattgtgccttcttcagtggtacctcccttcccttggtgtcttctttagagtctccttccttggtttctgactagactaggaagcctccggtgacacatgtctactctcaacgggtcgtaaattcttctggtatgccgtcttcctctgctgagctaccctcttttgttgtgccatcttctactattgagtcatctttctctaatgattcaccttcatttgatgagaatatgctgagccaacttcttctggtagttcttcactgcgacagtttctcgcttttatcaatcacttgaccggtaccatcctttgggttttgctgctacctttctttatgagccgagctcttattgtgatgttatccttcatcaggaatggcagcatgcaatggacgaggagattgttgctcttgagtgtatcgatatgtgggaacttgttactaagcatataggtgttttgcctattacacgcgtgcacaggtttaggatgatctgattgatcttcgttatgtgctttcaaagcttaagttggctgatttcttcacgaaggagcagaacagagctcaacataggttttgtctcttcaaactcagtgtgtttgatccaacttgagttcgagggggcgttagatatctatgtgcgtccttgttgtattcggtttcatatatatataatccttgttagatgtatatgcatgtgttcttgttgtatttggtctcatatatagagtccttattccacacggtctctattctatatcggtgtatatattcgggtctagtaccctcatattgagtatagtgcaatttataacaatttgaactccatgcaccatgcttaaatatgcaacataagataaaacgtccatacaattaaagatgcagtaaaatatattgtgcagaaccaatgtcctactttataatcctactaatgatgcagtaagatatattttggattatggagtagctcactagatattcgagagctgcaccttgagtcactaatcacatagccttgtgcctgggtgtgtttcgttggccttggtcgtgtagtccttgttcgcggtaattcttgtactgtgggtgtgtggtgtgtccgcgagcctctcctctgtagcaggagtggactcttgaccaacacatgtggtttgaggtgaatacaagcgcatccaaagaagtcctcaggtgggaaaatgtgctgcatgcttctcgccgtattgctgttcctataatccagtagtctgtcacaaatccaacattttgctgttttgcagttttgtcttgtttaatttaatgcaagtataacatcagttcatccagtgccgtggttacagcatttaacatgtcaatatactgcacttccgtttgtaatatgccatttttcttcacttgaacagctaactactatttgcttatagtcttctacataacatgcccttagctgaatgtaaaagcagcaaattcagtagccaggcatttttttaaaaaaaaaaactggcttcatcacctatgcatttgcgatttcaggtgccactttgct

SEQ ID NO: 624 - DNA, 9112 bp, Zea mays
  Intron number 4 from transcript GRMZM2G048703_T01 (locus G RMZM2G048703) derived from phytozome v7.0 (chr-ID 1; pos 3 7541965 to 37551076 reverse strand)
aaaaggcagtttcaggtcgattttgggaggatttggtaagtgaacttgtactatcaatgtatgtgcttttactagattgtttgctgccgtttgtcatattttggttgaatccaaactcatccattacttgagcccctactatatgatgatatagtcacataggcctgttaccatatgcaaaatgatctcagcttattatgaggtcgtccaccttggtagcatcctatcgtcttttgtgttgattcactcttagatgggcaagttatcatatggaatgccatggtgataaaccaacccattctttcatgtattgtatgccaatcaagattgtgctagttctttatacattggaatgggttagtagttactcctcatgtgtcatgaccaacatgcagataagaaatgagggacatgattatgccattagaatcatgtgatggcaagttgaacccatcttgatgaaacaaaaaacaagttgatggtaggattatttttatgcagcgagacatgttttagtgtggacaatttgaaagtcgaaacttgtcccaaccatattctctgcagttatatgttattatggttgagcttgcttggagccatatttatagtttacatggttctactgagccaattttcttcattatgtttgttgttgcttaaattaatttaactgaactacatattcatttttgcctgaacttttgtgctgtaagctttgatttgactgtaattgtgattcagcaatggcattgtgaatgcgattcatttacgtacctgccaatatatatgaaaataatatcaaatgttagtttgcttgcctcccgaatgtgaacttaatgacattacttgcacacaatggatgcaaaatgtagattgatagccacagtatctgtggtttttacatgtttggtttgacaaatgttttccaatctgtattgtgcagacatttccttagttttcgttttgttatattttattttttaattaaaaaattaaagagcaacatgtggataatggttttgatgtccaagttgattgaatggacaatggaacattgtcaatagattacataattttgcactctaaaaacactcgattatttggttcaatggttcagtcatgcacaataataaagttattgaagcataacatgccattttgtttcttgcatcgtatactagatgctactgttccttggtgatggatgagtttataggaaacatacaaagagatatcctatggtgtttgctgactaggtagtgatagttcatgaaagatgtgtattgggcgtgaggagataggaaagtagagttgtggttgtaaactctagagttgaaaaggttattgatttaacagaattgagactgatatatgtagtgtgatttcggcacactagacatgaggaggtaaatgttagttgtagggtcaggtactgcctagaaggatatatatatatatatatatatatattgaagcgtaggagaggtacgcatcatatatttgaagaagaagaaaaagttctaaaatagaccattacaaaaaaaaaacagaaacagtggccaaaaccagctcatggcggccgaaagcaacaaacataaaaaacatccaacattgtagctaagagagactaaatccctggaatcagagccataagaagggccaaactcttggccctggctggctcccaaagctccttttcttctccagctcttctgatagctgcattcaggtttggggaaaggccctcaaacacacaactgtttctgtggttccaaatgatccaaagccctagaataattaaggagttaaaccctttcttggtgattccatgcagctgatcgctgcagcttttccaccactgcatggtgtttccctctcccatttgaggagtgagaccctcaagattaacctgtccaagcagcatgtaccaaaaactcctagcgaaaacaaagcctacaagcaggtggtctatggtttctggttcttggtcacacaatgggcaacaatcaggatggttgagccccctcttttgtaacctatctgctgtccaacttctcctcaaagctgttaaccatagaaagaatttacatttagggggtgcccaggaaagccaaattctgtcccaatgttcaaaatgggtggaaccaataaagaggcctttgtaagcagctttggccgaatattttccatcgggtgcaatactaaagatgtgtttgtcatcacgccatggaagaagattgactgtaatcaaactttctgaaaggtcaaggaaatcagcaagaaccccaactgttaacacacctttgatattgcttatccatttgttgtctgttaatgcctcttgaacagttctgcttttcttaaatatgattagggatagctgctaacaaattgggaccaaggtcttgaattctttttccttgaagccaacggtcatgccagaataaggttgatgaaccattcccaacttcagtctgtaccacacaagagaagaaagacttcaccttatccggtacctgcataggcaggaacgcccaaggcttatcaaggtctgttttggccagccatagccacctcatccgtagggcccaactgagctctttaaggctgaagacccctagtcctcccaattcaataggtctacacactcttccctaggccactaagcagtgtccttcattgatatttctccttccttgccagatgaacccttttctaatcttgtcaatggccttgtatgctcccaaaggcaaatccacagccatggtgagatagatgagccttcctgtcatcacaaattggacatgaacttttctcccagactttgtcataagctcagctttccacccaggcaattgatcagcaaccttgtcaatgattggctgcacttgacctctggatagcctctttaaggacagaggtaaaccaagataagtacagggaaaggatgagatttcacagggtaggtgctgttgaagggctaccacttcttcactgcatctgataggatatattctgcttttctggacgttagtaaccagcccagatgcttctccaaacagtttcaaaatgctcattacaatctgaatatcaaactcttttggttgtaaaaacaaaaccacatcatctgcataaagggatattctatggtgcaatggtctagaggacagtggctgcagcagcccttcctcctcagacttggccactaaaaatcccagcacatccatcactaaaataaaaagcatgggtgatagtggatcaccttgtctcaaaccccttcttatatggataactccccttagacttccatttaagagaacttgagtggaagatgttgccaaggggccacttaaaatatctctccagatctgcccaaatcctagcttctggagaacttccaggaggaaaggccaagaaatagagtcaaaagccttagtgatgtcgagtttcagcattatccttgcccctcacttctgatggagcaatctggcagtttgttgcacaagcataaagttatcttgaatgaatcgaccttgaatgaatgcactttgtcgaggtgagaccatatcctgcaactttggagccaatctgtttgcaagaatttttgtgactagcttggccatactgtgaactaaactgatgggcctgaaatccttgacctcatcagccccctccttcttaggaataagggttatcaaggctgtattcaatttattaaagtgagcaaacttcctgctccaaattgcagagaacactgccataacatcatcttttatgatcagccagcacgccttgtaaaatctacctgtgaatccatcagggccaggcgcactatctgatggtagctgcttaatggaatcccagacctcttcttcagtaaactgtgaatctagctccaaatcatgagaaggcaaccctaggtagtcctaatccacagtttttgatctgtccaccctgctgcccagaagtttgttgtagaagtcatccactaggctggccttgtccccatggtcagtacatatgttactgccagaaagcagcctggcagtaaaatcctttctttttctatatctagcatgcatatggaagagtttagtattggcatgcccatcctttaaccaattaattcttgacctcaaacgagcaattgtgcgtttgagagaggaaagaaagagagaatgccttttaatctcctgcagcagccacttttctgctgggatcaatggtctgatatcctgagcaatctcaagttggtgtaaaatttcacgtgcaagctcaagctgggaagccacatgtccaattcttttatcgcaccacctctgaagggcacgtgcagtggctttcaacttcatctcaagagtcaggaaggggcaggagctaccactactcgatgcccacacttcctggactacttcctggaatccctccaatttgggccaaaaagactcaaaatgaaaccttcgtttaccatagcagttgcttttaagaccaagaattaaggggcaatgatccgagtcttctgaagcagcactctggagaagggagttgggaaaaagggcttcccaatcagcagagtaaagagctctgtccagtttaaccaaagtaggcgaagattgatgattagaccaagtatactttctgccacatagagggagatcaatgagtttgacatcattaataaatctcctgaatctccccatcattgccctgtttaggttgccattattttttgtcttccaccctataaattagattgaagtcacccacaacaacccatggttctgatttgcctcagctcttggaggaatagaatcttgtcatcaatgtcctgaggcccatagacaccagttaaccaccaaggttggccatttgactgctggaattggacagaaacagaataagtgtccattctattatgccctgttgcttgtacatgtcttttccaggctaaaagaataccaccactagccccagaggtaggtaaaaagaggaattcttcaaaattcactccaagaatagcaaggccagttcctctagaaatattctgcattttggtttcttgtaggcaaacaatgtctgctccaacggaatcaatgaaagttcgtacagagtgttgcttggagggagagttcaaaccccgacattccatataaatattttctttggatccattaaatcatagatggacacaactgacactaaaaaggacaattaacaagcagcaacaacctcgctggtcgatggagccctaagctcatccggcacattccatctgaagaggccgcgagagcttcaatctgagccaaagagagacttgaagagaacaccttctcataatccttccttgcttggttactaagatcttcagtgaccccaatcacctccagggccttcattacttttttcttggctctttaagtttagatcatgcttgtcaaattcaacccccgcccctgcaatgcggcgactatgacgaggggtaggcgcaggtggctgggcctccagagccatcacaggggttggaagaataccggagatttccttggacagttttttgaggaactgtaactgacctgcaggcaggacagctacctgcgaaggtgaaggttcaacgttagtgctaatggctgcaacattatgacactcctcttctatccttgatgactcctcctcaactgggtcctccacagtcctatcatcatccctgtcctcctcaactgagtgctcctcagtcctatcattctccatgtcctcataattttttcctctatcagctgcttctttggaaatctttttcttgaataaactagcagctgaggcggtggggctgacggaagcatcaactcaagggcggctgaggtgggagactcagtcgaagcaatgtcctccacgccatcagcagtttcaacgacatcagcagctttcagagtgtcagacgggatagtgcttctgtttgaatgaggcaaacattcaccattatccgctgggataacctccagaaataagacttccggggaaagttggccaccaatgacttccatgtgagcagcagactggggtgaaccggcatacgaggcactgtggaccccgccaacaccgaggaccgcactcgcgggcccagccgctcatgaaccgacaaccgaggcatggatgcaactgtcgatcttgctcgatgaggatgagaaatgggtatatagtgaagatgttaatcatataatcaaatagaatggccatagaccttcacctgatatgttgtatggtgcaaatagaagggccaaacttgggctttgcatttagctttgagatctcatattcacccttgtccttcatagagcgtttctttccatccttccgaaccatcatcacatgattatagtaatttttaatgctctccttgactgttttaagcatcccaagtcttcttcatgctattaatgtgaaagttcaaaatgaatgactcatagctcgtagagagagactggagaatcgcatccatagccagctcatcaagaagagcgaaaccaagcacgtcaaggctctcaatttaacccatcatcttgattacatgaggactgatgagacttccttcagttagcttgcctgaaaatagagactcggagatctcttatatctcaacgcttgcgtggttcatgaatatgccacgtaatcccacaatcatagtgtgggcatcatcatactcatattgcttttgaagctcaaaagacatggtggcaagcataagacaactaacatctagggagtcatttgtgcttctcataagcacttcggtcagcatcacttgcattacattcttcgcttgctcatcattatagaaagtctcaagaacatactctttttttctcttgcttgagaacaatttccaagtcatggtacaaatcaataaagtttgtttcagtgagtttttctttgttaataattgattgcaaattaaaaccggtaggagccatcactacaacaaaataaaaagcaaagttcacaactatgtttacttaaatctttcattaaacaatttaacaaaagattttcccactatgttttgcaatcgtcttccgtcgaatgacatatagtggacaagatcatgttcactaagttctagtgagctttggcatcacggctagaaacataatgacataggtaagcaacatttactaatcacatcctatgactcttgtttgttgggtggcatccaatgccctagctcccaacatcatgcctaaggcctaaatccgatttgatagcctcgttaagcaaactaacactttgcatgcagatgtccgacaccggtcctattagatcaaaatagttgatggcactctgttttggcaaacctaccaaacgatgattagaatctttataggcgctacaattggtggtatcaaagtgaactctcaatttttttgtgggaagctattctatcacatttaatacatggactaatagtatgacatgaaaataaaacaccacagatagttatattgacgaccctttatcatggtaatctccatcacaaagtcctatccgttacatttgggccatgctatttacaacatttctttcaaaaccaagttaagcggagaactagatactaccgcgtgtcgtgaaaatggattgtccaaacaatctatcgttgtacgcaaatgtcagtccaaatttgatttgcaacctctcagaaattcatcaatcatatcatgaaattgttatgaaaacttaccgaatttgttgcctttcccaacctgaaagatacacacattgttagccctaatggtgattctaactggcagagacaagtgtggtcaggagtcaaagcgaactgatcttatgcctcgatggtgatttcagttggtaggggcaaataagttgtgcgactatcgcctatttaaaccattcaggtcaaaaactgtgcatgacctggatccggtagactgcccggaaatatgtatgctacacactagcatatctaccatgttcaacaaagatggcatgcaagtatagggtcatagatcgttaccacttgatgtgcagcgctcttaagttcattgctgatcaacatcacttcatctccacacgtgtggagatgaagtgtgccaacactgcgtgtgcagcgagagaaacgacattgacgttttgggctcccacaaccttagggaaagaggtggcagcagctcggattgatatctctaacgcgctagccccttcttatatatatagacccttgctaatgaggttttacccgaaaagtctatagcgttctcatgaatcatgattgcctcttggtcatatattcaatagatagttggcctattaaaagactttgttgctgctgctgttacttgttacatgctagatgctactgaatggatgttcctgaaattgatatttcagtgatcaagtgtatgtctatctgagattttgacaactgataatatagttattacaagatggagcattttagccaaccagccaagaaataacatagaacaatgaacaatcaacctaccttttggggttatatgcttcttagaaacatcttgtagaatgactagattgtatattgtggtcatgtgcaatccatcgaatttttgtttacatttgtgtttattagtatgatatctgatgggattgaggggttagagctgaagctgggggagtacgagtgcccccccttccttgctgatttgccattctcgctctgcactcatattaagagagccagagagtaaaattgcttccttttgcacttttccagctttccaatccatgcctacaacatttgtaccatttacacatataattgcactatctcattgtttcatgtcatgactgttaagcatcaccacattcatacaatgcactgttacgcgggtatgacgttgttccgtccaatctttgcagccaatagttaattttataatgctattgttacattttttctctctcgatagcatcaagcttgattgatgtctgggtgtaaaaatgtgttcatgttgtagattgatattcacttgtatgctggtttaaattccaattctgtttaccaatatattcatgatctccaggtgctagtggtagtaggcgaccaacttgagtatag

SEQ ID NO: 625 - DNA, 3080 bp, Zea mays
  Intron number 1 from transcript GRMZM2G004182_T01 (locus G RMZM2G004182) derived from phytozome v7.0 (chr-ID 8; pos 2 2170711 to 22173790)
gggccagcgaggcgcagtgcctcaccatcgagcaggtgcgccgcaccgcattacccttctgcttgcttctgccaggcccagggctctacagtctacatgcctttgcttcctctctctttcagtgtgtctgtctgcgagttaaacgtaggctgcagcctagctgcttggacgacaagtgttgctgctgcttgcaatgtggcgggtgaccaatgaaaatcaaagctacctgctgttgattcctcgcctgtttctttgctcaggttgcaatctagggatagattagggcttcaaatgcgcatttccgacgccaatttggcttcaatgatgcacgcctgatgagggctactacctactaggacgcctatagaattttgccattttggttttaacatatgggcatgaaatgccaggtatcctagttgcgctggtgctcacgtatagaacttaacttcatactgtcaccttgcctaaaacttagaagtaaaccaaactaaggagaatgaatccttcgtccttccacatgtacgtgcaggtacacacactatattggggaatcacaaatttctatgcaaaactcaagaacttacccaccttgccatgtgtgatctgtgatctttgttctataactcttttccctctttaatgaaaggcagaggtcctgccatttgtgtttcaaaaaaggtgttcaaagttgcatctcttatcaaatagcaggatttaaagatctgcttcttttttcttggagagttggagttaactctaatactccttatcaggttgatgtagattgaaccctcacgttgcagataaataaggcgattcttagacagttctgcaatgctcctttatttatttctttactttttttgtaaggtatgaggtgtagcgatacagtatatctactaacagcacttgtgctcttgatagttcatttaggattgaatgaagttaccaaatgtagcagcatattgttcacttgttagttcaagatcaattcagaattaagactgtaaaatgttgctttagtagacagagtggtgcactatgtttgaagtgggtagctttagtgcttattgatcatagatattgtggttagcattagaattgaaatatgaaaccctattttctgagtcgttcgctgtttcgcagggtgcaatattacttggcgagtgtagttccaaaatactgcattcaagatcacttcagttcagtagtgttggaacaaaacactgcattccttttcttgataggctagaggtagcactaattgaagaataacttatccaataccggttgataggctagtgcatagtagaatcctaaggcgtgatagcaatgggaagagaggcaggggaaagccgaagttgacatgagaagagacagtaaaaagagacttgaaatgatgtaatatactaaaaaaaattagcctgaataggagtgcatggcaaacagttattcgtgtgtctgaaccttgacttgtggttttcattgtgtttcaactctagcctatcccaacttgcttgggactaaaatgctctgttgttgttgtgttctctgatttcctcaactgtcagcttgttctatggaggataactgtacttgttttgttatgagtaacacccattgttgttagatcatgatatgcctacttttagataaactatttgttgagtcggttaaatggctaaaacatgtgtttattatcctattatcacataatatatgttttaatatcattgaagtattttttttcaggaaaaatatgtttattatttgcatatgatcaatttatatacctataaagataatgttggtcaagattaaatcgcattgattacatgtattctaaaacattactaacttttatctactggcaagtataaagttgagtgaattgttgaaaaaaatcttgtggtacatgtcctgtgtatggtggatgatcatggttgcaattacgaccttgtagacctgattaaatggtcaggtcctcgacactacttacgtttgttcatactctgcagtctgaattggatgtaaacatcttaaccttgacaaactaagtgttactgtggatttgcttatttcatcatacaagcccttttaaaaagatgatttcattgagattttaaaaaagaattcaatgagaaagtgcaggtgaggtcctatctagggtacatttaaattttaagctcaatatttgaaacagaaatgctttctcatcaattacgtagtttgttatcggttattcatgggagtgaagggcctgttggggatgggtttcaaatccttcgttttttttatttcgactgaatccccagaatttctagagcaattatccctgtcaaaacgggttgtaagacattagaatggtctgtgggctaaaattatgggacgggatggtgcatagctcgagtttccccatgttgccggacaaccaactattctgtccattccaaattgttagtcggtttggcttttcttgatacatagcttttcctatacacctagatctacgctatgtttagatctagaaaagccaaagcggtttataatttggaaaggagaggctggtcgtaaaaaaacaaatataattattgcagcaggtactgcttctcctggtgtttttttagctttatagatgctaattcatccaggtgttctgttatttggcacacaggatgtcggccaacagttttaggtcagaacttgtgttgtggatctcatgcattacccaggattgctatgagtaagggtatggactgtaatgctgcaatacaagttcttaaaaagaatagaagaaagctgctgttacaaaattgcatgactaattcagaatctcacatcgatgcgaaaagttacttcataaagcaaaatgcccactataagtctaaggtttgcacattttgtttttgtggtcacaactattgtcagtgcacctaatgaatattctactatgtttggatcactgatatggttgtttccccccgcattagggctctaatagtcacagggtgtacttacaaaggtacatgctctctgccttgtttttcaggttaacgagtttcttaactgtctcgtag

SEQ ID NO: 626 - DNA, 1955 bp, Zea mays
  Intron number 10 from transcript GRMZM2G102521_T02 (locus GRMZM2G102521) derived from phytozome v7.0 (chr-ID 9; pos 18906735 to 18908689 reverse strand)
gttggtgttagcttattcaattggtacaagtaagtactccttttcaagatcaagtcatgctactctgtttatctatgtgctctgtgagcttgtatgctctgttagcgaagtgttttggttggtggtttgaattttggctgtaataaaagaaatgctgtaaactgcttctggcatcaagctttttggtcgtgatgcttggggaatgaaaagcccttaaactctaaaaaaactcctgtacaacacaatgagattaagaagtccttaatttctacgacctaaaattttgttcagcccaggctgagggaaatgccaaacagctaaactgaaacatcttccattcatttggtcaggttataaccagcatttttttcttgtggggatttatacctgtattttagtctcggggagtaatagcagggatgtttatttgttcagaattaacattgtaacaatcaagaatagcttagcatgaatttattgaccgatatatgtctggtgacaaaagttaaaatgtcaaacaattgcatgtcttccttggctaaccgcagcacctggtgaacactaggtgatgcaccgttgaagacaatcgtttcaatgcttccaaataatgaaataatcactgcccctgtcatgggtagtcagctaggcctactggaatgggtttggcagtgtggcccattagtgttatggatgttgatctgatctggatggctctaacccaagaagcctgacatcagctagccaataggcggcagtcagaacacaagggcagagatagaagggactaggataatagatctaatctttttgcttgattagatggatacaaggggctttgctttcttgcagcagcccctgtccctgccataccctgaggtggttatggtattagtttgatagatggatcactttatgtacattagattttggccgccgtaaggtggttctccgtatctcggtctatgtaaggcctgtaatttcttcttattaatataatgatacgcagctctcctgcgtgttcgagaaaaaatagatggatacatttcccctctttatatatagaggcttatttgatccctaaagagacccttatctctaattaaccctaacactaatgggccacactgccaaacccagtccagtaggcctagctgactacccatgacagccccaagaatgaacaaataatccatgttcttcttgaatgattgggctacaggactgacaactctaatcaaccattcactgaacatggcgtcctcaacagtaggtcacaaatttgaaaggccaacttgctgaaataaataagacaaaccggcctagagaagatgcaattggtgaggacctgttagatattttcattattttggactttcggtcatgtaatagacatttttatcggctgtggcatgccgacagcaagccaacagaagaattggctcttctttggtgcccaagacttctagatcagccaccaaggttcaaaggatgtggatcctataaataaatcctcataatccgaaatgttttgggatgagggcactgtaagcttgttagtctactgttttgggatgagggcactgtaagcttgttagtctactgttttgggatgagggcaaaaaggtgacgggcaagattagcaatcaagttgttatgcagttaattgtctttccaaaataaagtattagctccattacccagtggtcacaaatgccgtcacattagtgattctgtaccaatagttgcatgcacacaaatttacaggttcatttacatcaagaattttcatctacgataccccctttcccaaaagaaaggttacccaaaattgaggaactttttgatgcattgtgaacatattaacatattactccctctgatcataacactcattggatgctgtatcttgatgttaccttgtcatggtgtaagaacatttgtctctactcacaggt

SEQ ID NO: 627 - DNA, 23814 bp, Zea mays
  Intron number 12 from transcript GRMZM2G003984_T01 (locus GRMZM2G003984) derived from phytozome v7.0 (chr-ID 1; pos 48960250 to 48984063 reverse strand)
catagcagttggaaagttgagaggaagttcacaaggtctgatttattccatactataatgagtgcataattgcggatttgatacctaggagggttggtgccctcgttagctaaaatatcatgttgtaatgtttcaaaaatcatcacgaaaatcatgcatgtagcacacttgagttaagtgtagccacaacaattcagattgaaatttatcctacatgccaagaagcaaaatagacaagtagtctcttcagatagacacatgtttggaggcagattttctatttttttctcgaaaaacgcaggagaactgcgccttattttattaagtaagaagaaaaaagggtcggaaaggacccgaatacagggcctccttatggaggccagaaacaagcataaaggaaacaatccatacacaactaaaagatacaacttatctcaaatattggtactgggagcagctaaaaaggaaagacccttagctcctgcaaccatccatttctccctttcctcagcagtggcctctaagattgtagtgatattggggggggggcgtcaaacaccactctgtttctgaacttccagatcatccaagctcccagaatcaaaagtgaattcccttcttggccatgtctgacacaatatcagcaatacgtttccacgactgcaggaagtttgtgtcatcctggagaggggcaagaatgtggagcccaaatttccgaagagtgatgttccaatataatctggaaaagctacaagaaaccaaaagatggttgatggtttcaggctcttggtcacaaagagggcatctaggaggatgattcagtcctcttttttccagtctgtctgcagtccagcacctattatgagccaccagccaaaggaagaaccgacacttaggaggtgcccaagatttccagaccattttgtaatgctcaaaaccaacagagccagtgaagaaatccttataagccgagcttgcagaatactgcccattagaagcaattgaaaagatatgcttatcctcagaattaggttgcaacacaacatcagttatggcattccagagatgtaggtaatctactagagctctccaggtcaaggcacctttaatatcagagacccatcttctattagttagggcctcgcgaacagttcttttagaaacaattctttttggaacagtcaagaggagccttggagcaatatcagatacacttctagcattaatccacttgtcactccaaaagtaagtgttagcaccatcaccaatttctgtgacaagcacataagagaagaaggctttagctttgcttgggacatgaacaagaagattattccagggacgggtagggtcggtcctttgcagccatagccatctcatcctaagtgcccagcagagttcagggaggctggaaattcccaaacctccaaagttcaagggtctacacacttttccccaagccaccatgcaatgccctcctttaacctctcttctgcctctccataagaaaccttttcttatcttgtcaatttccttaatgacccacatagggaaatcaatagccatagcagtataaacacacatcccagtgagaacatgttgcactagaattcttctccctaccctatttaataagttagccttccagttaggtaatctatcagcaatcttatccaccaggggccagagttgttggttggataatctatgaagggatagagggaggcccagccacaccacaaaccatggcaggactgagtacatataaaaataacaaaattggaaactaagtaagcttcaacatatgctaaagtagatgttaatctaggtgctaaagataagaagataaagtgttgatatatgcaccaactactcctaagataagcacacgacttagtctatcattctccctaagtattgtgtggcgtcttatgaggaatttgaaccatcccaattcctagcgcaaaactactgaaacttgaccctctaaagtgaattcatgaggaaatcaacgagctagtcctacgtactgatgtaattggtcctgacactccccttgtccaagtagctcctgataaagtggtacttgaaccaaatgtgcttgctatgttcagggaagatgagattcttcgccaaggcaaggcagacttgttgtccaccctgggctccactgctttagcatctctgccaaggagatcacccaacaactgagccaaccagagagcctaagtagaggtagaagtggcgacaatgtactctgccttgcaactggacagagccaccacctgctgcttgaccgactactaactgaccaagcacttgctgacgaagaagccctgcttgtgctcttgatcataccgatgtcgtcggcatggtcgctatcactgtagccgatgaattgcgttgtgtcgaggcaccttgggtagtgcaagtcgtagtcgaagttatccgcaatgtagcgtaggatcctcttgatggcctattggtactccatcgtcggttgctgcatgaaccgactgacatagccgatggcgaacgccaagtctggcttcgtgtggatgaggtagcaaaggctatccacaatgcaccggtactgtcacgtccacttccttcgccatgccgtcacaacttaggtttggttgcattcgatgagcccgcctagctcgatgatacacttggcataggcagtctagcggagtgagatgccgagttgtcctggtggacctcgatccctaggtcactcatctggaaagcatccttcatctcagcctgaacatgtccacctcttcttccttggcccgacgatcaccaagtcgtcaatgtagaagcttaccagtagggcacaacttccgttgccccactagtaggcgaaaaccttgtgagcgctctattggaaccccatctgcttgagggtggagtccagcttggcgttccaagctcgtggtgtctgacgcaggccgtagaaggccttgcgtaggcggagaaccttgttcttcttgtcgaggatgacaacatccaagcagttggtggacgtagacctccttcaagtcactgttgaggaaggtggacttggtgttcatgtggtggatgcaccacccttctaggcttccaacgcgaggaggacacgaacgaactccatctgcacaataggtgtgaaggcgtcattgaagttgactctctcctgttgaatgaactcatgtgccaccagacgtgccttgtgcttaatcaccgccctgacctcattcttcttgagcttgaagaccgacttatgggtgatggcgcgatggctggtaggaaggtcagccaactcccacgtccggttccactcaacggtgtccatctcttgctgcatcgcggcacgccaggctacgtctccctgcacctcagcgaagaagcgcgacacatcgttcgtcatgcaccatgtgtagctctgtctcagagtcgtgctacgccagtctaagggtgtacttctcagcgagaatgttgtgcatggtgtggtagcatagaggctcatcgtcatggtaggcgtcaacgcgatcctcatcattggataatggagtggcgaactccaccatgctgctcatcacgaaccaaagctgccagtgttgatcccaaaggtgtgggcgccagtgcaggagagtagggcatggacgaagatggtggtggtggactcatcgaaggtggtggtgaactaggtgctagggtaggtgagctcggtgaagaagagttgctagatcccctcgctccctcaaagtggacgaagttgatgacggagtcactgatcgttgaagtcaagtcgttgtccaccatattgccccatgtccaagctcaccctttgttgaacacgacatcgtgcgcgatacacacatgctgtatcataggttcgagggtgcggtaggccttggtgccatccacgcaatcgatgaagacccttggtatgctctaggcgtcgagcttgtcgatgtggttgaactccttgacgaacgtctgacagccaaagatgtgatggtggctgatcaccggtttgtaccgatgacaagcctcatatggtgtcttgctagggatgtaatatggttcggaaaatatccgtccgaatccggattcgaagatggtgaacactggttcggatggaattttcggatattcggactttttttcggataacggatacgaatacggatattttgttcggatatcgaattcgaatacaatatgcctgatatccgtcggatatcgaatatccggatattttctcggataaatcttctcggatatccggatgtcttatccggatagcagtgtgcatttgttgattttttgtagaaaaaaattaataatacacaaatagcctcataaattcatgaaaatttatggaggcataccatatgttcatatataatcctccaaaatatttggaccataaaatccaaaatatgatgctatttctttcatttcaatttcacttgttgtgtgaattacacatgaaatcactctaagtatccaagttcactttaccattttcatgtggagacttgaggttatattcttataaaatgtttattagttttggtaacttattttcattttgatgattttatgcaaaataaattaatacacgcacataggctaaaaattcatgaattttacaaaaaaaagtgacatatgtacacatataatacagaaaatgtttatactcaaggagtggatacatgattacaaccatgatatgtgtgcaatgatgtcttacacgatatccgacaaaaaattcgttaccgacaatatccgtgtccgactagttccgtattcgacacacagctatccgtattcatatccgagaacatccgtattcgtattcgtatccgaagctatccgtattcgaattcgaatccgaataaaaatatgaaaacaaatatggtttcagtgatatccgtccgtattcgatccgattacatccctatgtcttgctgtcgagggccttggtgggcgagtagttgaacaaatggatgacgatcatcatcgcctcgccctagtgatcgcctacatccccctttgcttgaggagggcgcatgtaatggccaccaccgtatggttgtggcgctcgccacttccattcttctatggggtgtatgacacgaagtagtggcattggatcccttcgtcggcgcaatacgccgcaaactcagccgtcgtgaactcgccaccattgtctgtgcgagcaccgaagcttgtggacgcattccttcgtagcagcttgatccttgataacgcttgatggcgtccacaacggtttccttggtgtcgagtagggtaatcctcatgtagcgaaacatgtccttgatgaggaggaagtagcgcgggcctctagtggtaactagtgtcactgggttgcagaggtcgccgcacgagctctagcttctccttggtgcggtagctcgctcgacgtgggaaggggagccgccactactttgtcagcacgcaagtgttgtagaactgctccacatgcttgacacgaggcgtgccccacaccatctccttgttgtcgagttgccttagggccttgaagttgaggtgcctaaagcgctcatgccatcgctaggcatcattatcgtggcaggcaacaagacagagggtgctccacttgcacatggaggacatagagacgattgcttcctcttttcaacttggcgagaaggcagcgacggtgatcctagatgaacaccaccccttggtcgacctccacgtgcaagccattctcgtacaactgtcccaaattgatcatggagttccctaatgcggggatgtcctagaagccggtgctcattagtcttggcagtgaagacgatggagccgaccccattgatctctatggcggagcctgacgcgctagagtccaggtcagaggagtactctttctgtatggtcatgtggtgggtggcactagtgtgtcaaggtaccatccgttgatcttgtcgtcactagaactgttggcaaggatgatgtgggtgtgtggcttgtcgaggtggagaagagcggcgacgaccaatgcgagaggggagtgcaactcaatgctcatgtttaataggaacagagcttactcatcactcatgcactcacacaacatgtgcctgactgccatgctttgcctgtcggcagtcttgggcccaatgattagtcttgccacagttaaggcaggtgtcatctcgggtagcattgcgctcactgtctgcaccaccatcagcagttcaacacctccatgcgcccgagaagccttgtccctcttcgcagccaacacttatgtcatggtcgggcgcatgtattccaagtgtcgctgagcccgtgacgggcgccgcgacgcggagcgcatagagcgtgcggtgggcgcgcgcgaggacgcactgggcacgatcaccgtcagtgcctgagatggaaactagagatatctttctattattagttcgtaaattaaaggagcaggttgctttggttagttgaggctgatggccatatattcctgtaatagacaattggtgaagtcaagaaagatattgtccatatatttccctatctctctctgtcttcaaccaagcctttgaccaagggtctaacctcgccagagaagacggatcgaggctagaactttgtagggaggtctagctacccgagggcccttgacagagagagatagggaaattcacgattgaccggttgagagcacctagaggggggggggtgaataggtgatcctgtaaaaacttgaaacttaatccacaaaacttgattaggagttaggacaattaagtcaagtggctagagaggagagcttgcacaacacgataaccacaaagagatcaacacagagatggcacagtggtttatctcgtggttcggccaagtccaacacttgcctactccacgttgtggcgtcccaacggacgaggattgcaatcaacccctttcaagcggtccaaagacccacttgaataccacggtgttttgctttcactttactatatcccgtttgcgaggaatctccacaacttggagcctctcgcccttacactttaatgttcacaaagaagcacggagtaagggagggatgagcaacgcacacaagacacgaaatcagagtaccaacacgcacacaagtcacaacaagagctcacaacacaacccgacgagttcacaactcaatggagctctaattgctatcgcaaagaatcaaatgcgcggaatcgaagtcttggtgcttaggaatgctttagagaatgcttgggtgtattcctccatacgcctaggggtctcttttatagcccaaggcagctaggagccgttgagagcattccaggaaggcaattcttgccttctgtcgcctggcgcaccggacagtcccggtgcaccaccggacactgtccggtgcggatctctttccttatttggcgaagccgaccgttgcagtcctggagccgttggcgcaccggacactgtccggtgcacaccggacagtccggtgccccatccgaccgttgacacttgccacgcgtcgcgcgcggattcttcggccgaccgttggctcggctgactgttggctcaccgaacagtccggtgatttttagccgtacgccaccgacgaagtcccgagagcagcaagttcgcagatgccagcctggcgcaccggacactgtccggtgcaccaccggacagtccggtgcacccagactgagcagactcttggctgctttgagccactctttttcaattgcattttctctgattctaacacttagacaagcatgttagtacacaaaaaccaatgtactaagtctagaatcatacctttgtattgatttgcacattatccatcctttgacatagtttatcacttaagcacttgtgttggacactaaatcaccaaaatacttataaatggcccaagggcacatttccctttcaatctccccctttttggtgatttatgccaacacaacataaagcaactaaaagaagtgcaacatcaattcaaatgagaacacaaatttgttttgaatcaaatttggcatatatggatcattctttgccaccacttggtttgtttttgcaaatcaacttcaatttcctatctctaagtcaaacacacttgttgagacataacaagagttgttccaagagaaattgatcaaagatttcaaaaactccccctttttcccataattaagccttctccccacaagagactaacttttgacaataagagacaaacaagagtattttgacaaacaaaaactctaactctattttttcaaaattctcaagtggtagctgatcaatatcttgctttggccttattttctccccctttggcatcaagcaccaaaacgggatcaatcttggctcttaaacctcattgcctcaccaaaatcttcaaataggagtacaaaggcaataagaagatggagatgaacttggagtgagttaccctctcatcggagtgcagtggaagtcgtgcatggtccaagttcacatttccctttcaatccacctttgagactaaatcaggtaaactcaaacacacagttagtctcaaagggtcaagttgtagcatgactccccctaaataagtgcatcacttacaaatggacttgtgaggtccagggatcatgagtacaacttgagcaccataaacagaatgcataagagaacatgatcaaagcataatacacattgtatgctacaaatcaatccaagttccgcgaatctaagacatttagctcactacgcagcctgcaaaaggtcttctcatctaaaggcttggtaaagatatcggctagctggttctcggtgctaacatgaaacactttgatatcttccttttgctggtggtctctcaaaaagtgatgccggatgtctatgtgctttgtgcggctgtgttcaacaggattatccgccatgcggatagcactctcattatcacataggattgggactttgctcagattgtagccaaagtccctgagggtttgcctcatccaaattagttgcgcgcaacactgtcctgcggcaacatactcggcctcagcagtggatagggcaacagaggtttgtttcttggaactccacgacaccagggaccttcctaagaattgacacatccccgatgtactcttcctatcgaccttacatccagcatagtcggagtctgaatatccaattaagtcaaaggtagacccctttggataccagattccgaagcaaggcgtagcgactaaatatctaaaaattcgcttcacagccactaagtgacactcccttggatcggattgaaatctagcacacatgcatacgctaagcataatatccggtctactagcacataaataaagtaaagaccctatcatagatcggtatgccttttgatcaacggacttacctcctttgttgaggtcggtgtgtccgtcggttcccattggagtctttgcgggcttggcgtccttcatcccaaatcgcttgaccaagtcttgcgtgtacttcgtttgggagatgaaggtgccgtccttgagttgcttcacttggaacccaaggaagtagttcaactcgcccatcattgacatctcaaacttttgagtcatcaccctgctaaactcttcacacgacttttggttagtagaaccaaatattatgtcatcgacataaatttggcacacaaaaagatcaccatcactagtcttagtaaaaagagttggatcggctttcccaaccttaaaagcattagcaattaaaaagtctctaaggcattcataccatgctcttggggcttgcttaagtccatagagcgccttagagaacttacatacgtggtcggggtaccgttcatcctcgaagccagggggttgctccacgtacacctcctccttgattggcccgttgagtaaaacgctcttcacatccatttggaactacctgaaagaatggtgagcggcatatgctagcaatatacgaatagactctagcctagccacaggagcaaaagtctcctcaaagtccaaacctgcgacttgggcataactttttgccacaagtcgagccttgttcctcgtcaccaccccgtgctcgtcctgtttgttgcggaacacccacttggttcctacaacgttttgcttgggacgcggcaccagtgtccaaacttcattcctcttgaagttgttgagctcctcctgcatggccaacacccagtccggatctaggaaggcctcttctaccctgaaaggctcaatagaagagacaaaggagtaatgctcacaaaaattaactaatcgagaacgagtagttactcccttgcttatgtcacccaatatttggtggacgggatgattcctttgaatcgtcgctcgaacttgggttggaggtgctggttgtgcttcttcctccattaaatgatcatcttgtgctcccccttgatcacatgcctcctcttgatgaacctgttcatcttcttgagttgggggatgcaccattgttgaggaagaaggttgatcttgctccttttgttccagtggcctcacatctccaatcgccatggtgcgcattgcggccgttggaacgtcttcttcatctacatcatcaagatcaacaacttgctctcttggagagccattagtctcatcaaatacaacgtcgctagagacttcaaccaaacccgatgatttgttgaagaccctatacgcctttgtatttgagtcataacctaacaaaaacccttctacagctttgggagcaaactttgaattcctacccttcttcactagaatgtagcatttactcccaaaaactcggaaatacgaaacattgggtttgttaccggttagaagctcatacgaagtcttcttgaggaggcggtgaaggtagacccggttgatggcgtgacaagccgtgttcacggcttccgaccaaaaccgctcgggggtcttgaactctccaagcatcgtcctcgccatgtctattgttagatacccgtctcatgtaatgggcctggcccagttatttggtctattaatacactgcccaaccctactctagggttaggggtttccatttcaacttggtaccaaagccaaatttttttttcctcccaccctcagccgccgggctgctcccccgccgggcgtccctctctggccgtcggcctccctgctgccggccgcctccgcccggcccttccaccggcggcgcgcggctcctccccttccccaagccgccggcggccctggtggcggcgcgagcagcgcccccgcgccctgtgcccatcaccggcggccgacgcccctgccgcggcccgaccgggccgctccctgcgcgcccagccgcttgccgccgtgaccccgtcgcgctcgaccccaggcacgccagcgcgccgcgaccggcgcccagacccgcgccgtgcgtgccctctgccccgtcgcgtcgcgacgccctgccgcagcggccgccctgtgccggatccctctgcgcccggcctctcctcgccgggatcccgccgcgtccggcccctccacatctctgccccggtccccagccgcccatctccgcctccattcccgcctcactcctcgccgcgccgcagtagggttcgcaagcccgcagcagagcgcgtaccgcaccctcccccgcgctctgtccaccccacagtccctcctcgccctgcgtgtcggcgccgcctccacacgcccgtgcttcaccagcctccctgccacgtgcgctccccgccgcggcctcctctccctcctcactaatcgtgccgctgcgctactcctaccagcgttgtctcctccctcaccggttccatggcgtcctccccgccatacatgagctttacctcgcccgccgctctcgtgactgtgcgtgtcctcctccacgacggccagctcatccggggcatgttcgtgtccttcgatcctgtctggaaccctattcttcgggactgcgtcgaggtccaccctcaggcgggccgtcacgtgcctggaccgcttgtcttcccacgtgctgcgatcgcctccctcgcggttgagcccgtgtcatctccctcccttcctagtttctctgttggggcaccttctttggccctctccgctcacaccgtacctccgccacttccacctccccgaaccaccaccgattgggtggttgactctggggcctccttccacactacccccaccactagttcgttactccactctcatccaccccacccctcacatcctacctccatcgtcgtcggcaacggctccaccctcccagtcacctcagtaggtacatcggttcttccaggaccattctgccttaacgacatccttgatgctcccggactgactcatcccctcctctcggttcgtcgcttcactagtgacaaccagtgctctatggagttcgacccctggggtctcaccatacgccaccttcccacacatgctgtgctcgctcgctgtgacagctccggccccctctattctcttcacttaccctccactccccacaccagagtagcctcatctcctgcacttactactaccaccacatcacctgctcttgctactaccaccacctcatccgccatttggcaccgtcgcctcgggcaccctggacctgacgtcatgtctcagctttccggccactcagacatatcatatactcggggctcttttgagcgcctctgtcatgcctgtcagctcggccgtcactcccgtcttcctttttctacttccacgtccagggctgttcaggcctttgatcttgtccactgtgatctctggacgtcccctgtccttagcctctccggctacaaatactacctggtcattctggatgactactcccatttcctttggactttcccccttcggctgaagtccgacacgtttaccaccctcactcacttctttgcctgggtatccacccagttccggcgcccggtccgtgccctacagtgtgacaatggccgcgagttcgacaacaatgcctcccggtctttcttcctcactcacggcgtccagttgcatctctcatgtccctacacctctgctcagaacggccgggccgagcgcatgattcgcaccaccaccaacatgatccgctgccttctctttcaggcgtctctccctgccacctactgggcagaggcccttcataccgccacgcatctcctcaatcgtcttccctcgaaggcggtgagccaccctacacctcacttcgccctgtatggcacaaccccttcctatcaccacctgcgcgtgttcggctgtgcctgctaccctaacatttccgctaccgcccctaacaaacttgctcctcgctccactcgctgcctcttcctcggctactcccctgaccacaaggggtatcggtgcctggacctcacctcccaccgcatcatcatctctcgtcacgtcgtcttcgacgaagatgtgtttccccttgcaggctccaccccacccaccgatcttgactccctcctcgagtccgatccggttcccccccccacccccggcgccccgtcttgcgccgttacctgctcctcgtgcagccacgacgccacagctcacgcccattcccgcgccacgcgcggcccagtcgaccccgcctgcgccacgcgcggccacgacgctcatgcctgcgccacgcgcggccccgtcgaccctacctgcgccacgcgcaaccccgtcggccacgcctgcgccacacgtggccccgtcgatcccgcctgcgccacgcgcggccccgtcgatcccgcctgcgccacgcgcggccccgtcgaccccggctcgcttcgccaaccccacgctcgtctaccaccgccgcggccacgccactacctcggcaccccccgactcgggcccgtcgacgagcgcgacccgcttcgccgaccccgccatcgtctatcaccgccgcgagccggccacacctgccgctctcgacgttccggcggtccgctccgagccgtccgtataccacccggtcgccatccaccgcgaccccggacacgtccacccgatggtgactcgacgcgccgctggcgttcttcgccccgtcgaccggctgatcctggcagccgatacttccagcactccacccgacgcttccccggtgccctcctccgttcgcactgccctcgccgacccgcattggcgtcgtgctatggaggaggagtacgcggccctcttggccaaccacacctgggatctggtgccgtgtccaccaggcaccaacgtggtcaccggcaagtggctctttcgccacaagctgacctcggacggctccctcgaccgctacaaggcccgttgggtccttcggggcttcacacagcgccccggagtggactacgacgagaccttcagccccgtcgtcaagttcgccactgttcgcgccgtcctctccctcgccctctcccgcaactgggcgatccatcagctcgatgtcaagaatgccttcctccatggcactctgacggagactgtctactgcagccagcccaccggcttcgtcgacgctgaccgtccggatctggtctgccggctgaaccggtccctgtacggcctcaagcaggcgccccgggcctggtaacagtcgcttcgcctcctacctggcctccatcggcttcgtcgaggccaagtcggacacgtccctgttcatctaccggcgcggcgacgacactgtctacctcctgctctacgtcgacgacattgtactcacggcatccaccgctgaccttctacaccgcacgaccgtcgcccttcagcgggagttcgcgatgaaggacctggggcccctacaccacttcctcggcatcaccgccgagcgtcggcctcagggtctcttcctccaccagcgccagtatgccatcgacatcctggagcgggctggcatgtctgactgcaagccctgctctacgcctgtcgacactcaggcgaagctctctgaggacgacgggcctccggtcgccgacgcgacgtcctaccggagcctgaccggcgcgctccagtacctcaccttctccagacccgatatcgcatacgccgtccagcaggtgtgcctgcatatgcacactccgcgggagccccatctcaccgcgctcaagcggattctgcgctacctccgcggctccctcgactacggcctcctactccgaccatccccgacgtcggagctcgtgtctacaccgacgctgactggctggctgtcccgaaacgcgccggtccacctccggttacgccgtgttcctgggcgccaacctcgtctcttgggccgccaagcgacagcacgtcgtctctcgctccagcgctgaggccgagtaccgtgccgtggcccaacggcgtggcagaggcctcctggctgcgccaactcctccacgagctccacagtcccctccagcgcgccaccctcgtctactgcgacaacgtcagcgcggtatatctctccaccaaccccgtgcagcatcagcgcacgaagcacatggagatcgacctgcacttcgtccgcgagcgtgtcgctgccggtgacgttcgggttctcagcgtccccaccacgctgcagttcgccgacattttcaccaaggggttaccgtcaagtgtatttttagactttcgatccagtctcaacatctgtacagggtagagttgtgactgcgggggggtgttagatacccgtctcatgtaatgggcctggcccagttatttggtctattaatacactgcccaaccctactctagggttaggggtttccattccaacttctatgagcgtcctgttcttcctctctaccacgccattttgctgtggtgtgtagggagcggagaactcgtgcttgatcccttcctcctcaaggtactcctccacttgaagattcttgaactcggacccgttgtcgctcctcattttcttcaccttgagctcaaactcattttgagctcttcttaggaagcgctttagggtcccttgggtttcagatttatcctgcaaaaagaatacccaagtgaagcgggaaaaatcatcgactataacaagaccatacttacttcctcctatgcttagataggcgacgggtccgaagaggtccatatgaagcatctccaaaggtcttgatgtggtcatcagatttttgatatgatgagagctccccacctgtttacctccttgacaagctgcacaaggtctatctttttcgaaagtaacattagttagacctatcacgtgttctccctttagaagcttgtgaaggttcttcatccccacatgtgctaagcggcgatgtcacagccagcccatgctagtcttagcaattaagcatgcatctagaccggcctcctcttttgcaaaatcaactaaataaagtttgccgtctagtacacccttaaaagctaatgaaccatcacttcttctaaagacagacacatctacatttgtgaataaacagttatatcccatattacagagttgactcacagacaacaagttatatccaagcgactcaactaagaacacattagaaatagagtgctcggatgaaatagcaatttttcctaaccctttcaccttgccttggttcccatcaccgaatattattgaatcttggagatccttgttcttgacgtaggaagagaacatcctgttttccccgtcatgtggtttgtgcatccgctgtcgataatccagcttgagcccccggatgcataaacctgcaaggcaaatttaggcttgggtcttaggtacccaactcttgttgggtcctacaaggttagtgacaatatccttagggacccaaatgcaagttttatctcccttgcattttgcccataatttcctagcaatcacctttctatcctttctacaaattgcaaaggaagcattgcaagcatgataaattgtagaaggttcattagtcttcctaggaacatgagcaacatttctcctaggcacatttctatcatgcatagtagaaaaactagaagcaaccatggcgtgagattcaaaagcatcataacttctataatcatttctaggatgtttcctatcatgatacatgaaggcatggttcttttgagcactactagccataggggccttctctttctccttggcggagatggaagccttatggcttgttaagttcttgacttccctcttgaagtcaagaccatccttaattgaggggtgtctaccaatcgtgtaggcatcccttgcaaattttagcttgtcaaattcactcttgctagtcttaagttgggcattaagactagccatttcatcatttaatttagaaatgcaaactaggtgttcactacaagcatcaacctcaaaatctttacacttattgcaaattgtaacatgttctacacaagatgttgatttatttgctatttctaacttagcattcaaatcatcatttatgctctttaagctagaaatagagtcacggcatgtagacaattcaaaagaaagcatttcattccttttaatttctaaagcaagggatttttgtgcctctacaaacttatcatgttcttcatacaaaagatcctcttgcttttctaatagcctattcttatcattaaaggcatcaattaattcattaattttatcaaccttggttctatctaggcccttgaataagcatgaataatctatttcatcatcatcactagattcatcctcacttgaagaagcataagtagtattcctagtacataccttcttctccttcgccatgaggcatgtgtgacgctcgttggggaagagggccgatttgttgaaggcggtggcggcgagtccttcgttgttggagtcagacgacgaacaatccgagtcccactccttgccaagatgtgcctcgcccttagccttcttgtaagctttctttttttcctcttgttcccttgttcctggtcactatcattatcggaacaattagcgataaaatgaccaatcttaccacatttgaagcatgagcgcttccccttcgtcttgttcttgttaggctgccccttgcgaccctttaacgccgtcttgaagcgcttgatgatgagggcccatctcttcatcattaagcccggcccgcctcaacttgcgccaccttgctaggtagcgcctccttgctccttgttgccttgagagcaatagtttgaggctcttggattgggccattcaacgcatcgtcgacgtatcttgcctccttgatcatcatccgcccgcttacaaactttccaaggatctcctcgggcgtcatctttgtgtacctaggattctcacgaatattgttcacaagatgtggatcaaggacggtaaaggaccttagcattaggcggacgacgtcgtggtccgtccatcgcgtgcttccatagctccttattttgttgacgaaggtcttgagccggttgtacgtttgggttggctcctcgcccgtgatcattgcgaatctcccaagttcgccttccaccaattccatcttggtgagcatggtgacgtcgttcccctcatgtgagatcttgagggtgtcccagatctgcttgacgttatccaagccgctcaccttatggtattcgtccctgcataaggaagctagaagaacagtagtagcttgtgcattcttgtgaatttgctcattaatgaacatgggactatcagtactatcaaatttcattccactctcgactatctcccatatgctgggatgaagagagaacaagtgactacgcattttgtgactccaaaatccgtagtcctctccatcaaagtgagggggtttgccaagaggaatggaaagcagatgtgcatttgaactatgcggaatacgagaataatcgaaagagaagtttgagttaaccgtcttctttttctcgtagtcgttgtcgtcgtccttttgggaagaggaagattcgtcgctgtcgtcgtagtaaacgatctccttgatgcgccttgtcttcttctttccatcttttcgtttgtggcccgagcccgagtcggtaggcttgtcatctttcggctcgttgacgaaggactccttctccttatcattgatcacaatccccttgcccttaggatccatctcttcgggcgattagtccctttcttgaagagaacggctttgataccaattgagagcacctagagggggggtgaataggtgatcctgtaaaaacttgaaacttaatccacaaaacttgattaggagttaggacagttaagccaagtggctagagaggagagcttgcacaacacgataaccacaaagagatcaacacagagatggcacagtggtttatctagtggttcggccaagtccaacacttgcctactccacgttgtggcgtcccaacggacgagggttgcaatcaacccctttcaagcggtccaaaggcccacttgaataccacggtgttttgctttcactttactatatcccgtttgcgaggaatctccacaacttggagcctctcgcccttacactttaatgttcacaaagaagcacggagtaagggagggatgagcaacgcacacaagacacgaaatcagagtaccaacacgcacacaagtcacaacaagagctcacaacacaacccggcgagttcacaactcaaatggagctctaattgctatcgcaaagaatcaaatgcgcggaatcgaagtcttggtgcttaggaatgcttagagaatgcttgggtgtattcctccatacgcctaggggtctcttttatagcctcaaggcagctaggagccgttgagagcattccaggaaggcaattcttgccttctgtcgcctggcgcaccggacactgtccggtgcagatctttttccttatgtggcgaagccgaccgttgcagtcctggagccgttggcgcatcggacactgtccggtgcacaccggacagtccggtgccccatccgaccgttgacacttgccacgcgtcgcgcgcggattcttcggccgaccgttggcccgactgactgttggctcaccggacagtccggtgcaccaccggacaatccggtgatttttagccgtacaccgccgacgaagtcccgagagcagcaagttcgcagatgccagcctggcgcaccggacactgtccggtgcaccaccggacagtccggtgcacccagtctgagcagactcttggctgcttcgagccactctttttcaattgcattttctctgattctaacacttagacaagcatgttagtacacaaaaaccaatgtactaagtctagaatcatatctttgtattgatttgcaccttatccatcctttgacatagtttatcacttaagcacttgtgttggacactaaatcaccaaaatacttagaaatgacccaagggcacatttctctttcaccggtgccacatcatctcggaggtaggcgtcgccatggacctgaccaaggtgcagaccattcacgattgaccgatgcctcgctctacgtgagcggtgcgcgggttcctcggcttggcggactattactgcaagttcgtacacatacgactccgtcgcagcgccgccgaccactctcctcaagaaggacgcttcacttggggtgaggaggcagccgcgagttttgccgcgctcaaggccgcggtcaccatagcccccatcctagccatgccgaacttcaccaagaccttcgtactcgagtgtgatgcctcgtcccatggttttggggtggtgctcattcaagaagggcactcgatcgccttcttcagtcgccccgtggcaccctgctaccacgccctcgccgcgtacgaacgggagctcatcggcttggtccacgctgtatgcctgtggatgccgcacctgtggagccgccgcttcctcgtcaagacggaccactacagcttgaagtacttgttggaccagcacttggccaccatcccacaacaccactgggtagggaagctcctgggcttcgacttcaccgtcgagtacaagccgggtgcggcgaacgtcgtggccgacgcactgtcccagcgtgacacggaggagggggcgctcctcgcactctcagcactgcgtttcaagttcatcgaccgtcttcgccaagcacaacacatcaaccagctctcgtcgccattcgtgaggacatcagcaccgactcctgtcgagtgccctggtcggtcgccgcggcactagtttgccgggcgactctacatcccaccggcctctcccttggtccaagagatcatggtggcagtctacgaggacgaccacgagggtgtttagtgcacgctgcactgtctgtggcacgacttccattttcctaacatgaagcagctcgtgcaggacttggtgtgcacgtgcattgtctgtcagcggtacaagtccgagcacttgcacccggctagcctcctacttcctctgccggtgcctcagggcgtttggactgacattgccctcaacttcattgaagcgctgccccgcatccgtggcaagtctgttatactgaccgtggtggacatgttcagcaagtattgccatttcatccactgccgcccctgtactccgccgagtctgtcgctcaagcattcttcatcggcatcgattgactacacggtgtgcctcagtccatggtgtcagacatggactcggtcttcacatccacgttttggcgtgagctcatgcgcttgatgggtaccatgctgcacatgactgcggcgttccatccacagtcgaatgggcaatcggaggcggccaaccgcgtcatcatcatgtacatgtggtgcctcacaggggacatgccatgccagtggctacgctggctgccctaggcggagttcgtcttcaataccgcctaccaaacttcgccgcgggacacgcccttccgcgtcgtctacggccgtgatccgccatccatccagtcatatgaaccaggggatacgagggtggctgctgtcgccaagagcatggaggagcgcaaagagttcctcgccgacgtttgttaccggctggaacaagctcaagcgacgcagaagctacactatgacaaggtgcaccaccacatcacataccaggtgggtgactgggcgctccttcgcctccgacaacacgtggcgtcatcgcttccccaagctgtcaccggcaagctcaagccatgcttcttcgggccgtaccgcatcaccgagctgatcaacaacgtcactgtccgcctcgccttgccgcctcgagcccgcattcacaacgtgttccacgtggggatgctcaagaagttccaggggccagcgccggccactcccccgcccctaccgcctatgcatcatggcgcaagggcccctgagccagaacgcgccgggcatttccgtttggctcgtagggtgcatcaggttcttgtccagtggaagggcaagttggaagtctgctacttgagaagacgtcgagccgttccgcatcaagtatccggaattccagctcgaggacgagctgctcctcgatggggggagggatgccatggtcgggcgcacgtattctaggcatcgtcgggcccgtggcgtgcgccgtgacgcgaagcgcgtagagcgtgcggtggttgcgtgtgaggacacactaggcgcaatcaccgccggtgcctgagatggaaaatagagatagttttctattattagttcctaaattaaaggagcaggttgctctggttagttgaggccaatggccatatattcctgtaacggacaattggtgaagtcaagacagatattatccatatatttccctatctctctctgtcttcaaccaagccttcggccaaggttctaacctcgccagagaagatggatcgaggctacaaactacgtagccgaggactagctacccgagggtttaacacccttgacagcttgcgattgcttgacaaacccgaagactccctttctttcgcttcttctggcgagcaagccagtgcttttcggtgaagagaaacttgccaccaatggtgacccgctcgttgggtggtggttggtcatggccatcgacagccttgaggcgcccgccacctccttgctcgtcagctctgagagacccaacaacatctccatcgccaatgtgacttgcgcgtatttcttggggacgacgcgaaggaacttatcgacaactttctccttgatgtcatcgttgtcgtacatcgttatcaggctggagagacgtagagcaaattcgtctacatcctctcccggccagaacgccagacaattccactcctcaagcaacttttgttgggtggctctgtggatgcgattgctgccgatgcgtgtcgtggcgatggcatcataggcatccttagcggtcttcttgtccgtgaggatggacgctaattgtgtcttaattgaaacaattactaaattacataatttgtcttgtcagttgtcaaacatcgatcaaaagtcatgatcctttctagaaatatattacattttccttcaacaactttgccatttgttagttctcttttccttgaaaatcctaataagaagaattagcactttgtgccaaggccagatgctcaatatatgttctggttttgggagtgttggaatataatataagtaaattgtctaccttttcttatcggtttaagcttttggattgaactggttggtgcatgcaacttaatagggagaactgggatctcaaggcattaagaaaaactatgccttacgtaatactctctagtttctgacttcctgttaattcgaatcaacaattttatgtaacttggttctacaatttttctcgtaactgtagcaataaatatctgttctgttctttcaccgcaggtaagatcat

SEQ ID NO: 628 - DNA, 7434 bp, Zea mays
  Intron number 3 from transcript GRMZM2G158252_T01 (locus G RMZM2G158252) derived from phytozome v7.0 (chr-ID 5; pos 3 8781540 to 38788973)
ggaaggatccttctgctattgatcaggtacccatcacatcatgcattgcaaggtgctcctcccataagcatggtgaataaaaaacttccaatttttggtaaaaagagttgttgctgcccactactcacacacacagcccggttcttacaaaaatgaccgtaggccaaccggctgatctacgggaaccaaacattacatgttgcaaaaaggaagcggagtctattaatatgtgtgtcatatcgtaagagcagaacagtaaatttgagaacaggtcaatgggaaccatattattatgtgtagtgaaatcaaactatccttagttcagttcctgcttagcaccatttaatactagcctccggaacaatgatgcctctattaagattgcatattttatcaattcgaccttcatgttagtatatttacttgggtaagtcatgtacaattcttcttttggtaacattgtagttaccctactggatatcatgatatctatcagcgttgtgccctagtgatcaagggaacataatttgatctcttgaagtagatggattccttaggagccatctaaatctatatcttaaaaatgaaagacatcttaattgctgacactatgagcaaaaccacaaggtttttttgaattgggaaacaagtaatgtggttcaaagatggaatgcagagttgcatctaagtgaataagtgttatttatctcagacacattggagagctgtgtatcattgtgattttttttcgcagacacgtaggagaactgtgtatcattgcattaaggataagtatatgaaaacctacacatgcccccaaaacagattctatcgccacttataaaggttaattatgaccaaaagtgcatgcagcccctaaatcaagcatctcatgtatgctgaccacatcttcagatcattgtcctttgatcctcaaggtcagagagggctgcttggggaaaagacggtttcattttgagagtttctggcccaaatttcctggttttctggaggtggtgggtgcgtcctggagcttgccagttgggggctcatgcccgttggagcaggtgtctttgaagcttaaaaggttagctcgcgcattgcagtcctgggggcataaagaagtgggtaatgtaaggttgcagctggggcttgtcagagaagtgttgcataggctggaaatggcgcaggatatcagaattctgtccagtggagaagtttggttgctaaacttgttgaagcagcggtgtcttagcctcgcgtctcttgaaaggactgttgctcggttgagatcacggatccactatctaaaggagggtgatgccaacactaagttctttcattcgcaggcatgttatcgaaagaaaaagaatttcatctccaaaattgagggagatggaagattggctaccaacccatgatgatatgcaacaaattcttgaggagtattttcgtaacctgctgggggctgatttgcagaggccatttactattgatctgagtaattgtcacagggctgcgatggatctaactgttttggagcagcctttttcagagaaggaggttagggacaccattgctagtctcccttctgataaggcccctgggcctgatggttttacaggaaaattttataagacatgctgggacatcattaaggtcgacataatggctgctcttaattccctttaccatggtgatgcctataaacttgacttgctgaactcagcgtatctcattcttcttccaaagagggaagatgcttcctcagctagtgattttcgaccaattagcttgattcatagttttgctaagctggtcactaagatcctcgctaatcgtttgggaccatatcttcaggacctagtggcagctaaccagagtgcttttattagaggaaggtcaattcacgacaatttcatgctagtgcaacaatcgattaagttccttcataagaggaagatctctagtttgctgttgaaactggacatttccaaggctttcgactcagtctcgtgggcgtttttattggagattttggcacatttggggtttggtcctgtttggcgtaatctgatctccaacctgttattcacttcttctactcaggtgctcctgaatggctcgcctggtaatcatatttttcatcggagaggtcttcgccagggagatcctctttctcccatgctatttgtgatggttttggatgtgcttagcagcttgttccgggttgctgaaaatagaggcttgttgcagggccttgggggagctgatgtccgcagtagagtctccatctatgcggatgatgtggtccttttcataaagccaattgaagcagatctgaattgtgctaaaataatactaaactgttttggttcggcttctggtctggtaaccaatatgctcaagagcagtgctattccaattagatgtgatgatcagcaggtgcttgctggttgcagtgtgctgcattgcagtcccgctgcgtttccttgcaagtatctggggctgcccatatctgataaaaaattgaggaaatgtgaccttaagttatggattgagaagattgcagatcgtctgcctaactggaaggctcggctgctcaatctggctgggcggactgcgttggtgaagtttgttctatcggccattccgacttatcttcttattgcaatcaatgtccctcagtgggttattaaatcaattgataaaattcggcgaggatttctttggagaggaagaaaggaagttaatggtggtagctgtcttgttccatgggaagttgtcacgaggcctctgaagcttggtgggcttgggatccctaaccttaagctcaaaagctgagcattgcaggcaaaatggttatggttggaaaagacggatctaagcagaccttggcgtgggctgtcccttccagtgcaacgtcaggttagacagttctttgatttgtcggttgttaccattttagggaatggggctactactctcttctggtcggatagatggattcatgggaataatatccaggacattgcccctgaggtggtgggtatggttggccgcaaggcgtattcttccagaacggtggcacaggctctggataattggcattgggtcagtgatattcgtggtgctctttccttgagtgggttgcagcaatatctgttgttatgggatactttgggggaagttaggctttctcatgatgctgacagacatgtttggatgcactcttcttctgggatgttctcctcaaagtcttgctataaggcttttttcatgggttcaatttcgtttgagccatggaaacgtttgtggaaatcctgggctcccccaaaatgcaagttctttctctggctggcgataaggaataagtgttggactgctgatagattaaggaggagagggctgcaacacccggttgtttgtgttctttgtgaccaagagcaggaaacagtgcaacatcttctgtgtacttgcagttttgccaggcaattttggcatgctattcttgttcccttgtgtcttggggatctcattcctgctgttcatgaaatctcatttgctgattggtggaggaaggtgcttaagaaggtgcccaaaaacagaaagaaaggcttcaacagtctcattatcttggggtcttggtgcctatggctgactaggaacaaagctgtttttgatggtgtaaacccttccctgtgttttgttaaaagcttatttctgaatgagttaagttgttgggagagggctggggctaaacagctagcaagttttggtcttcctgctatcatgagtagggtctagattgtggtcaagtgttctgtttgccctacgggcattgtactttggtcctcttggacctttttcctctcttaatataatgacgtgcagtcctcctgcgcgttcgagaaaaaaaacagcaatacctgcctcccaaggattatctggatttacttaataattaggtggtactccgtagcaacaaacaccagaaacttgttatagctgaaaactggagacaccaccctatttctggtttcaatttacttgttatatgggctttttttctcgaaaaacgcaggagagctgcacatcattgtattaataagaaggggaaattaaggtccaagaggaccagtacaaaaaaccacactatggtggccagcaacaagcataaataaaactatccataggactaggatacaaaaagacgaccaaggaaaaaattaggtcgggcctgctgcgcctagagcagcagcaagcccaaggcttccgaggtgtttggcaccagccagcacccataaggatagctcgtcgatgaagcttctatgcaccttgccaatggttggtaaatctccatcgaaaataactctgtttctatgcaaccaaaggcaccatgctcccaaaataatggcactgttgactccctttctcttgcttctgtgcacctgaatggtcactagtccccaccaatcagcaaaattagtatcttctggtcctggagttaagtggcccataccaaagggggagaggatgttatgccaaaactgcctggcgaagacacaaccagtcaacagatgctgaactgtttcttgctcttgttcacagaaagggcatgcttccggatggggaagacctcttttttgcagcctgtcagctgtccaacacttattctgcatggctaaccataaaaaggtcttgcacttaggaggagcccacgatttccaaagtcttttctaaggttcgaaggtgatggagcccaaaaacagaaccttgtagcaggacctagaagagaaaaggcccgaagactcgaatctccacatatggtgatcctcctgagaagtgagcacgatctcacccagggtgtcccaaagcgtaagatattgttgtatccctacaagggagagggttggcttgatgtccctgacccacgacatgccctctaaggcttgatgcactgtcctggtagaggcaacctttttatccacctttgagatcacttcaggtgccagctcagcgatagagcacccatttatccatctgtccctccaaaaaagggtgttattgccatttcccacattagtgtacatcgaactggccactagtttccttacttgtgactgaacagggagatccaatccactccaaggcctattcgggtcagtcttggagagccaaagccatttagcttgcaacgcccaactcttatatattagatttgggataccaagtccaccaaggtccagcggtctggtgactttatcccacgccaccaggcaatgcccacctttcacatcttttctacccttccacaagaaacctcgccgaattttgtcaatagcactgataacccacttgggaacgttcatggcgatgaaaagatatacagggattgcagagagcacgaacctgaccaaggatgccctgccagcaaggtttagcagtggagccttccaaccgggcagccggttagctatcttgtcaacccactgcaaaaggtcccttttccctaacttcttatcagaaacaggcagccccaaatagttgcatggaaaagaagccgagttgcactgcaaaattttacagctgtcctgaaccgtctgatcatcacaactgagagggatagcacaactttttcgcaaattcacaactaagcccgaggcctctccaaagcaatccaggatcattttgacacaagtaagatcatcaactgcaggcttgacaaaaagaaccacatcatctgcgtaaatcgagagcctagatttcacgtttctgatggccaggtcctgcagcaatcctctttcctcagcatgcttgaataagctactaagcacatccatcacgattatgaaaagcataggagataaggggtcgccttggcgcagccccctccgatgacgaatataatcccccggagctccgttcaatagcacttgtgtggaagaagtggataacaaattgaacacgagaccacaccacctaggcccgaagcccagatgggataatacttttaggagaaaggcccaggacactgaatcgaaagcttttgtaatatctagctttagaaacagaccagcgatcttcttcctgtgaaaggccttgatagaatgttgaaccaacatgtagttatcatgaatggaacgtcccttaacaaaggcactttgatttgtagccaccaaattttgaaggtgcggtgctaagcgattagccaagactttggatatcaacttggcgaagctgtgaataagactaattggcctgtagtccccggctgtcttggcatcaactttcttagggataagtgttaggtacgcagaattcatcatccacaatttgcgtgtgttaccttggtgcagggtgataactgccgccatcagatcagccttaattatgtgccaacaagttttataaaatcttcctgtataatcgtctggccccagggctttgtccgagggaaggctagcaatagtggcccggacctcctcctctgtaatgggaaggtccaaggccccaaggtcaacatcagcactgtggcaaacctccaaatctagagtgaactctcgctgcttcgctacccccaacagattggagaaaaaatcaaacaagacctcctgcttttcctcttgcgaggtggcgatctggtccccatgcactaattcagagataaagtttcgctttttccgatagcaagcctgtagatgaaaaaaggaagtgttggcatctccctctttcagatatttgatccgcgatctaagtctagcaattgtccattccagagatgcaagccccaggcagtgatgcttaagccttcctttcagccatatctcgtccccacacaacagtctattgtcttgagcaatctcaaatctgtgcaaaatttccctggccaggttaagctgaaatttaacatttccgatccttttatggctccacgactgcaaagcctttgcaagccttttcaactttagagctaatctttccaagggacaagaaatcataactggctgctcccaagaggtagccaccgtctccaaaaaatctggaaacttggtccaaaaactctcaaagtggaatctccgtttccctttgacattctcattaagatgcagggctaagggaaaggaaagaatgcctgcctctaataattgtacatccatttctaaaagagtactaccaattgccaaataatagggatactgtttgggggataacctaaatcaactgtatttggaactgtgaagagattcgtaaacgtgagatatgtagtttcgaactatattttatatgcattaattagctatggtttgtaggggaaaatcatcttatttttcatactgcttgaacacatgtacacttttcaatgagcataaacctttgctaatgtcaactcatgcagaaaacatttgaggacttcacagcaaggacaacatt

SEQ ID NO: 629 - DNA, 5591 bp, Zea mays
  Intron number 4 from transcript GRMZM2G043749_T03 (locus G RMZM2G043749) derived from phytozome v7.0 (chr-ID 10; pos 66016090 to 66021680)
tcatttggtcaaggtacagcttggttatcacaccggtaagccatcagtttatggtacctatccattggctctatagttgtcatacaaggtgatatggtatgcatttgatatcacaaaacttgacatttcttgctgcaaaatatattggttcttctattaatcttttcacgatgcattttttaataactttaaccatactgactatttatataaaaattcttgttttgaggggtttggactcttaacagacaaatcaaaacctttttcaccttgctgactatttatacgactttgaaatgagctcatagttaggcagccaaattatgcatgtattatgttttccatagctgagatagtatcaatatagccttctactcactggcgtgccttgtcagagatgaagaagataatccttggatcacttaaacgctcacaaaactcaacacaaacactggaagtttacaattgagtttttttggccctgtcaaactacaccgctgcaataggtgtattctattgatatgtttttataaacaattacaaaggctcatagtcatagccataaatcacgaaaccaattagcaatcaaccaacaatcaattagctaagaaaggaaactaatcaatcaactaaaaaggaagcaaataaaccgagatggattatgcaacaatctcccctaagcccgtcttggtttatttgaccttgacgatgccaatcttgccacaaatttcaacggagtcagaatgtctgcaagttgttctttagtactcacatgatccatataggtcttcccgttcttcacattcacgaatgaaatggaatttagtgtcgatgtgcttacttcgatcatggagctggttgtctatcttcaacatcagcgactggactttgacgccagtgatgtccccagtagccgcacgagcaacaaaacttggcatgctctagccgcgcccatcatatactcttcttcacaagttgagaggccacctgcttttgccaagagataggcatgtctgccaggaagaagatagcatcgttggtgcttatcctctcattgatgtctcccctaagtcactatttatgtacccggtagcgtgtagcccatcaacgtgttgtcggtgttgcaacgcttgggtagacaaggccgtagtcgactgtgccaacgatgtagcgcaggatgtgcttgacgatgactagatgctcttgccacggtctctccatgaagcggctcaataaacccaccgcaaatgtaatgtctggcctggtatgaaccagatagcgcagactctccaccgaacttctgtaatctaaacatctatctccagtgttgagctcttcgacaaaagcttctatcggaccaccattggcgtgcgacatgggttacaattccccacgctggccttctccaacagcttgagggcatacatcgttcgggaaatcgtgacagaattgtgcccttgcttgacatctagccttatatataaggataaaagaccaaggtcgctcatccgaaacaaaaaatgtcgcatgctcgcatttgctccttgaacgcatcgatgtccgccgagcttgctctagtgaggatcaggttgtcgacacagacttgaccaccacacacgaagctgtgacaccgttgatgtacatcccatgctcattggcacacttggtgaagttgagttcgcgcaagaacgttttgaactggagaggcgtctcaccgtcgtggtcggcatcgaggtttggaatagtgtcaggtggtgacacaaattccacctgtgttggtgatgaaaggtgtactggtcgctgctggaggggtctaagcactggtgcagatgtatcgcctgttgatggcatccttagcgagcctggcgctgatgttgtgccactcatgcaccctagcgagcctgatgtaggcaccacatcacttgtactcgacgcagatgatgtgtcttcctgttctagtcccgtgatgtccaagccatggagcgtcaccatcgaaaacggtgtcgcattgcgttgaacccgctgacactgctctagtctcatgcctttccttcaaacaccgcatcacgtgagatgattacgcgtccagcgccaggattgtagaacctgtaccccttggacctcgggttgtacctggtgaacaccatcagtgtactccagtcatctagcttccgccacacacctaaaagtatgaatgaattgaattgggggctttatatcataccaagcttcgtacgacgtcttcccttcaacactcatcgtcggtgattaggtgagtatgaagacgaccgtggcgaccacctctccccacaaccagctcgatatccccttcgccttcattatgcttttggccatgacaagcatcgtctggttggatgatggacgtcgttgtctagtccgttgatgccagcatcacgagtcactgagagcacctagaggggggggggtgaataggtgatctggaaaaatgcttcaaacaatacaaacttggtctataaaaggtgttagagtaaactaaaaccatgtttgaatcaccggacagtccggtgcgccacttgaaatccgggcagcaacggtcgatcgtcgatctgattggccgacttccttttccagcatggcaccggacagtctggtgcgccatcagacaactgccacgtcagctagccgttggcggctggtgcctgcctgcggagagagcagttgaagaccttatctggtgcaccggacagtgcactgttcactgtccggtgaattttataattaaaattcccgagactggcccaaactggcccaagtttggctcttttgagccaaaacatctccatcttttggcccttcttgagaggttccctagcacttagacaaacatagttagcaactaaaacaatttacttagtgttgggatcatacctctttcattccttttctccaggatttactatatgtccaaaaactaagtccaaattccacttttcttgcacaaaggagttagtagccaaacaaaggtgcaagaaacatagtataaagtatgtgcaacttattcaagtacttaaacctcgtgttttgtagctttatccaaagttgcacttttgttcttcaaattcaactcatttggacttgctacctccaatttgcctttgctacacctgtgctcatgctcatattaagagagttggttcaatgtggtgtgttaagcatttaatcaccaaaacaactagaaatggcccaagggcacatttccctttcggtcacatgaagcgtatcttgtcgtcgacgaggaacaacttcccttcaggcttctccagggtgatcggaccacacaagtccatgcgtaccaggacgagtagatgaggtacattgaatgccacaccttgactagcaaccgtcggtgctagtcctagatcatgagaatgtcgtactcgtcggttaggaccttgtggccatactcatcgagttgacctaggctggtgatgtttgctgttagtcgggggatgtagacgctagccaacacatgatcgtcgtcactctttcacctgaagaggacaatgtcgcgtccctcaatggtgaccatggagctgtcacccaaatgaatggtcttgcggatgccgatgtcgagctcgaagaaggcaatgcgctcccccccatgcggtttatcgtgtcggtgttaatgatctagtgcgtgctcccgccactgcccttctcctagatctagacagttagttctcatcgaggtggatctctggccttcctagggggctagtgtcgcttgggaacgccaaaggcatgagcgccatatcttgtctctccttggcaaacgcccatcgtgtgctgcccccgtcctcgatctggatgataagtctatctctagctcctggcgacacgatatccacctatagtgatggatttgggtaagacgtctgcatcagtgtcccccttgcttgcctcttctttagtttaggtcatgatggaggcaaggtcaagtttagtgcgctcttccacagcctgggcagcatggccttacttgtccctcttcttgcgacattcgtgagcacaatggcccattttgccgcaatgcttacatttgtcgacaacaatccacttcccctttctgttgccattgatgttttgtggtggccttgagctgccatcatctctactacgcccgccaccacgcttatgacttatgctcgatgatgttcaattgcggcctattggagcagcgacaggacacgtgctaccaactcatccttggttaggttcagactagctaaggctctgccattgttgttgccatcgagatcatgccgttcttccaccactttgagcttctcgatcaactccacagatagtgtattgagatcgagaaggatttcgattgccatcacactatgtgagtgccttggtggagtgtcttgtaggaatttgaatatgatttttggctcctagtaccccgacattgaggacctccagttggttggccaagtcgcgaacagattcactgtccttgaacctgagcgagtcgaactcatgtcgtagcgtgttcgccttcgcttggcacactcagtccacgttgaggtgtgttttcttgagtgcgtcccacgcgatcttggcggacgccttgctcgcaatcgcctcttgcatctttggaggtacctcgagtgtgatggcctccaaagcattgtgatcgtcgatgtagtcggtggtgctgatgttcactgccatccacagccgtctcacctgcagcttcaacttcatgagcatcacccatgagtagttggtcttggtcaacaacgggtactacctactgtcactactccccctcacaactcgacggatcactaggccacaatcgccattgctagagccgctccttgtcttctggtggcgacacagtggtgaggtagtttatccgtactgcatgactgcaagcacaaccctgacagcgatagcggttctgataccaattaggttgtgtccagtagatcgtgcatgtagtcgtgtaaaatatttttttgtactgtagatgacactgtttgcagagtgaagtttgaaataggaggtaggatatggaatgttgtgataggagagctgttggagatagccttatagccttctactcaatggtgtgtattgccggagacgaagatctcaggatcactcaaacgctcacaaaactcaatacgaacaccgaaaaacacactgaggttttttggagctgccaaactgcaccactgcaataggtgtattctgttgatctgtttattacaaaagctcatatccataaatcacgacacaaatcagcaatcaattagctaagaaagaaactatccaatcaactatcaattagctacgaaaagaaactaatcattcagctatcaattggctaagaaagaaaactaatcaatcaactaagaaggaaacgaataaaccaagctggatcatgcaacaattaatgtccttacatatggttttttccatttgatttttgcttacctagtagccttggtatgttaattggtgcttatctgattgccatggaacgttatcttgttgcagaaaaactggaaccttttcagtgttaacgttgcaat

SEQ ID NO: 630 - DNA, 4481 bp, Zea mays
  Intron number 4 from transcript GRMZM5G809445_T01 (locus G RMZM5G809445) derived from phytozome v7.0 (chr-ID 4; pos 2 22357910 to 222362390)
aggatatcgagatcggtactcaagatgaatctactgccacttatgtttctgacctgtacgacaaggtgtacagcaacatccctgaagagacacatatgctaaagcttgttcccaactgcagttattgcaccacgaagaagtttgagtatgagccacctgggttttgttgtcgtggtgggaaggttgagctagctctagtggagacccctccccaactgaagaggttgtgggatagtgcagactctgatgctaggcactttcgtgataacattaggtttttcaatggccatttctctttcacttccctatattgttgcctcgatagtatgacaactaatgtaagggattctggtatatacacgtttcgagcacaaggcatgatgtaccacaatattaagtcatttggtagggaagatggggcagagcataaacaccttgagctttacttttatgatgacgatcctagcctcaagcatcggtaccgtaagtgccgtgaagagcatcaacagaaagacaaggaggttatcaaacagatagtcgacatactacgtggaaacccgtactccgagcaccttaggaccatgggccacgttgacaaccttgatgactatcgtatcgcgttaaaccttgaccagacgttgaaccagaagacatataatgcacctctcacttcggaggtggccgctgtctggatcgaagggagcgaagggcaaggccaattcaacaagagtgttatgctccatgggaaggacagttcaagacactgcatccgctcataccatggatgctacgatgcactatcatatccattgttcttccctagaggcgaacttggatggcatgcaaatatcccaaaggttggagtatccatggacgaagtggatgcataccgcgcgacacatagggcaagtaatgcaaatgatgaagatgcgggttagttgttaatttgatatttgagatatttgcacattattaactatgctttcgacatcactcacttttcaatccttccatatgcagaatctcctagccatttatgtgtctctgtacgtgactactactgctacaaattccatattcgtcccggggtattcaatccaatacttcatggaaagcgacttttccagcagttcgcggttgacacgtacataaagattgagagctctcatttagatttcatacgtaagaatcaagatcggttaagggcagacctataccagggcttggtggatagcatgctagatggagatattagggcagagaagattggcaagcgaactgtgctgtcaacatcgtttattggcggtcctcgtgacatgagacgtcggtatatggatgctatggctctggtgcgcaagtttggtaaaccagacatctttcttaccatgcatgtaaccctaactgggatgagataaggagggagcttctccctgggcagacatcgcaagatcgtccggatcttgtagtgcgtgtctttcatgcaaagctacaggagttaaagcataggctgactaaataggatattcttggtaaggtccgagcctacgtctatgtcgtggagtttcagaagcggggtttgccgcatgcccattttctactcataatgcagaggaagtacaagctcacatgccctgagtagtatgaccttttgatctcagctgagatcccaagcaacaagtaccctgaactacgaaagatggttatcaagcatatgatgcatggcccgtgtgggtcgctaaaccctaactgcccatgcactaagggtcgtaaatcgtgcaagaatcattaccctcgggctttcagtgacacaaccttgcaagggaaggattcgtaccctgtttacagacgtcgtgacgatggtcgtaccgaaaaggttcgagggtgcgaattggacaatagatgggttgtcccttacaacccatacctccttcgtctcttcaactgtcacatcaatgttgaggcatgtgggagcatcaaggctgttaaatacctgttcaagtacatatacaaaggccatgatcgtgcttctgttgttatgagagatgcgagcaaggcagatgatgatgtagatgagatcaagcagtacagagatgcaaggtgggtgactcctctagaagccttatggaggatatacggctttgagcttagtcagatatctccacctgtgatgcagctgcaactccatcttccaaacatgcacatggtggcgtttcacgagcggcaaatggtcgagcgagtcgtcaaccgtccaggtgttgataggtcaatgctcacagcatattttgaggcgaatagtctacacaaggaggctcgtggcatcctgtatcatgacttccctgaatggtacacttggaagagtggtaagggaaaaatatggcaaaagaggaaacgagatatgggtggacaagtcggtagaatagtctctgctcatccggccgagggggagcgctactatcttcgtgttctcctaaaccatgtgactggcgccacttcctatgtggatctaaggacagtagatggtgtcacgctaccgacttttcgtgaggcagcagagagaaggggactgcttgagtcggacaacacactggatgagtgtctcactgaatgtgctcttttccagatgccatcggcgctgcgacgactttttgccataatacttgtgtactgtgagccaagcgatgtggttgtactctagcagaaacacctagattctatgtccgaggactatcaacacaggaatccgtgcaaaactcatgttgagcagatggtattgattgacattaggaacatgttgcagtcaatgggaaaggacataaagacattccctcttcctcctatcatggacacgtatgacgatgctattggtactgctagggaggtttacgaggaggaaattatcgaaccagtagtagaagatgtggctctcaaagactgtcttaacaaggaacagagggccacctatgataagattttatctgccgttgacactgatcagggcggattattctttgtggatggacctggtggcaccggaaagacttacctatatagagtgcttctcgcgacgctacgcagccagggcaagattgcagtggcaacagctacatctggcgttgcggcttccataatgcctggaggaagaaccgcccattcacgcttcaagatacctctcactattgacgatggcgctgtatgtagcttcacgaagcagagtggaaccgcagagttgctacggaaagcatctctcattatctgggacgaggcttctatgactaagagacaagctgtggaggcactggacaatagcatgcgcgatataatgggtcggcccggactgccattcagtggtaaaaccattgtcttcggtggggatttcagacaggtcttgcctgttgttcgtaaagggacaagggctcaagtggtcgcttcttcgctacggatgtcttacctatgggagtccatgtcccacttaaagcttgttaccaatatgagggcaaaaaacgacccttggtttgcggagtatttgatgcgcgtaggcggtggaactgaggacacaaatagtgacggcgacatccttcttcctgacgagggtatgtgtgccttatagtgggagtgacaccgatcttgacaacctaatagacttcgttttcccaaatctcaacaaaaatatgtgcgattcgacctacatcacttcaagggcgatactgtcaacgcggaatgaatgggtggatatgataaatgttaagatgattgatcgttttcaaggggaacatatggtgtaccatagtttcgatagcgccatggatgatccccataactactacccacccgagttcctaaacacactgacgcctaatgggctgccaccacatgttttgaagctcaagattggatgccttgttatattgcttcggaatatagaccctgcgaatggactttgcaatggcaccaggctggtcgttcgtggtttccaaagaaatagcattgacgcagaaattgtactgggtcaacacgctggaaaacagattttcctgccgcgtatacctctgtgtccctccgatgaagagatgttccctttccagttcaaaagaaaagcagtttcctgtacgacttagctttgcaatgacggttaacaaagcacagggtcagaccattcccaacattggtgtatacttgcccgaaccagtgttctctcatggccaactatacgttgctctatctagagcgacagcccgatcaaacataaagattcttgcaatcccacccgtcgatgggaagaaaactttgaggaagggtgtaagaaagaaccccacagttgattgtggaacatatactaagaacatcgtctacaaggaggtcctaacaaactagacctatagtaagtctgttaaaactcaattgtttgtttcaataaaaatacaccgacacaaaactaacactcaattgattttgattttttttgggcaggactgagaagtgga

SEQ ID NO: 631 - DNA, 5368 bp, Zea mays
  Intron number 1 from transcript GRMZM2G099522_T02 (locus G RMZM2G099522) derived from phytozome v7.0 (chr-ID 1; pos 2 6674886 to 26680253 reverse strand)
gtacgacgcacgcgcgctccggccagccttgtcctgccctgcatgcatctgatctatgtgtagcccgcaacacgcatcccccccccaaatgaacgatattaatatatactaaaggggagcacctgcactttgggtcttttttttgtttattttcctcattctcgttttcactttaagaacacgttttttattgttagatttgctctcttaatttatggcttgtaagtctcgcaattgctcatagatcttgttctttggaaagatctcttctccttttagtcatggatggatgctgtctttctgttcgtccttgtttagtttggaatttatggtcgccctctttggacaatttgctctcttccttcttggtctgtgctgattcgttttccttcttggctgctcatcatttatttgacagctactcttacgtatctcgtttggtccccgtgggccaggtaaccaagatctgggcacatgaacctagatcttcctctattaattgtgtcctattacttatgtatatacatcaccaaaacacgatatcacgaccatcctttgttcaccaaaagaattagtagcatatatatcctcgcttttgttgcttacagctcatcacctaacaaaacaagggaacatatccggtgcatattagacttttgtccacatatggtgtacatgaactaacaaagttcacaaaaaatctttaaaaattcatacatattcttttcatcatactccaattatattcaaaattttaagtttaaatccgttatactttagctataataaaaaagagaacattttagctgattttcaaatttaaacttgttgaaatttatcttttttattacagttgaagtataacgaatttaaacttgaaattttgtatataattagagtaaaatggaaagaatatgtatgattttttcagatttttttgtaaactttgttagtttatgtgcactatatgtgcaccaaagtctaatatgcaccggatagtttccacaaaacaaacttttttcttcagcacaactatgtctataattgctaaatatgcatacagttcttccatttaccaaggtagatctcgtgaacttgtcgtatagtagacctgtacctcaaacaagatttgagtttttcaacttgttctcttgcaataagaagcaagagtaaaaaaaaacatcagtgcattatttactaccttcttccttccctttttagcattgttgccagactgacagtgttgccacattccatatccagttatccaatcccaagttttatttttacttcatatttcatctcctttatttttgtcaactcattttatcttccaaacaagctgatgtgcttagctcaccggttcagtcactagagctgtaggttcagtcactggagctgtatgaagccctcagctgctgatctatatgctactgtttcattcgttactgttccatagagggtacatgggcggaacggtagctgatgctcgagacctcgaaatgctatctcgcatctttcttgagtcccgtgcagagtcatatcaagcagctcagcatatacagcatgcaatattacgaaggttcaacgtcatgctttcatccatgtgcgtaagctagctgcatgaacagatgtgcaggagcatttcatttcatagttttttttcctgaagaagatttgtctatcatatcagtgttttatcgaagttgtagaaagtagcatatatatctcgtcttcctctatttgtcttttcgatcttatgcattcaagatttttctcagttttctgttcaatatcgtttctctggttttctctgccattttcacagattttcatcctttttagtgactccataggtggagaatgtatggttgtatccctgcctataggtgattcgttagtaatatatattttttcatccagtaaaaaattcttgatgttttaagcaagatgcagtcaaactcttgaaagaatgtccatcaataagttagaacgacatttgtagtctaaaatgtaaaagtaacagaaatttgcttgaaaagaaaattcataatcataaacttatatgtataaccatgtttgaataaaaatataataacgaccaactacttttggctggacgaactactatacatgcatgtgtatatactctctaatcacaaataaaatgtttatggtcaaacttcaattttacaacctttgactatcgaaggttttactagctagatcaaatcatgaaatagtttgtgaatatttattttgaattttactttcatgatactatataagtttactagatttttctaatacattttaatatataacatttatggtcaaagttatattttatagaccatataggaaatgtcgtcattcaaacaatcaagcgttttcaacattatgtatttaagtgcatgtagggagtttgatcaattcggttgtagaagtgttgacataagtaataaaacaatgcataaaaggaaaaaacataacataataatttacctattaataccggtgtgacatggaaatatgtatatatgtacaactttatccacacaagatagtaatatatagtatatagagagctttgtaccatcaatacatcttcatattttattgtaattctcctatgattgttaaattattgtgtggagctagccacaaagcatagttaatatgtgtataaaaatattatatgcaaccactatagatagggctgataatgggctataaattttgcactataagattgaaggatcgaagcgggttaggatcgagctctatttctagtcatttttgagctataatttatttagggccttgacattttgtggagaactatttggatcacaatccattaccacccctaactatagatgataggaattcaaaaagatctttgaaaaatcatgctttacgttgtaagatgtaatttataaatttagataatagagtaagcatgcatatttgtacaactattgtaattaattgtttaaggcaatgttgtggttataggccatgtggtggcatatattatgtcaacaatggagcttgaccaaacaaggggagcagtctatataattgaggagtaaacactaaaatatcactatttagacaatggggatcacattgagaaagggtggctatgggctagctagtttggtcttaaccaagatcctcccctgtaattaggtgtgtggtgctgactaactgacatcctagtggcactaattattagagttctttgtttcaactttgtttttcacatgttagaaaatacaattatccaaaatctctttaactatatgtttttaatgtggacgacccacaaccttagagcgtcatgcattagaatatacaaaaggaactccaaactaactaatggattctagtacacccgccatattatatttgatattgcatggtcttccacatctgaaaggtgacttaattatttaaacacgggactacatggacataagcataaatgttgtattactatgattagagtaataaacaaccaaataatttgttttattctaagaatcatctaaaaatatttattctagtttccaacaaaaacaaataaattggtttccaaagtaaagtatattgttttgtttttgctagcatcctcaattcctcaggtatgtttttgctacataaattatattacgattgaggtctcaagaattttgagaagatactttagcatatctaagactttaaaatagatggcagctatcgatctatatgactgtttgaagaagaaaaagttcatatagttatattaactaatcatgctatggatcgggttacattaccttatttacttccactcaatattaaatatacaatttgtaaacacaagacaatccatcggttaggtgtttaattgaaacaccacaaatctaatgggtaaattaaatgcattttgtctaaatatgcattatagattcatggatagatttagcagacatgaaatcttgacataaatctcatggaagagttattagtctccggagtttctagacctagtagttttctaaaattacaatagagctcaatagtacagatatttacctttggattcattcatggataaaaggctgctaacacgtagtggagttctctggtgagtttcagtccaatatatgtaggttctttagtggagattgtagtcattttcttagatatttttatgaactatataccattattccattaccatggtctttcacaagtaaattcgttataatatttgtgtggcatacaatacatcatttgtgcttttacattcagtatttaagtattttatgctatgatactaaaagttcaattcactggtagtctggtactaaaccttcaattcacaatacaacgaaacgtcattgccagtttgccactcatggcctatggccctatgctataacatcggttgctgtgctgcacttgcaagtacgtaggagtatatgaaccctcaacttagttcctatatttgcgtttccactaccagtctaccatgcaagcagcgtttccactaccatgcaatgatgcaatgcctctctctctctcaccccttggttaatggtgctatatcagccctatgacatgctaacatgcacaagatcacacattttctgttttagtttcacacccaaatttggaccatgatggccccccgggagatatatggtctctcttttttgtcctgtaaaggggtgcaacctatttttctatagctgtcaatggcataaatagataaaaggattatctatgaacatagacacatgatgagaagattaaagagaagggaaaaaaggtgaatggacgaagcccttgtagtttgtaaatcagtctaagttgcaaacactctctctgcatgcgttacatagttgcatttagcacccccggcccagcatctctcactctgctgcaatctcacaagtcacacccaagagtggcacaaaaaggaacgagtttccaaatatataataactaactatatatttcaattattgtgcaagggtatttgcaacttagactcaaacctaggatttatcatatataagcgtacatttacattacacacgggaggtgtgaatggactgaactatgaaactataagcctattccctattcttgtatcgtgtggtgtcaaacacgccatgtcttctaaagagcaaatgctacttacaatttacaacatatagtacaatatggcattatttcttagaaatggtgcaacaattaatcgttttatgaatgacagtggccggccttgaaatcaaagaatgtttgtttgtgctactagctgtcgtttttcaaatgctgtcattgatcacttttgccttgtgccaacagc

SEQ ID NO: 632 - DNA, 778 bp, Zea mays
  Intron number 4 from transcript GRMZM2G064612_T03 (locus G RMZM2G064612) derived from phytozome v7.0 (chr-ID 9; pos 1 54331556 to 154332333)
gaagctagtgccgctgttaagaacactgacaagaggtattcttatcttatcacttgccatccttctgtcgttattgtgttgttcagttgctgctgctaccagtcacatgccaatcacgttttctgcctcacatagatctgaagctgcttctagattataaataggacattcttttgttttcaatataacaggatcatatccctcgctcgctcgctcctgagcgtcatacttaccttgatgatggttttattggtttctcttgtagatgccacattaagttatgcacactcactttaatggtttcctacctagttgtttcacaaatctggttcatgtggtaagttaggttatagtgtcaacttggaagtgataaatacatcacatcttcttatgccctccagcatatctgcattctcgggcatcttctttcaaatttatttgacaaaagtagatatggtcattttgctcttggagtgatactgttcttctcttgcatattttcacttctgattctgatagtcatttcagcagtaatattaattagacatggtggttctttcaggaatattgtgccttttgtctctatagttgtgatcatccccctagcttgatgtatctgaaattagtagtaccggatttttttaagtagtgtcttgcctacatcacagtttagttgcactgaatcttttcttttttacagtttaaaagataatcctaatctggttatgtcttctggttgtccacagcaccatattggacagggtagtgaccgttgaat

SEQ ID NO: 633 - DNA, 1418 bp, Zea mays
  Intron number 2 from transcript GRMZM2G154344_T02 (locus G RMZM2G154344) derived from phytozome v7.0 (chr-ID 2; pos 3 2508378 to 32509795)
tcgtctacgggagcatcaagctctcaatcctaaaggtacgtcatcttgtgaattgactgactcaacctggtagcggaggttttttagatggttcgaattccgcaacgctttagcatggttcaggaatcggctaaggattttatgatgtgaggattcgacggaatgccgtgaaattaaccttttcctacgttgatgcccttactggaacagtttcgagcctcactcgtctggatagtcatagactgatgggtaatttatgtcggtatgagtagttgagtttaaattaacaacgagctgatgcttggcatcgcggaaataatttgtttagaatagttcatcaaccaattgaggctgttgtatagctgcttgttagtttatggctgcgacaaactgttttgccctgatttgtctcctctgcatgtttgtgggcactacacgtctacaatgacattcttcttacttgaagatgagtttatatatttgctcctgagttttcacatcctggaagttccccaaaaacatgttaggtataatactttttttgttggtattgtatgaaagccattcttttccgatgagtgcatatttcctgctagatatgatttcatattttgccagcccttgaaacagtaggcacactgaatgaatgggcttaaatttatgttataaattcttttgttgtgattggtgaaaactctggtaactgtaaaaagcaagtcatacttattctaaatgataaatgatgatggtcggttttgttttgttcgtaagtcttgatatatgaaactgtcagcgtcttttttccagattattcgtgcaaaagtagaaggagaattttggtgatgttaatggtcttctgataaaagcttactttgtttggtctatcactcttgcacccctcttctctaatagatggctgtgttggttcttcatagtttccagcatagtgtagatctttgtactggtccttttaaactggttgacatacacattcacaattcactaatttatttgtgctggttgctcctacctttaaatttagcactgtgatctatactagttactgattttgattgaatttgttatattcagactttagtagatgctgctaccattgactttttctatgcaagcttatggaaccagtatactgagcttgttctgctgttgtttcaactttgggcctggttacagtttaacttgcatgccgctttgtgtttgtgaaagatcatgtttgcctcattccctatttgaaccgtggtcgtttttagtaagaagcctagctgcactcttgtaacaagtgcatctcaagtttatttgttgcttcattccctatttgctgcactgaaccgtccaattcaattttcttacgttgcactttctctttcaggtaacaaaacctaaaaaggaggaagtgc

SEQ ID NO: 634 - DNA, 12055 bp, Zea mays
  Intron number 2 from transcript GRMZM2G073049_T01 (locus G RMZM2G073049) derived from phytozome v7.0 (chr-ID 3; pos 1 09366351 to 109378405)
aggtatgcatgcattgtgttatgtatccttggagatgcagtgaggatcaaatgttgaaagtaaggggatgatcatttggatgtttgattgattttacttgacaaactatatgctgcttcaaatgagcatggatttgaacttcattccgatccagatattggatatgtcgaattagctatcataggccctctttggtggaacttgggcttctaaaaaaacagagaagccagaaaaatccacccaaaacggctgctacttcaccgtttttggctttagaagctattcttttgtctacttgttttgtaagccggctaagaagtcccaacaaatgccctgatgctggtgcatgtcgttggtattggacagtagctctagtttaagtgagtcataaatttggacttctgtacctgtttactatttaactgatcatagtatgtaggaagattctgagtgttatagtgatagcttattgccttattcagataagatagctgatgcaatccacatatggagctttattttttgaactgactgattacagattaagattggagtattgttggctacctgttctgattcctgaagggagaccaaaacagggcaacataatcagtgatagattaaaagaagaagaatataagagtaaatatataagagtaaatgatcttcggataaaatgaaagtacatatagaagacaattatagctatgtttcctttattgcttcttcttcattacaaacaattacaaatataccttggaaggtagaagcaacaatacaaagatggagaaatcacagcttcgaaggcagaacgattcaaatctcagccctcagaagtctatccctgtgcatgacactgtacatctatttatagtggtggagtacaactttgtgaaaattacattcatgaccttagttctatacacatgaactacaaaatcaactaagggcagtgctgtcattttctctgtagccgtgttgagcaagtcttgaggatttcatcttaagtctttgacgtgttcgctctacggagccgaagtttgttgcttcgtctctgtgtgcgcgtgattgtcggtcgcacatcgctctcagacgaaggtatccctcgtcaattaccctattatacctaaaacatactttagaaacaattgtcaaattattgttttgaggacctttggacaagaaaggcccccaacaagtatgctagctagagaagaaacttccaagtaggaaatgctatattgggatatggtggtttggacaaagtagtatttgttttcaagtttctgtggtgcttgtatctgaacttagtatggtaggtagactccttgtgtttcagtgggtatttccgcaagaagtttttcttaaaactttgaacatagaaaatgcacttaccaccttagcgcatggacggttagacattgtggaagacttcatgctatttcgtagtgggacaagaatttccacgaggaggtaatcagtgtgccaaccagaattgacttagtcatgcacaattttaggagtaattggatgattaacatgattaatatttgctattagtatttgatagaaagactgtcaatatattgatctgcttcgtgcgttgatgctaaactaggttggtggagagatagaccgcactcacatcctcgcaatagactagggtgctcttggtcaattgactatggagttcctagaggagttggcgcaaccaacaagcttctgcaatactattggcaacgactttgtacttagccttagcactagatcgagaggtggtgggctggcgcttggacgaacaagagacgagtttgtcgccgaggaacatcgcatagccaaacatggacttatgagtgtcaagacaactcgtccagtcagcatcggagtagacaactagctcagtgataaaatagtaccgaaggagaaggccatatttattattgccctgaagattgcgcaagatgcgtaccgagggatttagagcgaaagacctccccggcggcgaagttgaagatggtgttgaagacgacgaccatggagttgtcgtgaatcgacgtcacacctcctatctggcgcgccatggacctgtccacctcctgttttctgagcaaaaggtcgttggtttgacccctacctggcgcgccagctgtcggtgtttagtatcgatggcgcactacggggtataccatgtagtgcttttgagaggacgacgaggtcgatcgtagctcgatggtttgtgccatgcacgatggaacacgatggattatacaggttcgggccgcttggatgcgtaatatcctatgtcctgtgagttctgagatgtatattgctggtggttgaggattaccggtgatttctggaagtggaagatggttgcggtatgagagtcccctgtttcgtaggggttccctcccagccttatatccgactaaggggagatcaccccgcacaatctcggagcacgattcctatctaccgactttcgctagaagcgcgccacgccttccggtggttagttggtctttgcgaggcctgcgcgtacactacatgggcaggacacgatcttgggaacatttgcgcccacacgtgcgtctcgttcggtcgtcttcgattgcacccagctgagggccactaggcgccttacaggcggcccattgggggccttgtaggtggcttacgaagcataacaatgccatgatgactcaagggatatctatcctccacaccactaatgcccgaaggtggattgctttagcattctgagcactagaattagcgtgcaaagaaacaaaataatcagtgtcagcagactgaacaggacattccaaagcatccaaaatctcatcagataggatgtcaccaccatcaggagtgtctggcacaatggcattgagctaagcaggtttaggagcaactaagacaccagaacacgtgtggcctggagagaaaattttccccacatttaaaacatagcccatttgctctttggtattccttctcatcagataggatgtcaccaccatcaggagtgtctggcacaatggcattgagctaagcaggtttaggagcaactaagacaccagaacacgtgtggcctggagagaaaattttccccacatttaaaacatagcccatttgctctttggtattccttcagctagcgagccttccacaatttagatggtgcatacatacttttagtcccactgtaactgccactaaggggtggcttaggcaaattgggtttggcactgcatgactttttcttcagcatcagttgttcttggatagaagccaaaatagcagcatgggccacaaaatctggcaactgcatttcaacaggataacacagctcccctttcagtcctatcaaaaactgagcagtaagcatcgtagaactcacagagggttcatataacctaatgtgataaaccatccgctcaaatgatttacgatattcctcatccgaaccagtctgacacaaatttaagagttccatggtcttcgtgcctttgtcaccgactatcgagcgtcgagctgccggcgtccatgcctctgtggctccaagctctgttcatgcggtgagaagcgccgtactctcaagtacaagggcaggaaggaactccatgttcttatcaatgttccagctgctgcggtcactgacccactagcgttcgacacatcagtccttttgttcccgttcctgtttccggaacgaggaacagtggaacggggagcgtgacgttcctagcttcttagagctgccatttaggaatgtttgaagcctcctggtacatggacaatagtcacacgtgaaaaaccatacttatcagtaggcctaatagtggtgcgatcccgtagattatatcgccgagcaacaactcatcaacatattagaatcatcaacaacaggagcatcacgactagccatccatcaatggttatgaaccaccaaccaaatgaaaaaaattgcaacgcaggagggcccaacttttccacattattctccatggactgaacctgattgttccaacaaagaaggctaataagcggacttgctcctgtaggagcccaacgtattcaacttccacttaaactggtcaagcacatcttgttgcaaaactataccatccactaagtcccaaacctgaagatattcaaccaaaacttactgtaagagccctatttatgtctctgacccattttctattttggagtgcttgggatacagtccgcctcttggcagttcatttcgagactgttctgaacatgttgtgggtcacctgtgccaaggtattgtcatctaatcaacgatcagtccaaaacaggaacataattttcttcccattgctagctaaggcatccaacacaacatttgaaagagcctgggcattttgtggagcttgaattgagagaccagcccatggccttgaagggtctgtcttttgtgcccacaacctacatattcttattgtccagccaaaaaggtcaagattatgaattccaagtcctccatattcaagaggccgctgtaccctttcccacatgaccaagcagttgtcaccatttgtctattcttgtcccctccatagaagcccccacttctttttgtctattgccttaagacaccattttgaaagatccatggagatcaatatgtattattccagaagaataatggccttcacatgacgatcaaatatgtctctgccatcttctacaaccaagctagctatagtcttacaataactttctgtagtggcatcatgaaagaaacttgtgcttccatctcctaatttggtccactagatggtgtatctttttttcccgatttttttgcattttagctcttttttcggaaaaaatcatatttagacctctgaaaaaatattcctgtttctggaccctttgctcggctctatgagccgtggcgctgaggtaacacggctcggcgccatagcccatggcgtcgaggtgttggtcgcactggcatgtgcgctgcgctggcgctgacatgtcagacttcggcgccacagatcttggcgccgaggttgtgtgcgcagtgaaatcgatacgtgcagtgctggtcttgtgtcagttaaagctgctggtgtggacaagagcctgatgtacccctttgatgaggggtcatgttccctctgtcagtcgtcgtgattcgtgaggtgaggtcaccgtgtcctagcattgtggggattgtcgagcgccagcggcagtgagaattgaattttttttgaaaaactaagaatgcatggctggatagaatgagtgtcaaattgatttggaagtaagccaaattattttttagtcaatctcgacgataggaggctggatagcaaaaaccaaagtgaaattcgctccccataggccccgccaaggaatctcggttattttattcccgcggcacagtagtgacggagtgacgaagagtttatcccataatgttttatttttaccctctccttcaaagcttaaatagatataaatttataaaataaattattacaaaatcaatcttcgtacagtcgctatataatcaaactaataaataggattttgttttttatatttcttaacatgtatggattataccttgaagttgaagtttgatatattgctaggttatataataaagtacattcatatatatatattttttgaaaaacctttcataagttttggtagtttaattatacaactattgcatgagtacaccagtagcagtgctcgaatccaccaggtgcttcatttttaggacaaccctcaccacgccaggtgctccagccatgcattctttgacagtccctatcacgccaggacacggtgacctgaccttatgacgactgatagagggaacgtacgcccctcatcaaagaggtacatcgggctcttgtatacgccaacaactttaacagacacaagactgacactctacgtatcagtttcgctgcggacacgacctcggcgccaagatctatggcgccgagctatgccacctccgcgccaacacaacacaaacacgccagcgcccctcggcaccatgggctatggcgccaagtcatgttacctcggcgccacagcccatggcgctgagcaaagggtccaaaaacgggaatacttcctctaggggtccaaatgtgattttcccaaaaaattgctaaaatgcaaaaaatcgccttttcccccaatattccttttttgtatcttagcaattttaagatatgttacttcgaaatgagtttgacgttttactcctgtaagtgaaggtctctcttcttgtagaaggataggagattggagaagacaccacactctgcagtgaggtggtgacgttcatatatatagccaatgtggctgagtgtacatggcaggtgccaatcacagtacatggcaggtgccaatcacaatacatggcaggtgccaatcacagtacatggcaggtgccaatcacactgattgtggacttgcctaatatgaacttgcctaatatacacttgctatatatatctatcagcctcccgcagtcgaagcgtcaggaatccggatgcaaagactggatcggaaatcctcaaatagctgaattggcaggcctttagtcatgatatcagcgaattgatacttggacggcacatggagaacttggacctcaccgagagccaccttctcacggacgaagtggatgtcaatctcgatgtgcttggtacgacggtgatggaccgggttggctgtcatgtagatggcgctgatgttgtcacagtaaacgactatggcgaccttcaagggaagatgaagttcctgaaggagttgtcgaagccaacagcattctgcgaccacatgagcaacagccctgtactcggcctccgcactggaccgtgacacggtggtttgccgtttggaggaccaggaaatcaaattgtcgccgaggaagacacagaagcctgatgtggagcgacgggagtctgggcacccagcccagtcagcatcggagtatgcaatcagcttgtcgacgggtccagtgcctatgtggagaccgaccgatagagtgcccttcacgtaccgaaggatgcgcttgatcagcgcgaggtgaggctcgcgcgggtcatgcatgaacaggcacacttgctgcacaacatatgccaggtcggggcgggtgagcgtcaagtactgaagagagcccgcgagacttcggtacgcggcggggtcggtgacaggagcgccctccatggcagagagcttggcacgagagtcaacaggcgtcgacgtcgagtgacactcggccatgcccgccttctgaagaaggttgacagcatattgtcgctggctgaggaagagaccgtcggaagagcgagtgacggatatccccaggaagtgatggagctccccaaggtctgtcatggcaaactcagagtgaagcctgtcgatgagtcgtcgaagtagagtagccgaagatgctgtgaaaatgatgtcgtcgacgtacagcagtaagtaagctgtggagttgccctcagtgaagatgaagagcgaggcatcggtggcagaggcgacgaagccgagctgtcgaaggaacgtggcaaagcgctggtgccacgcccgaggggcctgcttgagcccgtagagtgagcgctgaagaaggcagacagcgtcagggcgtgccgggtcgacgaagccaggaggctgctgacagtagaccgtctcattcaggtggccgtgaaggaatgcgttcttcacgtccaactggtggatgggccactggcgagaggccgcgatgctgaggacgacccgaatggtggcaggcttgacgacggggctgaaggtctcgtcgtaatcgacgccttggcgctgggtgaagccgcggaccacccaacgagccttgtggcgagctagggtgccatcggagtggaacttatgcctgaagatccatttgccggtgaccacgttggcaccgggtggacggggaacgaggcgccaggtgttggtttcgacaagcgccttgtgctcttcagccatagcctcacgccattgggggtctgcaaggcccccccggtagtcacggggaatcgacgaggcagtggagacggtgacgacgtgagttgccggtgggaatccgtatcggtcgacaggcttaagcgagcctgtctgtagccgtgtcaccggacgactcgaggtgggaggcggcgggatcgaagaagccgccacagccggagccagaaccggctgtacagtaacagcggtcgccggctgtgcaggaacggcgggcgccgtctgtgcagcaaccgcgggcgccggtggtggtacctccagctctggtggaagtggctgagcagcagcacgccgtcgagtgtacacccgtaggggtggagggccggccggagcaggctgagtcggagcaggggcaagaacttggccaatctggaggatggctgggtcctcagcgagctcctccaagtgagctcgatgttgcggctgctcaacgtcggctggcaacggagcgaccgcatggggttccgtggcagcagtgcggggcatcgacacggtatgacctgtaacaaggaaatccagagagctgggaagcgcactggtggggtcagcactaaagggaaatcgcatctcgtcgaagacaacatgacgggaaatgataattcgtctagtggtgaggtcaagacagcggtaacccttatgggaaggggggtatccgagaaatacacaagctgtggagcgtggtgccagcttgtgtttggaggtggctgtgaggttgggatagcaaaggcaaccgaaaacacgaagaatggtgtagtcagggggttgctggtggagttgctcaaagggaactttatggccaatggctgagcagggacgtctgtttaggagataggtggctgtagctagcgcctctgcccagtattggggcggcatgtgagcatggatgagcagtgtgcggcagatatcgttcagagaacgaatgatgcgttcagctttgccattttgagaggaggtgtaagggcaggagaggcgtgagtgaatgccgctggatgcaaagaatgtggtgagggcattattaacaaactcagtgccattatcagcctgtatagccttgatagggaggctgaactgtgtgtggacataagcgcaaaaattaatgatgtgagaggctacctcggacttgcggacaagagggaaagtccagcaaaagtgagtgaagtcatcgaggatgactaggtagtactgcgcaccagagacactggcaacgggagaggtccaaacatcacagtgaataagctcaaatggtagagatgaaactgaactggaatttccgaagggcagccgcacgtgcttgccaagttggcatgaatgacatagagtatgagtggacttattacatgagatggaattattttgtctaagcaaatttagggtagcagctcctggatgaccaagacgatggtgccagaggttggtggaggtggcgaggttggcttggggcgtggcagggatggtgtagaggccgtcagagctattagagcggagaatcacgcgtctggtctgcagatccttgacagaaaaaccaaacgcgtcaaattcgatagtgcaattgttgtcacgagtaaattggcgaactgaaagtaagttgcgcactagagatgggacaactagaacattgcgaagcgaaaaggatgaagtgctgccaggcaatgtggaggtgccagagcaagacacaggaaggtgatgaccgttgccaacagtgatggatgggacagaggagggttgacgggagagaagtataccatccgtgttgtgcatgtgggaggtggcaccagagtccatgacccagccggagttctggagcgccatttggttcagggcggcgatgaggccggcctgatcccacaccggggaaggaggtggcggtgcggcgaagtgggcctgtgggttggcacccatgaggccctggttgcgcccaccttggccgccctgctgccagctgccggtcttggggccttgctgccagccaccacttgaaggagtaccgccctgggaagcccatgggttgtagcagaaccatggccccatggggcggttgcccccggtttgggcattgctgccttgctgccagccgctgccctggccgcgccagctgccttgcttcttgctgcctttgcctttcctgttgcccccacccccggagcccttgggaggagcaccgatgggagcatcgtaggaggagcggcatcccgtggaggtgcaggtggagccagaggcagccaccatggcggatgctgcggtgatcttctcgtcattggcgagacgcaactctttataggagagcatctcgcgggccctggagaaggatggcaggacaacagaatttgcgatgtcgtcggcagtgccgctgaagcgcgggttgaggccgcggaggaggctgaggacgagtcgggcgtcttcgatggtttcgccgacgtcccgtagggcagcagccttgatcttgagtcgctggcagtactcatcgatcgtcaagtcgccctgcttcaaagagtgaaactcctcaagcaggaagacagcgcggggtgctcgattggagcggaagaggccttcaatcgccacccaaagttcgtgggcggactggttctcgtcggtgatagcaagatcaagaaccgagtcggcgacggtgttcaagatccagctgcggacagtgcactcagcaatgtcccacgatggatcaccggctggaggaggaggcccgtcgatgtggggacgaagactgaatttcccacacagggccttgaagaaggacgcccacttggtgaaattgggattcttcatctccaaagttaccggaatgtgggtcttcacgttgacggcggtgtaggggtggacgacgacagcctgcagtgctggtggtggtggtgcagcggcggctgcggcctcggcagcagcagcggcggctgcagcagcagcgtcgtcaccaggcatcgtggctggctgcgaacagggggagtggcgcacagcctgaggtggacggtggcgtcagaggacagccgccgggaaggtggaggtggggagatgcggaagcagaaggtccaggatctaattgatcttggtctgtgataccatgtagaaggataggagattggagaagacaccacactctgcagtgaggtggtgacgttcatatatatagccaatgtggctgagtgtacatggcaggtgccaatcacagtacatggcaggtgccaatcacaatacatggcaggtgccaatcacagtacatggcaggtgccaatcacagtacatggcaggtgccaatcacaatacatggcaggtgctaatcacactgattgtggacttgcctaatatgaacttgcctaatatacacttgctatatatatctatcacttcttccaaagcatctagagtttctagggcagagttaaagtccttaattagaccattaagattagattaatttttactccatttcttaagagcttgccttaaaagtccattatgcattttgacaaggttaccaaagccagctaagtcggtttctgctggaaagcttgtgatcggccctttttaacaattttgggtgtcaacaagtgagaaagacttggtggtgatagtttaatacttgtccctctagtcacaaatatctaatttctagggtgcccacatccatccattgtgaactttatcacaaattacttttaagtgtttattttgaatatttggaaaataatatgagtagattggtgttgagtagtagttcatacttgtataacgttaatatgtttgaatatactacaacaatttgtattcggtgctgtgttgaccaatggatgcataaaacatagcttatttatgacttgtagagtgttatgtaaatgtcctagtccatgctcatgtgttctaatctgtcaaccacttaccacatgtatacacaagcccatatttgatgtgtgaaaaacaaggtcattaagtcctaacatgttgtgctaaaaatgcaggttattgaagcattagcacaggctggtcttgagtc

SEQ ID NO: 635 - DNA, 33667 bp, Zea mays
  Intron number 5 from transcript GRMZM5G824676_T01 (locus G RMZM5G824676) derived from phytozome v7.0 (chr-ID 5; pos 2 14964125 to 214997791)
cacgcgcgctgtctcagttggtaagtctatatgccagtttcaccaagttctttgtgtgattagtcaagtgtattgttgcttcatttcttattggttacagtgatcctggctttcaatctatgatgcattgtagcagttccccataatagaatagaccatgttctttttttctgtttaggctgatgcttctatttgtgtgactgaaagtgccatagcttttttctgaaatgtttcttgtttgtttgacctataccttttctgtctagatttttgcttactttttagtcttcatgtaccacctgtttgagattgatgaactgagacaaaaaccattcaaaagaaatggcccagactttgatgctaaataaataaagttgaatcacatgtaaactcctatatctcttcattcttaaataccatgaacaaattttctcttcgaataccataaacttacttcactattctaaattcctggtgcttgtgctaccagtttttcatttacagtgatcatgatttcagtttgtgatgcatagtagcagttccccataatagaatagaccatgtttttttttctgtacctacattttcccttcttgtacttcttactcttccagtgatttagctacaagcaggcagctgctagggccaatgattcggctaggataagatgattgttgaggaccagccgtacaaatgcaaaatggaaacaatacatgcatgtatcaaacttaccaaaagttgagacacctcgtatacttccatccccattttttttgcatacccagttattgatttgttgtccattgtgagagcacctagagggggggggggtgaataggtgatcctgtataacttaaacttatagccacaaaaacttgttaagtgttagcacaataaatgccaagtggctagaaaggagtctcaacaaaacacaataccacaagagatcaatcacagagttgacacagtggtttatcccgtggttcggccaagaccaacgcttgcctactccacgttgtggcgtcccaacggacgagggttgcaatcaacccctctcaagtggtccaaagacccacttgaataccacggtgttttgcttgctttttctcaatcccgtttgcgaggaatctccacaacttggagcctctcgcccttacaattgaagttcacaaagaacacagagcaaagggggaatgagcaacgcacacaagacttcaaaagatcaaagcaacaacgcgcacacaagtcgcaacaagagctcgcaacacaactcaaagagttcgcaactcgacaagagctctagatgctatcacaatgaatcaaatgcgcggaatcgatgtcttggtgcttaagaatgttgtaggaatgcttggtgtgctcctccatgcgcctaggggtcccttttatagccccaaggcagctaggagccgttgagaacaaatcaggaaggccatccttgccttctgtcatcgggcgcaccggacagtccggtgcacaccggacagtgtccggtgccctattcctttccttaaatggcgaagccgaccgttgcagatctgggagccgttggcgcaccggacatgtccggtgcataccggacagtccggtgccccttccgaccgttggcttggccacgtgtcgcgcgcagaatccgcggccgaccgttgactcaccggacagtccggtgcacaccggacagtccggtgaattttagccgtacgccatcagcaaaattcccgagagcggcctcttcggccgaggcagcctggcgcaccggacactgtccggtgcaccaccggacagtccggtgccccagaccgaaacagccccttggctgtacacagccaactcttttcttttctttttcttcctgtttccaatacttagacaagtatattagtacacaaaaccaatgtactaagacatagaaacatacctttgctcttgatttgcactttgtccatccacaagcatgatttcacctttaagcacttgtgttggcactcaatcaccaaaatacttagaaatggcccaagggcacatttccctttcaatctccccctttttggtgatttatgccaacacaacataaagcaactagaacaggtgcaaaatcacttcaaaataaaaataaatttgagttttattcaattttggcatatatggatcatcctttgccaccacttggtctgtttttgcaaatcaaactcaaatctctatctctaggtcaaacacacatgttgaagcatatagagagttattccaaaagagattgatcacagatttcaaaaactcccccttttttataagagagacaataaaagagttttgccaaaacgaaaagctctattctactattttcaaaatctcaagtggtagctgatccatttatcgctttggcctttattttctccccctttggcatcaagcaccaaaacgggatcaatcttggccctttaaccccattgcctcaccaaaatcttcaattaagaggacaaaggcaataagatcatagagatgaacttggaataagttaccctctcatcggagtgcagtggaagtcttgcatggtccaagtccaccttttccctttcaattctccttcgagactaaatcaagcaaactcaaacaaatggttagtctcaaagggtcaagttgtagcacatctccccctaaatgtgtgcatcacttgcaaaaggacttgtgaggtccggggagtgcttgtacaacttgagcaccatcaataagcaacaaaatgcataaggaacatgatcaatggcataaacacatgtatgctataagtcaatccaagttccgcgaatctaagacatttagctcactacgcagcctgcaaaaggtcttctcatctagaggcttggtaaagatatcggctagctggttctcggtgctaacatgaaacacttcgatatctcccttttgctggtgatctctcaaaaagtgatgacggatgtctatgtgctttgtgcggctgtgttcaacaggattttccgccatgcggatagcactctcattatcacataggagtgggactttgctcagattgtagccaaagtcccggagggtttgcctcatccaaagtagttgcgcgcaacactgtcctgcggcaacatactcggcctcagcggtggatagggcaacggaagtttgtttcttagaattccatgacaccagggaccttcctaagaattggcacgtccccgatgtactcttcctatcgaccttacatccagcatagtcggagtctgagtatccaactaagtcaaaggtagacccctttggataccagagcccgaagcaaggcgtagcaactaaatatctaagaattcgcttcaccgccactaagtgacactccttaggattggattgaaatctagcacacatgcatacgctaagcataatatccggtctactagcacataaataaagcaaagaacctatcatggaccggtatgctttttgatcaacggacttacctcctttgttgaggtctgtgtgtccgtcgtttccatcggcgtctttgcgggcttggcgtccttcatcccaaacctctttagcaagtcttgtgtgtacttcgtttgggagatgaaagtgccgtccttgagttgcttcacttggaacccaaggaagtagttcaactcgcccatcatcgacatctcgaatttctgcgtcatcaccctgctaaactcttcacaagacttttggttagtagaaccaaatattatgtcatcgacataaatttggcacacaaacaaatcaccattgcaagtcttagtaaaaagagttggatcggctttcccaaccttgaaagcattaacaattagaaagtctctaaggcattcataccatgctcttggggcttgcttaagtccatagagcgccttagagagcttacacacatggtcggggtaccgttcattctcgaagccagggggttgctccacgtacacctcctccttgattggcccgttgaggaaagcgctcttcacatccatttggtacaacctgaaagaatggtgagcggcatatgctagcaagatacgaattgattctagcctagccacaggagcaaaagtctcctcaaaatccaaacctgcgacttgggcataaccttttgccacaagtcgagccttgtttctcgtcaccaccccgtgctcgtcctgtttgttgcggaacacccacttggttcccacaacattttgcttgggacgaggcaccagtgtccaaacttcattgcgcttgaagttgttgagctcctcctgcatggccaacacccagtccggatctagcaaggcctcctctaccctgaagggctcaatagaagagacaaaggagtaatgctcacaaaaattaactaatctagatcgagtagttactcccttgctaatgtcacccagaatttggtcgacgggatgatccctttgaatcatcgctcgaacttgggttggaggtgccggttgcgcatcttcctccatcacatgatcatcttgtgctcccccttgatcacacgcctcctgttgatgaacctgttcatcgtcttgagttgggggtagcaccatagttgaggaagatggttgatctcgttcatcttgttcctgtggccgcacttctccaatcgccatagttcgtatagcggccgtcggaacatcttcttcatctacatcatcacaatcaacaacttgctctcttggagagccattagtttcatcaaatacaacgtcgctagagacttcaaccaaacctgatgatttgttgaagactctatacgcctttgtatttgagtcataacctaacaaaaacccttctactgctttgggagcaaatttagaatttctacccttctttactagaatgtagcacttgctcccaaatacacgaaagtacgatacattgggtttgttaccggttagtagctcatacgacgtcttcttgaggaggcggtgaaggtagaccctgttgatggcgtggcaagccgtgttcacggcttccgaccaaaatcgctcgggggtcttgaactctccaagcatagtccttgccatatcaattagcgtcctgttcttcctctctaccacaccattttgctgtggtgtgtagggagcggagaactcatgcttgatcccttcctcctcaaggaactcctccacttgaaggttcttgaactcggacccgttgtcgcttcttatcttcttcaccttgagctcaaactcattttgagctctcctgaggaagcgcttgagggtcccttgggtttcagacttatcctgcaaaaagaacacccaagtgaagcgggaaaagtcatcaacaataactagaccatacttactccctcctatgctcagataggcgacaggtccgaagaggtccatatgcagcagctccaggggtcttgaagtggtcatcacattcttgctgtgatgtgctcctcccacttgtttacctgcttgacaagctgcacaaggtctatcttttttcgaattgcatgttagtcaaacctatcacgtgttctccctttagaagcttgtgaaggttcttcatccccacatgtgctaagcggcgatgccacagccagcccatgctagtcttagctattaagcatgcatctagaccggcttcctcttttgcaaaatcaactaaataaagtttgtcgtctaatacacccttaaaagctagtgaaccatcacttcttctaaagacagacacatcttcatttgaaaatagacagttataccccatgttgcataattgactaacagatagcaaattatatcccaaggactcaactaaaaacacattagaaattgagtgctcatttgagattgcaattttacctaatccttttaccttgccttgattcccatcaccgaatataattgaatcttgggaatcattattcttgacgtaggaggtgaacatcttcttctcccccgtcatatggtttgtgcatccgctatcaataatccagcttgaacccccggatgcataaacctgcaaggcaaatttaggcttgggacttaggtacccaactcttgttgggtcctacaaggttagtgcaaatatctttagggacccaaatgcaagttttatcacctttgcattttgcccctaactttctagcaattacctttctatcctttctataaattgcaaaggaagcattcaaagcatgatatattgtagaaggctcattaactttcctaggaatattaacaacatttcttctaccaacatttctatcttgcacaacatgagaactagaagcagtcatagcataagaatcaaaagcatgtgaatcataagcatcataacttctaaaagcatttctagaattttttctatcatgatacaaaaaggcatggttctttttaacactagtagccataggggccttccctttctccttagcgggaatgggagtcttatggcttgttaagttcttggcttccctcttgaagccaagtccatccttaattgaggggtgtctaccgatagtgtaggcatcccttgcaaattttagtttatcaaattcattcttgctagtcttaagttgggcattaagactagccaattcttcagttagtttggaaattgaaactaaatgatcactacaggcatcaacatcgaaatctttacacttagtgcaaatctcaacatgttctacacaagatgttgatttactagatttttctagtttagcatttaaatcatcatttttgctctttaaactagcaattgaatcatgacatgtagacaactcacaagaaagcatttcatttctcttaatctctaatgcaagtgatttttgtgcttctacaaatttgtcatgttcctcatacaacaaatcctcttgcttttctaaaagcacattcttatcattcaaggcatcaatcaattcattaattttgtctatcttagatctatctaaacccttgaataagcatgaatagtctatgtcatcatcatcactagactcattatcactagaaggagcataagtggagtctcgagtactcaccttcttctcccttgccataaggcatgtgtgacgctcgatggggaagaaggatgtcttgttgaaggcggtggcggcgagtccttcattgtcggagtcggaggagcaatccgaatcccactcctttccgatgtgtgcctcgcccttggccttcttgtaattcttcttcttttccctcttgttttcctgttcctggtcactatcgttatcggggcagttagcgataaaatgaccaatcttaccgcacttgaagcatgagcgcttcccctttgtcttggtcttgcttggctgccccttgtgaccttttagcaccgtcttgaagcgtttgatgatgagagccatctcttcatcattaagtctggccgcctcaatttgtgccaccttgctacttgttgccttgagagcaagggattgatgctcgttgatcggtccattcaaggcgtcgtccacgtatcttgcctccttgatcatcatccgcccgcttacgaattttccgagtacctcctcgggcgtcatcttcgtgtacctgggattctcacgaatattattcacgagatgaggatcaagaacggtaaatgaccttagcattaggcggacgacgtcgtgatccgtccatcgcgtgcttccataactccttattttgttgataagggtcttgagccggttgtatgtttgggttggctcctcgccccttatcattgcaaaccttccaagctcgccctccaccaactccattttagtgagcatggtgatgtcgttcccctcgtgagaaatcttgagggtgtcccatatctgcttggcattgtccaagccgctcaccttattgtactcgtccctgcacaaagaggctagcaacacagtagtagcttgtgcatttttatgaatttgttcattaataaacatagggctatccgagctatcaaattccattccattctctacaatctcccatatgcttggatggagagagaataaatgactacgcattttgtgactccaaaatccgtagtcctccccatcaaagtgtggaggtttgccaagaggaatggaaagcaaatgcgaattcgaactatgtggaatacgagaataatcaaatgaaaagttcgaattgaccgtcttcctgtagtcgttgtcgtcgtctttttgggaagaagaggattcgtcgctgtcgtagtagacgatctccttgatgcgccttgtcttcttcttcttcccatctttacgtctgtggcccgagccagagtcgttggatttgtcatcttttggctcgttgacgaaggactccttttccttgtcgttgatcacgattcccttccccttaggatccatctcttcgggcggttagtccctttcttgaagagaactcctctgataccaattgagagcacctagagggggggggtgaataggtgatcctgtataacttaaacttatagccacaaaaacttgttaagtgttagtacaataaatgccaagtggctagaaaggagtctcaacaaaacacaataccacaagagatcaatcacagagttgacacagtggtttatcccgtggttcggccaagaccaacgcttgcctactccacgttgtggcgtcccaacggacgagggttgcaatcaacccctctcaagtggtccaaagacccacttgaataccacggttgtcggggaccataattaggggtaccctcaagacgcctaattctcagctggtaacctccatcagcataaagctgcaaaggcctgatgggcacgattaagtcagggatcagtccacacgagtgactcgatcacgcttcacccgagcctatcctcggctgaaggcagccgacctcgagagacttctgtctcgcccgaggccccctttttatggcggacacatcaccggcttgcccaaggccttggcttcgctcagaagcaaccttgactaaatcaccacaccgactgaccaaattgcaggggcatttaacgcaaaggtggcctgacacctctatcctgacacgcgcccccggcagagccgaggtgaccgccgtcactccaccgctccactggccagtctgacagaaggacagcgccacctgcgccactccgactgcagtgccactcgacaggatgagtctaacaggcaatcaggccttgccaagggcgccacgacgaactccgctctgcccgaccccagggctcggactcgggctaagacccggaagacggcgaactccgctccgcccgaccccagggctcggactcgggctaagacccggaagacggcgaactccgctccgcccgaccccagggctcggactcgggctaagacccggaagacggcgaactccgctccgcccgaccccagggctcggactcgggctaagacccggaagacggcgaactccgctccgcccgaccccagggctcggactcgggctaagacccggaagacgacgaaccccgctccgcccgaccccagggctcggactccgccctggcctcggccgaacgacctccgcctcgcccgaccccttggctcgggctcggccacggcaactgaaggcaagactcaacctcggcttcggaggaaaccccacgtcgccctgcctagagcacagaccgccacgtcaacaggaaacgtcatcatcatcctaccccgaatcgactcggatcacggagaacaagaccggcgtctcgtccggccagctccgccagaggggcaatgatggcgctccacgagctctatgacgacggcggcccccagctctcttacggcagcaggacaacgtcagcagggactcgaccgctccaacagctgtccctccatcaggctccgccgcacctccgatagccacgacatcacgccagcagggtgcccagatctctccggctgccacattggcatgtacctagggcgctagctctccctccgctagacacgtagcactctgctacatccccattgtacacctggatcctctccttacgactataaaaggaaggaccagggccttctcagagaaggttggccgcgcgggaccgaggacgggacaggcgctctcttggggccgctcgcttccctcacccgcgtggacgcttgtaacccccctactgcaagcgcacccgacctgggcgcgggacgaacacgaaggccgcgggacttccacctctctcacgctcggctccggccgcctcgcctctcccccctccgcgctcgcccacgcgctcgacccatctgggctggggcacgcagcacactcactcgtcggcttagggacccccctgtctcgaaacgccgacagttggcgcgccaggtaggggcacgctgcgtgctgacgaatagctccccgtcaagctccagatgggcagtctccagcaacctctccggcccgggacggtgcttcgtttcggggctctcgagttcatgtccttcgacggcagctacgacatgatacttcttccaccgccgtgcgaccacgacaatgacggccgacaacccgcccgccggcggcggaatcgacgacgtcttccccgcatggtggaagagccatattcgggctcgctccgttctctcccccgccaacggaggggaaggcggagccgtcaaggccagacgggaggccgcgcttcgtcagccgtcgagcgaatcgacgcccccgacgccccgacgggaggcacgccggacgtcgacctcgtgttcgagacggaggcgagcgtcgtccccccgcggcacgctgaccctgagcaagaagacgacgccggcgcgctcgcggaaagcctgcaggacgtcgccctcgaaccagagatgacggcgcaaccagtccccgatgtgactacgtcgctcctcgtcgatcaaaaggtaacgactaactcccatcttgcgtcatttcgactcggcctccacccgccaaacgacctcgatttggcgggcgctctcattgaggcgagtgcaaccccattgaggttctgtatgcggtcgccttgggaccgactgacggacgtctcgacctacgggccctctgggtccgaggaagatgacgaccccagcatcggttgggatttctccggacttggcaaccccagtgccgtgcgggacttcatggccgcatgtgactactgtctgttcgactgttccgatggaagccgcagccttggcgacgagagctgcggcccaagccgcgaatgtttccacatcgagctagggaatcccaccgaaggcaaccatcttggcatgccggaggatggtgatctccctaggccggtgcctcgcgccgacatcccacgggagctagctgtggtccccgctccggcggggggttacgacccacaactcgagcaagtccgcgaggcgcaggccaggctcaacgagggaacgggagcgcttgagccgatccgtcgggacgtcggacaggcatgggtgggccaacccctggccggagaaatacgtcatctgccccaaggtctccagcaccgcgtcgccaacgacgtcaggatcaggccgccgcccgcatccagcggggtcggtcagaacctggcaaccgcagcaatgctcatccgcgcgatgccggagccgtcaaccaccgagggtcggcggatccagggagaactcaagaatctcctggaaggcgccgcggcccggcgggccgagagcactgcatcccgaaggcaaggatatccctcggaacctcatgccgcgacttcccgattcatgcgagaagcctcggtctacaccgggcgcacgcgcaacaccgcgcctgcggccccgggccacctcggcaacgagcaccatcgacgcgaccgtcgggctcacctcgacgaaagggtgcgccgaggctatcaccccaggcgtgggggacgttacgacagcggggaggatcggagtccttcgcccgaaccacccggtccgcaggctttcagtcgagccatccgacgggcgccattcccgacccggttccgacccccgactactatcgtaaagtactcgggggaaacgagaccggagctgtggctcgcggactaccgccttgcctgccaactgggtggaacggacgacgacaacctcatcatccgcaacctccccctgttcctctccgacactgctcgtgcctggttggagcacctgcctccggggcagatttccaactgggacgacttggtccaagccttcgctggcaatttccagggcacatacgtgcgccccgggaattcctgggaccttcgaagctgccggcaacagccgggggagtcgctccgggactacatccggcgattctcgaagcagcgcaccgagctgcccaacatcaccgactcggatgtcatcggcgcgttcctcgccggcaccacttgccgcgacctggtgagcaagctgggtcgcaaaacccccaccagggcgagcgagctgatggacatcgccaccaaattcgcctctggccaggaggcagtcgaggctatcttccgaaaggacaagcagccccagggccgcccatcggaagaagcccccgaggcgtctgctccgcgcggcgccaagaagaaaggcaagaagaagtcgcaatcgaaacgcgacgccgccgacgcggaccttgtcgccgccgccgagtataagaaccctcggaaaccccccggaggtgcaaacctcttcgacaagatgctcaaggagtcgtgcccctaccatcaggggcccgtcaagcacaccctcgaggagtgcgttatgcttcggcgtcatttccacagggccgggccacccgccgagggtggcagggcccacgacgacgacaagaacgaagatcacccagcaggggggttccccgaggtccgcgactgctacatgatctatggagggcatgcggcgagtacctcggctcggcaccgcaagcaagagcgccgggaggtctgctcggtgaaggtggcggcgccagtctacctagactggtccgacaagcccatcactttcgaccgggccgaccaccccgaccatgtgccaagcccggggaaatacccactcgtcgtcgaccccgttgtcggcgatgtcaggctcaccaaggtcctgatggacgggggcagctgcctcaacatcatctacgccgagaccctcaagctcctgcgcgtcgatccgtcctccgtccgagcaggcgctgcgcccttccacgggatcatccctgggaagcgcgtccagcccctcgggcgactcgacctcccagtctgcttcgggacaccctccaacttccgaagggagaccctgacgttcgaagtggtcgggttccgaggaacctaccacgccgtgctagggaggccatgctacgcgaagttcatggccgtccccaactacacctacctgaagctcaagatgccgggccccaacggggtcatcactgtcggccccacgtacaaacacgcgttcgaatgcgacgtggagtgcgtggagtacgccgaggccctcgctgagtccgaggccctcatcgccgacctggagaacctctccaaggaggtcccagacgtgaagcgccatgccggcaacttcgagccagcggagacggtcaaggccgtccccctcgaccccagtggcgacaccaccaagcagatccggatcggctccgggctcgaccccaaataggaagcagtgctcgtcgactttctccgcgcgaacgccgacgtctttgcgtggagtccctcggacatgcccggcataccgagggatgtcgccgagcactcgctggatattcgggccggagcccgacccgtcagacagcctctgcgccgattcgacgaggagaagcgcagagcgattggcgaagagatccacaagctaatggcggcagggttcatcaaagaggtattccatcccgaatggcttgccaaccctgtgcttgtgaggaagaaaggggggaaatggcggatgtgtgtagactacactggtctcaacaaagcatgtccgaaggttccctaccctctgcctcgcatcgaccaaatcgtggattccactgctgggtgcgaaaccctgtccttcctcgatgcctactcagggtatcaccagatccgaatgaaagagtccgaccagctcgcgacttctttcatcacgccgttcggcatgtactgctatgtcaccatgccgttcggcttgaggaatgcaggtgcgacgtaccagcggtgcatgaaccatgtgttcggcgaacacatcggtcgcacggtcgaggcctacgtcgatgacatcgtagtcaagactcggaaggcttccgacctcctctccgaccttgaagtgacattccggtgtctcaaggcgaaaggggtcaagcttaatcctgagaagtgtgtcttcggggtgccccgaggcatgctcctaggtttcatcgtctccgagcgaggcatcgaggccaacccggagaagatcgcggccatcaccagcatgggacccatcaaggacttaaaaggggtacagagggtcatgggatgcctcgcggccctgagccgcttcatctcacgcctcggtgaaagaggtctgcctctgtaccgcctcttaaggaaggccgaatgtttcgtttggaccccaaagaccgaggaagccctcgacaacctgaaggcactccttacaaaggcgccggtcttggtgccgccggcggacggagaagtcctcttggtctacgttgccgcgaccactcaggtggttagcgccgcgattgtggtcgagaggcaggaggaagggcatacattgcccgttcagaggccggtctacttcatcagcgaagtgctgtccgagaccaagatccgctacccacaagttcaaaagctgctgtacgctgtgatcctgacaaggcggaagctacgacactacttcgagtcccatccggtgactgtggtgtcatccttccccctgggggagatcatccagtgccgagaggcctcgggcagaatcgcaaagtgggcggtggagatcatgggcgaaacgatctcgttcgcccctcggaaggccatcaagtcccaagtgttggcggatttcatggccgaatgggtcgatacccaactaccaacgactccgatccaaccggagctctggaccatgtttttcgacgggtcgctgatgaagacgggggccggtgcgggcctgctcttcatctcgcccctcggaaagcacttgcgctacgtgctgcgcctccacttcccggcgtccaacaatgtggccgagtacgaagctctggtcaacggattgcggatcgccatcgagctaggggtcagacgcctcgacgcccgcggtgattcgcagctcgtcatcgaccaagtcatgaagaactcccactgccgcgacccgaagatggaggcctactgcgacgaggttcggcgcctggaagacaagttcttcgggctcgagctcaaccacatcgctcggcgctacaacgaaaccgcagacgagctagcgaagatagcctcggggcgaacgacagtccccccggacgtcttctcccgggacctgcatcaaccctccgtcaagctcgacgacgcgcccgagcccgaggtaccctcggctcagcacgagataccctcggctcggcccgaggtaccctcggctcagcccgaggtaacctcgggccggcccgaggtaccttcggcccccgaaggcggggcattgaacatcgaggaagagcagagcggggccacgccagaccaagattggcaggccctgtacctgcaatatctccgtcgaggagagctacccctcgaccaagtcgaggctcggcgggtagcgcgacgcgccaagtcattcgtcttgctgggcgacaaagaggagctctaccatcgcagcccctcgggcatcctccagcgatgcatctccatcgccgaaggccgggaactgctgcaagaagtacactcgggggcttgcggccaccacgcagcaccccgagcccttgttggaaatgctttccggcaaggcttctactggccaacggcggtggctgacgccactagaattgtccgcacctgcgaagggtgccaattctatgcgaagcggacgcacctgcccactcaggctctgcagacaatacccatcacctggcccttcgctgtatggggtctggacctcgtcggccccttgcagaaggcgcccgggggctacacgcacctgctggtcgccatcgacaaattctccaagtggatcgaggtccgacctctgaacagcatcaggtccgagcaggcggtggcattcttcaccaacatcatccatcgcttcggggtcccaaactccatcatcaccgacaatggcacccagttcaccggcaaaaaattcttggatttttgcgaggatcaccatatccgggtggactgggccgccgtggctcatcccatgtcgaatgggcaagtagagcgtgccaacggcatgattctacaagggctcaagcctcggatctacaacgacctcaacaagttcggcaggcgatggatgaaggaactcccctcggtggtctggagcctaaggacgacgccgagtcgtgccacgggcttcacgccgtttttcctggtctacggggctgaagctatcttgcccactgacctggaatacggctccccgagggcgagggcatacaccgaacaaagcaaccaagctagccgagcggaatcgctggaccagctggaggaagctcgggacagggctttgctacactcggcgcggtatcaacagtccttgcgacgctaccacgcccgaggggtctggtcccgagaactccaggtgggcgacctggtgcttcggctgcgacaagatgcccgagggaggcacaagctcacgcccccctgggaagggccattcgtcgtcgccaaagttctgaagcccggaacatacaagctggccaacaatcaaggcgagatctacggcaacgcttggaacatcaaacagctacgtcgcttctacccttaagatgttttcaagttgtccatatacctcgcacctacgcaaagtttagttgtcaaggaagggtcggcctagccccggcaaagcccgaccctccctcgggggctaaaaggggggagaccccctctgcgtcgaatttttcctcgaaaaaggatctctttttagcagggtttcttccgtgcctcttgactacttcggaaagcggatcctggaaacgacgaggtacacgtaagcagccaaggctgaccgagccgagggactcctacgcctccgggatacggatacctcactcgtccctttctgcgataagtaacttgcgctcgggtaaagcgactccgtggaccgaacgagtcatcacgttcggaagctctcctgccgaagcagtccttcaagctttcccgactaagtcggggacagggcctcatggacgggtgaaagtacgcgtaagtggcaaggccgaccgagccgagggattcccacgcctctgggatacggatacctcactcgtcccttccgcgaaaagcaactcttgctcacacaaacgtccctgttaccgacagagtccagatgctcgaagcaggaggaaaaaagacgcagcttcgcaagcgcggcgagggcgtgttcttctggcctcggcggccgcagaaagcgcacgctacaagatgatctgatcctgcaggctcgggtcttcacgccgaagggagccgtagcaccctcggcatcgacgacgtctacagcaaagcccgacccagcctcgggcggcgccgaggtccaggggctcctccaggaatccggcccgagcaggcggctcaaccggttacccctgaggcctcgggcaaccggcttccaagggcgctagcccgatccgaggcctcgactgaccgacttgggcgtcggctccgctgacgggcaacacggctaggctccggccaaccaggttccccattctcgagtcaactccgcctctgttcatactgatatcgctacccccggcctcgatccaccaaagggcggccgaggggtctcttcaactaagctagaggagcctcacataacaaggccgaacgggccgagggattcctatgcctccgggatacggatacctcacccgtcaccttgacatggggcaactcatgcttggtgaagcggttcagacaatcaaacaggcgagacttagtgctcgaaaatgaggaaaaaacacggctccgtgccaaaattacatacacgttcaggcctcgacagccacaatgaacgaattcactggcattcgaagtgccattacaaacggaactccggttccccctccgcaggtacgaacaaccccactccgagggggaaggcctgcggagcaacggaagaccgacgaacggcgcgccgtcacctgctccagcagtggcgacgacggcgacttctgctccggggggccgaacagcggcaacgctgacctcagggtggatgccgctgtcaggaggcccccgcccgtgccaaaactcgtgaggcaaggacgggcagaaggccgtagaagttggaggtcagcccgtggccggtcccggccgccgcgccggcggaagaacctcttccggctgccgtggcagacgccgacgccgcaaggggccccgaagccactcgcggctgaagaccaggcacgctgcagctgccggacgccacgggcaatgcccgcttctccccccatcactgagtgaaggagcgggccaccgcccacgcaggggccgaccccaactcggcactctcccctccccagccttggtgatgaaaatccttgaggctgaggaaggggcagaggccgcagcccggctcgctttcccccaccatcaagctggaggtcgccatctcgggtgaccgccggtgaaggggtgcgaccgggctgcgtgatgaaaatccttgaagccgaacgatggctgagaggtaccaactcccatggagttgcgttcctccaacgaggaggcggaaaggcggcggatatcccccatccgggggcttggaagacgggaagacccggcgcttaagggaggaagaagacatggttgccttacgaaaggagcctccctccttttaaaggcaactccccctacgtgcgcccccaggcgccgcgggccgagttttctccaacacgctccaaggccctcccctgcgactcgggggctgggtcccgcatgtcatgcaagccggctcagggcagaagaagccaaaccgccgcgcatggtgcgtacgaccgtccagcggttacaggcgaccccccattttcgcccagaccaacgggcagaaggggcgggcagccatgcaggcggcatgcaaccacgccagatggacgcgcttctccgacttctgacacgccagcttggaacccaggcccacgcgtcgagcaaccggcacgccagttgctgcatgcaagcaaccgcaccgccacttgtgccaccatcgcgcctcttcggttgcgaagcctatgccacgactcgaggcgacccaacagcgccagactggcgcgtcggtcaaagcgaccgaaagtgggccggcagtaatagcggtggcaggcgggcgggcgcagcggtcacgtcgtcagccaggctcacgtcccatcctgagacagcaagagagcctcctctcacggcgtgaagacggtgcacccgtgacccgttcctcgaacggatcacccgcgcgcaacggccgccccgccaaccactcgccccgtcgcattaactccgcggcgggacacgcggcgcctctggtaggaggagcgcgcgacgcttcaccttcgccgtaataactgcttcagaaaaggtacgccacgtcgtccgatttcgtatccttttccgttttcctctttctctatctcttgcaacagggaccggggaagggggataccccgaaagggatccttctccgcgaaggaaccgggctccgagccccccattactgatcaggggttcgaaggctggcccccaagggttcaacagccgcctcagatcgcgtgggcccgacacccactactggtcaggggttcgaaggccagccccccgaagggctccatggccgcctcaggctactcgggctccgcgcccattactgatcaggggttcgaaggctggcccccgaagggttcacagtcgcctcagacaccgagcgagggatgaccaggggtacgttcgatacataaccgaggctcgggctacgctcccgaggtaccctaggacatttccgagaccagcgggaacgatcttgtaacggaatcccatcggagggaggcatcgagccctcggaccccgtcgccaggggaccgggtccggcaaatcacccacaggtacttttgggcgtgcctctgggcccctagccgacccccaacgaacggggcacggacgtccactcggattacccgcttgcagctcaccggagacaccatgttcggtgcccatcgagggtaacatggcgcactccccccctcctccttgcggaaaggcgacgaaggggcgtatgtaaaaagccgagtctgtccctgatcgtcctctcgccctgtgcagaggctcgggggctgctctcgcaaaaaccggctccggccaaatcgttgacagcgtcaacataccagcccgagagcttgggccccgaccgtgcacccgggctacggccagttcgcatgagggaacgaccagaccagccgaagcgttaagcgaagtattaagacctcgaaggagtgtaaccactcctccgaggcctcgggggctacacccggcgggtgcgctcgcgcgcacccaccggaacgaaatgcaaccgagaaaggctggtccccttgcaaaaaagtgcgacaaaagcctccaagcgagtgctaacactcccttcgaggctcgggggctactgtcggggaccataattaggggtaccctcaagacgcctaattctcagctggtaacccccatcagcataaagctgcaaaggcctgatgggcacgattaagtcagggatcagtccacacgagtgactcgatcacgcttcacccgagcctagcctcggccgaaggcagccgacctcgagagacttccgtctcgtccgaggccccctttttatggcggacacatcaccggcttgcccaaggccttggcttcgctcagaagcaaccttgactaaatcaccacaccgactgaccaaattgcaggggcatttaacgcaaaggtggcctgacacctctatcctgacacgcgcccccggcagagccgaggtgaccgccgtcactccaccgctccactggccagtctgacagaaggacagcgccacctgcgccactccgactgcagtgccactcgacaggatgagtctaacaggcaatcaggccttgccaagggcgccacgacgaactccgctccgcccgaccccagggctcggactcgggctaagacccggaagacggcgaactccgctccgcccgaccccagggctcggactcgggctaagacccggaagacggtgaactccgctccgcccgaccccagggctcggactcgggctaagacccggaagacggcgaactccgctccgcccgaccccagggctcggactcgggctaagacccggaagacggcgaactccgctccgcccgaccccagggctcggactcgggctaagacccggaagacggcgaactccgctccgcccgaccccagggctcggactcgggctaagacccggaagacgatgaaccccgctccgcccgaccccagggctcggactccgccctggcctcggccgaacgacctccgcctcgcccgaccccttggctcgggctcggccacggcaactgaaggcaagactcaacctcggcttcggaggaaaccccacgtcgccctgcctagagcacagaccgccacgtcaacaggaaacgtcatcatcatcctaccccgaatcgactcgggtcacggagaacaagaccggcgtctcgtccggccagctccgccagaggggcaatgatggcgctccacgagctctatgacgacggcggcccccagctctcttacggcagcaggacaacgtcagcagggactcgaccgctccaacagctgtccctccatcaggctccgccgcacctccgatagccacgacatcacgccagcagggtgcccagatctctccggctgccacattggcatgtacctagggcgctagctctccctccgctagacacgtagcactctgctacatccccattgtacacctggatcctctccttacgactataaaaggaaggaccagggccttctcagagaaggttggccgcgcgggaccgaggacgggacaggcgctctcttggggccgctcgcttccctcacccgcgtggacgcttgtaacccccctactgcaagcgcacccgacctgggcacgggacgaacacgaaggccgcgggacttccacctctctcacgctcggctccggccgcctcgcctctcccccctccgcgctcgcccacgcgctcgacccatctgggctggggcacgcagcacactcactcgtcggcttagggacccccctgtctcgaaacgccgacaacggtgttttgcttgctttttctcaatcccgtttgcgaggaatctccacaacttggagcctctcgcccttacaattgaagttcacaaagaacacagagcaaagggggaatgagcaacgcacacaagacttcaaaagatcaaagcaacaacgcgcacacaagtcgcaacaagagctcgcaacatgaaagtcgcctagagggggggtgaatagggcgaaactgaaatttacaaatataaacacaactacaagccggggttagcgttagtaataaagaaacgagtccgtgagagagggcggaaagcaaatcccaagcaaataaacaagtaagacacggagatttgttttaccgaggttcggttcttgcaaacctactccccgttgaggaggccacaaaggccgggtctctttcaacccttccctctctcaaacgatccacggatcgagtgagctttctcttctcaatcacttggaacacaaagttcccgcaaggaccaccacaagattggtgtctcttgcctcaattacaagtgagtttgattgcaaagaaaggatcaagaaagaagaaagcaatccaagcgcaagagctcgaaagaacacaagcaaatcactctctctagtcactattgtgttgtgtggaatttggagaggatttgatctctttggtgtgtctagaattgaatgctagagctcttgtagtagttgggaagtggaaaacttggatgcaatgaatggtggggtggttggggtatttatagccccaaccaccaaacttgaccgttggctgggttgtctgttcgatggcgcaccggacagtccggtgcacaccggacagtccggtgccccctgccacgtcatcactgccgttggattctgaccgttggagcttctgacttgtgggcccgcctgggtgtccggtgcacaccggacaggtactgtttgctgtccggtgtgccagcatgggctcgcctgacatctgcgagcgctgcgcgcgcatttattgcgccgcagagagccgttggcgcggagttagccgttgctccggagccgcaccggacagtccggtgcacaccggacagtccggtgaattatagtggactagccgttggagtttcccgaagctggcgagttcctgaggccgacctcccttggcgcaccggacactgtccggtgtacaccggacagtccggtgaattatagccgagtcgcctctgcgaaattcccgaaggtggcgagttcgagtctgagtccccatggtgcaccggacatgtccggtggcacaccggacagtccggtgcgccacaccaggggtgccttcggttgcccctttgctcctttgttgaatccaaagcttggtctttttattggctgagtgtgaaccttttacacctatatcatctatacacttgggcaaacaagttagtccaaagatttgtgttgggcaattcaaccaccaaaattatataggaactaggtgtaagcctaattccctttcaatctccccctttttggtgattgatgccaacacaaaccaaagcaaatatagaagtgcataaatgaactagtttgcatgatgtaagtgtaaaggttgcttggaatttagccaatattattacttacaagatatgcatggattgtttcttatttataacattttggaccacgcttgcaccacatgttttgtttttgcaaactcttttgtaaatcattttcaaggttcttttgcaaatagtcaaaggtaaatgaataagatttttgcaaagcattttcaagatttgaaattttctccccctgtttcaaatgcttttcttttgactaaacaaaactccccctaaaggagatcctcctcttagtgttcaagagggttttgatatatcattttgaaatactactttctcccctttttgaacacaataggaaaatcaattgataaatattcaacactaagtttttgaaatcggtagtgggtgcggtccttttgctttgggctcctttctccccctttttggcatgaatcgccaaaaacggaatcattagagccctcaaagtagtttcttcccctttggtcatagacaaatgagttaagattataccaaagacgaagtccttttgctttctcccccaaggatggagagtggtatgtggcgacggcgaagggtgagttacggagtggaagcctttttgtcttcgccgaagactccaattccctttcaatatacctatgacttggtttgaaatagacttaaaaacacattagtcatagcataggaaggggatacgatcaaagatatataaatgagctatgtatgcaatctaacaaaagaaattgcgcgaatcaagaatattgagctcatgcctaagtttgttaaaggattgttcatcaagaggcttggtgaagatatcggctaattgatctttagtgttaatgtaagaaatctcgatatctcccttttgttggagatccctaagaaaatgataccgaatggctatgtgtttagtgcggctatgctcgacgggattgtcggccattttgattgcactctcattatcacatagcaaagggactttggttaatttgtaaccgtagtcccgcagggtttgcctcatccaaagcaattgcgcgcaacaatgacctgcggcaatgtactcggcttcggcggtggaaagagcgaccgaattttgcttctttgaagcccaagacaccaaggatcttcccaagaactggcaagtccctgatgtgctctttctattgattttgcaccccgcccaatcggcatcggaataaccaattaaatcaaatgtggatcccttaggataccaaagcccaaacttaggagtataagccaaatatctcaagattcgttttacggccgtaaggtgagcttccttagggtcggcttggaatcttgcacacatgcatacggaaagcataatatctggtcgagatgcacataaatagagtaaagaacctatcatcgaccggtataccttttgatccacggacttacctcccgtgtcgaggtcgagatgcccattagttcccatgggtgtcttgatgggtttggcatccttcatcccaaacttggttagaatgtcttgagtgtactttgtttggctgatgaaggtgccctcttggagttgcttcacttggaatcctagaaaatacttcaactcccccatcatagacatctcaaacttttgtgtcatgatcctactaaactcttcacatgtagactcgttagtagacccaaatataatatcatcaacataaatttggcatacaaacaagtcattttcaagagttttagtaaagagtgtaggatcggctttaccgactttgaatccatttgcaataagaaaatctctaaggcattcataccatgctcttggggcttgcttgagcccataaagcgccttagagagcttatagacatgattaggatacttactgtcttcaaagccgggaggttgctcaacatagacctcttccttgattggtccgttgaggaaggcacttttcacgtccatttgataaagcttaaagccatggtaagtagcataggccaataatatgcgaattgattcaagcctagctacgggtgcataggtttcaccgaaatccaagccttcgacttgggagtatcccttggccacaagtcatgctttgttccttgtcaccacaccatgctcatcttgcttgttgcggaaaacccatttggttcctacaacattttggttaggacgtggaaccaaatgccatacctcatttctcgtgaagttgttgagctcctcttgcatcgccaccacccaatccgaatcttggagagcttcctctaccctgtgtggctcaatagaggaaacaaaagaataatgttcacaaaaatgagcaacccgagatctagtagttacccccttatgaatgtcgccgaggatggtgtcgacggggtgatctcgttgaattgcttggtggactcttgggtgtggcggccttggttgttcatcctccttgtcttcattgtttgcatctcccccttgattattgccgtcatcttgagggggctcatctatttgatcttctcctttatcaacttgagcctcgtcctccttttgggttggtggagatgcttgcgtggaggaggatggttgatcttgtgcatttggaggctcttcggattccttaggacacacatccccaatggacatgttccttaacacgatgcacggagcctgttcttcacctatctcatcaagatcaacttgctctacttgagagccgttagtctcatcaaacacaacgtcacaagaaacttcaactagtcccgaggacttgttaaagactctatatgcccttgtgtttgaatcataccctagtaaaaagccttctacagtcttaggagcaaatttagattttctacctcttttaacaagaataaaacatttgctaccaaaaactctaaaatatgaaatgttgggctttttaccgattaggagttcgtatgatgtcttcttgaggattcggtgaaggtataaccggttgatggcgtagcaagcggtgttgaccgcctcagcccaaaaccgatccggagttttgtactcatcaagcatggtccttgccatgtccaaaagagttcgattcttcctctccactacaccattttgttgtggcgtgtagggagaagagaactcatgcttgatgccctcttcctcaagaaagccttcaatttgagagttcttgaactccgtcccgttgtcgcttcttattttcttgatccttaagccgaactcattttgagcccgtctcaagaatccctttaaggtctcttgggtttgagatttttcctgcaagaagaatacccaagtgaagcgagaataatcatccacaataactagacagtacttactcccgccgatgcttatgtaagcgatcgggccgaataaatccatgtgtaggagctccagtggcctgtcggtcgtcattatgttcttatgcggatgatgagtgccaacttgcttccctgcttggcatgcgctacaaaccctgtctttctcaaaatgaacatttgttagtcctaaaatgtgttctccctttagaagcttatgaagattcttcatcccaacatgggctagtcggtggtgccagagccaacccatgttagtcttagcaattaagcaagtgtcgagttcagctctatcaaaatctaccaagtatagctgaccctctaacactcccttaaatgctattgaatcattacttcttctaaagacagtgacaccaatatcagtaaaaagacagttgtagcccatttgacataattgagaaacagaaagcaagttgtaatctaaagaatcaacaagaaaaacattggaaatagaatggtcaggagatatagcaattttaccaagtcctttgaccaaaccttgatttccatccccgaatgtgatagctcgttggggatcttagtttttctcatatgaggagaacatccttttctcccctgtcatgtggtttgtgcacccgctgtcgagtatccaacttgagcccccggatgcataaacctacaaaacaaatttagttcttgactttaggtacccaaactgttttgggtcctttggcattagaaacaagaactttgggtacccaaacacaggtcttggaacccttgtgtttgccccgaacaaacttggcaacgaccttgccggatttgttagtcaaaacatatgatgcatcaaaagtcttaaatgaaatgctatgttcatttgatgcattaggaattttcttcttaggcaacttggcacgggttggttgcctagaactagatgtctcacccttatacataaaagcatgattagggccagagtgagacttcctagaatgaatttttctaattttgtcctcgggataaccggcagggtataaaatgtaaccctcgttatcctgaggcacgggagccttgcccttaacaaaatttgacaatcttttaggaggggcactaagtttgacattgtctcccctttggtagccaatgccatccttaatgccagggcgtctcccattataaagcatgctacgagcaaatttaaatttctcattctctaggttgtgctcggcaattttagcatctagttttgctatatgatcattttgttgtttaattaaagccatatgatcatgaatagcatcaatatcaacatttctacatctagtacaaatagatacatgctcaacaatagatgtagagggtttgcaagattttaattctacaaccttagcatgcaacatatcatttttagttctaaggtcggaaattgtaacgttgcaaacatctagttctttagccttagtaatcaacttttcattttctactctaaggccagcaagagatacattcaattcatcaatcttagcaagcaaatcaacattatcatttctaagattgggaattgaaacatcacaaacatgtgaatcaaccttagcattcaaactagcattttcattcctaaggttgtcaataatctcatggcaagtgcttagctcactagacaatttttcacatttttcaacttgtagagcgtaagcatttttaactttaacatgttttttattttccttgattaggaagtcctcttgggagtccaagagatcatccttctcatggatggcactaattagttcatttaatttctccttttgttccatgttaaggttggcaaaaagagtacgcaaattatcttcctcaccactagcattatcatcactagaagactcatatttagtggaggagttggatttaaccttcttctttttgccgtcctttgccatgaggcacttgtggccgacgttggggaagaggagtcccttggtgacggcgatgttggcggcgtcctcgtcggaggaggagtcgctagagctttcgtcggagtcccactcccgacaaacatgggcatcgccgcccttcttcttgtagtatctcttcttttctctcctcttgcccttcttgtcgttatccctgtcactgtcgcttgataatggacatttagcaataaagtgaccgggcttaccacacttgtagcaaaccttcttggagcgggacttgtaatccttccccctcctttgcttgaggatttggcggaagctcttgatgacgagcgccatttcctcattgtcgagcttggaggcgtctattggttgtcgacttggtgtagactcctccttcttttcttccgttgccttgaatgcgacgggttgagcctcggatgtagatggatcatcaagctcgttgatcttcctcgagccttcgatcatgcactcaaaacttacaaaatgcccgattacttcctcgggggtcattttagtatatctacgattaccacgaattaattgaacttgagtagggttaaggaaaataagagatcttagaataaccttaaccacttcgtggtcatcccactttacgctcccgaggttgcacacttggttcaccaaggtcttgagccggttgtacatgtgttgcggctcttcccctttgcaaagccggaaccgaccgagctccccctcgatcgtttcccgcttggtgatcttggtgagctcatctccttcgtgcgcggttttgagcacatcccaaacctccttggcgcttttcaacccttgcactttgttatactcctctctacttaaagaggcgaggagtattgttgttgcttgagagttgaagtgctcgatttgggccacctcatcctcatcatagttctcatcccctaccgacggtacttgtgcacaaaactcaacaacatcccatatacttttgtggagcgaggttagatgaaatcgcattaaatcgctccacctagcgtagtcttcaccatcaaaagttggtggtttgcctaatgggacggaaagtaaaggtgtatgtttggaaatgcgagggtatcgtagggggatcttactatacttcttgcgctcttggcgcttagaagtgacggagggcgcatcggagtcggaggttgatgttgatgaagtgtcggtctcgtagtagaccaccttcctcatcctcttgtgcttgtccccactccgacgcggcttgtgggaagaagatttttccttcttctctttgtggtgagaagaagatttcttctccttccctttgttggaggagatcttcttcttctccttccccttggtgcgggactcttccgatgaagtgctcccgtggcttgtagtgggcttttcgccggtctccatctccttcttggcgtgatctcccgacatcacttcgagcggttaggctctaatgaagcaccgggctctgataccaattgaaagtcgcctagagggggggtgaatagggcgaaactgaaatttacaaatataaacacaactacaagccggggttagcgttagtaataaagaaacgagtccgtgagagagggcggaaagcaaatcccaagcaaataaacaagtaagactcggagatttgttttaccgaggttcggttcttgcaaacctactccccgttgaggaggccacaaaggccgggtctctttcaacccttccctctctcaaacgatccacggatcgagtgagctttctcttctcaatcacttggaacacaaagttcccgcaaggaccaccacaagattggtgtctcttgcctcaattacaagtgagtttgattgcaaagaaaggatcaagaaagaagaaagcaatccaagcgcaagagctcgaaagaacacaagcaaatcactctctctagtcactattgtgttgtgtggaatttggagaggatttgatctctttggtgtgtctagaattgaatgctagagctcttgtagtagttgggaagtggaaaacttggatgcaatgaatggtggggtggttggggtatttatagccccaaccaccaaacttgaccgttggctgggttgtctgttcgatggcgcaccggacagtccggtgcacaccggacagtccggtgcccctgccacgtcatcactgccgttggattctgaccgttggagcttctgacttgtgggcccgcctgggtgtccggtgcacaccggacaggtactgtttgctgtccggtgtgccagcatgggctcgcctgacatctgcgagcgctgcgcgcgcatttattgcgccgcagagagccgttggcgcggagttagccgttgctccggagccgcaccggacagtccggtgcacaccggacagtccggtgaattatagtggactagccgttggagtttcccgaagctggcgagttcctgaggccgacctcccttggcgcaccggacactgtccggtgtacaccggacagtccggtgaattatagccgagtcgcctctgcgaaattcccgaaggtggcgagttcgagtctgagtccccctggtgcaccggacatgtccggtggcacaccggacagtccggtgcgccacaccaggggtgccttcggttgcccctttgctcctttgttgaatccaaagcttggtctttttattggctgagtgtaaaccttttacacctatatcatctatacacttgggcaaacaagttagtccaaagatttgtgttgggcaattcaaccaccaaaattatataggaactaggtgtaagcctaattccctttcacaacacaactcaaagagttcgcaactcgacaagagctctagatgctatcacaatgaatcaaatgcgcggaatcgatgtcttggtgcttaagaatgttgtaggaatgcttggtgtgctcctccatgcgcctaggggtcccttttatagccccaaggcagctaggagccgttgagaacaaatcaggaaggccatccttgccttctgtcatcgggcgcaccggacagtgtccggtgccctattcctttccttaaatggcgaagccgaccgttgcagatctgggagccgttggcgcaccggacatgtccggtgcacaccggacagtccggtgcccccttccgaccgttggcttggccacgtgtcgcgcgcagaatccgcggccgaccgttggccctggcgaccgttgactcaccggacagtccggtgcacaccggacagtccggtgaattttagccgtacgccatcagcaaaattcccgagagcggcctcttcggccgaggcagcctggcgcaccggacactgtccggtgcaccgccggacagtccggtgccccagaccgaaacagccccttggctgtacacagccaactctttttttttctttttcttcctgtttccaatacttagacaagtatattagtacacaaaaccaatgtactaagacatagaaacatacctttgctcttgatttgcactttgtccatccacaagcatgatttcacctttaagcacttgtgttggcactcaatcaccaaaatacttagaaatggcccaagggcacatttccctttcacattgcagttgcagaacaaagcctcagcctattttgctgctaccaaccctcccccctaaacttgtttaaaaagcaacccattccagtacatagttgctgcgtacagtttattatcagtgcttgtattccagtacatagcagctcattccagtatatagcggctcattccagtatagggaataataatgataatagttgtatatcgttggcagtttctttttatatcttctctgtcgcatttcctaccatgttaaacacttgcagatgcttaagattatttcagagttggaactttttaaaactagagtttcttatgagttattcaagtcttgttgaatgttgaagttacgaaacactggttgatatcacctgggcgaggatgtctaaatggccaagtgcttgaaattgctttttccataccaaatcaattgccttacatgccagatttgctcaccaaattgtttgtgttgttggtctcacaaatgtacatgttaatgtccttattatctatccatatgactatgaggtctcaattgcctttcattaagaggcgagaaagtttgaccacattcatgtcaaagccaagaatagtgtaaattttagaaaacagtttacttgaggtacctcatagtcatatggatagataataaggacattagatatctggtacttgtgaattagaagatttcatatgccaatttttttggtggatggaacatgacacatgtatttatggagcttttatactcacattcttgtatttgttgtttgtagcctcgacaaacctggagtttgaacat

SEQ ID NO: 636 - DNA, 9848 bp, Zea mays
  Intron number 1 from transcript AC177901.3_FGT004 (locus A C177901.3_FG004) derived from phytozome v7.0 (chr-ID 1; po s 32008614 to 32018461 reverse strand)
ggggatttgaaggcttgctgtgacttgtctcgtcggtatggggtgctcggcggttcgtcgccaagcgacagttctcgccgccctatccttaggccgtgcgacgaaaaggggaagtcaggtgtcttagcggtagaagaggatggctggtctgttgtgaagcctaagttctggtggcggaaaagttcaaattttcttggggatttcaagcagcaagatgtgatccgaggaaccgattttttcaagcaacagctcagaggcaaatgtttcaattgtctggcgtcagatcactttgcttacctctgttcggcacctgttcgctgctggcaatgcctacaagcaggtcataaggctaggtcatgtcctggcaatatctaccttgggagatcccattcaattcgtgatctacctgggtcactcaagcattcaatccagaagggcagtaatttctcctcgagctaccagctgcagaagcctctacccggccctcttcaaatgggacatgaacggcagcctacacttcacacttcttctgtccagccaaacaagtcgtatctccaagctgtccagggaggccaagtcatggaagcgcgctaccccggtgaccctcgggcgcggcctgcaagagcagtctgtgccatctcggcgaccgggtcgatccgtcgtcgtagagatgagttaatcagtaaggcagtggtttgctcttttgatggaaacagtcatgaggtggatatgctgtcagcaggggatatgctgagagaggcttttgatcttcaccacggtcagtatcaacttgtaaagcactttccagagcagttttttatcatcttctctgagtcaagaatcaagcaatgggcgctggataggaggtcagtctcctatcgtggtcgagtgttccactttggggactggtcagaggagagctatgccaggaagaccaactttgagttcagagtcaaggtcagggtggagggaattccggttcactgctggggagaagaggtggctgctagggctttaggaaagagctgtgctattcactatgtccaggagcgctcgaggcgtaaggagcgcacgagatcctttgatctttgggcttggtgttcggatccttgtgatatccccaaagaggtctcgctgtctgttgcagaacctgatagggagctccctcctcctggtgccccgctacctctggttggggtttttcatgagttgccaactgatctaaaggaaggccatgtttacaccattcgaaaccacattgaagtcgtggaagacctctcattcattcgtggaagggatgctagagaaggtcccacttgccgtaggccacgcagagaatttgtgtggagctacggcgtgccggactctatcggagaaaaaagagagagatcagaggatcgcagaggcagggattttggtcatcgaggctgggatcatgatgatgatgaggactttcagcaggatagacgtcatggcactcgtaggcaccgcagtctttcgggctgggcgcgttcttcgcggtgccgtggcggtccggaggactgcttcagttcaagtggaaggcgcaggccgtctaccccttttcgtcatcgtgggctggttgggcgctggattccaaaggtgaaggtcaggtcggtctcttttgctgatccactaatctctgctgtttggcccccaattggtgtggaagagctggaagatgaaattggtgctattcctgctggcgattcgatttcaggcgtcctgacagcacagcagcctcggcttgctgtcccttccaaggtttgcagtgcagagcatttaggtttctcagatgttgtgttaagccaaaaatctattgagattgcatttcctaatcctgatacaatcctgaatcctttacaaatcttagattcagctagagagacagcagccccaattttattacatcaacagattgcatattctagtcctgatacatctctgagtgctttgcaaatcatagattcagttagggtgccagcagccccaaattcattaagtcagccactcgttgcagaatctcatgtgcctccacattcaaatattaatagtgcatctgtcatgccgtgcaatccagatttattcacctcttcgctgtcatgtagcatcccagatccctcaagcattaatatagatgaatttgttgcatctatctctaaagctcctgatgctccgctaattcgatcgcctcccagctctagcttagcttcaaacagtttggttgtggggtgttcaattcagcctgctgttgctacgggtgtaagtccatctcctattggcaagagatctagtgctagattggctgcaaagaaaaaactcaaatttggaagaaatcgaaatgccatagttaaagctcaagaaattctagctgctaagttaaataacgctgctgctactcaatttcaaagctctaatgctctatctgttaatggtcaggtggatttgatggaacagcttgcaaggcatttcataaggccccttactaaggatcaaatggaggcaattatggagttggcaattcagggaaaggagaaggaagggaccaagaagaagggcagaaaggtggcacctctcaaggctcctttcatagaggctgctgagaggatctgagtggtgtttttagatcttgtgtgggtcggtctggtgcagaatgttatctcgcatgtgtaatagtctgtgggtcacccaactacttttgatgtctgctttgggtagcaggttgtgggattgtcagcagtgtttttttcttttggcttgctctgtcggtgtttcagtctgtcattatttcaggcgtgggatgcatgctcttcccagctagcaatgtgctgctgtcgctggttgtctggtcaggtcctgtcttgtgtggctctacttgggcatgtaggggaactacttttgattaatgaatgccaactgttgtattttgtcatggaatgtgagggggctaaatgacccagctaaaagggcaagtgtgaagcatttgattctctcttctggggcaactattgtctgtcttcaagaaacaaagataatgagctggaataataatcttctaaacgaaacactgggttacaagctagctgctcagacggttcatttaccatctcttggagcgtcaggtgggatcctaattgcatgtgatgaggatctgtttgacataactgctattccttatccatcagtatactcgttatctgtcagaatctgctcccgtatgagtgacgtggtgtgggacctcacaggggtttatggtcctcaacctgtaaatgaaaaaatgaattttctggcagagctgcgccatattcgtaatctgatgaagccggaatggctgattttaggtgattttaacatgataaggagagcaagggagaaaaacaaaggaataattaatagaagactgatgaggcagttcaaccacacaattgattaccttcagcttttagagcttgacctcaacggtaaattatacacatggtcaaatgaacaggacacccctacgatgtctaggattgacaggtttttagcgtctacggaatggcatgatttcttccctcaggctgatctgcaggccattgggtccatgacctcggatcattgccccttagttatgcaaggtaatgctgcctttagtttctataagggatttagatttgaagctttttggacaaaaattgatggattcaatgaggtaattcagcaagcttggacatccagtgttcgttcttccgatgccattcttcggctgcacgtgaagatgacccgcacggctaaagcgctattgatctggagacgaaagacagtaggcaattttaatgtgcaactagaaatcattcagaccgttcttaccctccttgagaaagcgcaggaatccaggcaactctccggggatgagctagagttcaggagaagtctaaaaatgaaaatcttagggctagtggcaattcaaaaggcaagagctagacagcattcaagacttacctggctgcgtctgggagatgcaaacacaaatttttttcacctcatggcaaatcatagaagaaggaaaaatttcatcagatcactggttcgcggtgataggctgctcaccagtcaggatgagaaattgcaggaggcccatcatcatttctctcaagttattggcagaaggggtactagacaaagagctgttcggtgggataacataggctatagtccatttgaattatcagatcttgatcttatgttcaatgaagatgagattaaaaatgtggttatggggatgcactccgaaaaggcaccaggtccagatggtttcatagggattttttataagagttgttttgatctgattaaagatgatttatccagtgcaattcatgatttctatcaccatagatgcaaatacctgaatctcgttaatgaggcaaatatcacgcttttacaaaaaagggagggtgctgacaggattgacatgtttagaccgatcagtctcatcaatagtttcatgaaaatattaaccaagattttagcaaacaggcttgcgccaagaatgaatgagatcgtctccactgctcaaaatgcgttcattcaaaaacgttcaattcacgataactttctctatgtccaaaaagttattcagaaacttcataagaataatcagccagctcttttcgtcaagcttgacatatcaaaagcttttgattccatcaattgggcttatctgttagaggttctgagagctctaggtttttcccagaaatggagaaattggattgcaacaatattaggatcttcctcctcaaaaatcatcatcaacggtcaacaaacaaatgcaattaagcacatgcgtggcgtccgtcagggtgatccgctatcgccgttcttgtttattctcgcaatggaccctctgtagaggatgattgagatggcggcagatgcagggctcctggggcgggttctgccaaataaggctaaacagcgatgttctctttatgcagatgatgcaggggtgtttgttagagcagataaagaggatctgaaggttttgaaaaagattctggaagtttttgaagggtgttcagggatgaagattaattttgataaaactgaaattttcccgattcgatattcccaaactctttggccagatctgatggatgtgttcccgggcaaatactcaaaatttccggggaggtatcttggtctacctctgcatgtcagaaacgttaggagaatagatgtccaaccgctaattgacaaaattaataaaaggctagcaggatggaaaggcagactactctcaaaggcaggaagggaaaccttggttaaagcggtgatttctgctcagcctttataccatctgacggtttttcctgcgcagaaatggcttcttaaaagaattgacaagctaagaagaagcttcctttggaaaggtaatagtccagaattttgtaatgggggtcactgtttgattaactggtccacaacttgccttccaaagaataggggggtctgggagttctagatctggagcgttttgcaagagcgcttaggctaagatggctgtggttaaggtggaaagttaaagataaagcatgggttggcatgcagctaccgtgtgacaaggcggatatagatctttttaacgcatcaacagttgtgactattggcaatgggaaaatggcggacttctggggatctagttggattgaagggcaggctccaaagaatatggcacctaagctatataagaaagcaagaagaaagaatatctcggttttcaaggctcttaggaacaatttctggatgcagttttgtgcgcctttctctcgggaggaggaagtgagagaattcgtattactttggcaagcgatcagcaacgtgcaaggtctcaatgaactcgatgacaccatttcttggagatggtcggcagatggggaatacagttcaagtagcgcctacaaaattcagttcacaacgaacttctgtaaaaccaacatcaatcccatttggaaagccaaaactgaaccaaaatgtcgtttctttgcttggactttgttgcataacaaaatattaacttcagacattctgcagaaacggggttggccttgcaaccaaaattgttcgctttgtaatgggtctccggagacagctgctcacctttgtaaggattgccccttcgccgaggaagcatgaagcatgatcctgacttgggctgatttgcggttcctggacggtatttccaaaaccggatctcttcacgagtggtggttcagactgaggatgctctgtagtaagcaatcaagaaaacattttgatggcctcataatatatttctggtggagtttatggctggaaagaaacaacagaatctttaagggtcagcagagaacgacagagcaaatggtgcaggtggtgaaagagctcattggtggaggtgtagcctgtctgtagcggctggagtcccggtcagggggggtttttgggtctttttctttttgcgtcagtgttctatctaggtccttattgttaagttttatcgggctgtgtctgtttgtaaagtttatttttacctcttctaatatattggaatggcaaatcttttgcctttctctttcaaaaaaaaaaacttcttaaccccccaccccccatcgctgttcctgtcgcatgcaatggccacggtcggcaattgccacgtccattaatggcaaaaccttaggtgtgtggacaaccacaaccatccatctagcgatgtataatcctggttcttgactatcttcgatctggtttgtctcgaccacctctcgctcgccctatgagcgacgaccggcggcaccggtggtcacttacgatgctagatcatgtgatggctagctaacagggataaatttagggttagttgcaagaggatggacgaaaaatttagtatctgcaataatgtgccaagtggctccgtcgtcgtccaaaactattgcccaagatgctaagctagttagtgatgcaacttgactggtgacgttgactgcttgagcggcaacgcctcgtctcaagcccacagcgagcgtaggggacgttgggatggccacatcacatgcatgaacatacataaaaagtcgtgatggaacagctagaaggttcaagaaacacaggccataagaactgtgagctaagccatagcctacgtggctttgtgctctccagatttctatgggcaatctgatgctagctttggccttatgattcagagaagatatgaaaaagccgaaacactgccaacaaaaactagctaattagccaaggcatatacttgaacattatgtcataccagctagactgcgaccaattaatattctcaagattacaaatccctgctgtggtaacgactgacaagttgcaccagcgactgcgatcgaattcgttttcttggaacgggcgaccgtgctgtgattctgtgagcacattttgacccggccggtggcaatttgagctccaccaagaattggtttacggattaatgtaagcgatatagctcaatagctctggtcttaaaactggacatgtcagaggggacaaggtggttaattaatacgcagtatttcttgggaattagtatgcatacaagtagaagttgctggcacttaaactctgtgataattaagtttctctctatgggaggaggatcgaaacagatacggcaggcatcatcaccggctacttgctgggttctaaattgctgctgcttactctctcttctgactaaacacatattctaagcctgatataagttaagataacggttttttaaggtggtgcccttaattttactggtgtccatcatcatatatagttttatgcgtctcttgatatcatgcatgacatgctcatttgcaacttgcagtgagagcatttggtagccaagaagacatctgctggcttgcacgactccgtgagtcactttcataaatatctttggagcctcctctttgacgtggatttttggccttctctgatccaatcaaaatggattagtggaaaacgtagcctcggagacaattttcgtttcatttgggtgagtcaggaaggagggtaatgctaccccccaccccctcccccacccacccacacaaatttagcacagagtctaattcttttgggctcctggaacaaacgacatttggcttcatccagaacgaagtcctgttcaacactatctcctccacggcctatcgagtcgttgggtggatcaaggaaactctagatgtacaaaaaaaagagcacacctttttttttttgggaatagaggcagtagaaataaagaggccttgctggtttggggaatgaaccatgctgcatatacagactcttcttcttaattaaaagacatagcttgtctttgttaaataaattactctttaacagttatcctgaaatggttagccttatgttcctaacccttgataaggttacatgtgcttcatggttcgtttgtgcatgccgaaactgcaacatgacttaataatctatctaccaaaccaagcactttattggtaatacaagaacgtaataattgtttatgtgacagcacataacactgaagcgaatctctctttttgttaattattttctgaaagctgcaaaagggctatcacaaaagacacaagggagtatcttgcagtcctcggtacaatcataattcagaaaccgacataaacatagaacagttgcagcaaggaaggatgaatagattgagctctcttttctctagaaaaagtgggatgagctttcgcctaaatatacataagggtactaagactccggttgagtttttaaaacacaaaagacaactacgagactgcatgatacaattcatagactcaagataataaatacagctaagagacaacatgtataaaaagtcgtgaaaagacatgctctttaggcttttcgcgaagagactatctcttgtatttttttcacttagccagttaggcctttaaaaacaccaaagagactctatattaaatgtggttgtacatgcccagacgagggatcgctgtacctacggggatcattattgccactgatgacccggcttttatgtattaatttacgaagttggttatataatcctgtgtgatcattatatagctttagcttctaagctgcatatgtcaagaatacctctcccttttcccacctgcgattgcacctttttcctgggttcagacaatgactgccggctgaacgacgttcaaataggactaattaaacagatgggcaagaagggcctaatgagtatagcgcaggatcagatgtacgatgtatggtgtctgaactgtagctgctcattgtgctgatggaaacacaaccaccaccacccttcaatttgtattttcatatttctctggattgacgcgccgatgccaattattgccgtaaaatccaaattcaagaacatatctatgttgtttgcaagatttagatggtgaggaagcagcctaaggatggaagctatattccctattcagattacttatagggaatgagccatgagttagttatgcaaggatatatatattttgatccacatgcaggttccatacaatcatttgggaggttattataatctttctcagcccggccttctctgtatgttctagtgtattgcagctagcgtcaagccttttctgattgtcattttctacgaaatactttgtctagtttcattttgctttctttgttcataaatgtgacaggaacatgctaatggaaacaattgaatttaaaaggagtgatgttttttgaacgaaaaaggacattgctggctggtgcggcagccaggggtggag

SEQ ID NO: 637 - DNA, 12156 bp, Zea mays
  Intron number 2 from transcript GRMZM2G145792_T01 (locus G RMZM2G145792) derived from phytozome v7.0 (chr-ID 3; pos 3 7179012 to 37191167 reverse strand)
aattactgcatcacaaaacactaccattaccattggtatgttttgtagtttggtgcatttacgtttgttcagtattatgaaactacactatcttttttattttcccaatgacataataggttctatgatataattctgatgcagtaacggtcaagttcatacattttttacataaaaatgtacctatgtgtcagggcccaagagggccgctacagtgatgtcggtactgtagcacgcccctcgggtaagttaggtaaagataaggctagtttgggataggattagaataagagataagattagatctagttcttagaggtcaagtaaccctctctatataaggagaaggattgtatcaattgaaggtaagcaagtgattagaaggaaatcccttatcttgtcggtcgtgggcaaagttctgtgggctgtggccggcctccccagcgcctctaaccctagctgtcaccctcaaaccctcgcaaccccatccaacgaacagtacccgtgaaactgtagcattgcgggtactgttgcaccacagccatctactgcccctcaacaatttttgcactcaacactagcaaccacataacatcaaccccaaacgttgtccataacaatctggtatcagagaccccactgatcctaggatgtcagacaaccctccccagccttctgttcccccggtgaagggccccatcccggtgacctccgtggcagcagccgccaccagcacgtcgcccgctgcgcccgtgttgcaggactccttcatggcgttccagcggcaggcgcatgactccctaatgttgatcaacaaccacctattggcattgaccacccgattgtaggaaatcaaggtccattttgcatcggcctcatccgtgttcgatccttcgtcgtcgtccacatcttcccctacactgcgcaagattacccctacgaccttcctggctatggggccatccccaccgcgcaccctccctgcccctggtagccgttgcgagacaactttcgccctctacgacgcccctgctacagtatggtctaccatggttcgggggcatcccggcccttctggcgttggttccagtcatttcggaggtcttctctacgctgcatgtcccgcctgcgagtttggtgcccgacccttttctgtagcggatcaactagccaccgccataactggccagcagtctcctgagagtcgaggagagcagcagtccagggctgctttccaccacttcttcaccgccccatgcctgtgccgccatagtagcattgcgatggcgtcttctacgggggtgtagatggcatccgagcatggacgacgtagctacaggcggcggcacgctgcctcctagcgttttagcaaggacaacgccccatcttcaagtagcggtgcccagttgtcctagcaaccttacaacagctcgtggagatgaaggcgattgtgcgtgtgagtgcctgcaaggtgtctgcggtggtgtggctacaggctgcggcgcgtgacatcctagtgcgccggcagctgcaggaggtgcaccgacagacgcttggggcagccttggtggtggttgacctcgacacacgggggcgcgacctcaccgagtcggacgaccatcagcaactatgttggcccgctgtctccaagtgcgagcatgtcccatgggcaacaaactccaactctacaacaacggtggtagggaaggcactcccctccttatcatcggtgagggtgcactgcttagcgccaccacattctgctattgtccgccacgagggcgcctccgctggtcattgttgcgacccattccaggtggccttccatgttctccccttttgtgtccagatggcgtccatgggatccaggtgtaggtccagtgcgcggaaggtgtctgtctcattttaagggatcaaaaaaataaagaatcatattctatttcagattcggaataataaaataagccaagatgtaaaatgcttattttaggtgttagtgaaagggaattaggcttacacctagttcctaaataattttggtggttgaattgcccaacacaaataattggactaactagtttgcccaagtgtatagattatacaggtgtaaaaggttcacactcagtcaataaaaagaccaagttttggattcaacaaaggagcaaaaggcaaccgaaggcacctctggtctgggggcaccagactgtccggtgcaccagaggactccaacttgaactcgccaccttcgggaatttccagaggcactcgcgctataattcaccggactgtccggtgtacaccgaacagtgtccggtgcgccaaggaagagcggcctcaggaactcgccagcttcgggaaacgccaacggctagtccgctaaaattcaccggacatgtccggtgtgcaccggactgtccggtgcaactccggagcaacggctagtcggcgccaacggctacctgcggcgcattaaatgcgcgcgcagcgcacgcagaagtcaggcgcgcccatactggcacaccggacaaggaacagtacatgtccggtgtgcaccggacacccaggcgggcccacaagtcagaagctccaacggtcagaatccaacggcagtgatgacgtggcgggggcaccggacatgtccggtgtgcaccggactgtccggtgcgccatcgaacagacagcctcccaacggccacttttggtggttggggctataaataccccaaccaccccaccattcattgcatccaagttttccacttcccaactactacaagagctctagcattcaattctagacacaccaaagagatcaaatcctctccaattccactcaagcctttagtgactagcgagagagatttgtcgtgttcttttgagctcttgcgcttggatcgctttctttctttctcacttgttcttgtgatcaaaactcaattgtaaccaaggcaagaggcaccaattgtgtggtggcccttgcggggaagttttgttcccgtttgattgagaagaagaaaagctcactcggtccgagggaccgtttgagagagggaagggttgaaagagacccggcctttgtggcctcctcaacggggagtaggtttgcgagaaccgaacctcggtaaaacaaatccgcgtgtctcacttacttattcgcttgcgatttgttttgcgccctctctcgcggactcgtttatatttctaacgctaacccggcttgtagttgtgtttatatttgtaaatttcagtttcgccctattcaccccccccccctctaggcgactttcaattggtatcaaagcccggtgcttcattagagcctaaccgctcgaagtgatgtcgggagatcacgccaagaaggagatggagaccggcgaaaagcccactacaagccatgggagcacttcatcggaagagtcccgcaccaaaaggagggagaagaagaagagctcctccaacaaagggaaggagaagaaatcttcttctcaccacaaagagaagaaggaaaaatcttcttcccacaaaccgcatcggagtggggacaagcaaaagaggatgagaaaagtggtctactacgagatcgacacttcatcaacatcgacctccgactccgatgcgccctccgtaacttctaaacgccaagagcgtaagaagtttagtaagatccccttacactattctcgcatttctaaacatgcacctctactttccgtcccattaggcaaaccaccaacttttgatggtgaagattatgctaggtggagtgattcaatgcgatttcatctaacctcactccacaaaagtatatgggatgttgttgagtttggtgcacaggtaccgtcggtaggggataaagactatgacgaggatgaggtggcccaaatcgagcacttcaactctcaagcgacaacaatactcctcgcctcactaagtagagaggagtataacaaagtgcaagggttgaagagtgccaaggaggtttgggatgtgctcaaaaccgcgcacgagggagacgagctcaccaagatcaccaagcgggaaacgatcgagggggagctcagtcggttccggcttcgcaaaggggaggagccacaacacatgtacaaccggctcaagaccttggtgaaccaagtgcgcaacctcgggagcgtaaagtgggatgaccatgaaatggttaaggttattctaagatctcttattttccttaaccctactcaagttcaattaattcgtggtaatcctagatatactaaaatgacccccgaggaagtaatcgggcattttgtaagttttgagtgcatgatcgaaggctcgaggaagatcaacgagcttgatgatccctccacatccgaagctcaacccgtcgcattcaaggcgacggaggaaaagaaggaggagtctacaccaagtcgacaaccaatagacgcctccaagctcgacaatgaggaaatggcgctcgtcattaagagcttccgccaaatcctcaagcaaaggagagggaaagactacaagtcccgctccaagaaggtttgctacaaatgtggtaagcccggtcattttattgctaaatgtcctatatcaagtgacagtgaccgaggcgacgacaagaaggggagaagaaaggagaagaagaggtactacaagaagaagggcggcgatgcccatgtttgtcgggagtgggactccgacgaaagctctagcgactcctccgacgacgaggacgccgccaacatcgccgtcaccaagggacttctcttccccaacgtcggccacaagtgtctcatggcaaaggacggcaaaaggaagaaggtaaaatcaagatcctccactaaatatgaaacttctagtgatgataatgctagtgatgaggaggataatttgcgtaccctttttgccaacctcaacatgcaacaaaaggaaaaacttaatgaattgattagtgccatccatgaaaaggatgatctcttggacacccaagaggacttccttattaaagaaaataagaagcatgttaaggttaaaaatgcttatgctctagaagtagaaaaaatgtgaaaaattatctagtgagctaagcacttgccgtgagatgattgacaaccttaggaatgaaaatgctagtttaaatgctaaggttgattcacatgtttgcattgtttcagcttccaatcctagagataataatgatgatttgcttgctaggattgaagaattgaacatttctcttgctagccttagagtagaaaatgaaaatttaattgctaaggctaaagattttgatgtttgcaaagttacaatttccgatcttagagataaaaatgatattcttcatgctaagattgttgaacttaattcttgcaaaccatctacatctaccattgagcatgtcactatttgtactagatgtagagatgttgatgttaatgctattcatgatcatatggctttaattaaacaacaaaatgatcatatagcaaaactagatgctaaaattgccaagcacaacttagaaaatgagaaatttaaatttgctcgtagcatgctttataatgggagacgcccgggcatcaaggatggcattggcttccaaaggggagacaatgtcaaaattattgcccctcctaaaagattgtccaactttgttaagggcaaggctcccatgcctcaggataacgagggttacattttataccctgccggttatcccgaggacaaaattaggaaaattcattctaggaagtctcactctggttctaaccatgcttttatgtataagagtgagacatctagctctaggcaaccaacccgtgctaagttgcctaagaagaaaattcctagtgcatcaaatgaacaaagcatttcatttaaaacctttgatgcatcttatgtgttgactaacaaatccggcaaagtagttgccaaatatgttgggggcaagcacaagggttcaaagacttgtgtttgggtacccaaagttcttgtgtctaatgccaaaggacccaaaaccatttgggtacctaaagtcaagaactaaacttgttttgtaggtttatgcatccgggggctcaagttggatactcgacagcgggtgcacgaaccacatgactggggagaaaaagatgttctcctcatatgagaaaaaccaagatccccaaagagcgatcacattcggggatggaaatcaaggtttggtcaaaggattgggtaaaattactatttctcctgaccattctatttccaatgtttttcttgttgattctttagattacaatttgctttccgtatctcaattatgtcaaatgggctacaactgtctattcactaatgtaggtgtcactgtctttagaagaagtgatgattcaatagcatttaagggagtgttagagggtcagctatacttggtagattttgatagagctgaactcgacacttgcttaattgctaagaccaacatgggctggctctggcatcgccgactagcacatgttgggatgaagaatcttcataagcttctaaagggagaacacattttaggactaacaaatgttcattttgagaaagacagggtttgtagcgcatgccaagcaggaaagcaagctggcactcatcatccgcataagaacataatgacgaccgacaggccactggagctcctgcacatggatctattcggcccgatcgcttacataagcatcggcgggagtaagtactgtctagttattgtggatgattattctcgcttcacttgggtattctttttgcaggaaaaatctcaaacccaagagaccttaaaaggattcttaagacgggctcaaaatgagttcgccttaaggatcaagaatataagaagcgacaacggaacggagttcaagaactctcaaatcgaaggcttccttgaggaggagggcatcaagcatgagttctcttctccctacacacctcaacaaaatggtgtagtggagaggaagaatagaactctattggacatggcaaggaccatgcttgatgaatacaagacttcggatcggttttgggctgaggcggtcaacaccgcttgctacgccatcaatcggttatatctacaccgaatcctcaagaagacatcatatgaactcctaaccggtaaaaagcccaacatttcatattttagagtctttggtagcaaatgctttattcttattaaaagaggtagaaaatctaaatttgctcctaagactgtagaaggctttttacttggttatgactcaaacacaagggcatatagggtctttaacaagtccactggactagttgaagtctcatgtgacgttgtgtttgatgaaactaacggctctcaagtagagcaagttgatcttgatgagataggtgatgaagaggctccatgcatcgcgctaaggaacatgtccattggggatgtatgtcctagggaatccgaagagcctccgaatgcacaagatcaaccatcctcctccacgcaagcatctccaccaacacaaaatgaggatgaagctcaaattgatgaaatagaagatcaagaaaatgagccacctcaagatgatggcattgatcaagggggagatgcaaatgaggaagacagggaggatgagcaagaaccaagaccgccacacccaagagtccaccaagcaattcaacgagatcaccccgtcgacaccatcctcggcgacattcataagggggtaactactagatctcgtgttgcacatttttgtgaacattactcttttgtttcctctattgagccacacagggtagaggaagcactccaagattcggattgggtagtggcgatgcaagaggagctcaacaacttcactaggaataaggtatggcatttagttccacgtcctaaccaaaatgttgtaggaaccaaatgggtcttccgcaacaagcaagatgagcatggtgtggtgacaaggaacaaagctcgacttgtggccaagggatactcccaagtcgaaggtttggatttcggtgaaacctatgcacctgtagctaggcttgagtcaattcgcatattattggcctatgctacttaccatggctttaagctctatcaaatggacgtgaaaagtgccttcctcaatggaccaatcaaggaagaggtctatgttgagcaacctcccggctttgaagacagtgagtaccctaatcatgtctataagctctctaaggcgctttatgggctcaagcaagccccaagagcatggtatgaatgccttagggattttcttattgctaatggcttcaaagtcggaaaggccgatcctacgctctttaccaaaacacttgaaaatgatttgtttgtatgccaaatttatgttgatgatattatatttgggtctactaacgaatctacatgtgaagagtttagtaggatcatgacacaaaagttcgagatgtcaatgatgggagagttgaagtacttcttaggatttcaagtgaagcaactccaagagggcaccttcattagccaaacgaagtacactcaagacattctaaacaagtttgggatgaaggatgccaagcccatcaagacacccatgggaaccaatgggcatctcgacctcgacacgggaggtaagtccgtggatcaaaaggtataccggtcgatgataggatctttactctatttatgtgcatctcgaccggatattatgctttccgtttgcatgtgtgcaagattccaagccgaccctaaggaagctcaccttacggctgtaaaacgaatcttgagatatttggcttatactcctaagtttgggctttggtatcctaggggatccacatttgatttaattggttattcggatgccgattgggcggggtgtaaaatcaataggaagagcacatcagggacttgccagttcttgggaagatccttggtgtcttgggcttcaaagaagcaaaattcggtcgctctttccaccgccgaagccgagtatattgtcgcaggtcattgttgcgcgcaattgctttggatgaggcaaaccctgcgggactacggttacaaattgaccaaagtccccttgctatgtgataatgagagtgcaatcaaaatggccgacaatcccgtcgagcatagccgcactaagcacatagccattcggtatcattttcttagggatcaccaacaaaagggagatatcgagatttcatacattaatactaaagatcaattagccgatatctttaccaagcctcttgatgaacaatcttttaacaaacttaggcatgagctaaatattcttgattctaggaatttcttttgttaacttgcactcatagctcatttgtatacctttgatcatatctctttcatatgctatgactaatgtgttttcaagcctatttcaaaccaagtcataggtgtattgaaagggaattggagtcttcggcgaagacaaaggcttccactacgtaactcatccttcgccgtcgctccaagcaactctccgttctaggggagaaaacatgagcaccaagcaaaaggactccatctttggtataatcttcactcatttgttttgaccaaagagggagaatgtaacttagagggctctaatgattccgtttttggcgattcatgccaaagggggagaaagtaagagcccaaagcaaaaggaccgcaccaccaccaatttcaaaaacttagtgtttccaagaatattttcaattggtatcctattgtgttcaaaagggggagaaaatagtatttcaaaaatgacatatcaaaaccctcttgaacactaagaggaggatctcatttagagggagttttgtttagtcaaaggaaaagcatttgaaatagggggagaaaatttcaaatcttgaaaatgctttgcaaaatcttattcatttacctttgactatttgcaaaagaactttgaaaaggatttacaaaatagtttgcaaaaacaaaacatgtggtgcaagcgaggtccaaaatgttaaataagaaagaaacaatccatgcatatcttgtaagtatttatattgactcaattccaagcaacctttgcacttacattatgcaaactagttcaattatgcacttctatatttgctttggtttgtgttggcatcaatcaccaaaaagggggagattgaaagggaattaggcttacacctagttcctaaataattttggtggttgaattgcccaacacaaataattggactaactagtttgcccaagtgtatagattatacaggtgtaaaaggttcacactcagtcaataaaaagaccaagttttggattcaacaaaggagcaaaaggcaaccgaaggcacctctggtctgggggcaccggactgtccggtgtacaccggacagtgtccggtgcaccaccggacagtgtccggtgcaccaccggacagtgtccggtgcaccagaggactccaacttgaactcgccaccttcgggaatttccagaggcactcgcgctataattcaccggactgtccggtgtacaccggacagtgtccggtgcgccaaggaagagcggcctcaggaactcgccagcttcgggaaacgccaacggctagtccgctaaaattcaccggacatgtccggtgtgcaccggactgtccggtgcaactccggagcaacggctagtcggcgccaacggctacctgcggcgcattaaatgcgcgcgcagcgcgcgcagaagtcaggtgcgcccatactggcacaccggacaaggaacagtacatgtccggtgtgcaccggacacccaggcgggcccacaagtcagaagctccaactgtcagaatccaacggcagtgatgacgtggcgggggcaccggacatgtccggtgtgcaccggactgtccggtgcgccatcgaacagacagcctcccaacgaccacttttggtggttggggctataaataccccaaccaccccaccattcattgcatccaagttttccacttcccaactactacaagagctctagcattcaattctagacacaccaaagagatcaaatcctctccaattccactcaagcctttagtgactagcgagagagatttgccgtgttcttttgagctcttgcgcttggatcgctttctttctttctcacttgttcttgtgatcaaaactcaattgtaaccaaggcaagaggcaccaattgtgtggtggcccttgcggggaagttttgttcccgtttgattgagaagaagaaaagctcactcggtccgagggaccgtttgagagagggaagggttgaaagagacccggcctttgtggcctcctcaacggggagtaggtttgcgagaaccgaacctcggtaaaacaaatccgcgtgtctcacttacttattcgcttgcgatttgttttgcgccctctctcgcagactcgtttatatttctaacgctaacccggcttgtagttgtgtttatatttgtaaatttcagtttcgccctattcacccccccccccctctaggcgactttcagttaggtttgtgcctaatagagtcatcgttaggttgcagctcaaggacgacctgcttgttcaggaggggtgtagtgtcagggcccaagcccccctacagtgacgtcggtattgtagcacgcccctcgggtaggttagataaagataggcctagtttggtataaggttagaattagagatattagatctagtgcttagaggtaaaaaacctctctatataaggagaaggattgtctcaattgaaggttaacaagagattagaaggaaattccttctctcttgccggccgtgggcaaagccctatggttggcctccctagcgcctctaaccctagccgtcgctctcaaacccgtgcagccccatccagcgtacagtactcgtggtactgtggccacgtgggtactgtagcactacaaccatctgtcgccccctcaacaatttctgccctcaacactagcaaccacataacatcagccccaaacgttgtccataacactattcttatcttggaagcttatggggcatgtgagaatgtaaagtctggcattgatccagcagctgataaggaaatgtgcatacatatattttaaagttttctcaccatgattatttttaaatattgtagtcaattttgtatgtattaccttatagatattttttgcttatgcggatcaa

SEQ ID NO: 638 - DNA, 7657 bp, Zea mays
  Intron number 9 from transcript GRMZM2G003186_T01 (locus G RMZM2G003186) derived from phytozome v7.0 (chr-ID 3; pos 1 4303824 to 14311480)
aggtaactcttttcttatgcaactctgttgaaccaatgtgcttgactgcatggctgtgtgtaatacagcaaataccagtagagtagtgtcatgtatgcatctgtggatatattatgcattttttgtagaaaaactataattttaatcgagtgagaacatagtaccattgttggggaccttcggcgtccgaaggtcctcaaaaacaggatttaacagtattcctgcagtacaatgtgtaaacaggtaccctcggactaaagtcggcattgcagtagaccggaataatacgaaggttgacacagagccgaaggtgcgagcaagaaagcttcggcgcgacagcaaagagtggaaccgacttaaagatgaaaaggctattcagacctcaatagactactatagagttattatcaaatgtaaagggcatgaatgtaattttgtaagggctgtgtcccgtgtctataaataggtgaacagtatccccgtactgttcacgctgacttggcattcgcttttcgcgtcacgcttgtatcatcatctccttccgattgaaggtacacttgtaattcaacgatgttttcgtttatgctcgataataatatatgattgttcatgttatcttttacattctttatatttcaaccttcgtcattgttcgatgaatttatgaaggtatgtccttcacaaccttcgtccgcaagtcattacatcctaagggaaataatgcttcggaggacgaaggacattaacaattaacattttctatgttgccttgttcttaactcttagtacttgagaacaagtctccaacattggcgcccacctccggtgaactcacttccatttcttgagcttttcaacaccttcggcaagcatcacattcgtcatgccgccgaagaaggcttcagcaccaggggctggcacgctgcagccgctggaccccaatcaagacgtcctttctcttagagaggcacgaagccagaagaggaaggctaccagtccaacacctccggaggatgatctagatcaggagattcaaaatctggaaatccttcagcagcaggttcaacgcaagaaggaaaagatggccagggtagctgaactgcagaggcagatagacgaagcctctgaagaagttcgtcatcttgctcaggacgagcaacatcgaaggcctcagcatcaagaccttcatcaggagggttttcccaacgaagatgattggtatgacaatttccatcatgggaattttgtttttgatgatgcttctcctctgtccgctgagctgcaggctacaccttggcccccgtcctacaagccgcctcagctccctgtattcgatggccactcagacccgaagcaatttttgatgagctacgaagcaacagtgtcttcgtatggtggcaatgcttcagtcatggccaaatctttcgttatggctgtcagaagtgttgctcaaacctggtattcctcccttcgaccaggaacgatcacttcatggcagaagctgaaggatttgttgttaaccagctttcaaggatttcagacgaagccggtcactgctcaggctctgttccagtgcactcaggaccacgaagaataccttcaggcatatgtccgaaggttcttgcgtctgagggcacaggcaccaacggtgcccaatgaaattgtcatcgaggccatgatcaaggggcttcggccaggtccgtcagctcagtacttcgccaggaagcctcctcaaactttggagaagcttctccagaaaatggatgaatacattcgggccgacaatgattttcgccaaagaagggaggaggctttcaggttttctgaaatgaccaggggcttcggagggaggttttacccgaggcatgtgagatcaattcacaattctacacaaaatgatgacagaggaagccaacagcaaaggccacaatgctcctcacaggcttctggacaacagcaaagctccttccgaccaccagctccaagaggcagaggcgccaggggcttcggaggaagatttggcgatcaaccgagaagaatcttttgcttattctgcggtgagaacaaaggccatactaccaggatgtgccatgttactatacagaagcaaaaggaaatagctgaagcagcagcacaacaagcccagccgaagcaggtcatgcatacagcttcgtatcattcgccctacatcccagaatatgtgggcaaccatcctgcagtttctgctgcttcggcaagtcagcctcaagcttcctggcaacagcctccgcctccacctccgctgcaacaaggccagcagccagaagggagccaatatgctccgcatcaaagggacttcagagaacagtccgaagctcgcacggtcaacagcactgtgccagaatcaaagcacatctattgacaaatatcctaccttaatagcaatctttttcattcagttttattttctgtaataaaggacattgtttaggtttcatgtaatcagtttcgttgattcctacaagaaaaatatgttttcttcacaggcttgtgataataaaaaggaccttcggactatcgaaaattcttcgaagcaacaaaaagtcgttctaaggaacgtagagtaagtttgacgaagtcacaaaaagtcgttccgaagggagcgcagtgtaagttttctgctccaaagtcgttccaaaaggaatgcagagcatacagcgaaaagtcaacgctgataccgcctaagtaaaaggcgaagaagctccaaagacgttcctaagggaatgcagagcttacagcgaaaagtcaacgctgattccgctgaagtaaaaggcgaagaagctcctaagggaggcttatagcgaaaagtcaacgctgattcacaaaaagattatgtgtttcatcgcgcaaatatgcgtgtatcttcggaatatcaccttacatagcatagcatcatcacatcatctttgcataacataagcatcatacatcatactgcatgtggcataagaaggaaatatgatatcaatcttcgggaaaacgctttgaaaaaggggcaaatcatgccaagtcacaaggagaaacaatattgatctctgaagtatagccttgaggaatgtttctacgaagcttcaaaactttccaggatacttcggatattgttgtgataaatggtacttcttcttcacgaagcatgaaaagaagggaaggtgttttttcgccaaagactcaaaaaaggtacgtatgtaaagtttcatgcatcgtaaagaattgaaccataaagaaaaataaaacaaatatattacatacaggattacaagatattacacatgttacatttaaaatgtttttacaatagcatctagtcttccctaagtaccacttctacggcttcgttcaacagtcgatcgacaacttcgtccataatatcttcggccatctttttaatttcgtcgtcccctttcggctgagggtccgaaggcgcttcagttggatctgaagcaggacacggctacattgctattacaaatcgcaaacagatcttaaagcctaaagattacaacacgataaaaactattatttagtacctaattgaccttcggcttctgcgctcttgtcagcagcctcagctacttctctagcatcgtgaatgcccttctcacttcttcgaataatctctccggccatttctcggccaccattatcccagatatcggtaaaaaactttccaccaattatgctagcttcggccgaaggatctcttgtatcttcaaaggacaaggcagcttcggactctgctaaaatttttacatgttcgcagcccttcttctctaagatggtggcaatccctctggcgccagagaaggcacatatatctcctcggctatttaaaatttcttcgaaggcttcagcttcgtggtcaatccattcaatgacaccttcgggattgcctctcgaaaagttttcctcacttgagaatgtgccgaccttggcgaagctagcctttaatttcttaacacaatctatagatttgttgtagcatctctttttggatgaacgaagctcttcaacagtcacttctaggtgatctgcccattgatcgctgagttcacgctttgtttcttcaagtatgcgttcttccttggctctggccagttgtttccgaaggtcttcaatttcgcgtttctgagcttcagcttgacttttaaaagtagcttcgtcttcctttattttatttatcaatgagtataatattttatctttttcaagaccttcgttcctcagttcaattacttcggaacgaaggttgctcagggctatagtacatccttcgtcctcagcatctttctgtgccctgagggcattgctaagtatcaagccctgcaaaaagaaatatgtgtgtgtcaataggttttgtcaaacgaaaaattttttggactcaacagaaaatacaaaaattttatttgtcgcacctttaagctattgtaagccaggctgtcggccagatcgttcttcgacagcaccgaaagtccgtcttctaaagttgggaatccgaagcttctgctcatctcccgacagacagaaatttccttgctgtcggggagacaatacaagaaatcttcttctccgctgccattaaatatcaacgccccctttggatatttcaacttttgggcatagtgctgggcctcttgttcttctttttctgataattttttccccgaagcatgacgaaaaatataatcacgaattttgggggatgcttcgggggtaacaacaccagtttcttcaacaaaagttggctttgttattttttctgcctcactttccaaggtttttgcctttgcgggctctgagggcccagcttcggcttcaatttcttgctctggagctgtagaaccagaaatttcagctgttgtttcaggagtaacagcagccttcttcggaggtgtgctcgaagatttgatcgtttccagtacatctagcacattagccattctctttctcttcggagttacggctggcactttttcattttttgctgtcccaatgattgctgtaggactcaaaacttctgatgttttggagccctcagttgcttcctttacctcttccattttttctgtgaatggcgcttcggccttctctttcgtttctggtaacaaaatctttgattgctccaattttgtcttcgttggcacttcggccgtttctgctacttctagcagcaaagttggctcggctggtttttcagcttcggtggccgaagaagtttctccggtaaattcaggcaccgaagctggttcaatatagtgcggccgatgcgtaagaacctttatcttcttccttttcggttctggctcgctaggagcagctgcagtttcttcttttgcagagcttgtgttttttctcttctgccttcgagtgggatagcaatagtcagggtagacgaacccgatggcatcaaatacccgattcagcctcttcttttttcggcctccgaaggctgctgacattgcagtatcttcggccttcgagtaggtcccaagcagctcatcacttaaattatcaatgcttttcaaccactcatcatctggctcaataaatttatctccaaatttaaaagtgtacttaaatctgataagtccaccttcgtcggcctctttaatggtttcttgtggcatttcccatttctccgcaagcggccacaccctgaaggcgatatgctcttgtactaagtcccttgttcctataaaagaacagacgacgccgaaggctctttggcattcttcggcggcttcattcatttcaaccttcggcctgcgaaggccgaagctttgccaaatagggcgcataattatgcctttgatgtcttctcgtgctttcagatcattttttacataaaaccattctgtcatccagccgctgggccatctcttccgaaaaagttggcacggggcagcttgacccagaccgagaaacaaaattgtagcagccaaagttattgtgatattgttccttaccccaaggtattgtctcgtatgataattcgtgcatattgcagaaactttttgcatcaggcttcagaccttggcttcgcacggcccacacgaagatgttcagccttatgattgcctcgggggtaagttggtgaaggtagacttcgaaaatcttcagcacctccacgatgaagctgctcaagggtaatcgcagcccagccttcaaaaagcttcggaacactacgacttcattctcttcggggtgtggacaagtcttctccccttcgtcggccctcacaacggacaaatcccggaaataccttcctctcatgttaacaagatgattttttttgatagttgatttaccataaactgaatggcttggtcgccaggggcgatcttcggagtcttcgccaccgctgtccacatcataactttcactgtcaccagtatcttcagacagcccttccagaatctccttggtgattttttctgtgttggtcttcaacatcgctataagaaaccctaagttcttctcttcatcaagactcagcttcatcttagcagcagccttcttagcagcttcagacatcttcggaaacactaaaaaactgttttcaaagccgaagcttcaaagcgaaaagcttagcaaatcacagtgcacaagagttaaaaattgagtgagcgggagtggttggccagagagcgtgcaaaatgagtttgcggtatggccgtatttatacgctcggtgcgttgaaagctgaaagaccccacttgtcattgaatgttgctattctagcaaagggaaggtgttttttcggaccttcggcgtaaagccttcgtccatatcgcaatctaaatttattatttcgaacaaattaatattgcgaggggctactgttggggaccttcggcgtccgaaggtcctcaaaaacaggatttaacagtattcctgcagtacaatgtgtaaacaggtaccctcggactaaagtcggcattgcagtagaccggaataatacgaaggttgacacagagccgaaggtgcgagcaagaaagcttcggcgcgacagcaaagagtggaaccgacttaaagatgaaaaggctattcagacctcaatagactactatagagttattatcaaatgtaaagggcatgaatgtaattttgtaagggctgtgtcccgtgtctataaataggtgaacagtatccccgtactgttcacgctgacttggcattcgctttttcgcgtcacgcttgtatcatcatctccttccgattgaaggtacacttgtaattcaacgatgttttcgtttatgctcgataataatatatgattgttcatgttatcttttacattctttatatttcaaccttcgtcattgttcgatgaatttatgaaggtatgtccttcacaaccttcgtccgcaagtcattacatcctaagggaaataatgcttcggaggacgaaggacattaacaattaacattttctatgttgccttgttcttaactcttagtacttgagaacaagtctccaacaaccatgcttttattgttctcctgctcttacctgacattgtgttacatagtaatacaaataactttcttttgaggcagtgtagccacagatgcctttatccccttccattccgatttttttgttgaattcaggttcttg

SEQ ID NO: 639 - DNA, 924 bp, Zea mays
  Intron number 5 from transcript GRMZM2G136185_T01 (locus G RMZM2G136185) derived from phytozome v7.0 (chr-ID 6; pos 1 35189637 to 135190560 reverse strand)
ttagactccttagtgtcgttctccattctactcctgtaagaatgcatatcaagtaacaaagttacttggttattctttatattttggtgtatggagtattagttttcttttcgaggatagaaaacatgggggctagaactgaacattgatggtaagtaccaagtatgtgaagaatgtagacctcctaattagtttctaatatatttatttgactttgggttgggtatggaaaatgggaagaatataaagctgattagtaacatctagctacttcaaatgatgagtttccctttgaaattctccattcttaacttgtttctcttatagattgcatgattatgtgttggttattagtagataaataaaaaacttagttttgacattttttgttcctttgatatctcaaatcggccaaacaaactagaagtgctggcaggaaaagattggtatgtttatgctaccatattaagacgtttttattttctaggttttctttgaacttgcatggtaccatctatttttcagattttggaatataattatcagtgaagattcgtgtagttctcttataatgctatataattaccacaatacagtgcactcagtttattatttcttgatgaaaagtgagtgatatagccactttatttggaggtttttacccaagatatcatgtacctgaaatactaagatagtatgaatcaatacatggatattgaaggctatactctaaaatgcagtctcactacataattgactcatgaaaaatctgttttcttattacatgattctgtttagtagaatctatggttttaaggtcgtagtagttttacgatcgtatacttgaagttctggtctgattcaggatcactattttaacaaccttgtgtggttaatttgcaggatcgtgataactattggaag

SEQ ID NO: 640 - DNA, 1085 bp, Zea mays
  Intron number 1 from transcript GRMZM2G474108_T01 (locus G RMZM2G474108) derived from phytozome v7.0 (chr-ID 6; pos 1 14092808 to 114093892)
cgtcctcagcgcgtcgtccccatctctggcttgaggtattcaaactttgcgacactacagagattaaagtggtagtatctctttccggaagcctgcatgtggtcaatcaagtcagttcttgcaaatcaaactttgcgacacttcacgcactcctcaagcttttctatgttgttgcaaatgaaaaccagcataagcaatcaaatgatatgttgcttctgttctgtgatttacaccattttaaatgaaacttctggacctgttgggttaattgctgcgaattccattagtatcctttgatttaccaccgtccaatctaccttcctaattttctgaatacattttccctgtgcaacttgatttattccttgactaactgtaaagatatgttgctaaaaataggtattctgcaatatttataaaagattatttctagctacataactttgttcatatctaacattgggatctctcacgttgtctgtttttttaatggatgttagtagctgatgacattctttacagggctaattctattttcctaatttctagtttgaccactgttttctctgagagggttttcttgaacggaatgaggttcaagcagactgctcccattcaaatagcgattggcatctcgccactggagatgtaatcaccagatcattgcataaatatgtgtggctggtacaagtttctaaagtcttgtttctggtgctgacaaattaatgaagtctttgctatttttctaaagacctgttcctagtgttgacagattatcctggtgccgacagattaataatagattaatgaagtcttgttattggattctgtttcaactttcattagtggaactagaataaaaggaggagcctttgctatttttctgattttagtgcattaacacaagttttttacagaatttattcagtggaagcaacacatatgatattctagttttttcagtggaagcaacacatatagtttttttctatgttattagcattgaactatataattgtgtaaccatataaattaaaatgtgtatcaattgatgttacttgcagtgtgttaagtggaagcaacac

SEQ ID NO: 641 - DNA, 23032 bp, Zea mays
  Intron number 1 from transcript GRMZM2G031802_T03 (locus G RMZM2G031802) derived from phytozome v7.0 (chr-ID 2; pos 1 22585881 to 122608912)
gctcctcaagatccataccatcaagtcctgcgcaggtacgcccttctcttcccctctccgccccactgggatcagggctaggattctaggaaccgaaactaattgcgctgccatttctccgtattttaacgactggttcttctgggaccgcaccggagatctcgatctcgaggggagcaggtagctgtagtgttgtacgcaatgcggcgttggcactgcgtgcctcccgctgatcccttctttccgcattgtgaacggccgctaggaatttattgtgtagaaacgagcaaatgtaatgagggaccttgcggctgctcttctcgaatttgaggaggctcatccgtataccctgcaacaatggttggcaaagtacatataattttcttctattgactacaaactttttatttatttttgtcggtgaataagcagataacattgctcctgagaagacccatcaaggaggaatatgttgacttgttgaggttgtcctggaatcggcagtgccatctaaaacgccgccaaatctcaccgggaggcataacgaacaacaaaatatagaggaaaacagataaaagagataatagatgtatttttaatcgattagatgttgggtaccttaatcagctgtattcctctggtacttagtaaccaggtttccggatcgatggcatcgagaaacgggaacatggtacatggtacgctactaaaactaagttttaacactacgggaacgagcttgttcccacgttcccggaaagaggaacgtgccaagttcccagttccctgttactaagctctggtatatatagagaggggtcgtcttatcccagtaaaaaaacaattctaaaacatgttttatatgttttcaatgtcaaaaaccaatatagaagttaatcgattcagaatctagcaaaagtcgcggtagtcaatgattaaagtcagctaggtcaggcacgtgggccggctactatagccggtatcacatgacaataggaagtttggcctagctagcttctatggccaacctagccgatgttgtcaacccggcctagtcagggtttgtgccatctttttctactttttgctagacaatttttatgttgggacatttttatgtgtcaaatatgccaaagctctaaatagtgacgatgttgaactcattggctatttagcatctaagggtaaagggtgatggtgatgcatacattgatcatatttgtgctaagggtgatacaaatacccgatattgttcaaataacactttagtcttcttgccaaacacttggaaattactttttttcttgagaggctagaaatcctgtccctaaaacatggtgggttgttgtatatatatgagagcatctccaacaatatgccctataaaagtgccctaaaattttaaaatagatatattttatagaatttagggcaccaacaaaaaaaatgaagctcctacagtaaagccccaaatcaagtgattaatcaaaatccgataatctactccgttcgtttggaaaggaaagttttgtgaagcgtcggtttgtttagatctagatatggggcaacctaataaggtgcagtatatttgtggcacttcaggaggtgacctatattttcgccaatattttgtaaattagggcacttttgtagcatttttttagcttgagccctataatttaatttggggcactgagataagtcacttttgatgctcttagagagggaaatgaatgtgctgggccaaggcccattactacaacaaacacatcataatccaaccgccacagtcgaaactctagccgtgacaaatgttgagactgaagcgaaactccgggaacagcgaggagggaagacccttggtgaagatgttggcaaactgcgagctcattgagacgtgatggacatggatgtcccgacaacaacacgctcacggacaaagtggaggtcaatgtcgacatgcttcgtgcactgatggtagatggggttgacaaagagttagatggcgcttacattgtcgtagtatactagggtactcttagcgagggagatgtgaagctcttagagaagctggtgtagccagctcgcctcagccaccccattagcaatagcctgatactcaatcttagcactggagcgtgagaccatagactgttgcatggaagaccaagagatcaggttggctccaagaaacatcgcataaccgaaggtcgatcgatgggtgtctaagcacccgacctagtcggcgttggtgtagacaatcaactcatgagtggaggaacatcgaaggtggaggccgtagtcgacagtgccccgaagataccgaaggatccgcttgaccgcacccaagtacggctcacgaagatcatgcacataaaggcaaacctagtgaacgacatatgcgatgttaggcctggtgaaggtgaggtactgaagagcattagtaaggctccgataggcggtggggtcaatgacaggagcgccatcgcaagagtgcttggcttgcatctcgaccggggtcacatagggcttgcagtccagcatcaacacacttgaggatgtctagggcgtactaccattactggaggaagaggccccagagcgagtctcaatggcaatccccaaaaagtgaagggggcccaaatccttcatgacagactcatgctgaagagcggtgatgactcggtacagtagaaccgaagaggtagtgagcacgatgtcatcaacatagaagagtgggtacacgatatcgctaccaccggtagatgaatagagatatgtccgacgtggcctcaacaaaaccaggagagagcaggtatgtggcgaagcagcagtaccagacgcgaggtgcttgcttcaagccatagatggacttgttgagcttgcataccatatcggggtgagcaggatcaacaaagctagtaggcttactatagtagacagtctcaatgatagtcccatgaacaaaagctatattgacatccagttgatgaaccgaccaagaatgggacaatgccaaaatgagcatggtacggacggtagcagacttcacgacgagacagaacgtatcatcgtagtcaacaccaaggcgtgtataccaccgaagaacccggtgggtcttgtaccgatctagagagccatctgcctttcgcttatgggtctagacccacttgtcagtcaccacgttgccgcctaggggtcgaggcactagctcctaggtgtgattggcaacgagggcttggtactcttcctccataacacaatgccaatggggatcggcaagggcgctatggacagaagactgcacaagagaggctgatggtgaggcgttcgtggagaggatgaggcgatcaacagggtgaagtaccccaacagactggcaagtcaccattgaatggatgtggcgagggttgcgatgaagaatgggatggggtgacacactgctggttcggggcgagagcagggcggtgtacccacccaagcaatacgttgataggcatgcataggttgggcgtagcgatgaggaacaggcataggcgcaggagccacaagaggcatcaagccaccagccgaaccaatgtaagagaacctgcatgtggaaaaacaaacggtggctgaccataatgcgccacggagtcaggatctgtcgccgcccgaaacccaccagcgagagacgacaggtgacacgaggagccgtgaggctcctaggactgctggtgggccctggtccctcggtcaatggcctagatcctggcgtacgatcgggcttcgaggttcgcctggcgtgccacctgacctatacctgatcaggaaggtgtcgaggtgcttcgagtggttctctgcatgcacaaacacacgtaaatgtcagtccgagccgtgttcggctccccaggtcatatcggccataaagagccgatcgttctccctaggattgcatcggtttcgtgccttggtggcgcgaagagccgatggcctctagaaatcccgctttatccgcaccgagcaggcttcgaaccactacggttaaagcttcaccatacgaccggaacgtcctacacatggctggccttaatgatcgtggcagacacccgaacgtcgtccggaacagaggcctaaaagccggcctgagccgactcccggaacaatccccactccgaaccaatgccaactgccccacacgtcatcggaacgtccatccaccatgcaaggcctaactgtatggatattgaacagatctttgacagaccaaagactaactgtgatagatcggatctaccaagtgggatcaaaacagggcactgccgtcgcgctcgagcaccttgcgcaaggggtggtacaatgctcgtaatctgcaggaaacatgcatacgtaacaactccgccgacgcataattctacgataactagtgcatctcgccataaaaaacgcttcagtacgagaaaacactaaattgaatgagtaataacagcaccgccctgatcgtaggacacaatcagggcggcgtggcacctacccgtatagaaccctcagaataggggtggcaatgcgccaaagcttgcggtcgcaattagtggagaaattacgatccctttcataagtgtctacagatacatatttatagtcccagggactctctctaaccctagtgtaacagtcggactctaatatccttccgctcctctgggccactcttcgtgacccatcctgtgttgtggtccatctcaggccctgctaaaatatggcgataacacatgccccctggtcttggcaatgatcatttcaaaaccaccattttcttcccgttttatttttggtcgtcccgtgttccttctcttgttcggtcgtgtgccgcgttttttaacgtgacaagacgtgtctgttcgcgtccttggaaactggcactgtgccgtctcttacccttccccagcctttcctttggggtaaaattcttcccatttcggtctcggggactgacatgtaggcctggtaggcgccctggcccacgtgcagtggccatgctcctggtagccgattgcaatggaatcggccccttagccttgttccgatgactagggtcctccgttctttcttcctccacgatccttgcttcgcaacacatcgtgctactttcgcccgcaatggcacctacctcttcctcttcctcctcatttccttacttcgagcatgacaccgatcgggagccaactccagtgtgggaccgcattgctgcttatgaggaggctcctccgcattgggatgcagaggagtgggacttcgcggtggagtctgaggatgacctctccctcaccgatggcgaggacctcgagctcctccttggcgaggactgggaggacatcgaggatgaccttttccctgggatggagccgatgagtcgtcggagagtgaggagggcggcatgtcttttgaggaggagtaagaaccacccctccacgttcgcttctccgacgacgacgacgacaacgatgacaatgtcggccacgggtctagcgacaccaacagctccagcggcgacgtcgacgacgaggagagcgatgataccggcggcagcggcgatgatcccgaagccgatgtgtctcctcccccgaatcgccacaaggtcgtgtagttagtaggatttcccttcggtagtagtagcatttctggaacaatggttcttttggtggtgttcgtccgtcctggccgataaatcgatcgtgtaaagaacaatcgtacttttaacctatttaattactatttgcttagctaatctccgttcgtgtgtgtgccctttttggattttgagagccgacggcagcacatcggcttctcccccctccgtcgccggtaggtatacaaacatgatagttcttgagaaggatggctcagaagagtggctcagacctatcaatctcaatggcaagccactggcatagccgatgcgctctctctgtcgctatcccctcttgagaaggatgaaaaccttcttaaaaccattggctacttctggtctgatgctataaactgcttccttttcggtcatgggcccatgactcctacccttatggatgtagtaatgatcaccggtctagatatcgagtttgctagccctttagccttcagcatgcttgaagttcgtttcaaactctcatccaagggagcttacatgtcctagcatgccaaaacaaggtctagtaactaaaaaagagcatacaacttttcttaatctttggcttgagcgctttatgttctgtggcccttcccttgctcccactaagaattatatttccctggctcatcgactagccggaggtagccctgttggtcttggaaaactgttcttgggagaggtttaccgattcctacacttgaccatctcgaaccttctcagtggcaagaaacttaggactgatggcccatggtggttcattcagctgtgggctcatttgtattttcaacggtgtatccccaacttcccagtcctggccagcaattccttccccgatgaatctggtaggcaaatcaggtgtaccagttatggtcaggctttatacagtcttcctggcagcaaactgaatcctagggatgcatctggctggttcaaacttttcttctagggtctggacaaccctcttttctttccttactctgactctattgagtttgagaacccgacctcttttaggttgtggatagttctaccgattacagtgacactcaacacctatactcactcatgacccaacctggtttcctcccagttggcatgagtacttctaacaggatcatcaagcctggttatgaatcttaccagcccgtgacagttgcccagcaatttggcctcggactagttcctcctcactttcaccttcaccaacttacagaatgcagagctgatctccccgactccattactgttcaatggtgctactcactgtttgacgacctgaagatcctcatcctagccgacttgtgcttcaccttctcaactgacggattcagctcatggtgggggatggggaagtcccatgccttccagagggctttggggccaccgctgcagcagattgataccgaatacgaggtccttgacggggaggtattgctcctgatcctctcatgatctgtatccttcattgttgactccacttgctcttctttgcagcaacgggaagaacaagagcctttatacgatgatggcatcccctccggctccttgaggttacccccatggccttcttccgcaagaatgctcctcccatgaagaaacttagggtgcatttggttgtaatgacagaacgggatgagataggacgatcccttaaataagcttgtttggtttagggctaggggttggaacaggactatcccagtgttgttccagttgtccctcaaaattggagggatgagagagaacgccaggggatgtccctgtcttgcctgtccccagctgtcccgcaaccaaacgcatccttatactgcagcaccggcctgattctccacaaccgattgcaaagagaagtcggcattagaaactgctgccccccgggcccaaacaaaagtaaggagagtggttgccaagagaacacttagagaggcacgatcatcatcttcagttcgtgaagccttgaccacttctcgggtacgtttaactgcttgcatcttatttttgatgttcacgcattactattggtcatgcttcattcactctttaggccgctgtcgtcgaagcatctagcggagaggagcaagtgccccgaggctgctcacccttgggcaccattgatgtcctgaccgagaccgttggtactctggtcgttcttcaggatcttcatgagccggtcaaccccatgttagatgttgacccttgcctcgggacgggtatgcaacgttcttttaattcatctgtacccttccttcatcctgacgtcgtcttctgcctttgtttcttcagggctttgacctttcagagttattatcatttgatcctgccctggtgggttcacccatcctcaatactgctgattaaccgtcagggtcgactactgtccttggctagctccaacgtatcagagccttactctcagctcccattgacgcactagtccaagattccgaagaagtaaagtgcatctttgaggaatcaagcctcaacttccagagacgctccatatcagactttggccagctggacaccttccttttttcgtgcgaaggtggaagcggcttgccggaggatcaagtcttggcgttctcaggctcctctgaaggctgatattgcctgacggtgcatgttgctcaacgagcagaaagcaattttggatgtcaagtctgacacttttgctaatgttgccaagctcaagctcttggaaaaggaaattggaggaccttgagaaatgcgtccgagtcaccggttagctcatttaggataagaaagtttcaatagctaactcacaacaggaggctgaagccctgaccactcggctgagactgaagttcgccgatctgagtacattgagtcggcagatagtggcaggtgaggacagggacgacgataccgtcattgctgaggttgaccgtgttcgtgtcgaagccatccgcgctgttgatgatttcctccgttgaactgtcgtggcagcccatcgagtcgttgctagcagactattttatgaatttctgactcacatcgtcggcctgttggcctctcactgttcatcgtcccatatgcttgggaaatacttcttcaagtgttggccgttaaccgccaccgggaacttagtcccgtttaattcttcgagtatgtatgcgttcctaggtaggacctgatcgactttgtagggtccatgccagttcggagaccatttgtcgtatgccgcatcttttgttccgagtggcagcactggttcccataccagatctccggcctgattttctttcggcctgacctttttgttgtacgcccgggccaccttagctttgttgtctctaatcttttccaacgaccaaagccctagttccgtgagatcctcgacattatcgttcatcagagcagcgtactcttcagccgtcaggtcattctggaattccacacatcttgagccggctgcaatttcccacggcagcacaatctcctacccgtataccaaatgatagggcgaagtcctagtggatccgtgacaagagatccggtaggcccacaatgcttctgatagtactttgtgccaacacctgggatgctcgtcaacctttctcttgattaacttgataaggctttggttgcatgccttgacttgccgtttgcttgagcatagtacagggatgatcttatcagcttgattcccatattatctgtgaactttctgaattcttctgaaacaaaaaccgatcctccatcggttgttatggtctgaggcaccccaaacctgtgaatgacatgctccctgacgaagctgatcacgtcttttgtcgttactgacttcatggggacgagctccacccactttgtgaaatagtctgtgatagctaaaatccactgatggcctttactgtacgaggggttgattttccctatcatgtccatcccccaacccctaaatggctatggtttcacaatggggttcaattctgatgccgacaccatctgtattttcccaaacccttgacatgcctgacatcctttgtagtatttgaagcaatcttccaacatggaagggcagtagtatcccgaccacctgatcaaccatttcatcttgtgagttgattgatgagttccgcaagccccctcatgaacatcatgtaaaagctgatttgctgcaggcggccccaggcatttgagtagtaaaccttccatggtcctgtagagcatgtcatctcctatcaagacatactttgaggctttgtaacatatccttctgggtgccccccgagccgaatccttcaaataattgatgatatcggctctccaatctcctgcctcaagcaagcacacttgggaatcatcgtcgtccgagcatgctttgtatcctaaggccatttgtgttagatcattggcttcagtgttctgagtcttgcggatctagtggaacttgatatacttgaattgtgtcatcaactcactgcattccatccgtatccagcatcctcctgctgaggtcgaaaacgaccctctcctggctgtcatgtatttgtactagtactgaggcaatggaggtgtctcccactgataggtatacataaaacggctcgcttggccgtggtgggaccaacaccgacggttttggtaggtactccttaatcccttcaaatgccttctgttggtcccgcccccaattgaaatcgtcgtcattcttgattttaaccaggctcataaactgttcaatccgtccggttaggttcaaaataaacctcctgatgaaattaattttgtcgatgaattgatgtagttccttcttcgtggtcggcggtaccattgttctgatggcttcttgacttttcaggctgatttttatccctcgttcatgcactaaaaacccgaggaactgaccgaccgtcaccccgagggtacatttcttcgggttcatcttcagccgcccaaacctcctggtttgttccagaacttggcgcgagtcatatatatgcccctcggtggatgcagatttgaccacgacattgtcgatgtaaatctccaccagcttccctatcaggtcgtggaaaatgtagttcatggcacgctgatatgtagctccaacattcttcaatccaaaagtcatggccatgtactcgaacaatcctaccgagccgggcaccctgaatgcagtcttgtgcacgtcttctgggtccatgaaaatttggttgtatccggcgtttccatccatgaaccttagaatcttgtggccaacagttgcgttgatcaaaacctccgcgattggcatagggtcctgaaatccacatacacccgccatcgaccatctttcttttgaacaggcactatactggaaatccattcagcatagcggcatggcctgatgaactctgctccaacatcttctctacctctttcttgacttcgtgcaatacttcgtctttcatcaactgcgctcgttgctgaaaaggccgaaaccccttctttagcggagccgatgttcaacaatgcttctatcaagccctggcatttccgtgtaatcccaagcaaagcaatccgaatattcccttagcaagctcatcatcggctctcgtaacctcgggtctaacctcttgctgatgaatgtacgccgcggcttatccccgggctcgatatcgacctcttctagctcgtcagctgaggtaaacccatatcccagcgtcagcctgcaaatcgacggaacatacaggcaaagaataggactgaaaaaatttgggcctatcgcagggatcagccgcctcattattctcattaatacttaaatacgtacatcgagttcgtgaccggttgctagagcgggtctttacatcatttgctatcttacttttacaatttatttttttcgggccgatcactgggatcggcctttacgggcacgcatgtcgctcctactctttaaggccggtggataagaccagcctcaacccgttttttgatgcctctacacggtcgcagccttccaagtcgattcttgatatcggctcctgttcgtttgcgtcccacgcgttcatatcggcgagtgaaatttcccacgaatcatccgcagggaccacttccaccttgtctccgtcccactggatcaggcattgatgcatttttgatggaatgcaacagttggcatggatccaatctcttcctagcaagacgctgtacgctatgtggctgttggtaacaaagaatgatgtggggatggtcttatgcccaactgttaactacacattgagcacccccttcgccaccgttggttggtcattgaagtcattcaatgtcatgttggtgttgatcaagtcttcagtggatcgccctagacggcgcaacacagcgtatgaaatgacgttcactactgctctggtgtccaccatcatcctgttgaggggtttaccattgatataacctttgagatacaatgccttcagatgcttgtaccctttttctggcggcttctcgaatacgactggttgcgggccgagatccatttgcgctacagatgattcttcaggttttggtgcatgaaactctggggagtacaaacaccatattcacatcagccgattctcttgattctcccaaggggcttggtgagcaggtccgcaagttgatctttgttattgatgtagcgcgccttgatgctcccttctgccaaatagtctgtaagcaacgagactcttactctcatcgagaggatgacactataagttggggcgattttctgtttattttctcaaacactacataatgacatacccatctaagggtcggggacacatatttatagccctagggactgcactacacactacacagtgaacacgctgcactacacactactttgcagtattagaaatgctgctgtccctgctgtcctctagatcctaaaagagggcagtcaaaaagctcctactgtcctctaggtactaaaggagatgctgctgtcctgcagcatgctgtccttcacaagaccatgcactgtcttctagtctaaagaactgcagcaaagcactattgtcctctacccaacctgctgtccttaaagcagtcaaaaactgcagtaaagaccaacaacaacagcagatgctgctgtccttcgctgtccttaaagcagtcaagaactgtagtaaagaccacgagacttattccaacaattctccccctaagtcttgtgcatcgtcttgttggacagttgggccatcccggacctggagcaaagcttaagaaacttgatcctctcaaggggcttggtgagcaggtccgcaagctgatccttggtgttgatgtaccacgccttaatgctcccttctgccaaccagtcacggataaagtggtacctcaccccgatgtgcttgctctgttcatggaacacgaggttcttggccaacgccaaagcagactggctgtccaccctgagttccaccgctgcagtgtctctcccgaggatatcaccgagcagtcgaagcggtggaggcttctatgtactcagcctcgcagctggacatggccaccacctattgcttgaccgactgccagctgatggggcacttgccgaggaagaagaggatcctgcttgtgcttttgctggtgtcgatgtcgccgtcgtggtcgttgtcgctgtacccaacaaggtgtgcctcctcagggcacctcgggtaggagagaccgtggtcgagagtccccgcaacgtagcggacgatcctcttcacagtctactcgtgctccgtcgtcgatcgctgcatgaacagactaacgtagccgacgggagtatgccagatccggtcgtgtgtgcaccactacacagtgaacacgctgcactacacactactttgcagtattggaaatgctgctgtccctgctgtcctctagatcctaaaggaggacagtcaaaaagctcctactgtcctctaggtactaaaggagatgctgctgtcctgcaacatgctgtccttcacaagaccatgcactgtcttctagtctaaagaactgcaacaaagcactattgtcctctacccaacctgttgtccttaaagcagtcaaaaactgcagtaaagaccaacaacaacagcagatgctgctgtccttcgctgtccttaaagcagtcaagaactgcagtaaagaccacgagacttattccaacaattctccccctaagtcttgtgcatcgtcttgttggacagttgggccatcccggacctggagcaaagcttaagaaacttgatcctcccaaggggcttggtgagcaggtccgcaagctgatccttggtgttgatgtaccacgccttaatgctcccttctgccaaccagtcacggataaagtggtacctcaccccgatgtgcttgctctgttcatggaacacgaggttcttggccaacgccagagcagactagctgtccaccctgagttccaccgctgcagtgtctctcccgaggatatcaccgagcagtcgaagcggtgaaggctactatgtacttagcctcgcagctggacatggccgccacctattgcttgaccgactgccagctgatggggcacttgccaaggaagaagaggatcctgcttgtgcttttgctggtatcgatgtctccgtcgtggtcgttgtcgctgtacccaacaaggtgtgcctcctcagggcacctcgggtaggagagaccgtggtcgagagtccccgcaacgtagcggacgatcctcttcacagtctactcgtgctccgtcgtcggtcgctgctggaacagactaacgtagccgacggagtatgccagatccggtcgtgtgtggacgaggtagcgaaggctccccacaatacgccggtattgagtagcgtccacctcctccgtcgtgctatcacgactcagcttcagcctctcctccatcggagtgagagctgggttgcaagtagtgagcccaaccaactcaacaatgtacttggcataggcggtctgacgaagtgtgatcctagagtcactctagtgcacctcaatccccaggtagaaggagagatgtcctaggtcgctcatctggaaggtgaccttcatctcttctttaaacgccgccacctctgcatccttggcgctggtgatcaccaaatcatcgacgtagacaggaccagcaggacattttctctattgccctgccgatagatggccgcctcgtgcgggcttggcatgaagcccatcctcttgagcgtggaatccagcttggcattccacgccctcggtgcctgtcgcaagccgtagagggccttgcgcaggcgcatcaccttgccctccttgccagggatcgcaaaacctggcggctggtgtacgtagacctcctcctttaagtcgctgttaagaaacgccgtcttgacatcgatgtgatgaacgtgccagccctcctgggttgacagcgcaaggaggagtcgcacggattccatccgtgccacggggcaaaagcatcgtcgaagtcgatcccctcctgctgtaagaaactacgtgccaccaagcgaggcttgtgcttgacgatggcgctggcttcatccctcttcagtttgaacacccacttaagggtgatcgcgcgatgtccatgagggagatcaacgagctccacgagctagcgtcggagaggacgttcccggagagggtaccgtcggtgctggagtatgtggtgatggagagctcgctggagccggagtcatggctggattgcgtggtggtgaagagctcattgtagccggagctggagagcgtggcgctggagtcggtggagacttggggactggggtaggcctactcggtgaagggtcgtctactcccccggctccctcaaagtggacggagttgatggtgaagtcgttgtacgtcggagtcgtgccgtcgtccaccaccttgtcccaggcccatcctcgcccttcgtcaaacactacgtcgcgcgctgtgcgcacacgcagtgttcttggatcaaggatgcggtaggccttcgagcccttcgcgtagccaatgaacacccctggggtgctcctgtcgtcgagcttgccgatgtggccaagctccttggtgaacgcgaggcagccgaatacccgtaggtgagagaccgccggcttgcgcccatgccaagcctcatacgatgtcatcccgttgagtgccttggtgggcgagcggttgaggatgtagaccgctgtcaccaccgcttctccccagaagacagccggcattcccctctgcttgaggagagcccgagccatccccacaaccgtctggttgcgccgctcgacgacgtcgttctgctgcgggctgtacggcacagagtagtggcgttgaacgccctcatccgcgcagtacgacgcgaactcagctgctatgaattcaccgccgttgtcggtgcgcagcacgcgcagcttgcggccacactccgcctccgcagtgacctgcacacgtttgatggcgttcgcagcctctcccttgctgacatggaccatcacccacatgtagcgggagaggtcgtcgatgagcagcaagaagtagcgtcgtcctcctggtgtggctggtgtcatcgggccacacaagtccccatgcatgagctcgagcctatccttgactcggaagctcgactgctggggaaaggggagccgtctctgctttgtcaacacgcagacatcgcagaattgctccacatggtcaaggcacgacaggcctcataccatctccttggcactgcgccgcttcaaggcctcgaagttaagatgcctgaagcgctcgtgccactgccatgccccatcgtctcgacgagcagcaaggttgtgccaccttcacgttgaggatgtaaagccgatttagactcctgcataccttggcaagaaggcgacgagaggggtcctagatcctcatgactccttgttcggcctctacacgcgaaccattctcatccagttgtcccaagcctgtgctcactagacgtggcagtaaatacgactgagccggtgcccttgatctctacgccggaggcgtccccaaacttgacggagcctcggacgctagagtcgagctcggtgaagaactcccgtcggccgataatgtgatgagtggcgctggtgtcgaggcaccatccttcgatcatgtcattgctggagccgtcgacgaggaaagtgcatgctttcgactcatcaaggtggggtgccgctgcggccggtgtcgctggaggcagctcaatgcttgcgtgtgctaggagcagagcttcctcctccgcctccgcctgtgcgacgttggcctggccgcgtcgtggttgtcgacattccctggaccagtggccaagcttgccacagttgtgacagccgtcatctcgtgccggcttcttgttgtcgacggcgccaccttgggcgcctccgtgggcaccaccctcagcttgtcctcaagccccggcctaggcgcctccgcgcgccttgcgtggcttgccgcgtttgcggccccatgtcgaggaggaccccccttgttgtcaccctgacaggcctcccactgctcccgagtgagatgtagcttcccaccgatggtgataggcccagagagggcctgtggttcgtcgccgtcgacaaccttgagacgaccaatcgcttcttcgatcgtcatcgtggagaggtctagcagagactcgattgagcgagcaatctgcttgtacttctcggggatgcaatggaagagcttctcgacggctctctcttcatcgtaggtgtcgtcaccgaactgcaccatcttctggaacagagtgttaaggcgaagagcaaagtcatcaacatcctcacctggcttaaaggccaggttctcccactccttgcgaagtgcctgcagtgtggtcttgcgggcacggtcgctgccgatgcgggccgcagcgatggcgtaccaagcttccttggcagtccgcttctgggaaagtgaaaattgtatctcgggcgggactgcagcaatgagggcatctagcgcccgacgatcctcgtagtagtcgacgtcgacgtaccgaactgctaaccacatgcggcgaacctggagctgtaccctcatcaccgcggcccactcgacatagttggtcttggtgagggtagggcacccacccctgggaccgatgtccctaacaacgacctggaccccacggtgaccatggtatcgatccggggagggagagccacgccgcctgtagaggcagcgatctccgtcgacccggccgccgccatcgggtgcaccattggcgcatccgcgcccatctaggctgccgccgcgtgcgttcttgctcggagcgccgtcagcgcgtctgcgcctatctaggctaccgccgcacgcgcccccatgggggtgcgcggctgcccattagccgcctgctcttgcgttgcctcccttgctagcctaagctcgtcgttggtgctgccgtcgccggaaacagagctgccggcgctactgtcgcgcagagcctcgagctctaccggcgccgcacgggcagcatctgccacctccactgcttctacttccgctctcactgctgccagttccgccgccgccagtcgtgctgccctcgccgctgtcgctgcagccaccgctgctgctcgctcatgttcttgtgccacggcgacctcggcctcctgctagcgccacacactctaagtgaccgagcgtagggacatggtgtgctagtgaggggtcgctgcgtgtggaagaggctgtctcagacgaaaggctgctcgtccgagcaggagaggaaggaacaactggagctcttgctgccgactgagtatatggagaggcgtgggaaggagatgagcaggagatgtttaggctgcaggataatctgctttgataccaattgtaaataatgggactcttactctcatcgagaggatgacactacgagttgggcaattttcgttttatttctcacacactactaaaatgccatacccttagaagggttgaggactcatatttatagccctaggggctgcactacatactacactatacactgcagcacaaaggcgttgtccctgtcctctagatgctactgtcctacaacagtcaacagagatgttgtgcggactgtcctccacaccacaaaacagagatgttgtcctccacacgaagaccacatgacttattccatcacattccaccatattgacgactaggaacggttggctgtcgaccttcatggtgaactgccccaggattagccgaccctgctcaatggccgactggatctgtcggcgaagctctttgcaatcattggttgtgtgcgtgaacgagttatggcacttgcaatatggtcttcccagttgctcctgcgctgtgggaaacttgtggccttcggacagcttcaattgcttttctttgagtaacaggtcaaatacctgctcagccttgttcacatcataatcgaaccctttgtaggcccttgctgcttcacccacttgcaagatacgaggtttgccccctgagcccattctgctatcgcaacgtcttgttcttctgcactaccctcatcttcttcagcaacaaccatacccacgtggcgcttgaacttgtcctgtaacttttcttgatacaactttggataatattgctcatacgtcgtcagcctctgtgccaagtgagccagggagctgaattcaagctggaaagtcaatccttgattggctttgcaaggccgagagttgctagctcgacagcctccttttctatgattcgggacgagttgcaccggttcttaactgcccggaaccgttggacgaactccatgacagtctccctgcgcttctgcctgatctatgccagatcggcaatcccgacttcaacagcttcgggatgatactaagtgtggaactgatcttgcagctgcttccacgtcctaatcgagtccacgcctagcgaggtataccacgcgaaggccggccctgtgagggactgtgaaaagaatctcacccgcaacaggtccgataccgagactgtctcgagttgtgtcaagtatcatcttatatgctcaatagagctagctccctccgatccactgaacttggtaaactcagggagccgatactttggtggcagtgggatcaagtcatactcactggggtatggtttggtgtagctaactgccctttgcctcgggatcatgccaaactgttctcttagaattatgatgatctgatccacagtagcgattcttgggactgaattctcatgattcagcctggtagcatactggtccaaccatgcctgcttctcggcgtccgccccagcaactaccgctatgccagaccgtattgggtgtgctgtgctggcacggtccggcacatacatgcatgaatactcgtgtggaatgtggttaggtggctcattgaagaactgacaatcttccggacctccacccgtcttgtacacaacatacgccggtgaagtggccgactgtgcttctgggtagcaactgaatacgacagaggtggtttggtccggaaaggaatttcccctttgtggcttcccaggactgggcctgtcagagaatactgatgcttcatgatctcttgcacaatgcgaatggccacacattcgaatgtattcattaggcttttagagtggcgatggagcgagtgagccaccatatagttgacttcttgacgtaaggccctgatgcgctcttccaagggcaatgagaggtcaaccccgttgagagcaccttcgtgcgagaaccccttccaccggatgtcatgcctgcgggtcctctcgaaagaatcgatgaggtcggcttcaaaaagagctttgatctgatcatacttcgcttggtgttctggaggcagctcttcatatgtgatgggccggtcttgccctagtctagccatgttcgcctaattgtttgtcacttgagcagctgatttcgcagatgttgacattgtcggtcccactgggcgtgccataatgtctcgtcgtccgaaacccaccgacgagagacggcaggcgacacgaggagccgtgaggctcccagcactactagtgggccctggtccctcggtcaacgacccagatcctggcgtacggccgggcttcgaggtttgcctggcgtgccacctaacctatacctgatcaggaaggtgtcgaggtgctccgagtggttctctgcatgcacaaaacacacataaatgtcagtccgagccgtgttcggctccccaggtcatataggccataaagaggcgatcgttctccctgggctcgcatcggattcacgccttggtggtgcaaagagtcgatggcctttggaaatcccgctttatccgcaccgagcaggcttcgaaccactacggttaaagcttcaccatacgaccggaacgtcctgcacgtggctgggcctaatgatcgtcacccgtacgccgtctggaacagaggcctaaaagctgacctgagccgactcccggaacaatccccactccgaactaacgccagctgcccaacagtcaccagaacgtccatccaccatgcaaggcctagccgtatggatattgaacagatctttgacagaccaaagactaaccgtgatggatcggatctaccaagtgggatcaaaacggggcactgccgtcgcgctcgagaaccttgcacaaggggtggtacagtgctcttaatcggcaggcaacatgcatacgtaacaactccgctgccgcataattctagattctacgataactagtgcatctcgccataaaaatgctttagtacgagaaaacactaaaactgaatgagtaagaatagcaccaccctgatcgtaggacacgattagggcggcgtggcacttacccgtagagaaccctgagaacaggggtggcgatgcgccaaagcttgcggtcgcaattagtggagaacttacgatccctttcataagtgtctacatatacatatttatagtcccagggactctctctaaccctagtgtaacagtcggactctatcctcctattcttaagctaacctatcatcacacaatttgtggatgcttatcttggaatgtccctgcgcgaggcatatccttccgctcctctgggccgctcttcgcggcccatcctgtgttgtggcccgtcttaggccctgctaaaatacgacgataacaggattatggagaaaatccaactttggaagagaggcaatgggtggctaagaggtagtcgagaatggaaaatccgtctcgccgaaggtgacgtgatatgtatataacactattaggctgaaactatttgtggattgtgacacaaccatcaaacttaatagagaaactcatccattttctggccctcaatcctcatagttataggttgtggtgtactcttgaaactttttagcttcaaaattcaaatgatcaacatgtgtggctatttaatagcaatggtctgtacacctgcctacagagcttttttcattggagcggaatcctttgagccctggaaaagaatttggaagagctgggcagcccctaagtgcaaggtctttgtttggctggccataaacaacaaatgttggacagccgacacactaaaaaaagggggcttgatcatcctgaaaattgtgttctatgtgatcaagaagacgaaactgtgcatcatatcctatccaattgcgtcttcacaaggcaattttggcacaatattttaactccaattggtctctcttctgtgagtcctaagagaagagattcagattttgctgaatggtggagaaaggcttcaactaggattcctaaaagcaaaagaaaggggtttaatagtatggtaatccttagggcttggagtatttggaaacaaagaaataggtgtgtttttgatggagttcgaccctgcctttctaccttagaggacggattcaaagatgagatgagactgtggttttctgctggagccaggaacaagcgcttcttttttgaccctggctagagaaaggaaagtcttgtagcctcttggaagactggggtggtggtgtgtcgtgtaccggtatgcgtctgtgttgtgtgtgtgtgtctgttttgtgtgagtctggtgtgtttttttgtgttgtgttgtgttctgtttgtcccaggcgtcaggcctttttccctctactttaatataatgatacgcagccctcctgcgtattcgagaaaaaaaatgccgatgctcgtgtgaccagagttttaaccttattaggatcatttgttagatttattaatggcttaaataatgcctaacccacttgttatatttattcggttattctagtaattattgcctaacagcatgttaatgtttagcaagcttctattgttatatggtttgatgggtctctgattcacatggcactttcttgtaggcatatctctgaagacacaggagctgt

SEQ ID NO: 642 - DNA, 1621 bp, Zea mays
  Intron number 5 from transcript GRMZM2G092256_T01 (locus G RMZM2G092256) derived from phytozome v7.0 (chr-ID 9; pos 8 3247325 to 83248945)
gactaccttttaggaaggaattgttgacaccgtaagtgtatacagttcatactttgttgttttgatgatttttgaagctcattgagctcaatgtaactatgcaattgtgaaaagagtaagtaaatgcgagattgcagcatcctaggaacaataactgtgcagttctaggttgttttaactgtccaaatatggagtaaatgtgacatatgggaatcctgctatgactgaagttacagtcaagatttaattgctaaactttatattgagttattttaatgaaactgtaggtattattccagaaccataaaaaaactgcatgtccaagttaagttttgcagatccctaaaaaaattaagtttcgtagatattctggttaactcagtctatgtgacctcgcaccctccccagacccaccaaaaaaaatctaacccattgaatcttgttaaaggctgtgtgtaatctctagtaggtgttgaagtgtataaatggattgactaccttctcccatcaagttaagattttgtgttgaactggttagtgcgtccactttaatatgatatcaaggctagaggtgtcgagttcaaatcctgacagtggttttatttatgcctccacccatttatttccacgtttgcgcctttctctctgactgcacgcgagtgagggtgttgaaatgtataagtggattgattaccttctaccatcagcttaaacttttaggttgaactagttagcgtgtccactctaacagtaggtaccatgtcccaatgtattgacaagtgagcttcagtctctcccacacggccacaccactcaaccttggcatcactcacttcttcctgccctttccttctgcagcagttgcaagtcatggcgataggtagtggaaacctagatgactatagttgtttctttgtgagagtgctggtgtcatatagggtcgcacccacagctgcagaacaagaaggcagcataattaggttgattactgattgattgaggaaaggaaggtgataggtttagtcaattaattagttagattgggagaaaagttagaagaactggttggcttgttgcatatgtaattccgacgttgtatgctgaaaatctagcattgaaacaatcttcctcctatcctctctctacttctcacggccaacatagatcaggagtgacgaggcaaggagccgtgacaaccggctgatcaccactaccacctaagaagccttggccctccaccaccaattcctccaccagggcataacagctggattagaggggggaggttgtacttgtgatgaattcaacaaatgttttttttttgcaaatgtcaacaaatcagagaactattattttttgtatttgtctgttagtgttttaaaaatttctgacaaaatttcagtaaatatttacttgatttaacgatatagggtggcaagtgaataggtttttgttcatcatgtgaactaaaagcaagagctactacaactcaatatccaacaattaaaatggaaacctcctacatgtgttagatggtttagatgcatagttctactcaaagcgtacttatcatttatcaaacacaaatcaagtttaatgtttcaattgtgcactcaggtgg

SEQ ID NO: 643 - DNA, 4789 bp, Zea mays
  Intron number 1 from transcript GRMZM2G081053_T01 (locus G RMZM2G081053) derived from phytozome v7.0 (chr-ID 2; pos 3 4571013 to 34575801 reverse strand)
gcaacggggacgtcgcgctcgtccgcgccttgctcgtgagtgatccaccccgcccctactcccccgcgcgcataccgcattccctccctgctctgttttctcgcgtcggaattgactgactatccgcatcacgattcacgcttgtttatgtttttttccccactttgtatacgttcgggcattgcgttctgggtcctgctcctgcacaattagtggtttgctacgcaagttgcattttcgagctgttcgtgcgtaggcccttcactgatttttttggggcgatttttggtgccaatctgcgttcaaatttgccgaccagagcatatggtttgttgcagcgttgtaggctagcctttttaccaagaggatgaagtctttccaaatatcactcgctaaattaaagtttgaagaattatttgtacaaaaaactatttttctatattttttcgttctctactagtttccctgaaccataaaccctatttttttacgaactctaaggaatagctactaaaaaaaattagataaaaggcaactatatttagataactcttttaaagaaattgctgtaacatttttttataaattctctatttttattacaaataattagaaagaatatatagtcaagaataatatagagagtctgctggagcaggcgtgaaaagcgctacgcacgcctttttcgaatggttttagcgggcgctgtgtttgtaccactcccgcaaaatcctacatcttcacttcacctcgtctccgcttgctagaaaaaggctggtgtttatccacactgtcgatccaagtaccggccaccaacacgggtcgttctttacgccaatcataactctacgtactgtgtaaatgcacgcgcaaagacaaacccccatttttgttaaatgcctacatcaatacaagttggaacgcaagagattttaccggacccactcgttttgccctttgtgtatgtatagctcggaattatgactccggatttgtaggcagatatatgcaaagtagaatacacgatacatacttgtactctagtcccatctcgattgcttggtcctttgcatactagtatactagcgctggcagtatacggtaggattcagctgttgttgccaactgaagataagagagatggaacataaatcttattaataaaagggctagctcattatgggacatcttgcaaatggctgcgaccaaattatgcggttcattacggctagcctaaataaatcatttggaacctttatttggttctataccaactaaagtttagttagcagtgtgatgtttgtttccttagatactaatagattagctattacaagtaaaaaaaacatgaatatctttttatttgagtataattttttatagctatacgggtcaaccattcataactagtcatcattaactaaggttaaatagataataaaatcttggtgaaactcaaccgggtcttaatgactatgtttatttagcccagtgacagcggcacgggactaccatgctggcctacggtcctgtaccaattctcatggcttcccctgcaatgcaaatgcagtggtccatacttttgcttgagttctttattgggcacggacatgctcgttctgttccatagccaagtagaaatcgtcaaatggggcatgcaacaaagcagtctgacagtctctacgcaggggaaagggagcttcgctggaacaacttcgatatccttggaatacgtgtagtgtaggcattggccgtagtcgtttgtaaattgtatgtatgtactggtatggtattgtactgcttctactgtacagtagtggcagtatagttcttaattcgactaccagttaaaagaaggagcagtagctgaatgactgaacccacgggatccatcggtccaagtattaaaaatatatccctgccgtgctctacagacccaccgtgttgtcccgtcaagaaactgggcaggcctggagatccataactgtaaactgcaggcgagtaaacaaaaataagattaatcttcgagagtattttagtgtgaggactgaggattgggaggcaggggtagatgggtttgacctgagcccggtcgggaggcgagccctgtgttttgttaacctgacaacactaacataatcagtaaggagtagaaagcaaactgggctagtgtttgttaaccaagtacaacagctcagcactttgggtagagaccaatatattctcctcgtgagcgcggtcgggtgtgggatgaccggtcacgtgcctccccctcccggcgccggccggtctccgctgtggcgctgtccagctccagcctctggccaccacgttccacgcctccttcgtgtgcgtgcgcccgcatcatcttgagctctggtacgggatcctatggtacttcgcctccggccctaattattcagcgatgcaccccgcctgtctgtcacgctccaccctcgagtctttctgctatgaatttctgatgggaaatcaaatagcagaattactagcagtagtcaggtagggtccaatccagtcgagccgacataatcatcggtgccaactatatctatcatagagtggaagatgaacctgagttttactagaggatttacgaataggactacgactagtgggcggccattcgcgggcgagatacaggactctgtctctgtcctttcggccgtgccgtgtcgtggcacggtcgtccggcgcgcggtccggcttatccgccggccggcgtcatgggcggcgcgcgccattgaatgggagtggatgccgctgctgccgcagcatgcgcccggcatcggccgcgtactttcgctgccccccggcacggcgactgtgccgtcgtctcccctgataacctctgccgaaagtctaataaatgcctctgccggtagcaggcgctcgcccatggccatggccatggccggccgtgcccggtcccttgtcacggaacacgctgaagcatctccttcgttttgtttggagctctggctcgtccggctagcaggcatggagtaaaaagtgcagcgacgtgtggtcttcgtttagatcagtctgaaatcgctcgtttgtcatcacgaatcgcaacacttgatcaattttactaccaggaagctacccgtgcgtgttccgagccagatcactcaccccgcccgtgggcgctggcaaaatagtggtactacgctgccaggaagctcacacgacctgcacctgaagccagatgcatgctggtgcgccctgccgctccaatgcgtccaagccgaaccagctgtgagctgtctgtattacatcgcgccatgaaacgaagccatctgcccacgactccccatcatgtccacctcccggccccaggccaggtagtaggaccggtcgacgatccttctcctcgtctatctgctgtattaaagacggcagcgcatgtgtcaatgactgaggccggccgcgcgacgcagtgccagtgcaatgtattgggcgtggtacggagagcgctcgtccgtatcgtgccgtgtcgtcttccctgccctgtagccatcagcccctcatctctgccaccggggtagcggccgcggccagctgtatcccctgcctccccgtttcctcctgggctgctctgccactgccagtaacgcacctggcacccatgcacagccgcgggcactcccttctgcctggtgcgtgcgagtgtgggtgcggcaccgcgggggcctccgcgcgcggccccctgccccagcccgtgtttcattgcgtggcctccgcgtactgtggcgcgcctcagcggaataacatcaccccagttcagtcaacagtgcctttttatcggtgttttgctgtttgttgctcgtgctacctcttggcctcttgggtgagatgcgcatgcctgactgtttaaccagtagcatccatccctaggacctgcttatgatttgatgttctgatggttggatcgcgacaccgatgcagcaactcttgtcgcccgattttgcgaatcgtacggcgtacgttgcaaggtggtgtggtgaggcagtgtttagcttgtgtggtggcaattcattcgctgtgctagtgctacaaggtcgatgtgactttgcaaagccgacggagggagggcgtgctggcactcctgaaagctaggcgaggcggttggctccaccacgcacgaggatttcttgatctgagcagcatagcaatcaccctgcagaattttgaccagattccctccaccttccagccaggaggcggcccccctcctgtctcttgcgtaaatgaattccagccatggagcaaccaaccactgctccggttatttccagcgacctgacgcggccactccatctggtggcccgcacagcaccgacctgaccgggcatagtagcagtaacagcgacatttgttactcggacagctgcttgcaggtcccgatgctcatttcgccacgccctgttcgatgctactgccccttatctttagtgtctgtaggccaaggagagtaaagagaaggaatgctactatagtaaaaaaaaatgtagaagcaatcagtgtaggtgagatgagcattggagttgagaccattgatcacaaaaatgtttcacgagcctcggcgacgggtttaagggccctgttgtaaagcactctacgagtgccattgtgttccactggatgcttgggcttttactcaagaaaaaaccactttgtcacccgttatctgatggtttcacggttctcactttgtcgtgacgcgcgtgcaggcaaagggagcggacgtgaacggcaaggtgttccg

SEQ ID NO: 644 - DNA, 9849 bp, Zea mays
  Intron number 5 from transcript GRMZM5G819807_T02 (locus G RMZM5G819807) derived from phytozome v7.0 (chr-ID 3; pos 3 8240904 to 38250752 reverse strand)
tcaagatagaagtatttttctctcttgtacatatttttttgagagcatgtataaataaataattaatgatattatcatgaatttaaactaatctagcatagctaatgctaccttgttttgagaagttgatattattgctccaaattatcaatgtagaaacatagaaagttgtgcagtgtcaaacttatatttcttcagttcattcacttcattggtgattggaagaactagagggaaaaaaaaggaaatgaccatcccagtaacgttaatacaaccatccattcattcaaccttttcctattcttgaagtaactcttgtcagcttccaaatacaggaaggccacaaaaagatcactaattattattcatggctactggattaaaatgagtttgtattaagacaagtcgtaattgggaagccatctttgtagaattgtagtttctggctcagttgtagtcgtgtgccctgggaaacctggttgtgcaggggaactatgatccccatgctgccttggtcatgtttctgtctgtatagattcacaatgttatggtgggctgtagtgctacagaagccgcgggtactgttcgtgttgaataattagacaaattccaaattaaattccgaatataaatcatgaccaaatcagaagaactgaaataaaagccaaatcagatgatgcgtactgattagacttactgattgttggcgcgcgccaggatcagatgggttgacgaggtcagcagatcacgagcagtcgcgtgaagacgcttcccaaaaaccttattcgccctctcccggtgcaggatctagaagacgaagggttccggagacctgctctcctgatcgcagatgcacctctgcggtcgggacgaagggaactaaaaggcggctcagctatgaagagaggcgaaagcgaactgggatctgggatgatttggaggctggctgccgggctccttttatagggccgagtccgcgaccccagtgcttatccgctcacgaaaatctcgcaatcagttgagattttatagggatcggttaggataagcgtaacagccaagaaaccaaaaaatcaaacggcaaaaggtagccgcgcccccgcaaggcgaggggccggatttcggcggaccattcacgcgcatgtcgtgcgcccgcgcccttcgccccgccccgccccggcccggcccggccaggccaggcgaggcgaggcgagcgagcgcgcgcgcgcgtgtggctctccacactctctcctctcatccatgacttggtgagtgagtgtggcttccatatttaagttagctctactccacaagagctagcaatatggtgctattggttccacctatccctttgccatccacttatatgggcttttgagattttcctgggatttatttgaataacttaattgggccaagcccataaatcctaacaatcccccaccagatctcaaatgcccatctgcagttttcgccactgttcactactgtttaatatactagtttttcagcagagactgttaagttgaacttccgcctagaactccaagttacaccaacccacaacttggacaatggactatgccttgaattgcaagttttgcgtgaatgggtttcacttgaagtcatgactagtacttggctaccagtagtccccttctcgggtggagcatatacgtcgtactccaaggtctcttcatgagtttactagagatcacccagatctcatagactgcgacgttagacagtctaactcatataggtgtgttctttcaagaatgttctgcaggacaacatcttcgctaatacaagccaacagaacacattaaggcacaaagccaacctgccttacagcatttgagagtattgcatctttacttagagagggtcaaaggttactctcctcagttcaccaatggcttgttcttcccaggacctaattcacgggatctccgatcacatagactgggtttccaccatggcaactttattcgggtctcatacccatctctctcgatgcgatttctatcacattacgtggtagtcccttggtaaaaggatctgccagattcttatctgttgaaatataagtcacacttataactccggagtttctcaactttctgacagacttcaatcgtcttttgacatgtcttgatgactttccattatccttagaactcgtcactttagcaatcactgtctgattgtcacagttcataaggatagctggtattggtttctcaaccaccggcaagtccatcaagagttcacgcaaccattctgcctcaacggttgctgtgtcaagtgcagctagctcggcttccatggttgacctcgtcaaaatggtctgcttgcatgacctccatgataccgcacctccaccaatagtaaagacataaccactggtggcataaagctcgtctgcatcagatatccagttcgaatcactatatccttcaagtactgcatgctgaccagaatagtgaattccataactcattgtaccttgcaggtagcgcataacccgctcaagtgcatgccaatgatcagtcccggggtttgacatgaacctactcaatttgctcacagcaaacgagatatcgggccttgttgcaccagcaagatacatgagtgaaccgacaatctgagagtatctcaattggtctaaaccaattctcttgttctttcgcagtgtcacactgggatcataaggtgttgaagaaggtttgcactcagagaagccaaatcgcttcaaaaccttttcaacatagtgagattgcgagagagtaatcccaccatctgccttaatcagcttgatgtttagaatcacatcagcttctcccagatctttcatatcaaaactctttgatagaaaagacttgacttcattgatcacatcaatgtttgtgccaaatatcaatatatcatcaacatataagcacaatataactccttcgcccccaccacagcgataatatacacacctgtctgcctcattaatggcaaagcctgcagacgttagagtagtgtcaaacttctcatgccactgctttggtgcttgcttcagaccatacaaagatttcaataacttgcacaccttgctttcttgaccctttactacaaatccatcaggttgttccatatagatttcctcgtccagctctccattaagaaaagctgtctttacatccatctgatgaacaaggagaccatacgaggcagccaaagaaagtagtactcgaatagtggtcattctagcaacaggtgagtaagtatcaaagaagtcttctccttctttctgagtatagcctttagctacaagcctagccttgtacttttcaattgtaccatcaggcttgagcttctttttaaacacccacttacaacccacgggtttgcatccatagggtcgatcagtgacttcccacgtaccatttgaaagaatagagtccatctcattatgaactgcttctttccaatcatctgcatctggagatgcaaatgcttctgcaatggtagtaggagtatcgtccacaaggtacacaatgaaatcattaccaaaggatttttcaaccctttgtctcttgctccttttaggagcatcattgtcatcctcctctaggacaatttcatgtggctgttcaaaactctcaataggtgtattatgttcaggaattatctcagaagagtatctagaattgctatgaatgtctttcattggaaatatatgctcaaagaaagtagcatcacgtgattccataatagtatcaacatacacatcaggaacttcagatttaactactaaaaatctatatgctatgctacacgaagcatatccaagaaagacacaatccactgtccttggaccaagcttgcgttttttattaattggtacattgactttcgccatgcacccccaagtgcgcaagtatgaaagtgatggttttctcccaacccacttctcataaggggttttctcttctttgcccataggaattctattcagaacatgacatgaagtcaggactgcctccccccaccatgccttagataaaccagaagtgtctaacatggcattcaccaggtcagtcaacgtacggtttttcctttcagcaatcccgtttgactcgggtgaatagggaggagtcctctcatgaataatgccatgttctgcacagaaatcgtcaaagactttgggaaagaactcaccaccacgatctgatctaagacgtttgatctttctctctagttggttttcaacctcagccttatagattttaaagtagtctaaagcctcatctttagtttttagcaagtatacatagcaaaatctagacgcatcatcaatcaatgtcatgaagtatctcttaccaccttttgtcaacacaccattcatctcacaaagatcagaatgtatgagttctagtggtgccaggtgtctctcctcagcagccttatgaggctttcgaggttgcttcgactgcacacaactatggcacttagaacctttgactatggtgatattcggaattaaactcatggttgcaagccgagacatagagccaaaattaatatgacacaaacgagaatgccaaatactcgcaagatcatcaacattagcacaaatatggttcacagacttattattgaaatctaacaaagaaaagcggaacaagcctccgcaatcatagcctttaccaataaattgtccagacttggacacaactaatttattggactctaaaactaccttgaacccatctctacatagaagggttccgctaacgagattcttgtgtatagaagggacatgatgcacgttcttcagctgcacgatctttcccgaagtaaacttcagatccaccgtgccagtgccatgaacagaagcatgtgacccattccccattagcacggaagaatcccgggcgccctgataagaagagaacaagttgatgtcagaacacacatgaacattagcaccagtatcaagccaccagctaggtgattgaaatactgagaagatgaaaggtaaattaccataccctttgtcttcctcattgctagcgaccactgtgttgacattgccctttttgccacggcgatccgctcgatcgggacaatccttggcaaaatgacccgcctcgccacatgcgaaacatgtcaattcagccttgttcttcttcttcttgaagttggtagttttgttgggcttgttagattttggctttcctttgcccttgttgtggttcttctgaaccatgttggcgctggagtggccctcgcctcctttagatcccgtgtccttagcccgagctttctcctcaacatccagagacgctatcagattttcaactgatatctcctgtctcttatgtttcagagctgtggcgaagttcctccatgtagaaggcaactttgcaataatgcatccggccacaaatcggtcaggaaggactatcttaaggtggtcgagctccttggctatacactgtatttcatgagcttgctctacaatagagcgattatcaaccatcttataatcatgaaagctctccatgatatacaggtcactgccagcatctgatgcaccatacttagtagtaagtgcatcccacaactgtttcccgtctgtgtactgcatattcgcatcaaccagacgatcaacaagggcgctaagaacggctcccgtgaacatagtattggcatggtcgtactctttctcctgttcaggagtcagtggaccctcaggtctgcctttactaacatggaagacattcatagcagtaagccagagcgtggccttgacttgccatctcttaaagtgcataccattaaacttttctggcttcagcgcgtcggcaaaagcagccatagaaaaactaggaaattgtctacaataaggtttttggattgttgaataattagacaaattccaaattaaattccgaatataaatcatgaccaaatcagaagaactgaaataaaagccaaatcagatgatgcgtactgattagacttactgattgttggcgcgcgccaggatcagatgggttgacgaggtcagcagatcacgagcagtcgcgtgaagacgcttcccaaaaaccttattcgccctctcccggtgcaggatctagaagacgaagggttccggagacctgctctcctgatcgcagatgcacctctgcggtcgggacgaagggaactaaaaggcggctcagctatgaagagaggcgaaagcgaactgggatctgggatgatttggaggctggctgccgggctccttttatagggccgagtccgcgaccccagtgcttatccgctcacgaaaatctcgcaatcagttgagattttatagggatcggttaggataagcgtaacagccaagaaaccaaaaaatcaaacggcaaaaggtagccgcgcccccgcaagacgaggggccggatttcggcggaccattcacgcgcatgtcgtgcgcccgcgcccttcgccccgccccgccccggcccggcccggccaggccaggcgaggcgaggcgagcgagcgcgcgcgcgcgtgtggctctccacactctctcctctcatccatgacttggtgagtgagtgtggcttccatatttaagttagctctactccacaagagctagcaatatggtgctattggttccacctatccctttgccatccacttatatgggcttttgagattttcctgggatttatttgaataacttaattgggccaagcccataaatcctaacagttcgcagggtgggggctggttgggtttgagggcgacggctaggtttaagggcgttggggaggccggccgcagggctttgcccacggccggcaagagagaagagatttgcttctaatctcttacttgaccatagattgatacatctctcattatatagagaggtcttacttggcccctaagcaagcgactaattaaccctaatgggctaaggcccaataggcccttgactcctctaacattacaccccacctagacatgcagctcgtcctcgagctgcaacctaacgatgacgctaacaatgactccgctagacacaaacctaacacataaaaataagccgtttacatctcggcttattttattattccgaacctgaattagactatgattattttttgaccccttaagataagacaaacaccctccgcgcgttggacctacacgtgtgcagccacctgtatcccatggacgccatctggacgaaagtggagcacatggatggccacctggaagggtcgcaacaataaccatcggaggcgccctcgtggcagccggtagcggaatgtggtggcgctaggcagtgcgccctcgtcgatgacaaggaggagagcaccttccctactgccgctgccgtagagttggagtttgtcgcccgcgggacaggcactgtgcttgtgtttggagacagcgggccgacgcggttgctgatggtcgtccgataggacgaggtcatgcccccatgcgtcgaggtcgaccgccaccaaagctgcctcgagcatatgctggcgcacctcctgcagccgccggtgcactaggaggccacgcactgcagcttgcagctgcaccaccgcagtcaccttgcaggtacttgccgcgcaatcgccttcctctccacgagctgctgcaaggttgctaggacgactgggtgtcgacgcttgaagatggggtgctgtccttgccggtgcgctaggaggcagcgtgccgccgcctgtagctgcgccgtcgatgcatggatgacatccatgtccccgtagaaaacaccatcacagtgttgttgtgacggcacaggtatgggatcagtgaacgacgggatcggggatggggagtgtgggaaggcgatctgatggttgagtacgggcatggttgacgtcggtggcaccaaggtggagatcggcgatggaaggggtgttgtggtggtagtggatggcgtgatgatggtgggaaggggggctatgccaccatagcccatcatgccataggggaaagcagcagcactggtggcagaagctggaggcggcggtggtggcggtgtcctactggacatgccgttgatggcggcgaactgctgcaccattagctgctggaatgccacgaagtctgcttgggagattggaccagtggcggcagccgtcgcatcaatagatgtggcgacggtggaggtggtgggtggtgttgatcctggcgacacgtcgttggaacctggcatctccgaatctccgataccagattgttatggtgcgttgtagtgctatagtacccgcgggtactgtttgtagggtgggggctgcgcgggtttgagggcgacggctagggttaggggcgctggggaggccggccgcagggctttgcccacgaccggcaagagagaagggatttgcttctaatctcttacttgaccatagattgatacatctctcattgtatagagaggtcttacttggcccctaagcaagcgactaattaaccctaatgggctaaggcccaataggctcttgactcctctaacggacaatgtgctaagaagtaataccaccttattttctcgaaaacaaagtaagaggggagggcgggtccctaccctagctcactagcgctatgtattatgactagactaaagattaggattgtcttaagatccagcacgtgttaaaactttggaccaagtccaagctttgcgcgagaaggtttccattcaatggatagggagttgatttttctattttaggtgttatctacttcgctatgatcttatgtcctcaaaataagtgagatacatgagtgttgaattatgtacttcatggtcactttttcattgtattcgaacttgatgtatataaaccattttcatctttagtaatcgaccacaactcactttatgaagtttgatttacaaggaagttatctgaagcttacaccaaaacattgtagtgtgcagtgaccatggatgttgagagcattactttggcctaatgtttgggaaacctgagtctcttcttggtctattgggcatgtttggttcaactttttttttctgacaagtgtttctgaaaatcgggattcttgaagaatctgaatatctatagggtttaagatctagtaagtgacatattcctcctatcgtgacgactcgtccgattctgttcacgttaatttggacgattttcatcaaatcgattctcatagaagcgggctgagaagctgggcgtttcgcagtccgcaacaacttctagcgatcagaatctagatttaagccgaaacaaacggggttgttggcttcaaacacataacatctagtttcaatatacagatctaagtcactttccattggaaaaatatatctcaaaattgtagcctagatattttcttgcataaaaaaactcgacctgtgggggcaaggcagcccacggacatatattatattaagaagaagaccttctcacgcaggtcgagaaaacccttaaactcctgacccacccatacacaacgacattgtagcccatgtgagaaacaaccgcgactaggatcgggccttagacctgtgctttggcatgggacaaacggatggttttttttaaccacggcctgaaattcgctcccaccgtgagtcgaacccaagaactgagtgctactcatgccacctaatcaactcgactagaggcccttttgctgatattttcttgcatgaaacttggttgttcttgctgtaactgtaattcccaatggggtgagaaatttctttcagtatacaatttactgtctactttgcgttcaggttaagctgctggcaagacacattggtaaaccaat

SEQ ID NO: 645 - DNA, 1819 bp, Zea mays
  Intron number 2 from transcript GRMZM2G025123_T01 (locus G RMZM2G025123) derived from phytozome v7.0 (chr-ID 1; pos 2 8603181 to 28604999)
tctcgcctggggaatttttctttacaacattaaaggtgagactccaaaactctgagtgatcattctagcatttaaaatttatcttacaatattcttaccatttctgctactctctgtccggttcttatttccattcagaacaatgcaagtcgatcctatatcctactatcatttttcctatgtaacactcgattgcatggtttgcatcttatcttgaggaaatcatccacagaatacatttctacattctgattgttatagcaatgcacaatgcacttgaacaggccctttcttatttcatggttctagcaatgtgtaatccaatgattgtggtcgtacatggtgcacagtgagtgcatgtatctgggtcaggttgtgtgactttttatcatatttatgcaaactgcatctgctgatagtcctaaagaccaaacagatggaaatcctctcacacatggttgaaaagcttagctgcaaagttcatatacctaggtggtcttttcactttactaaattacaattcaaaatcgcaagtacctaatgagcatgtctgcacacacaaaaattgaataccgttgcacatattggctgagctagtgaagggaaatctctcgctacttactgaagtgaagcaaggtagtgcagaagggaaagggatgttagattaaattatgaaaggatactgggctcattggtgggatataatttttcaaccagttagttatgctgtatatgcttcaaccattagtagattggttctttacaaatagaatccaatctaaatacaaattcttttgtcgataaaatctctcttaaatgatcttgccgaaaccagttggtttcacctaaaaaaaagctactgcctacctagccaccagggctttgcagtgaccagacattcatactcgagtaactagtgtttgaagctatatcacagagtacctctttttttcctggaatatgcaagagaactgcgcaccaataatattaaggagataaaagaggtccaaaatggaccatgtacaagaaaacctcctcatggaggccagaatttagaatacagaaacacacacacgcacatcgaagaactctacagacaactctgcactagctaggcctaacactaccacacagttagacccagagctcatcaaatcgaagggaagacaaagctttgatctctgttagagacctagctgccaaaacccaaaagggccgcagtcaggctcgggctgcagccatggaacacacacctggctctctttgataacaggtttgcagtatagcggttcattgttctatgatttaatagtttcatccatgataaggtggataactatcaacaattgctccatacactggcccttgaacagatcccagtaccgctaaatttcctcagtgttgctagtctacagcaggcagattcaaagtgaatggtgttgcataggccttgtttggcacagctttagctccgaggtttacctcaaatcttgactttgtatgctaaatcatgaatcttgagactcacgtttgtctagaatagaaaggaaacagttcaacttcaaccaaacaattcaggtgtaacctacctccatctccacaaagtttctagggttagaaatacctagctccgggaaatcacatatttattgaaggtggagctccgcgcaactggcctatattaccattctcatgcaatttccatactataggtcagctttattttgtagtggtcattacaaaattaagctgttaattatctcattatcttcaatcccatgcaggtttcaggttattgtggccttttacttggaagtcc

SEQ ID NO: 646 - DNA, 1337 bp, Zea mays
  Intron number 1 from transcript GRMZM2G316635_T03 (locus G RMZM2G316635) derived from phytozome v7.0 (chr-ID 3; pos 2 16268222 to 216269558)
gtggaggagatcgcgtcaccaagtgggagctcaaggtacgaactctgctcccgtttcaggatttcgttttttttcttcttcttcccagccattgtgccactgttgcctgaggcccattgttcgggccaagaattctgctccgcttttaggcgaggccttatttttctggcgattttagagataatgggtttaatggggctaggttctgcactgtagagagtttgctcgtctttaccgcacacaccgttttggcgacgaaatgctgcctttgcgtaacaatctgcgcgttggttccgctctgctttttactatttcggctgatttgttgtgagtaggatggtggaatgtcgtttccaagctacgtgtactgcattttttttctaatccataaaggttattgtgtttggtgaagtgctatatttcgtcacgcgttcaatactcacgattgaaggggctatatctgtatatatatggagttcttttaggaaatcctttttcgcataaaaatattgccttcgggttgaagtgctgtcttttttcttctccactttcgagttgttttaaaatcgaagaattagcgaaatgcctgtgaaatcttgaattttacttatgaaatttatgtaatcgtgtgttttcatgactctttatttctgtgttgactagatatgtgtcatgatgacgacatataagggcatgtacagtggagagacaccaaaacggttctccaagcacaggagacaactaagagactattgtacaatggattgtctataaacgtagtctattaataaatacagaattaaatgtatttgtatagcatcagatcgatagaacagacgacaaattcgtacagtgggaagtgaggcgtctgttgctacttgatttacgagccagagacgtctcttcacggagagacagctctaagatttttttgcaaataacccccttaaacaccttaagagactccacattaaacaccactgtacatgccctaattatgaattctgatcctaggtccccaaaacatgtcgtagtaacatactaacatttcacctaaaagtgtactcccgtaatgcaatggggcactgactcaaaccctgcttccctcctaagttcaactacataatccctttagctactttcatattttttaattcattgttttgtagttcttttctgtgtcttttcagggaattcttagctgtgtaaagtgggctgaccttttgatgtcattgacaagagtgaatgcacatgccatgttttattgcttctgatttatgctcattacttccatatctacagatcatcaactagaaaagaatcggtccgattggata

SEQ ID NO: 647 - DNA, 977 bp, Zea mays
  Intron number 1 from transcript AF466202.2_FGT007 (locus A F466202.2_FG007) derived from phytozome v7.0 (chr-ID 10; p os 138499158 to 138500134 reverse strand)
agaatgtgagtgaatgatggcagcatgacctgcaagtcatcataacaagaaaaaatatttataatgtttcaattggagctacacacaagagtgtttcaaataacctcgcttggtctgttgctcttcttttagctatagctgaccataatttttcttggttgaggaaactgtagttagtgatagctcaatattctgtgtgtagaaacctgtataaagtattggacatgtatttcatagtttttgtaacttataaggctatgtaagtcacagattaactcttcaaagaattatacaacaaagaaatcagcgctcagaaatgggatctttgcatttttagtcttgctcattttttagtattcatgtatgactcatggttttctagagaaaaatattggaccgttacaataatgctaatatggtgttaatctaggattgctcattttgagtattcttgtacgactcatggttttctagagaaaagatcttggactgtagcactacctccacttctgagatctggacttctgtagttatctgccatagcaacactaaaagtgacaatgtttgaatggtatagttcttttccttggtcggtgatatatattcacttgatggtatagctctgccaaaagcacaacagctcctgcttgatccacaaaaaataggatgctcatgtgattgtattttgattttttagttttatttttgttgcatgtataatccaatcgccgagatcaacctctaccttctcgagccataggacctcccctccctcttcaacatccgcagtcacaacaccaaggggtagttcttcgcccgtgcggtcgaggcggtcctagcaacaggaccaaccacgtacacacagagtttataccgttgcgctaaatacctgaatatattgctccaatctccgaaattcgatcgatatttgtctgctttcaggtgcaccgagctggctcctgatagggttcggccag

SEQ ID NO: 648 - DNA, 8788 bp, Zea mays
  Intron number 1 from transcript GRMZM2G396169_T03 (locus G RMZM2G396169) derived from phytozome v7.0 (chr-ID 5; pos 1 15391170 to 115399957)
tcaattcctgggaatctgtggaagcaaaatcgaaggtacgattccaaatcgcaccatctatcaggatttgttggtaatggggattgctcgaacttgaatcaggaaagtagagcatgcaatggtggttccccgtttgaaattattgataaacggagtatgaaaatcaagcatacccctgtgatgctacgatggaaatttaggaggaatcaaagcttaaatccatggaaaaatcatggagatcagattcctgcatggattacgcctactcggggagatttagactcttctaaatttcgggattcagaagggcctattaaggaaaagtgtaaggatgtcgataaaataaatgatgaagctaaggggtccaggaaaaaaatgtgaacaaggtatattgaggggagtgaatgccgaaccagcacactcacaatgctcctcaaacctaaagagcagaacaccaagtcgcccttgctgcatgcgtcaaaaccacaaatcgagagatttgttgggcatttttgggggagatctcaaaaatcttatgcgagtgcggtgaaactgtggcgtgctctagtcgttgctgtgaagatgcagccaaaaggaatgggtcgtcgtggtggtgcgcgcggatctggccgcggatttgggcgtgaacacgttttgtaaggcccaaaactcgtaaagaaaaaaaatataattataaaataaatcaacaaatatagtattataatgctttgggaattaaggaataaaaaaatatgagaaaggatttttttcttttaaaggaaaccatttatacctcccatgaaataaatgacaaggagaagaataaataatgacattttaaacaatgaaagctatattcacattagtaataatttggacacatggaaatttgaagatcaaacatggatttgaaaagagttgacaaagataattatgataattatccattccttttagagctaaatggtgagggagaatataaataaaaaacataataaaaaaataataataaatatgatgatgggatttctatccacattagaattatgtttgaaattcaaatttgaattaggttcgaatttgaaatagaaatcattaaaaaaaagaaagtagaaaggaaaagaaaagagaaaaaaacgcctgggccgattctccctcagccggcccaactcccttccactctcggcccaacgtcttccctcgtgccgcgcctgatcacgctgacgagtgagccgatgctgtcagtcacagtattgcgcgcccgtcgtcacttgcgggcgggctctagtctccagtgctggtgcgcgggcggctaccctgccctgcgccactaccgcatgggcccgctcggccagtggctcgctcgtgtgcgcccgcagcttgagccgctgttccgcaggttccacctggtcagcccctctgtcgccccagcgcctgttcttcatctccacggaagatctccgccgaatccgtgcttccggccgtgaatctcggcggcaacaaactccgcaacgatctccggttgctcggccatcgttggaccctcctggtgtatatatatatcggccgacgtcctgtggtttcgttcacccgtagatcagcgaatcgcgagtgccgccgcgaaccagaaaactcacgtcgccgccgggaaaaaaaaattcggtctactctcaaattggggaggcgtagctgggcttggagcttcggatcacgatgcaccttctcaggacctcggcgggtggagattggatcggctgggtggtggatagctcgccggtaagtagctcggcgcagacgtccgcatcgccgtgtggcccgcatcacgcaatcaccgattgaaggtaaggaggccgccgttgaattcacctaagtcatctctacgcgtaggcgagtcatgggcagggtaggatcctcgggtggtcacgatgggcgcatcgccggcatggctccgccaaggcttgcggcggcgctgcctcgggttggcaagggaagaagaagcccctgcaccgtccgtcctgggattagtggttgggattcaatctggcgtgcctgctcgcgtgatgagatgtgcgccgttggatcgaatcttgacgaataaaaacgaaccgtgtcacgtattgaaatcctaagcgtagatctctaatcccacggctggggatgcgtaccggttagatttataaaacaatctaatctggaccgtatccttttaatccaacggctctggttgcttcttaccccttcggctatgccattatgcaaaagagaccccgtataactctataaacaacccgcgacccatcgcagaagagtgatgagtcttaaaactatttacagattaaaccctatacttatcttttttatgcgcatagtcgagagaccagagaaattagataataaattgtagaaaatgatttttaatacaaaaacaatactagaaacttgtataattcctagaaacttcaaattaagtccaaattgatccattccagtttctataattttgtattaatattgtctatcaattattaacactgtttagccatgaaacttgaattaaaattgttcatttggattaatctattctaagcactaaataatttcagaaattcataatttaataaccatagctccgaatttagtggttcttgtttctacgatctcgtagcaacccgtagattattattacgcagtttattcttatgtttggtgtaatgttaattttgcctataccatgtttgtctgtattgctacgtttagtagtgaggacacgtgtcacctgaagagcaagttggtacctggaatctcaagtgccaggcaagttgtgcccttgatcacttctttttacccactcatgttctaattaatcataatgatctgcataggttaattttgatgggacccaataggttaccctagtttgattatctttataccttgtttaccactgaactttttgggtagtacttgctagtgctttatgtggttttgggtatgaagatacattattcatgatcacacctttattatctgtttattattactgttcatgataagatcattatgttaattggaacatggagcgaccacccgggaaaacagtgctaccacaagggtttaatgggacgcccttggctgattaattaggaaagctagtggaagactaccttacccgaaaggggcaagggtagtaggggagtggtcagtgtggggaggtccttgggatgattttgctgcgattgcggtcatgcgaggggtccctgcattggagcttcctataaactatagcgggttttctgaagctagtggaactttgtaaaggcctcgtagtgttaccctgcctcgcctcctcggtagaggtgtatgggaagtcgcgatcccttggcagatgggtaacatgacttgtgggtaaagatgcgcaacctctgcagagtataaaactggtatactagccatgctcacggtcatgagcagctcggaccctcacatgattaatttatggaactaaattcaatttgtcatatgcattgcatcgcaagtgaagttattacttttcttaattgggttggtatttacttatacttagtaactgctaataaaattttgaccaactttaaaagcaatgctcagctctaaccatcctctttggtaagccttacacttcacgtgagctcccacctttagcgagttcatgcacattattccccacaacttgttgagcgatgaatgtatgtgagctcactcttgctgtctcacacccccacaggtcaagaacaggtaccgcaggatgaggcgcatggaggatgctgtgatgtgttcgtgagaggtctaggccgtcgtctcccagtcaactttgggttgctggaccgttgtctccttataatgtaactaggtgagtgcccgtgcgttgcagcgggaacatataatactatgataacttatatacaaaatgtgtgctatattgttataagaaaatgtttcataatctatacacaaagatgagatttctgcaaagaataccatgccacatcactaaaatatgaatggctcacttatccctcataacagcagccttgtctctgatttaagtttaggcacattacaaatactcaaaccgctcagcaagtccttttgccgcttcttcagaacaccagatgttatggcatcctacttctctcctacctcatcactggaattctcaagccaatctagtataggcttactataatcagtggtagaataatgtcttgtatcattgtagaacgtatcatgagatagaaaatggagatttaaaaattatgcatagttcttcaaaaacaaatatccagaaaagtattcaattatcaaaaaaagaaaagcataccatgataatataatacccagaatgaccgtgttgtccagccagctccatcatcttaacaggcaaacaataaatgttatcccttagatcagtaaggaattggcttcccaccaaaagaagttcctaggactgcaggcattgtaggaccataaaattatggccttcacattaactataagtatttgtaactgaaggataaggtttaccttaacaaaggcatatgtcttctgataaatttcaacacagagaattacttctgaatggaccacagttttgtgctcgtcagaccttaaagctttgttctgggaacaaaatagattgtaagactaaaactccaaagataggaacttatgtaaatgggtgctacagttgaactcagatggttcagaccttccaaggtgtaccgattagattaagagatctcgccatttcaattttcttagacggtgacttggaacttttgggcttcacagaattgccaccgaaacaaacaattatattcatttaaatttgtggcaagaaagagatgaactgaaatagaataattcatgttgtcaagtgcataaggataaaaataggcaaattcatttctccagtttgctcttgaatacagtataaaacaaatatgttctagaatcttattgctaactcattttggcatgcatattaggattccagatttgataaaaaataactaaaaaccaataaataagtatatacaatacaatcataatatatgattgttaacaatatgcagcaacgattttaactgcctcacctgaaaaatacagccttgctgcaaatttgtctccgtcttgcttggccttgatttgtacccacttatctgctttagtaagatagcttccctgataataaacatggaaataacaaaaatatataattatgcaaaagcataaaaaatatatacagagatggcatatgtactttaacattaaatgacagaaattgcagattcctcttacatacaagaatataaaggatacatatactaatacaaaaatagacccaatcctcaacaaaagcataacttacagtgtaagttgtgaatatttcatctattatagtaacaacaaactttaacatttacatctaccatggactggtgatttctagtgttttcagatttacagattattagtaagtgcaaaattaattttcatagctcgatggctgtgttacctaaacagagtagtcctatatgcatttgtatcacagtgagaagggacatgagtgaatgggttaatttgtaatagcaccttactcaaatacaagatacatgtacgatgaacaaaattcattcaagatgaagcaacataacgtaacaattcgtaccatacggaatgcaataattcagcagatcgtcgttcacttcgccgcgtcagagggcaggcgcatgtagccctccccagagtccgtggcatgcagcgacagcgagcatggatagaacgtcgaggcagtagaggaaggtggcgacgacgacggctggcagcgccgcgtccatcgtcggcgctgcggcgaacagctcgatcggatccgatgatggcatggtggtgaggccaagggggagtcaacagattggcccccagtactgtagcggctgtgcgcctagattcaaatgcagttgcgggccacaagcggggcccgacgacagctacgattttggctagataggcggcaactgcaccgagatgggggtcgtggagatcattgcgagcgtggcagtgggggctcaatggttgtcggtgggggaggctgcaccgacggtgcccgctgtgttgctagagacaacatggtcgggggcgacaccaagccggcgaccatgctgtgagacgagggggtaggtccataggtgggcgtgagtttctttccatgaacttagtggccaggtactcacaaaactcattaaatcattgcccaccatagcagagacaacctataattgaaacagtataacaataaacaatggtgattatgaaaattactatgtacaaataaatacagatattcaaaaccgaaaataaaatgaaacctttaagtagggtgagatactgttcttgagataatgatttcttgtgttttcccagagagcagaaccaccggcatgggctataaccaaagcatcagccatacgattagaagcaagacactggttaactgcccctttgtagtctctaaccaccaacgcatgttgaatgcttttgtcaattgatggatctgatggcacagcatctccagaaacttcctgttctatctgttgaccatttgtagaaactgattcttcagccaagctagcctctgaagattgaggattgttgaaaaaatcatccccattatcaataagaaactgggcatccgcattatcggttactgcaacatgatcaatattaagtgtatctgccaatgtttggctcaattcatcagttgaacttgcaggcggtgcctgaggtggtttcgaagccaagatgagcaagcaattttgtccttgcaaaatcctcgtcctcaaacataacccttaagaagccctaggtttctctctcctcgtcagatctgatcaaacatgcatcacataaagttagtctccatgcaaatatcagtattagttctactaaagaagcacctacaaagattcttgtgattttttttcacatagagcacgtagcgaacttttgtcgccattctgaatagcagcttcaaattcagttgatcggctcaccagactttgctcgatcaccaaattgtgcacatgtacctataaaaaacataacataaacacaagaacttgaagaggagcagaaaacagaacactgacaaagaataattacctcagatgtagatgtttgcgcaccttgggtgggtgccaccggatggaaagaaacaagtttaccaccgaaaccaaaagatgcaccggtggggcatttcaaccatttaatcttgtacaaagttacacaccataatataagtatgagtaaggaagcaacacaccaaatttgagaattaacacttttaaccgcctgtcgttttatttcagttggatctaatagaatgtttttcaattaataaagtagtgaagctgaacagcagggaaccaatgaccgtttaaattctaatactgtgattccagagttcatgaacccacccaaaaaaagtctgaatatatgaaagttacactctttagtcttttgtacacaccaagaccaatattccttcttcttagatgacatttgtacaagatgaagtacataattgtagcacagttacatgcgtaataacatttgtgttatagcttaaagttacactctttagtcttttgtacacaccaaggtcaatgttccttcttcaaaaaaaattacagatgacatttgtataagctgaatgtacataattgtagcacaattacatggccaataacatcagagttatagatttcatactgctatagtaaaatggcgataattttaaactttaacaactaaaaaattgataaattggtattagcacaaaactactatcgcaaaacattttggattgcagaaagaatattaacaaaaaaaactacagaaatctatgaataacattttcctgcacagatgcttacgctgataggcatttcatttgacgccacaaccactccactgtatgtatcagaagtcgcaagtgaagttataataagacagcccacaaaaaaaacaaatactaatgtaagttccatcagtagattgaatatgctgctcatatcacagaaataaataagaaaattacaagtttatgagtattgagttcagtgctttgcactcctgaataatttcatccattggacactatattgttctaccaatccatgacgaaaagaaacatttagaacggtgctaaaaacacttgcaaccactgtgttctttcgtcttactaaattgtaaagttgtgggaagtgatctttcaaagagaagttccacatccatttgtcctcccaaaatctcgcatgattaccatcattacgctgaaaggttccaaagctaaaaaatcttcttttactttcattagtcccccccaccccacaaaaaagtgtgaatctgttagccgcctctgtacctgagctaaagtttggtttcataagtatttctgcctaagcagtgtctgccaagccctcttcattcatgagcttaaacaaccacttacttaataaacatctattatgtatataaagattcttaatgcctaaaccccccacatccttaggttggaaaatactattccatttgatgagcctatacttcttatgtccttccccttgccaatgttggctttatttttctctgtgttaagtttgcactcaatatttttcaatgacatgtgtaaattttctagatattagctgttgtatgcctgggttttcatgcctttcctatctgcagc

SEQ ID NO: 649 - DNA, 10855 bp, Zea mays
  Intron number 1 from transcript GRMZM2G070890_T01 (locus G RMZM2G070890) derived from phytozome v7.0 (chr-ID 3; pos 2 26981358 to 226992212 reverse strand)
ctccagatcccgctcttcaggtcggtaatgaatcgatgtaacgcttcttcccatcaactccccggagcaataatcaaccagatttttttgctttctccataaattgctcagttttcttagtcttagatttctgggacttgcgactttatcatcgggcttgcttacgttttggtgctagatccattatcggctcactcatcattagtactcgcgtgcatttacttttgtttgcgctttgcattggggggggggggggggggggtgttgaatgattcgttgcaattgtattttatttcgataccttgtggaaaccttagtgatcaattctaatttctattggtgctggtgcttgccatctaaagaacggaaagctgcagaatgtttcaatcaaatgctaccggttacgggcttcaagtatcagcttcgattgcaaaattagcaacgggtaccatcagctttcatgtgccaaccaataattttcatgtggctcgactccatccaccttgaacttttgagtactgcttcatctttaatgtttatgcacataaacaacagactgccagcagggtacatgttaatgcatgattgcagtttagtagaacagaagcatggggtgaaaggatattgattgactttgcatgtgatttttttttcttcaaatcagtgactgcaacacacaaataatataaggcaaacacacgcataatataactagcatcagtgggttaccgctgatgtgcattgcttattgcccaacatacattttctcgatttaagggacttagccctgtccatatatgcattgtacaacacaaaggttatagagtttacagcgccaaattaaaagatcagcatctggccatttgcttacgaaaccacgtgaaacatggaaacaccacacgggtgaattacttgtctaactttcctactctcaaaggaaagtcgttactagcttaacacataacatcatacaattcagtaacaaggagttattcttttatcccttcccttgaaaacatgtgcagctgagagcacaccttccttaaactttagtgcagagctcctccaatcctcctagctgcctggagctcattggcgatcatttgcccaacatattgatggtaaacgatatgtaattcatacattattgtaagttgttaacttgaacctccccacctatatgaatgaagatcataaaatgcaataaagtatgatgaagaaactcaagagaaccctcttaagatatctgtgtttgagttatgctaagcataatacgcattccactccaagcaccaaagatgccaatagcagattgaagagtgaaatgtgaaaaatattttcttcatgctccagcaggcagcagttaatttagagaatccttgactggattttaacaatagatatgtatgtatgaattgttctgcttcttttcccagcagtttacctggatcataatttactatcattcctaagaacttctgttcaccataatttactattttctctggtcacaacagtgttgggtcaaattttttaaactacagactccaataactattacattgtttagtttggaaacatgtaagttacaatgttttcaagttatccggtcgtctagtcgaattcaccgggcgaccaggcgattagtcgcgactagggcggcgacctagacgattagtcggtcctggtcacgcctaatcatccatctagtcgtccagtgcatctccaggacttgtatagatataaactatacattattattaaatagacattttggagattagacagtagaggcaatcaggcaaaagaagtatagtagaactggagtgtttcagttggaattgaaactggaatagtaatactggaaaccggacaactgatactggatagtgtttgctggaactggaatcaaccatttaataagcaaagttaaatacaaacttactagtgacctaatacagttgatcttcatgactaagatgcaaatagaatctgaattccattactttgcagaatgacagacacaaaattaggatttaggacgaaagaaggaactgcataagaatctgtattctgtacagactacggaatacagaggggaaacagagaagagagaagagtgtaacagggacaggggtgaagcaacaaaaggaaatggtacaggtagagacctatagatgaattgctcatgatggaggatgaaccgccgccggtgatcagtagccgctaggaagttctaaagagggggcgagagggaaggcagctgcctatgcaaggaactgaagagttttgaggggggtgtttaatgtcccctatagccaggccgaaaattggcagcccaattaaactaaactaattctggtcgctatctctttcaagtcggacgattggatgactagcagacctaaatcggacgacttgaaatcattggtaagttatatgtgtatattacaatgttttcgagtcgagaagtcgagtctgagtcgtgcaactaccgactagtagactagtcgtgactaggacatactagtcgtgactagtcgaacgtaagtcaatgattatatttttacaattttctatatatgctaagactgaaaacatgctgaaacactaaaaacaccatgtttagtatatctttttccatctccatcttctacaatacatcattaaatattagcaagtcttctattgttctctctgattttaaagaacttgtttggattaaaaaactgttatttgggatgcgtcagaccctagaaacaaaaggttttagaatcagtaggacgaaaactgagtatatgagatgtgactttgacactacaattagtgaggatggtgatgtaagcttgggagaccaggtagtaccaaagaaggtgtcagggcctaaggaggcccatggaggggctgcggcagcagcaaccatgggccctcaagggggattagataagaatagttagagataagattagaagattagttgagattatctaggaaggttatcaattagtagtttgttgagtgtttttaggagagttttaaggagataaggatctctagctagataggggcggccaaccggactatttatgtaatcaatggatgaaaaataaagtagtcaagaattagaagggagaaaccctcctcttgctcggccgtgggcagaggcccccggccggtgttcctgcccatcgatacacctctccaatccctcaccgatctagcgaccataacatctggtatcggagagcttgggtttcaatctgatcccatggcttctgctgccaatttcgcggcgtcatactggcaactgacgtccccatctccatggattgcgccgcatgtcaccttcgtcacgctatcctggcaaccgacgtccctatctctatgggctgcgtcgcatgccaccttcgtcacgccatcctggcaaccggcgtccctatttccatgggcagtatcgcctgccaattttgtcaccacatcctggacgctggcatgcccatccccagggacaacgccaaatttcgtcacatcatcttcgttgacggcgtctccgtccccatgggcgacgccactaggggcagccacggctcagcaatcaccagcttcgtcgatgggggatttgtggaccaacataagggctgatctcgcaaagatgcaagccacgctccagaaggttgagcaagggctgctgcaaatcaaggcagcagtgcaacatgagcagcaccagctggcgttgtccgcaaggctccagacgttggcggttgtgggcatacaagctgctgctcgtggcttccttgcacgacagagagtgcgggagatgcgccggcagatgctcgaggcagccttggtgacggttgacctcggcacacgggggcgcgaccttgccctatcagacgaccatcatcagcggcactgggccgctttctccaagtgcgagcatggtacgtgtcccgcgggcgacgaacttcaactctacggcagcggcggtagggaaggcactcccctcgtcatcgggaagggcgcactatttagcgccaccacattccgctaccggccgccacaagggcgcctccgctggttattgttgcgacctactccaggtgctcgtccatgtgcttccctttcgtctagatggcgtccatgggatctaggtggctgcacacgtgcaagtccaatgcgcggagggtgtacgccttatcttatggggtcaaaaaaattcagattcggaataataagataagccgagatgtaaaaggcttgtcttctaggtgtctggttttgggtcaagtagactcgatctttcagcacccgtcatgctgcagctcgaggacgagttgtttgtccaggaggggtgtagtgtcaaggcctaaggaggcccatggaggggctgcggcagcagcaaccatgggccctccaaggggattagataaggatagttagagataagattagaagattagttgagattatttaggagattagttgagattatctaggaagatatcagttagtagtttgttgagtgtttttaggagagttttaaggagataaggatctctagatagataggggcggccagccggcctatttatgtaatcaatggatgagaaataaagtaggtaagaattagaagggagaaaccctcctcttgctcggtcgtgggcagaggcctccggtcggtgttcctgcccatcgatacccctctccaatccctcaccgatctagcgaccataacaggacaccttcctttatttgtgatttatactacagagagatggtgatattgatgaagatgttagccataggatcaaagcgggtggatgaaatgacgtcaagcatcggcagtcctatgtgacaagagagtgccacaaaagctgaaagacaagttctataggacggcgatttttttttcaaaagcgcaggagaactgcgcatcatttaattagagaagaaaaaaggtccaaaatggaccaaggtacaaagccctaagcaggcttaatcaaaacaaaaaactcacacatgctacccactccctagaccctgtgaaggttacgcgtgagctccaaaccaaaactctgaagatgtttggctccagccgtaatccaacatccaatctcatcgagaaagacgcatctgatatagcttagcgaaggggtctccccattaaagacaactttgttgcagtggatccataaacactaggcccccaaaatgatgatgttgttcatgccctttctcttgcttttatgattcttcttacttgtttttcgccaccaatcagcaaaggaggtctcatctcctggcggagagagattacctagatccaacacgaacagaatggaatgccagaactgtcttgcaaagacacaggtacacaaaatatgttgtatggtttcctgtgattgatcgcagaagaggcaagacactgggtggtccagacctctcttctcctatctatcagaagtccaacatttatttcgaatagccagccacaagaaatacttgcactttgggggagcccaagatttccaaagcctcttccaaggttcaaaaaaaatagctcccataaaaaagccttgtaacaggacctagaagaaaattgaccaggggaagtatgcagccaggtatgaatatccgcctcctgtgttaacacaatattgcttacaacatctcaaatcagcaaaaattatcggatccccgtccaggaaagaggtatcaagatgtcactgatccattgctgtcctccaagagcctgggccactgttctagtggagacaatatgtttatcaaccttggaaacaacatcaggagcaaaaagaatttgaaggaatggaatatctcgaaggagttgtgtttggataaaagtgcttggaaagaagctatccacatgtccgaaccgttattaggccttttcccttttagtgctctaaaaaatcttttctccctcccctttctctctctctttttggtgacttcttgttgggtttcaactctagcctaccccaacttgcttgggactaaaacgctatgttgatgttgatgatgctgccccatatagattggtatccatctgactgtcccacaatagaaattacttcatctattaatcactctttctgttccaaagcttctttgatgctcttttttgcatggtcaatggcagaccacatttcagccattgttggtctctcatcaccatcaactatcctcaagaatattagaagaggttgtgaagctctcatgaaatcttctactgcttgccaaaatgaccaaaatgcaacagataacacatgcttttcctactcagcgttcttcaatttgctctcataccatccatcactaacaaagaaagctttcagcccttgtctttgtttcacatactagccaatgttaggaaggatgtcgcaaaccgaatagttgcatgcctcacaagatctctaccatttgtattgatcctcatcaagtcatgaatccttccatgcccatagataaatctggttatcttctttgctttagtaatgcagccactaaactcttttcccttcccaatatcctccagcatgagatccaagcagtggacagcacaaggcgtcaaaataaggtaggaaacttatccattagcatcctacctactagggttgagatggctgggcgggctcacatttttatacctcggtccaaataagttttccgtctgaactgctacgactagttgtgactagtcgacgagtcgagcgactagcagagaaagtcgagttgctcagatcgactatcatctctgcaccgacttctcgactagtcgcccaactttaaaaccttggtacattagtacttgaaatacgtgcagtactcttaaatttggaggattcaaaacttgagaatatattctagaagatactattggccgaagatatgcattcaggagtcaggaccatacaaactcaaatgtgttgtttttggcaagagggagtaccatcataagaaaaagtgttggaagaatagctcttagattactgggccaaccctatatagggtttatacatgggcctcatgggcttagcctcatgggcctaatccacatattctaacatccccccgcagtctgaacttccgtcgcagcggagtttacagactggactcgaaaagaagtacatcacacacaataggatccccccacagactcaactagccactactgatgttgaggctggaccgaaaatcggcgaaggtcgaggacggaagacccttggtgaagatgtcggcaaactgggaggtggtcgggacgtggacgacccgaacagcaccggcggcgacataatcgcggacgaagtgtagatcgatctctacatgcttggtccgctggtgctgcactgggttggtggagatgtataccgcgctgacgttgtcgcagtagaccagcgtgctcctggagaggggactgtgaagctcggcgaggagctgccgtagccaggcagcctccgccacgccgttggccacggcacggtactccgcctcggcactcgagcgggaaacgatcggctggcgcttcgacgaccaggacactaggttgccgcctaagaagacagcgtagccggaggtggagcgccgagtgtctgggcacccggcccagtaagcgtcggtgtagacgaccagctcggagaaggtagaccgatgaagaagcagcccgtagtcggcggtgccctgaagatagcggaggaggcgcttcagggccgcgaggtggggctcccggggatcgtgcatatggagacagacctgctgcacgacgtaggagatgtctggcctggtgaaggtgaggtactgaagggcaccgacaagactcctgtagtcggtggggtccgcgacggggtcaccggtggcctcggagagcttggcccgcgtgtcgactggggtggagcagggcttgcagtcactcatttgggcccgctccagaatgtcaagagtgtactgtcgctggtgaaggaggagtcctgaggggcgaggctcagcagtgacccccaagaaatggtgaagtacgcccagatccttcaccggaaactcctgctgaagtgcgtcgacgagacggcgagaagtgacgggctggaggcggtgaggacaatgtcatccacgtagagaagcaagtaggcagtctcggtgccatgatggtggacgaacagagacgtgtctgacttggcctccacgaagcccagggtcaccaggaacgtagccagtctggagtgccacgcccgggggggggggggctgcttgaggccgtagagggacctgttgagccggcagaccatgtcagggcgagaggagtccacgaaccccgccggctgacagcagtagacggtctcggtgagggcaccgtgcaggaaggcgttcttgacgtcgagctggtgaactggccaggagcgagcgagggccagcgagagcaccgtgcggacggtggccggcttcacaaccgggctgaaggtctcatcgtagttgactctggggcgctgagtgaagccccgaagaacccagcgagccttgtaccgctccagggtaccatcggcccaccgcttgtgcgtccagatccacttgccggtgacgacgttggtgccgggcggacggaacaccaaatcccacgtctggttggcgacgagcgccgcgtactcctccattgcccgacgccagtgggggtccagcagggcggtccggacggaggagggaaccggagaaacctgcgagtctccggtcgtggccgctaggacccggggcggcagggtaccagccacgtgccgcgtcaccatcgggtggacgtgccgcgggtcgcggtgaagaagcggtgggtggtacaccggcgtctcgacacgtgccgcggatggccgcggcggaggtgtaggtgtccctggcggggactgggccaccggcggtgccgccgaaggagaagtcaccagtggggacggcggcggtggtggcgacggtggaggtgcgaaccccggcggcggcagccggcgctggtagacgcgcaccggctggtcggacgggcgcgcggcacaggggcagggcgcggtttctttggcacctggcggcgcaggcggacggagcaggggcggcgcgaccggggtcggcggcctctgggcgcgggcgggtcggcggccgtcgggcgctggcaggtcgcgcggcacaggggcagggcgcgggggcgcggcctcctggcacgcggtcaagcaggggcggcggccaagcgacgcctggagggagcaggcggcctggcggcagggaagaaaccctagccgccggcggctgagggatgagggaggaacgaaaaacctactgtgataccatgttggaagaatagctcttagattactgggccaactctagggggtggctatatagggtttatacatgggcctcatgggcctaatccacatattctaacaaaaagtacagtcaactttcatgaacaaaccaacacacccacccaagtacacttttcagtgactggaaaccttaggatgcagcagtttctggattatgacagtgtttaagccttcttaaagtttctgttggccttttcgatggtatgggaggctgggagtcaattttgagataaagcaagaaggcacctgagattatctactttttgtagaaaattctggtagcttgtgtttatcttcttacagaatgaggaatactgtttcttgcaactagaactgactttacctactgtttgcttttaacacatgttggtcttgactgattgactgtaaggctatcttctgcagcttacccatcctcatcccgatattcaaacttcagtttgcgaacagtgcggcctacagtgtaaaatagtgcaaaacagtgttttgggtgaccatatgagtgaaccgcttgagacggtctaagataaaagaaagaagaaaagcaggtaacgactactgtgtaatcagacattatgtgcaagcgagccttatggtccgttagatcatgatccaaccgtaagtcacctttaacacttatatttatagttggatcatgatctaacggactaagatgttttgcttgcacgcttgcacacaaggtttgattgaacaatagtcactgtcagaaaagcatgggggagaattgatgtactctgtttgtggcgaaaaaatgtcaaaacagcaaaatgagttccatgttatggtgtataacttgttactacgaatggtacctgcattgagagattgaccttggtgcatgtctagcatttgacagtatgaacatccccataatgtgaaaaagaaggtaattaaatgtgatgaagaaatttgagttaatatctgcatttgagctaaaccagtatgcattctacttcaagcaatcaatccaccaaaaaggtacttaaagtggccaaattgaagagtaaatgtgtaaaaaaaatatctccaggttttgtcagcatttaaattctgagaaccctcaacttgaactagctggattgttcttgtttccccaggagtgtacttgcactgaaattcgctatcattcttgagtaacttttttggacctgtggttcagtttcaaatacaattttggaattattaatgttctacaagcattttttctttagattcacagcaacaaatatctcgtttcttttcatatattttatggttcctctaagtatacaataacctagttttactttttttactactgaaccctcatattgatgtttgcattttttaatagaatttaatggtctgtgtataggaattaattggaaggattagaagagttggagttcttttatgagcagggacataatgtgctaaggggatttcgcttgcttttggcatttcagggtcccttgtagagctggcac

SEQ ID NO: 650 - DNA, 12137 bp, Zea mays
  Intron number 2 from transcript GRMZM2G080725_T04 (locus G RMZM2G080725) derived from phytozome v7.0 (chr-ID 1; pos 2 62309195 to 262321331 reverse strand)
ctgcacgaagtggttcgcttcttactccctctttcttaaactaaatgaagctgaacccgattcgctaccaaaaatctagaatctcaatcaaagggctataacatcagaatagatttttgaaaatctatactctagtttaattcacaaccaccttctaccctaatttttttcagatttctatgttataagatgtcatggtcttatagattctatagttgatagttgtttcaaccaaatatttttttataattgtcagcttataacagctttttcacatctcacaactagaatcagatttttaggagaaccaaacatatgcaaagttaagcttacttcagccacgaaatttcaagctccattagtgaaatcctttctctaccttggaatggtgattttgaaaccatgagcactgaaaggatcaagatttaaagagggtggattgggctaatctaaaaattcttgcaacaactaaaacctatcacttagcccattttaaccaatgtgtctaatagtgaattctatcttacgcatagcattttgcaccctaagttccttggttccaatcctactctagcatgtcgattttaggaatgtaaagacaacaaagtaattgcacaaatgtaaatgcaaaaggtaaagataaggatatgaacgctgtgatgttttcctaaagtatagagagttgatacttcccactagtcataattgatgaatcgccacgaccactcacaccatgagttgggtcacccacaagctccaccgagtaatcactaagttctcaatcaccacgaagttgtctaggtgatgatgatcaccaagagcaacaaacgcaaaccctcacttgacctacataagcctaaccaggaaggtggatgcacacttgctactctatttgcaacaatgatgttcttaatcatgtgattattaaatctcaatcactccattaggcaagaactccctcatgctctctaatgtgtttcttcaactgaacaaatgagcaaaagagactcggctagtttggaaactcaaatccccttcgggattgaaggggattgagaagaaactagttcatttctaccttaatcctctctaatctcgaaggggattcgaggtttccaaagtagccctaaggatgagatggaggggtatatattgccccaaggcaaaggcataggcatagtcgtttcccctccactcaatgttcacaaggatactaaacatgtctaatgcagccctcctatctccatcgaacatgttcgataacactataatggctagtttcaaaaaatattgttaacggtatgggacatccggtggttgaggtccattacttatcagacacgtctggtctgtctagagacaaacacccaatagtctttgtgaataactcttgtcggagtctatacaccatcagacgaatagctcacatctggtgcacatcggacgccaaggtcatgtgctaatttatttaactaaaatctagtgcattgttcatatatagtggataggttcgatgcacctacgacaccaccaactcatccaatttatgcactcattgaattagaaatgcctcgttttgaggaggggaaaactttagacaaatggtccatgctaacactagagatgtcgatgggaacctgatacctactaaagccttgttcggtattcctatttgatatggattggataggatgagaaaaattatgaagaatttcgacttgctatggattcaaactcacccaatctcgctcaatccacatggattgtgattgaaacgaacaggccctaacccatgaggaattttttctattagggttaggatatgagacaaaaattgtcccaatgagtataatatatgggacaaaatcctcacctattaggtaagcgggaatgaatatgggaagcaataatctaaacccgattaccatgggtaatattcaaccaataaaattaggtgtacaacctaatagacaataagtataacaacttccctatctctctcaacccttttaagcacacatccacccaaacctaggcgtccaaccaccagtcgcccgcccaccagcccatatgtcactttggttttgttgttttgtatggttaaacaatatttttcttgttacatgtctgatttattggtgatgtattgttattggatgtcgtgtgcctattaatatcttataaaatataatgtgataatgtttaacaccacgtggcccagataggagcccggtaatgccacatggcccatgggcacgtggcgcaagccttcggctggaggcaatctcgctcgcccacattcaatacaggcggctaaggtgtgccctgctgcacacagggcatggacagacttttgacagatcacgcaggctctaataaccgctccacgtgttaccgaggcaggcaattgtgtgtcagcactatgtgtatgggttgcacagtaaaccgcgtgttaccgatgcaagacggttgtgtctcagcggcgccatcatgagcaactactggctcgggctaggcacgctctacagtactgaccaaaaatgatagctcgggtatatcgtcataacttctacggacgttagcgaggttggcccctacatatgtcagcataccatagtccactccgcaggaccgtagccaactcgagctggcaaacggagcagaaacacgcttggttagaagatctgcatgacaatagagggagatctctgtccatagcagcattgaacactccatgttatacatatttaatactagatcgttgggcccacctgtcagggctcagcacccttgtacgtgccccccttggactataaaaggaagggcacatacgataaaggggacatgctctcttgagttcacttagacactctcagactcacaacaatacaactcataagtggacgtagggtattacgctctggcggcttgaaccactcaaaatccttgtttgttcttgtgttccaccatctcctcaggctaaccctaggtagccccttgttcttaggattaggtgggtgctttccgccactcgcctggagattacctccaacaccttcgtagaatgatttttcttctcttggcatcagtcgtggcttcctcaggtgcataattggaaggggaattgaaggtgtgcacatatgacattaggccgactctaggggattaaccaaagtttactcatatgcaatgttttgcactattttgcatgtagactgtattgttcgccgagtggagtttgaatataggtatgagaatgggtaagctgctagagatagtcttatatcgtgaatcgtgattgtcttgggtgatattgagaaattcttttttcttgatatacatgactcttttaggaatgtggaatgagtgatacgccgcccaaaactcctcccaagtgaaagggtagttggcggggcgtgtggccacaacgttacaccactaaaccctagcggtgtcttgtagatgaagagagaaccttgtcatgctcttaacaatgaataagtccaagcttttgctcgatggtaccgagccaaaagtcagtatccagaggctccttagtgtcatgaaagattagtgggttagtgtgaagaaagtcctcgtagccatgcatgggtaggcgatggtccatcctggtatggttggtacttggttgcctaagttgtgtactatctagctaaaaattgattattgagcaaggacatccataagtattgggcgaataggagggctataaggactttccccactatgttgctcaccacgctagaaatcggagcaattcaacatcatatgttgccaaatcaaataggtcagcaaccatatatgtagataagcaagaacatctttatgataaaaggggtaatcatgagataaggaatgatacacatttgattgtgcaagaataacattcgagatgaatacacatataagcatatccaaacaaaacaaggataataatcatgaaaatttggacaagtatcccagatttggaacttagtaaggacaataagaaggcatgaataaagccatatttttattccaaggtgtagcccatgtatgcatgcatatatgtgcaaaatatgaatgcaaaatgacgtctcctcacattgatcgagcaacaacaatggctccaacaattaatttcagcaagtgtaataacttagagatcatgatataaacttgcataagtaaggcatatgaaatataaaatgtagagtaaaattacaacttaaataaacttagttagataagttgcaaaaacatcacatacaacgtcttatattgctacaaggaagcctttccaaagatggtaccaaggtccactataccagatacaaactctcatgctactaccaacacttagcgcttcctactacaacttagcactaagggggaagcaagcgcgcaaaacatcgttccgaagcttattggtatgggaacctagcaaaaagaggctcgaagtagctcatgtagtggtagtccaaggtatcatcatcttctagtttcccaggtgcgtgagacgatctagagaacccaaaagagactctcaagaggtaggcacatgtggcaaatgtcgcacatgcagtcccatagagaaaaatgggattaggcacatgccttgtctacatccatgatccacccgcaacggggatgaagtgggttggaggtgtcatctcatgcagtgtctcgtaggggcaccctccgacgcaccttacaactacgaatgaatggctccaactcctattagatacagagaaggtgttgtcttgtctccaactcagctcccacttcacaatacgctatgcccaatcataagcgaacacaacctccggcatgcacctctccaaaagaggtgctccctctagtgcaataacaacgtgacacaccagatcctcgagaactcacatggggaattaggtgaaggggccttcccacaactattgatgctcccaagtaagaaagtcattgcttcatgtgccacctcttggatggccatctccaccgatgtctctaaagcttgaaacatgtggcacgtggacttgatcaccatccttgcttcaaggtgaagggttactgtgtagtccacaatcccaaccccatgtcctcgtagttaagcaatcactttgccgaaagatctacgaaacatttgaaatgcattgcatgtctttattctagaaattcttttgcaaactttgataaatataagttagttgatcttgctacattgtatgttgatgacttctcgttgtatgatcatatatgtttgagagatcaacttgatacattcattgttgaagagccgatttaaaattcttgagttgtagtgacatttgtaagcttgctgaattgatggtcgagtgtaaaaatatatgaacatctacaattggtatatcatctcattgaattgcctttgatattgctggtaactatatatggccaaatgagcggctcgacccgcatgacctgttaggaccgtctaggtaatcgtgtcgtgtcgggctggctcgtgtgtcatagcaaatgaacctaggcacgacatgaccgtttgcttgaaatggaaaaatcaccaaaaatgtcgcggatactggattcgagcccatgcacccttggtataagtaggggtgggtgttcgagttacctgaaaaattcgggtaagataattcgtgtaatttaaatttcagattctgagaatcggtatccgaaattacaacggattttataatacccgaaaattcgggtactcgaaattttgggttcaggtttgagtattcccaaactacccgaactattgtgtcagctccataatcaccctattaaattagtacaaaaacatagtttgaataatgttatacatgcactaaaaacaaaggcaaactacaatcacaagtttacaagtcatacacacttatatgtaattatagatgcatacattaataataacaatcacatgaaagttcgagtatttcaggtacccgattatggtatcccaattacccaaataaattttaattttacaagttgccacccaaaattcctgaacaaaatttagggttcgagttcaagtattctggttcgggttacggattttttcccagccctaggtacaagggtgggagaagttagttgagcctagctaaccaattggacccatgtttttttgtgtcaaatagcctctatatatatatatatatatatatatatatacattgtttttaaaaataaaaatataataatattgggtcgggtcgacactacgagccgagacagcagtctagatacgacacgaacccgatttaaatagtgttggaccaagccacgacactattaaataggttgtgtctcaggccagcctgtcagacacgactcatttgaccatctatactgatggcaactgtatatgtagaaataactttttcggttatgaatatcatcaaaagtgaattatataataaatagctaaatcatgagagagatatttataactaatgaagatgatgaaatattaagatatctttaagatttgagaacacagaagattagattacttcttgcgtattgattcctcatatgttccctctctttaaggctatgttttattttatttgacgggttatattttatagtatacttttatcttagaaccgctccaatgattttttaaaggacgtgttcggctggctacaagccgacactgttgcagctgtttggactgctgcagctgcaatccatagagagaaaaatactgtagaagccgcagccgcagccggattgcagccgcagcaagccgcagcgaacaagctgaaaatccttaatctgccactatcaatgagatgtggtcctagcttatgaaaaaaatcatagatttctcttccagcttaggggcatgttcgaacaaggtgtattgaaagggattaaattcattcttaattaaaattaaatagaagaggatttaatcctacgctaatttaaatacaacctaccctatttaaatacaacggaacaagatcttaattggtcctaaaatagctaggagcgtccgaccactcgtacatactaccttcgttctcgaatatttatcgctcactggtttatttttgaactaaaatatgataaataaaaaaagaacagaggtggaaacgaggcggtatgtcccggaccaagacatgtgcattaagagtaataggcaagcatagcagtataccttttgtcatttcaaccgaacaattgtaacatccatggtcccataagcaaatagttgtacagatatgtttacagattctattcttccaatccaggtctagcaaacataaaaacggacccaggccaccattgttagtgaaaatttaatgcactcactggagcaatattagctgaacatatacatatcctacacctaccttgtgaatgaaaacttgtgaagcaaggcatgtgtcaaaacaaaagcttgcgtatcaagctcatatatcaacatcacctccggaacttgccgaatcagcatcactaccatcgctaccactgctgctgctcccacttccactgccgctctcacttccgctgctgctgctgctgctcccactagagcttgagctgtcctgctgctcctgatgctcctctgcgttcacttgagctcgcagcgcatcggctgcattgatccacagatccgtgtcatcatttacatctacatcagcaatttcatcatccatatcgtcctgatttggtaagttgatgtcaaaaccacgaacagatgcctcttgtcctgcagccaagttgtttggtgaagcattgccatcatcgtcaccaagtatgtcaaggttctcttgctcatttggatcaggtgaaagggcaaatgggtctacggtaacagattgatatgtactcctgttgttgtattttgggcctgcaatgaacatgagtaatgagaacagatgatgcataatttagacaacactgtaacctctgaacaaaacataattatctttctcatcaacccatttttattagataacaatctgtatgtatagaatgcaaaataaggcgaggaaaaaaacaccacattagtcttgcttgacactcatataactatatccaccattctttcatctctaagttattgccctctctttgagacatgaagtggaagtatttaaggatggtattaaggggatgcatggcactagtgcctgcgcattgtataataacgtgtatttggagacctaatgttgttttctttctttgtagatagtgtggaaaatgaaggtaaaaaggaaaactacagacaatcccaccattactagttacaaaactgaaattctactttctttctccttgtgtgtctagagcgataggaatggagtctcaactatctagtattgtttcttagctcccacactactcaaatggcttggggtcgtatatatagctccaaagtccaaaactagccgtgggaagcaaagcagaaattttgcatactcaccgacactccgatgcactcaccgaccatgtccggtgcgtgttcacgtgtactagccgttgaactagtcggatgttgatagtctttatatacctattaaacaccaatactcctacaatacttaatattctcataattttcgcacaagtaaaataatctcaatagtcaatacatggttgacacctctctaatactttttcgacaccctggaacgatcccccattcacctttattctactagtcaagacctctctaggtcacttccacttgctccctccttatctctcttctataccgaactttgagaaaaggggacggctgacaaagtgagcccccatgctgatttccgagcacttgcaagtggcatggctccatggtcatgtgataatgacttcccttcccctatttcataatgcaagtgatactcctatgcatggcgtattggagtattgcctatcgagtattcgtgtatcaatatcaaggtgtccaggtgacatgtacatgtactaatgtatggcgatccatccctggtcaattgtcaaactaccacgtcccttcattacacgtgccacggtgttacacatccagtgaaacatttaatccaactcattttctaattgtagcagaggtgtggctagtggctacaatctctatcccagtataggattaatttcacatagagcctacctggattttctggttcaccaatgtcaatacgctcaacctcaacctgcagagtcagaatcagaatcagaagtatgatttactgaaacatcaaattttgaattgagagtttgaaactatatatataggatcacatcgtgatagtggagaagttctgtatagtgctagatagtggaaaagttctatatagcgctaatgtgagtatatcaaaatattcatatattaataaacttgactcaacataaagtttcatcccatacatgacaaagcaaattagaaatgatataataagcttttatatattaaacaaaaacatacactcgaaaattaaagcagcttggtaccatgattgaaacaatgtatatgacatttgcattgaagaatttgtttccatctcaattccatcttctaaatcccaacacaagaccacattcccttctgatactaaggatgtgtttggtttagttgtgagctataaaaaagttgatgtgagttgtctactgtgaaaaagttgttgtgagaaaaaagttgaaagtcgtttggttcaaactgctatgagttgtccacggcaaacaaactgtatattgtttatatgcactttgtttaactatatctcttaattaatatatataattaaaattttgatttcacatttgtgttcctaatattttttacaaataaatatttttaaaaatttcatttgtaataatttttttattaaaaaaatatttcatttattataacacttaattattttaatcctattttagtttcaatttattttgtctgttattaatataacgaactctgataagcagcaaaaacagggtccaagctactttcaaatttgtactaaagaaaagctgttttttcaaagtagttgtggaatagctgaactgagttcatcctaaagcagaaccaggtttcaaaagcagaaccaaacacacccgagctgcatactcagcagtatcagctgccatggttcagccttcagagttatgaccacagatttaaagaaaaataatgttatgaaccattattcattctaacaaatatgtcacattcagtgaccaagtgtgcacgtaatgaccctaaaaatgataacaatgagaggttatcacaagtagcaaattaagtttcacatgccgaccaaaaataaggtttccgcataaaaagaatagtagttcaacagtcatttattaacaagtagctaagatccacacattaagaaggaaaagccaactaccatattctgccaaagaagccttcataggtaatcagtgctaagaatacttgttatccaatgttttgcttctaaattacaaatatgttgaatcattacaaattaagagcatcacaatggacagtaatcagcaaccttaacatttcaatatccaattgaagtttcatttgtaactttataagcttgaagactaatgtttttgtgcatcattaaaattaaaactaaatcagataataattattttgtataccaccaacataacacttgtcttatgaagcaacagggtatggctgcagcttatttaatcctaataaattttcgaactagacagatttgaaggtaggcaaatatataacttgtggatcaaaattcctagtagaacatttcatcttcctaaaaagaagtgatagggtagcatatattttatttttttctcgaaaaacgcaggaggactacgttttagatatatattaagaagagagagacaagggtctaagagacccaaaaaacaacaacacactccctatggaggccagtaacactcgtacatgaaaggatccataaaaacacccacacacacactccctacagcaacctatgcagggggggagggggcagccaagaaggagagccctttggctccagcaatttccctgcctcttctttcctcatctaaatgctccataatcagaggaaggctggaagaccctccataaaaaatgactctattacgatgcttccaaatcatccatgatcctaaaatgatgagggagtcaagaccttccctgaccagaccatttgttgtctctgataccatctcccatcaatccataaaagaaactgcatctggttgtggggctaaactatgcagccagaactttcttagcacgttgtaccagaaaatccttgagaagacacaattcacaagcaagtggttcagagtttccccttgctggtcacataaaggacatctgatagggtgattcaatcccctttttgccaagcgatcagctgtccaacatctattttgggccaccaaccaaatgaaaaaacagcattttggtggagcccaagatctccaaacccttttatagtgtagcatacattttatatcatcctaaattttccttaatctgtctaggttaaatactatcaagtatcaaggaagattgttgatgacacaaagtacatcagatgataaatcaatgaacacaaaatatctggagaaagatatcatgtatttttagaaatggaacctgtcagaaatcttcaaactttattacttaatactatatcgcaggtgttatcatgttactcaatttaacagtgaaagtctagtaaaagaaagaacaatgacaaccattatctaagacataaaagtagtaacagaactcactggaactgagtgaacagcaggtttgttcatgctctgtgacttgttgactttaggtaatggaggagactgtgattctgcacccattccagtagttgtagctgccaaattaactgctgcagactctcctggaactcggacatgccttaacctcttgacagccctatgcaacctctctaggcgaaaggtctcaccatcaaaaaataagacaccatcattatccttgtactcttcttggcttccctcaaatgtcacctttggtttgccaggctgattattatagaattccacagtaacccggttatctttggtactctgcagagacccagcttgagtcttgtcaattg

SEQ ID NO: 651 - DNA, 5495 bp, Zea mays
  Intron number 4 from transcript GRMZM2G092286_T02 (locus G RMZM2G092286) derived from phytozome v7.0 (chr-ID 6; pos 1 6146596 to 16152090)
aggctgttgcactggccttgctctgagctttccaggtaaagtttgagaaaatgtgcaatcaatagccttgaactgttttattttacaattgctgaacagtctgttccttaatgctctggtgaggactaggattacataaataatagccatattatttatttggccctgaggcaattactctttttttatatatttttgctctttgcaattctgacaatgttggaaattgagaacatgatgtttgtgtttatacttgatgataacttgttcataagtgtggttcttggactgtacctttgcttgcaacccttgatctggctgacctctagaccaaaacatagaaatcttcatatgctagggactagaggaagctggttgtaaacttgttagttgatggcatctcaatttctttaggttgaatggttttgagaaaggaataagtcgacataacccccatgacctttagagggtgatctacttcacaccctcatcttcaaaatcggttgtttaaccccctcggctttacaaaactagacaaataattccttgggtagttttaattggcggttttgatgacgtgacactgatttaagtggaatgagttttgtttttttcagttatgtcatcttatagtatccaaaatttatataacttcacacaaaaaatgttaattagataatatatccgttctaatttttctgaaattttaggagtaatagattaattactaaaaataaaactacataacaagagtttaatatttttgtctctgtttcatttcttatcttttaaaactaaaaattttacaaaccctaaataatattattactaaattactaattttttgttgattttattaaacaagttaagtggttttttctaattactaactaaatcaattatatattatcaaacactaataaagtgattcctaattttgcacaaaccttctagctaaactaatatacacaaatatttttagaatttttgagaactttaaatttggactcataatttacataaatatttctgagaactttatataggtctagatttaaagttcttagaaaattctaaaaatatttgtatatgttagtttagcaaaaaaaatcctgtgtaaaaattggcattattttattattgtttgctaagtgctcttaataacaaatataaaaataatttagtttgcaattagaagaaaaaatacttaacttgtttaatacaacaacaacaataacaaagcctttttgtcccaagcacgttggagtaggctagagatgaaaccccatatgaaaacctcagagctcaacccccaaagaaaagggagacaaaggcaaaggagaaccgaaaaacgatgaaacagagaaacacattaaaagagataaaacccacaagaaccagcaagatctaaaaggacacaagaaaaaggtcaaacgattaaggaggaaaagcgaaactacaaatcagggttctggcacgtgaattgcacacttccaccccttcctatccacgacgagctctttatcaatattccacttcttcaggtccctcttcacagcctctgtccacgtcaaggttggtcgacctctacctctcttcacattctcgggacgcttaattattccgatatgtgctggtgcctcttcaggtcttcgttggatatgtccaaaccatcacaaacgatgttgcataagcttctcctcaattggcgccactcctactctctcgtatatcatcattccggactcgatctctccttgtgtggccacatatccagcgcaacatacgcatctctgtcacacttagttgttggacatgtcgtcttttagtgggccaacattctgcttcatacaacatagccggccggattgctgtcctgtagaatttgccttttagtttgtgtggcacccgggggtcgcataagacactcgtagcttgccgccacttcaaccatccaactttaattctatgactgacatcctcatcgatgtctccctccttctgaagcattgatcctaagtaacgaaaagtgtctttcttgggtaccacttgcccatcaagactaacatcgccatcctcataccccatggcactgaaatcacacttcatatactctgttttagacctactaagcctaaaaccttttgcttccaacgtctgcctccacaattccaacttttgcgaaacaccactcctactctcctcaataagtaccacatcatcggcaaaaagcatacaccacggtatatctccttgtatgtcccttgtgacctcatctatcaccaaagcgaaaagataagggctcaaagctgacccttgatgtagtcctatgttaattggaaagtcattggtgtctccatcacttgttcggacacttgtcacaacattagtgtacatatctttaataagattaatgtactttgttgatactttgtgtttttccaaggcccaccacattacactcctaggtactttgtcataagccttctccaagtctatgaagaccatatgcaggtctttcttttgttctctaaatctctccataagttgtcttagtaagaaaatggcctccatagttgatctcccaggcatgaaaccaaactgattttgggtcacgctcgtcatcttccgcaggcggtgttcaatgactctctcccatagcttcattgtatggctcacgaacttaattccacggtaattagtacaactttgaacatctcctttgttcttgaagattggtactaacgtactccgccgccactcgtcgggcattctgtttgtccgaaagatggtgttgaaaagcttagtcagccatactatcgctatgtctacaaggcatctccatacctcgatagggataccatcagggcccatcgcctttcctaccttcatcctttttagcgcctccttaacttcatattcttgtatccttcctacaaaacccctgttgttgtcatcgaatggttcgtccaattctattgtagaactctcattccctccattgaacaatttgttgaagtactccttccatctgttcttgatctcttcattcttcactaatagttggtttgcttcatccttgatgcatttgacttggttgacatcccttgtcttcctttcacgaatcttggccatcttatagatatccttttctccctgctttgtgtccaaccgttgataaaggtcgtcataggcttgaccccaggctctactaaccgctcgctttgcagacttcttcgctatcctgtacttctctatgttgtatgcacacttgtcatgatgtaagcgtttgtagcaatctttcttctccttgatagccttttggacatcttcgttccaccaccaagtgtctttaacttcccttctgtttccttgactcaacccaaactcttctgaagctatcttttggatgcatgtcgccatcttcctccacatgatgtttgcgtctccctcttctgcccaagggccctcctcgataactctctccttgaaagtttgggccacatcccctttaagcttccaccactttgttctagtgaccttgttatgcttattccgttgtaaatgaatcttaaaacggaagtcagctacgacaagcttatgttgggttaccacacactctctaggtataaccttgcaatctaagcactcatgcctgtcctcttttctcaagaggacgaaatcaatctggctagtgtgttggccactactgaaggtcaccaggtgggatttcctcttcctaaagaaagtgcttgctataaacatgtcataggcaaagtttaggatctcctctccttgattcctactcccaaagtcgaagcctccatacacaccctcgaaactagtgctagatatacccacatggccattgagatctcctcctatgaagagcttctcgccaattggcacactactaaccatgtcctccaggccttcccagaactccctctttgagttctcattaaggcctacttgaggagcatacgcgctgataacattgagaaccaagtccccaatgaccattttgactaggatgattctatctcctagcctcttaacatctactaccccatctttaaggctcttgtcgatcaagacgcctactccattcttgtttgctgcagtccccgtgtaccacaacttgaagcctgtaccttccacttccttcgccttctgtcctttccacttggtctcttgagcgcataaaatatttacccgtctcctcaccgcaacgtcgactatttctcgtaacttacctgttaaggaacctacgttccaactacatacacagaccctagttggctcgactagcttccttacccttcgcacccgccaaggaagatgcaaagacccttgttcattttccactgcacccgggcgccgatgtagcgcgccactaaggatgtgacgacccgatccttgctcacttatcaccggctccagatcaagagacgacgcgtcacttaaggggtgacgacccgacccttgctcatttaacaccatacccgggttccgatatggcgcgtcgctaagagggttacgtcccaacgattttctttgtggtttcatctccataagatttggctggtttttacgttggtttgccggacctaatacaaccctcctcctttaccgggcttgggaccgactatgttgaaacgactcaaggaagtcttccaatcaacataggcggagttacttaacttgtttaataaattaacaaaaagtttaatagtttactaatagtattatttagctctattaatattttagtctcagaaaataagaaatgaatcagtgacaaaaatattaaactttttttatgtagtttttgttatttagtaagctgatatttctaaaattacaggaaaattacggaacacataatagctaattatagatttttgtgtaaaattatataaaatttggacactaatagaagacaattaaaaaaaagacaaaactgatgtcacttaaattagtgtcacgtcatcaaaaccgctaactaaaattgtctaggggttatttgtctggttttgtaaagttgagggggctaaataactagttttaaaggtgacgaggtaaagtataccaccctcgaaaagttagaaggttttatagacttgttccttttatgagaaacatgcatacttatgtgatgtccttagtgcctgactgactgtcacggatagaaagttggatggttattattcttaacaattctgcattttgatgtccttaggatgtctccataattgattgtggtttgtttcttatgcattatggtgtatcaatgtttagattccaattactcgtattctgttgatgtccgtgtcatacgttgactgtttgcattctgttcaagttaatttgttatgctgacttgtttttatttattagaatgatgtcctggtgcagtaattgttgaaatcaatatcacatttttgtactgggtttcaggtgcaccacaaactctgattcagagctgcctgacc

SEQ ID NO: 652 - DNA, 2548 bp, Zea mays
  Intron number 2 from transcript GRMZM2G113532_T01 (locus G RMZM2G113532) derived from phytozome v7.0 (chr-ID 9; pos 4 7229503 to 47232050 reverse strand)
ttcaggaatctcttagctttgttaagaaagtaaaggtgagaagttgctcaaaggaactctcattcatttattagaagctttttacagttttgatggatagtgttcattaatcttaagttgttgcgccccatagctgttaatttatagctcatgttccattttctactgttttgcataaatatctgaggtatgatggtagtttcatcacatagtattttgaattgtagttttgtagaaatgtattatttgaaataaggaagttatatttatgaaagtattccatggtgtagctggtatcatcggaatcatatactgtcaatatatatacctttttatgtagctggtaacgcgcaatatgaaatatttaagtctatcataatcaaaatttgcatgaagtctccgtctggagatgagatctcctttgccgattggtggcggaaagtaagtaagaagattcataaaagcaagagaaagggtatgaacagcgtcatcattttgggggcctgatgtttatggattcaccgcaacaaggtagtcttcaatggagagaacccttcgctgggcactatcagatgcgtttttattgatgagatggggtgttggattaaggctggagctaaacatcttcagagtctaggcctagaggtcgcgcttaatatacacatggcctaattttgttgggggaggatgtagtgtgtgtgggtgtttttatttggcctgtttagggctttgtacctcggtccattttggaccctttcttctctaattaaatgatgcgcgctctcctgtgcttttgaaaaaaaaaaatgcatgaagtaaaatttatgaaacatgaagctttttgttccactgctttggggacaaaattactaagggaaaaagtccatattgctgcaatgaactattcacgttgtccaccttacctatcatattcagtttcatatcattaacttcccttggcgacacgtcatgtcgtaatctgggtacaatgtcaagtgagtaaagatcgaattgttgctcgttacatcggtgcccgtgtgtagtgaaaaaattgcaatggtcttcacatcatcgataggtgtgaagggtaaagaagttagttggaccaattaggatctatttaggtagttggaatgtagggttgcatacaggtaagctaagggggttagttgagatagcgactaggaggcatgtaaataacttttacgtgcaagagactaaataaaagtgttagaaggtgaaggaggtggacaataccagcttcaagctttggtacatagagacaactgcaaatagaaatagagtacacgtttttattttttggttgctcaccatacaattcgggtcgtgagttcatattttgtgggtgatatatgacaacataccctatgttacattttttgttgtaagttagaatgttttattccaacgttttactccctatgtgttggatttgtggccatgcaaggaggaatcaagtctaaaacgatgatatacgtgataggctaagggtagcatcaattgaagaaaactctgttcaacactgattgagatggttgtacatgtccaatggaaacctttagagacaccaatgcgtaatgggatcctaaggcgcaacagtaatgaaaagagagacagaaaaagtccaaagttaacatggaaaaaggcagtacaatgagacttaaaagaatagaatatatagaaaaaattagctttgaataggagctagtggaaaaaagctacctatgggcctgaaccttgatttgtgacttctaacctaatctaacttgcttaggactaaaagactttattgtagtagttgattttactccctattttatatttaagattttttgtgattaattttgtgccttcccatatctagaggttaaactagtatcagatggttctaagttccaacgtatgaaaataatcacgaaaaaatctaatatatttttggatataggttatgctgaaagtgcttgaacatgagaggcaagtttgctctcagttctttgctctctctccattcatatcaactgtactgttaaatgatcactagtctgttactcgtgtgttctattggttagataggtatgaatttggaaccaacaactaaggttaaaacccccgtttgtgtataattttactttatttttacattaaggccttgttcggttattcccaatacacatggattggatgagattggaaaaagttcttaagaagtttgacttgtttgggattcaaacccattcaatcccactcaatccatatgaattgagagctaaccgaacaagccctaaatgggaagggtgacacgagacgaccgtgaaactagtgctttatatagtagagactagtgttacatgaatattttgatggtacaccatttatgtgctacgaagtattgtgggagagcgcccgtgatatatgaaaccaaacctatcgtagggcaccctgttttactgctgtgcatcaagtaatactgtaatagttgactgatttgtgtttgactgtctctttgctggtgcaggcacgtgactac

SEQ ID NO: 653 - DNA, 7289 bp, Zea mays
  Intron number 8 from transcript GRMZM2G004475_T02 (locus G RMZM2G004475) derived from phytozome v7.0 (chr-ID 7; pos 9 8408673 to 98415961 reverse strand)
ggacagctcgtatctggggtgcgggtttcaaaccatcatcctttcctgtcttgtgcattgtattttttttttctcgaaagagcgcaggaggactgcgcacccatatattaaagtagagggaaaataaagggccataaggacccaggtacaagcactccttatggaggccagaaacaagcatacacaaagctatccataaaactggacaaaaaacactacagccctaggagctaggtagtttggctggccaaaaaggaaagccccttggcaccagccagccgccacgtctcctgttcatcctcagcagcttgaagaaggaaggagatagagggggtccttccatcgaacaccaccttgtttctatgattccaaatcatccaggcccctaaagcaacaagggagtccagtcctttctttcccatgttgaggacatgagcccgaggaattctcccaccaaccaaggaaggaaggctccacttgctgaggggataagctgtgtaacccaaactttctcaaaagcctataccagaaaactcttgagaacacacaggaaaccagcaggtgatcaatgctttcaggttcttgatcacaaagagggcacctagccggatggttcatgcctcttttctgcagcctatcagcagtccagcatttatcatgtgccaccagccacaggaagaaatggcacttgggtggcatccaggatttccagattcttttgtggtgaagaaaggagcacgatccctggaagagcccttcataagcaacttttgctgagtagttaccatctggcgctatggaaaaaatgtgtctgtcttcaatatcaggatgtagctgaaaatccgttaaagcttcccagagatgcagaaaatcaatcaaggcccctgctgagagagcgcccctaatatcactaatccatctcctattgtccattgcctcttgcactgttcttttattggcaattctttttgatatggtgcagaacagtcttggtgcaatatcagctacctttttcccattaatccatttatccacccaaaaaagagtattcgcaccattgccaacctctgacatcaacactgcagagaagaaggacctggcaatacttgggacctgaatgggtaggtccacccatggcctcgaagaatcagttttttgcagccacaaccacctcattctgagagcccaacaaagcttagtcaggttagaaatcccgaggcctcccatatgtagaggcctacaaaccttttcccaggctaccatacagtgacctcctttagcatcctttctgcctctccataagaatccccttctaattttatcaattgcatccaaagcccacttaggaaaatcaatagccattgcagtatagattgtcatactagttaggacatgctgcactagaattcttctgccagctttgttcaacaactctgccttccagcttgggagaagatctgcaattttctcaataaagggcaggagctgctgtttggttagtttgtgtagagaaagagggagacccaagtatttgcaaggtagggactccaccccacaaggtaacaagctttgaacctccaggatggtctgctccgaacatctgataggataaatactggatttctgcacattgttgtgtagacctgaggcattcccaaagatgttgagaatgtccagagtagtggaaatgtcattctgagttgggagcaggaagagggccacatcgtcagcataaatagaaattctatgaagtttctttctgttggacaattgttgcagcaaccctgtctcttcagctttggcaaatagaaggcaaaggacatccatgactaaaataaataacatgggggagaggggatccccttgcctgagcccccttctatgttggattttattgccagggcacccattgagcagcacttgagtagttgaggaaccaagtaacccacaaattatatttctccagatttggccaaaacccaaagcctgcagcacctcaatcagaaaaggccatgaaaccgagtcaaaggcttttgtgatgtcgagcttaaaaagaagacatgccatattttgctgatgtaaaaatcttgaagtttgctgcactaatataaaattgtcctgtataaatctgcttttgatgaaggcactctgatttggggagacaagctcatgcagatgaccagcaagcctattggccaggatcttggttaccaattttgcaaagctgtgcacaagactaatcggtctgaaatccttcacctgatcagccccatcaaactttgggatcatagtaatatatgcagaattaactttatccaagttattgaagttcctacaccaaattgctgaaactgcattgagtacgtccactttgatgatgttccaacaaaccttataaaacctcccagtaaaaccatctgggccaggggccttgtcagcaggtaggttcaagacagttgctagaacctcctgctcagtgaaaggggcgtccaagatggagaggttatgagctgggaggccgagagcagctaaatcaatggtattctccctggagaccgactgaccaataaggttggaataaaactgatccactaaatctgctttggcagcatggctagtaataatattatcaccgtctttcagcaaggtcaccagatttttccttttccgatatctagcatgcatatgaaaaaacttggtgtttgcatccccctccttaatcctggatattcttgatcttaatcttgccatggtacgcttgaaggaggccagcagcagggactgtttcttgagtctatttttaagccagcattcagccggagatagggccctgtgatcttgagcgatttcgagtttatgcagcaactcctttgccagacaaagctgcgaaacaatatgtcctacctgcttatcactccagctgcgtaacctcatggctgtcaccttgagtttcctatccagggtgatgaagggacagctgaccggctgtacagaattccaagcctccagcaccacgtcctgaaatccctccattttggtccaaaaggactcaaaatggaaccttctcttgccaacaatattgtcttttagaccaagaagcagcgggcaatgatctgaatcttgagaggatgaactgagcagaagcacatttgggaagtatgattcccagtcagccgagcagagtactctatccaacttcacaagcaccgggttatcctgttgattggaccaggtaaactttctgccatgtagctgaatttctttaagagctagatcgttgatcagcgatctgaaccggcccatcatgtccctgttgaggttgagttgttcttatcactgttcttgtagattagattaaaatctcctgcgaccacccaagggccaacacaagccgctcgggtatctctcagctcctgtagaaaaataattttttcagaattcccctgaggcccatagacacatgttaaccaccatggctggccgtcttgtctacagaactgcactgaaacacaatgattatcaattctctggagtccagtatgaccaatattcctcttccaagccactagtatgcccccactatttcctatcgaaggcaggaacacaaattctgtgaattcgacaccaagcatggatagtatatctcttctagaaatagattgcattttagtctcttgacagcatacaacatcaattttagcagaatcaaccagcattctcacagcatcttgcctgatcgaagagttaagtcctctcacattccagaaaagtattttggaaggatccattggaaaattaacagaaaacgccaactggacagacctaagaccttaagtcttcaggtgtagaccacccaaacagagcagctaaggcatcaacatgagactggataagcgggcgtttaaaaagtaaagcatactccatgatagcatcagaagtaatcttatcagactcattgataatacgtaaagccctcattgctttcttggatgccttgctgcgccaatcctgcatggagaactccacgccaattccagccacacgcctactgcgtcgaggcatagtcacagttaggtccttttgcctcttcagtccagtcccgggtgcagggaggaggtgtgaaggctttctgctaatcatgttgatgagggatgatgatggaatcgtcagttgttctgagatgtcagtggccgagttaattatcccatccgaaatgccttgactgggttcctcactgtcctgaagatcagtggtcctttccatcagctgagttgttccacattttcttcttgagtataccttgagcagtggcttacaagaactctgcttcaactggagttggggcgagactggtactgcgcacttggtctcgacctgcccagtaagggtcaagatcgcatgcacactaaccgtctcaggcggcccagactcaaaaacagaggcgtccccttcaaactcgagtccctggggcgagactgatctgagattgtgtgtctccagcggcccaattatgtggggcgagaccacagatggactgaccatctccggcgacccagggacgagcccagtcggggggagaacaggagttggcgcatggggcgatcccaacccaattaattccagcggcccagtcaccatggactggggcgaaatattcctgggagggttcagcgacccgcgtgcctcactcatgaagacagtgggggccatgcctagggtactgtttgtcttccaccttgggtccagccttgatgcctcgggaatacccaggcagttaagtccagccgccggcgccaggatatcttcatcagccgaccttgggtccagaactgttgcctcgggaatacacaagagatttcctccagccgcatccttcccattgtccaaggaatttaaatgccccagcttcaggaaatcagccgcatgttccccgtcgtccaagatacttaaatgctccggcgccaggatatcttcatcagccgaccttgggtccagcactgttgcttcgggaatacacaagagatctcctccagccgcatccttcccattgtccaaggaatttaaatgccccagcttcaggaaatcaaccgcatccttggtggtggcaggcgtgttcagctctctgttggcacgcgagacccctccacttccttgtggcggctgtggtcccagcctggaatggactgactgccgaccagcagaaggggcacccatacgaggaggacgagggaacatactgttgccaatatcctgatcttcaaaatcttctggctgatgagcgtcatctgggggcgaggagtgcaatccccccaaatccgtgtcctcaggattgaccatggttgcgctgatattgatcttgtatgataaacaacccttgtcattgctctgcaaccctctctcaataatgtgtagcgtcatctgccgttgtaactttttaaaatcaaaacaccatgctcgcactgtaaaggatgagagactctttttcatcagggtatcagaatggatctcaacaatatgacatgagtcgttaagaacagcttccgcagtggagcaagaccatgcatgttcagggattcccctaatctgcacatccactaagtgagacatgcgagacatagaagcatgagagaaacgagaccatcttttgaacattaagcagaaacgaggtccagtgaataatctgcccccattgaaaatcctggaggcagtgtcctcatccggcaggaaaagcagaaaatcctctggtgtggaatgttggatggacatgttatcaatacataccccaaagctgcgagccacctcatccaacacctccgatccctgtaccacaggtctagtacctgcgatggtgacgaacagggcttttcgtagattgatctcttcccttgccatctcatcagtgaacgtaagaacacgtgaagcttcaacggttgggggagatgcggtatggaattccatcctcgactgggagaaatgagcttcaggagatgagggaggggaatctgaacacacacccgaacccgcagcttcagcaggaccttttccttttttgctcttggaccttcttcttttcctcttgttgcgaaaggaacgttgatcaacatccggggcacagttgttcaacattggagatggctgattagtcttctggtcggatgtttggggtgcgggagagatacgcacccaaactgacttcttcttctttggaggagcagcactcccagctctgcactgcgggggggagaccttctgagaagatagcctcttgaacaccgagaggcgtttgctgggctcttctaaacgatgccagactgacctcttgcccaccgggtatgacttgtcaaattccagacggtcacgcaagcgacctggggtcttcagttgcagagggccggcctgaatggcagggcaccgagaggcttgatgtccgagcttgaaacacctaaaacagcgaggggggcaccgacacgaagccacgagatggtttggagagagacagttgaagcatctcccgcggaggttcacactggtccctctccgcgccgaagcacaacgagactgctttctgctcttcaccacctgccagccatcctccttgtcgaccggcaccaggtcttcacgccggcacaacctcctttccttgtcacagagcttcggccttgctatggtagaagtgtgtacgtccaactccagggaggtggcgctagaagaggaaaggagggcctctttataggagtgcaccgtaccaccagaggaggaacccgaagcgttgtcatcccatcgctggaacttggaccgccccacctgagaggtgcagaagccaagagaacagggcagaggtgtggtcgccggcgccggagtagcagccgtcgaggggctgtggtggctggtggaggaaggggaggggttggggtcggggggaggggctgggatagggggagaagacataccttctcgtctgtttgtcttgtgcattgtagcttgattttcttcctttatctgaactctatatcagtgatttgcaaattcaaatggaaaatgttaagtttatacatgcttaaaagaaaagcatgaacatgctctagcagcctctgatctactgattatttgttagttttatttttttctttcctgcaaataagatcttgttggcccaatttattttaagatttagactatttgttgccatttaaaggctacaagtgcctgaatttttgtggccatgccttctcttgctgtttttggacattgcagattgcagaagtgggaagtgcactcgggttatacag

SEQ ID NO: 654 - DNA, 3875 bp, Zea mays
  Intron number 1 from transcript GRMZM2G161222_T03 (locus G RMZM2G161222) derived from phytozome v7.0 (chr-ID 5; pos 1 3617181 to 13621055)
ccttaacagttctcacttccaggtatggctttaattgattttttggcttctagttaagtatattgtcatcaacatgccttctaagttttgttttttagtcaaatgagctccatatgtttcaagatatgccttttttcagtggatatgcctcattgcaagtcccaaatcacaatttgcatgttgaggaaaacaagggcttctttggttgctgcatgactctgccctgcccaaagtctcggccggccaaatcggctgcccagaaattggccgcgcatttgctgcaaaatgaactgtgtttggcctcatgagctggggcaagccaaaatacggtgggaatccaaacaacatcagttttcttggtcaacagacagattttggcttggcagtcatggacgttcatccaaacccacccttaaactcttatacaaggcagtgttaattaataggaaaaaacgaaacgggatgcattgctttgtacattttttgtaacctagcataaaaagttccattaagtgtacccaaatgagttttgaatcagtaggacacctttgacaattaccattttgcactagtacttctagtactatctttattggtccttgtccgcggggtaaggtagcccccaggtgttttgctaagaagaagacctcatacaggtcgagaaaatcctccaacccctgcacaccaatacatagtggcaccaaaacccatttgaaaacgaccacgccctgtgccgtgatctgggaagtcagaaaacacattccaggttgaagaaatgctcaaatcatttttgcagtttttttcatcactgtctttttctgtttttggtcagaaaacattctttctgacacagtggaacacaatggctgctttgaacccgcgacttggtgactcagtgagacacttctcaccactgcaccaggcctgcctttcatacagtggaacacactaggtgataattgattgtttccagacaatgtagtacttaaaggcacatttagatcacacttatggagtcatgaaatgttagctatattcataacagtcgagcacttatgtttcataatttttttagtcttgcaatgttgaaatatgttacagaacttggatgctatgggatggaagaatctaagctgggtgtagatggaaaggactggaatagaatcttcctttccctttttgtttcttcatgttattggtttatgtcagtgtatccagctttttgtggcttctatttcctttttgcagctaagctgcctaatagctttagatgcacattatctgtagcttttagcagtagaagcatgcaaatattggactcaatatgagatttctaagcagtacaagctgccatttgcagcaatcaactggagtatggaaatgtgtttgaactttgaaatatttgaaagatactatgcaattacttctttaaatattgtactatctagaggatagattactcgctttccacactgcactggacctgtaaactacaaatgtaccatctataagttctggaagaatgtaccatcactatctataaggagccagatctattggttcttgtctcagtgattgctagtacaacctttggtgttatgttaaatgttagctgatctgggagaaagtcatgggagaggctaaaacatgcataagattacacaagctattagacaagactggttccccagtgaaaactgtttgttgtgggcatattcaaagatatctatgctagtgtttcattaagatagtcatgtccctcaacagcagttgataaatatccgttgtttcgagttgatctgttctgtaggatcttaggtaccaaatatttcagtgttattgacaagaccagttccctcatctagcaacatgcagcatttatagttttacagaatatttctgtatctgtcactgaattttagaaaatgattgcatccatccatttatcattccattcttcaatttccatggtttgcatcataaataaggcaaccaaattgcttttttttttaatttttaggcacctaagtctggcagtagataagttcagtaaaaatagctggaccactcgctttggtaataatgattgtgttgttgtagataactcttctctggttgtaacatttcttgtaccgaattgactccagaactcgatatgcctgatgagaacccaatatttctcattatggtcttgtgtatgttccaattttcctatactgggtccaaccatttccctctgctgcaacgttctaagaacatcaatgctctgtgggtgtcatagactggatggtgatgtttactgcatgctaattggccagtgtttcttttagtttgattattgttggagctgatttctagccatgcacattgattttagtaaactgtggcatactggtttcattttcattataatgcttatttatgatattggatgactaaataaacaataaattttccattcacacaagcttttgagctatgctgctggcacaaacgattcaaaatccatttctatgtgaattattctggttggtaagtgaacttatctagatgatcgagtaccaggaccttcgtatcaaataatgaaacaccatctcaccatgcatctctgtgccctgtgtacattctacaatgacgactctttcactcactgcattcggttactgacatttgcttgagtacaaatcttttcctatcctttttaccattttttatggatatatggcctgctatgttatttctgcaaataaataatatctcatgtttgacttcttttagttcattataaatccataaaactaaagattcatgttggacttgttttaattcgtttttcataaatcccaggaagcttctctatcattaaccagtttattttagtttttaggattgtcacactgcatttaaatcacatattcggtactggtagtatgttaattaatcttggcttgaatctcttgacagttatataatatattcctggttcgtgtcttcaattgaagcgaaaccttccttgagcatacacaaccatccaggtacccactcatggatgagtgggtaatatgacctattccctctgttgcttaacttttcttatctagtgctgcatttgtcaataacctgctttaggattggagtcagcttgtacaaatatatgatacactcacgacccttacgcatcccaccacacagacaccctctcccacaaaaatgggtggcacatatataatagtgcacaaccagtgtaacatataaagaagtgcaaaaatccacttttatacctgtgtcttatggcattttgagcaacagaaatttagttggtactgtttccaattgctgtccatgtgctgctgctgtgcaaattacatgacacttggcagtggtcatggtagagcctagggatcttagggcgcgatcatgtgtgatggtgggtcggcgcttccacgagtgacgtcgggcaggtgccgtcggaacgggaaagagggagagcatgaactcagggggcaacggctgatgttgtcctgtttaactgttccctggtacgagagtttgtgttttatcaatctaaacaattgaacttttaatccaggtggtttatctaatgtcggtcagttgccgcggatgtgcacacggcccatgtcccacgacgccgtgcatcacatgtccacagtccttcgtctataccgcatcataatgtaccctttgcctaacaagatatgctttatgttgccacttctgatttctagaaagtattttaccgtgttgttaagttggtagttcctgctttgtaatttctagaaagtatctctgatgtttttgcttgattattgattttgcttgtcaggttgctgaacgcgctttgttcttgtggaaca

SEQ ID NO: 655 - DNA, 4483 bp, Zea mays
  Intron number 2 from transcript GRMZM2G361615_T01 (locus G RMZM2G361615) derived from phytozome v7.0 (chr-ID 7; pos 1 9826862 to 19831344)
tataacaaggctctgaaggtacccgtttcgttaactatgtaactatgatggctgctgtgttggtctcatttgagcatttgttttaatgaaatgcatttaagtttacatgtagtgataatccagtggtcttcagcatttagtctggcttctgttactgccctatgttaataacttttacctaatattcttggcatagtttatgaattttcaactgccccattgtttaatattttcacttaatagtcttggggtaactttcctgcttggacgtttgtccagtggaatgtaaaactacactttcagtctagttgttcgaatcgtaggaagctgaaatttctcaacctgttgtctgtgctgcacttgttcctgatctttctatcctagcaaaactattaaggcactcagtaaaaactaaacaatgatgacattttgctcaaggatttttttcttgattagctcatgagcatgaattatcgttatccttggtaacaactttcgattttaagtccttattggacatttcttcttgatctgtggagattcactttttcaaacgatcttgtagtttgatcgcttcatgggaaatgatgcatgcaaatgaggcttctcaagtatgtgatgtccttctcatgttggagataccacccaatccatcaggacattgttactgatccattagagtagctaagtttgccagaggcaactagcattcatatttttttttaatttgtgttaacatgttttcatatagcatgcaccactgaaattcgatttggcacgatgcattcacagctttagatagaatgatctgtttgtgctagctaaacatccaagttgttggacaaggactggcataagttttatgtagaatacaatataacattaattccttgctttttggtgattgtatattcttcaaaggaagcagttgatcattaattcaagcacatctgatttgtatgcatattttttagcttttgctcaaggttccaaaagatgctaggcactagaccactttctaggctggactaaaccaatgttttctggtcgctcgaccagctagtcgaactgggggaacgaccaggcggctaatctcgattagtcaccgactaggtcgactaatcgacctctagtcgacctggtcatttactagtcgtcctgttcatccaggacctatgtatatactatatagtatataattatataactatatatgaaggatagggtaaacatgacatgaattcagcaatactgaatactgatttaagaaattgagagaagttatttgttcatccaatccaagtatccaactgaacagcaaagaaacacttactagttactaatactaccagcccaagataccatacaacacacattaccacccagctacctaaagaagatcttcatccaactgaaattcatcacctgcagctcctcttccacctgattcttgttcgccttcatcttcatcatcattcatttgtcttgctgtctcttgttcttgttcatcttcagcaggagaattgtcatcttcttcacgtatgtcttgagctgtagctgctgcatttctaggttgttttctggttctaacataggtttgtgtctgagtctgagaggaggaaccagcacctgcagcagcagtcttaggcaaatttcggccccgtgaccctgagttgcacctagagcttcatccacagcaccccaaatgttatcaccatcagattcttcttcaacccattcattttgccacataaactcttcaagcaacagtggattgcttctcttcccttggaacctagctctcttatatttgtgaacctattatccatcttcctgttgtagtttacatagaccaatttatttagtctcttgtgctccagtatgttcctcttttttgtatggatcttgtcatgtgcggtcgcacatatacgcgccgcaggcgtgcgcacgatgttcgccgcgccgctgaacgcgccgcgcgcgcgctggaacagccaggcagtggataagtttagaaagtcaggattagttgccttgttggttgcctagaatttaggagtgattagctccttgcggttcagatttgggcctatatatcgtaattggttggatgaggaaattatgcagaatatatcaccaatctaatctccccttttctcaactctctcaagtcggcgtcttgggggcataacccagacagcgaaggggcaacgacatgggggaataaccccgccgacgaccacggaacgcaactacgatcttcgtagtcgcggtccagttaccctcggaccggaggtccttgacaacctggtatcatgagctcgacgatcctcgtcgtcggtgtcaaccagcagcaccaccaccccatccatccacccgcctcgcccaccctcaccgtcctcttccacagcctcgacgaccatgggagaccagcccactaagcgaagaagccgttcgagaagatgtacagggccagctgtcaggccgggcccacaagtccgcaagactcgcatgcacgcagaagataagctcagggtctgacaaatggggactgggtgtcggtgtcgcggggtatggcgcgagttctgggattcggcccgtccgggtcccgatggcggtggtccgcacgcgagcgagagacagacgggtgggacccgcctgtcggcgccgccgagcgcacaagccgactgtgttgagcctgatcaacgaattcggtccaacgcacggatttttctttttttcttttccttttctattcctatttccatattttgaatttaaacttctataaagttttgactctcaaaattccaataaaatgatcacataaaatatcagcatgatatgcactctggttttctattatttatttatttattttattaattacctccttccttaactaagctcatgatggtgattatgcatagaaaggaaatgaaattacagactcaaactcttaaggaacttatttatctaccttgaattttgggtattacatcgatgtgaggggaaatgttggaatataatataagtgaattgcctacctcctcttatcaggctatcaacttaagcttttgggttgaattggttagtgtgtttactctaatagttgtgtttggatagaggtgattggcaagaagctatctacttgcccgaaccgtgattaggccttttcccttttagtgctctcaaaagcttttctccctcccctttctctcatctctctttttggtaactttttgttgggtttcaactctagcctaccccaacttgcttgggactaaaaggctatgttgaagttgacatatggcttatatagatgtccaagtccaactttgatataaaaaagaaattgtaacacattcaggcaattttgattccaattctcgcaaagttgcaaagtggtgtagggacttgcagttttgatccccgcaggcctgcacatcttgtttcccttttcactggctcttccccgtgcttttttcctgctgcgaaaagctaagtgtttcggcttttcgcagcttttggccatcaaaagctgctgcggactgccaaacacttagcttttcagccagcttctataaaatttatctgagtaaaagccattcaaaatcaacataaacatataatcggttgagtcgtcgcaataatagtaatccgtcactttatagatcctgagccctatggacaactttatcttcctccgcacgtaatcctaatgatactcagattctctacacagccagattctccccacagctagattctcggaaaagctggtcagaaaaaagctgaaccaaacaggcccatggtcacacagcccaccaagccagccagccaggccactgcctattcatgtttctgcgccacttaagtattgcctcacgagtcacgcctactcacacctcctagacgtgtcccgagttttattcggcgcctaggccctaaacgagatgctagggatccatttcaggtttaattgagagtaaacctaagtttaaatagttttttagaaccatgcttttgctttgcgatgataaaaagaagggaaaatacatggtgggcgcgaggggttagactcttgagaaaattcttctatgccattgaaacctatagcgctcttctatgccatcagaaattgcatgttccttttgttgccatccttttacaatttttcttccccaagtgccatttagatgtatgtcattattctcaacgttaggagcgggtactgtgctagggtagtagtgtgcatgcaggcaacgagtggacagaaagctgagggacatgaaattgtcaattaataattttggtgtattttatctcgtagacattcttttggcacattccacctccatccgcatgtgctatgacaccttaaatccatagaactgggtagcacaaatgcacatatttttttggtaattatttctgaatttctgcagtttgtggagtggatcgaaagaagaaaactattaaa

SEQ ID NO: 656 - DNA, 5594 bp, Zea mays
  Intron number 1 from transcript GRMZM2G151332_T01 (locus G RMZM2G151332) derived from phytozome v7.0 (chr-ID 5; pos 1 58489291 to 158494884)
cggcggctgacgtcgacgacggggggcaggagaggttcgtgttggatccccggccggatcaacgagcgacgagtacagccgcgacggcgaacgcagacaggcgcggtgactgcggcgagagcgaggaaggctgagcgcgcggacacacacaggttagaacagattatttttgtctgcgcaatgtgccgcagcttttctgggttttttcactgaataaataaacggtgcttacacaggcttgaaagccctctaccccgtcgccatcgtgccccatgatctccaccattttcggatcacgcagatcatgtgcatgcgcagcgcgagtgcgacggggtcaacaaacaccaaggcggcttgtggtgccaggcacagcactgatcacccacaaagctacgccactaagactagataacgtaaacacaaatgttccaactagattacacgtgacaaaccttattcagactaacatatcacccccttaatcttgttggacttgaaccatccctagtcttgatctcagttccacaagtctgattcggctcaaaggctttgtcaggatgtctgcaagttggtgttcagttcccacatgctccacatccactatgcctttgtcaatgcagtcacgaatatagtgatatcgtgtatcgatgtgtttgcttctgtcatgatacacggggtttttgctcagctcaattgcagacatgttatctattaacagtctgaacttctgaggattcttatgcatgatgtctgctatcagcattctcagccatacaccttgacaagctcccaatgcagcagccacatattcagcttcacatgatgacagggctacaaccctttgcttctgagaggaccaagtcaccaagttatctcccaagaagaatagaatacctgaggtactttttctgtgcactaagtcacctgagcaatcactgtctgtgtagccaagcaatgtataatctgctgctgcccccttcttgaaattcactcccaggttaagtgtacctgccacatatctgagaattttcttcactgcagtccagtgttctttacctggggcctccatgaatctgcttaccagaccaactgcaaaagctagatcaggtctagtattcaccaggtacctcagactcccaacgacacttctatatctggtctcatcatattcagtccctttctgagcagtactgagctttactcgctgctccataggagtgtcagtgtgattacaggaagtcatgttgcactgctctagaatcttggttgcataggatttttgacagattgtgatactattttctccttgcttcacctccattcccaagtagtagctgagcagtcccaaatcactcatactgaatgtcttcatcatttgttgcttgaactctgcaatgctacttacagaaggcccacagatgattagatcatccacatatactcccacaaccagcatggttttgccagttcctctcctgtaaactgcatgttctacttcacattttctgaatcccagggacaccagttctgaatcaagcctgatgttccaagccctaggtgcctgtttcagcccatatagtgctttgttcagtctgagtaccttgcctagcttctttgtatcttggaaaccgggaggttgagtgacatatacttcttcttgaaggtctccatttaggaatgctgattttacatccatgtggtgaatttcccaattccactgtgctgcaagagctatcaaaactcttattgtttcaaaccttgccacaggagcaaatacttcatcaaaatcaacaccctccttttgagcataccccttagcaacaagtcttgctttgtgtttcactatatttccagcagcatctcttttgactttgaaaacccacttcaaaccaattgctttttgttcttttggcagatctgcccacacccaagtgtgattttgttcaatagagtcaagttctgaattcatggcctgtctccagcactgatctgtcaaggcactttcaacattttttggctcatctgcagctagtaaacaaaaagcactgtactcaaaatcatgaacttcttgtgttgagtctaataagtcagatattgttctgtatctcaaaggaatcatgtctgaacttcctgcattcactgactgagagctattatttgaacctgaggcaacagatgcagcttgggattgattctgggacactgaaggtgtcataggagtttgtggtgagggtggtgacgcagcagcaccccctgaagactcactcgtatcacctgaaccagctggtacttgtattgtctgatctggcacagtaaactgaaactgtgtagtgaaaggaattgtagtttcagtctgctgattcttttctgcactctcccagtcccatctttcactttcttcaaacactacatctctgctgatacacagcttctcagtgataggatcaaacaatctatacccttttgtacctgactcataacccaacaggaccatcttagtggacctatctgacaatttgtttacccctggaccaattttcttcacatgagcaatacagccaaatgttttaaggtgctgaacactgggtttcttgccaaaccaagcttcatatggtgttcttccctgtacactcttggtaggggatctattcaacaagtagactgctgttgtcacagcctcaccccagaatcttgatggcacccctttactcttcatcatgcaccttgccatctccactacagtctggtttctacgctccactacccccattttgttggggagagtaaggagtggtcgtgaagtgcttgatgccttgttcagtgcaaaaggcagtaaacatatttgaattgaactcaccacctctatcagttcttatgcccttcaatctgccctcctgatcaacttcagccctttgcttgatcttcttcaagaaatgtagagcttcatcttttgtcttcaacaactcaatccacataaacctgctgaagtcatcaaccactagcaaaaagtaactttttccacctactgtctgtggactgatctgtccacacagatcagcatggaataactccaacccctttgtggctctatatgaggacagccttggaaaaggtgttcgatgttgcttcccaagagtacaaccatcacacacctgttcagctcggtctacaataggcattccttcaaccatactcttctttccaagatctctaagagctctgaaatttagatggccaaatcttgcatgccacaaccatgctacatcatctgcctttgacagcagacacactggaggtacaactcccaacttcactgtgtaaagtctgtttccagtgcgaggtgcactgaccaacaggttatactctggatcaaaaactttcagtctgccaacaaaaagtctaatgtcacagcctgcctcctctagctgtccaagactaattatgttgcttttcaattgtggaatatagtacacacttgtaagcaccttgtgatctccctgtctagtattcatcaccactgagcctaatccacagattctgacagtagaaccatctccaaatctcactgacccactgacagtgtcatcaagttgagaaagtgcagacttggtgcctgtcatgtggttactggcaccagtgtccagtacccacactccatctgggcagattactggcactactttatcttcagacagatgaattacttgagatgcttcactcactgccccttgcacctcagctaatagaagtgttgcattctccacatctccaactacaacatttgcttcctgttgtttttgatccttgtcatccttctttggacgtttacagttctgtgcccagtggccataaatgccacaatttcgacatctcccctttcttcttggtgtcccctttgatgtcagctttggcttgtttgaattgcttgaactgccaccatcagaacgatgaggtcccttacctttccactgactaccactgccaccatccttttgagagtaagactgaaaccgatgcttatgtttttcaagccagtcctcctcagctaacaacagtcgaccagttttgtcagttacttgctcaagcttgtcttcaaaccgatcctcagctgcacgcaggcgtccaaccaagtcttcaactgtgagtgtcttcaggtcacagaacatttcaattgagactgcaacctgattaaaacgaggtggtacaactcgcagaaacttctttactacccgagtgtcatcaacagattccccaagtgacttgatgttggcaacaagatttgttattctcatcccaaaatcctcaacactctctccatctttgaactcaatattttcaaattcttttaaaagtttctgcacgtttacctctttaactcgatcggctccaatcctcatgttcatcacagcctcccatgcctctttcactgtccttttggcgccaagggttccccacatctcctttggcacggatctcatcagagcacccattgcctgtcgatcttgcgagcgcttgacagtggttcccggatcaatgacatcccagatttccattgcctcatagttaatctgcattaacatggcccactctgcataattcgatcgagtcaacataggccataccagggaactctccttgatgccggacgacgccgcgcttgaactggtcctggtgtcacccatctcctgatccttcacaggcgatctccgaggaacgacgaacttcttccttggggttctcgcggtggacagacagatccaccgtagaacataaaccgccctctgataccagatgttggatccccggccggatcaacgagcgacgagtacagccgcgacggcgaacgcagacaggcgcggtgactgcggcgagagcgaggaaggctgagcgcgcggacacacacaggttagaacagattatttttgcctgcgcaatgtgccgcagcttttctgggttttttcactgaataaatgaacggtgcttagagcaactccagtagttctctaaaagacttcctaaatcaataatttaggtagttaacatgaaaactattctccaacagttctctaaatgaactttctaaatttaacaacttgtcatctaacctcattttctctctacatttggcaaccatttaacaactcactaaacaaaaatgttgactgtattatatagtttttgtgacttattttttatgtggataaatacaaaacaaaattacaacctatatttagagaactattggagaactcatatttttttactctaaaagccatttagcaacttcttaaatttgtgatttagagagctaaaatttacataactattggagttgctcttacacaggcttgaaagccctccaccccgtcgccatcgtgccccatgatctccaccattttcggatcacgcagatcatgtgcatgcgcagcgcgagtgcgacggggtcaacaaacaccaaggcggcttgtggtgccaggcacagcactgatcacccacaaagctacgccactaagactagataacgtaaacacaaatgttccaactagattacacgtgacaaaccttattcagactaacagttcgtggtgccgggc

SEQ ID NO: 657 - DNA, 12059 bp, Zea mays
  Intron number 4 from transcript GRMZM2G480451_T02 (locus G RMZM2G480451) derived from phytozome v7.0 (chr-ID 1; pos 1 58487138 to 158499196 reverse strand)
gccaacacagccacttccatcaccagcggtacgttcctgattcatgctgcttgctacttgttcacgctgcaacaaattggccttcttttttgggactactccactgctgcttgtttcttgtgatggcagcatgttaggctagggcagatgtttatcatgatttcctatatcttggtgtacatgtcattttgtgatattcttggaagccacattttgtgtttatcatgctttcctatatcttcgtgtacatgtgatttaatgccaacattttgtgatcttcttggaagacacattttgtgtttatcatgctttcctatatctttgtgtacatgtgatttaatgccagttgtatatttatgagaattttggtttattttgtaggattccggttctcatcaagtgactcctccccctcacgatgactttgcggacagatgtctcaattctagtggtggagctacgaacaacaatctgatgtattgatcgagagtgatggagctaatgtttgaacttgtgtgtttgaacttgtgaactaaaaatgtgcactatggatgtgaacttatgtgaatttgtgaacttatgtatttggacttgtgtgaatttgtgaacttatgtatttggacttgtgtgaatttgtgatatgaacatatatccatgtgtttgaaatctatattgtatgtgatattctgtgttgcatgtgacattatgtttgtctaacttttcatttctataaattttatttttttctggaaaagggttaagttcgtgggtacccacgttcttaatgttaagaacgtgggtaccgtcgaacttaatgtgcagcccacgcaggcccacgcaggccaaataagttcatcggccacgtggccccgacgaacttaaccttaagaatgtgggtaccgtcaaacgtgtgggaacaaattcgatggcccccgtcgaacttaaaaacgcacgttcttaatgttaagttcgacggtacccacgttcttaatgttaagttcgacggttcccacgttcttaatgttaagttcatcggggtcgtcgaacatacttttctaagttcgttcaaaaatcaccgtcggccatattcgtcggtaaaccgacgaacttattgtaagtttgttggcttattacattaagttcgatggtttgtcacccacgttctttagttagtttcttgtagtgaagattagtatagaaagaatcagagtaaagtaagtaggtaagtgttttgtccagttctatctaggtttcgtcctacagtcaacatttcccctgtgtaattagttctcacaggaattaagtgagcaactttggttagtctgtccatgattacccaaatagagtcgtacccaacagaagtgcggggtagaccaatgttgaagtccataccaatttcttcccacttccactcgggtatctttagcggatggagtaatccagctgatctctgatattcagcttttaccctctagcaaacatcacaaactgcgacatgtgaggctacatcccttttcagcccataccaactggggtggggtggtttttaaaagaaagggtgagtacacatcaacgtactcagcaaatatcccgtttggctaaagtgtactggttgtatgtggagttaaggttaagtagttgcttttagttggtcaagtatttattactaatagtagagccaaattttagtaataaacccagttattacccaaatgtactccatccaagaggaaataccagatatcataattataaccatcatcattaaccgtcatcataaaagtatccaaagttcttctaatcaaagaggatcccaaggctgctcttaaccgtgagcacggctgatatactagtttctaacaatctgcagaggttgcacactttatccacgagtcgtgattccctttctgcccggagagcgctactccccattgaccactacctaggtggcctagcagggcatcactacgtagcctttacaaaggctcacctggtgcatagctgctcgttaggtttcaccagtcgtacaaacacagtacacctccctaaggtgggtgactaataaaaccaaatcgaatgaacctcggcacccacccttagcagagcgagcactatgccctggcccccattgatggccctccggcaaagccaactacaccccaggttcatctaagtattcagctaagaatgtcccattccaccctcatggttgcactgttatctcgggtggtcactcaacaaacatgtccttacgaagaggtactcaggaaacagcctgagtcccctaaagtatcacaaggtcatcaatgggataacatcatcgtatcataaatattcacatcatgttcgttgattaaggtaaagcaatagcataaagctaaccataataacccaaaaggtaaacaaggataaggtaaatacagactagtcaatccttaggtttcaataaagtaatgcgggatggtgaattataaagtaaataggacataataggtcagatgacacttgccttcaccaggttgttgctgaggaaggtcttcagcaacacactcaggaaccacgtgttgctcgttgcctaaataaagcgatcatgcattcaatacatttggataaagacaaatgaataacacgtcaatcatgtacaaacaagtcgacacaactcaaaagaacagcataaacttaagaggtagtttaggttatagggtgaactaacacatttagaagtttgttattctctaagtgttgtctatctccatggactacataattagatttcacttaatttaattagacacaaaattacaccagtggtagattcatactttacatattattaatttcacaaagttacacatccagttacccttagggtttcctttttattttcttatttaatgaataaactattatataaactaacctaaagtctaggcataaaaattagaatgtccagacaatgaatgatcataattttaacagatagagaataatcccatgaacattttgcaatttgaatcactcaatttggagttcatatgcaaaagatatgaaataaacaagttttggaatttgaaatacaaaattaggtctaaatatgtgattaaataaaaggtcaggtgtatgtctgcaagaatacaggggcctccgcgtgaaaaccatggatagcgggttgatttcgaaaaagtcgggggtctctttaacaattttaccatgcgaaggggtatcgagctctctcagccatcggatctcaaattaacggccgagaacagatcccgcgaccgggcgcgcggccatgggcacaggcgcacactgactagtgggccagggcggtcagcgaccgagggcgggaggcagacttaacggtcgggaccagcgccagggggcacaggcgaccgacagatggggcctaggggcgcgcgcttgcacgaagtggcatccagagatctggaccgtgggatcgagatcggacggctgagatcaacgctggggggttacgattgcgggcagcgccgctcctgctcctcggcggtgaagtcgctggagctagggcgggtgtgggctacacgggcttcgaggtcaccggagttggccaggaccggcgagaaggacccggcaaactcactggtgtgattccggccacgagacagggaccagagacgagagaacggaggagggaaagcttcgagcgagtcgaggtaactccagcgaggaatctcggccgcggggagaggcaatcgagtgcgctaaggctcggactagctccgacgagggtatgggagtgctatggaccaacataggggcacgggtcgggcccaatttggctggacaccatgcgggggcggtgagcaagcgcggccgagctccgacaaggacgaattagccacgacaaggcagagttaaaggaaacagagcacgggagcgagttccccacctcgagacagcgctctgggaggcttggcgtagcatcttactcgattaaccctggcaatgttgaatcccttgccagaggttggagtttgttgcttgttctggacattgcttcaagcgggtgtattaggattcctgttcggacaagcattagcatagtgtcccacctcaccacacttgaagtatgtggtgactatattgtaccctgcaggtctcaccgaggtgccagtgggggcaaacctgatgagtgtgtggagtctgtggagtcccatgtggtgcatactgagctgatcgttgtcctcctccaggacgagctggtgtaccctagggcagaacatagcgaggacgaatattactgctcccctacccttgggtgataccttcctcttcatttcacctagctgaacacgcttgtgttcaatagcaaaagccttgtctaggagcctttggaatgatggaaaggtgtgagcaaccagtgaatactgaagtggtctattaagtccttccatgaaatgctcatgctttctttcatcatctgccacttcttcgagagcataccgtgatagctgaataaatttgtcacgatattcactgactgacatattgccttgcttcagtgataggaattccttcttctttatcttcatcagtccagcaggaatatggtagtttctgaactgtgtagcaaattcttcccaggtaatagtattggcagcatcatgggcagcagtgtaagaatcccaccaatcagcagtggggccagtaagacgactagaagcataaagcaccttctcccggttagagcattgggcgatatttagcatcttctccactgattttaaccaatcatcagcacgtaatggatctggagagctggcaaacataggtggcttgtgactcatgaactcccggtgcttgtcccggggtggagctggtggtggtggtggaggcattggtggttgttgttgtcgcaccattcgctcttgcctcatttcctctcgtgtctcatgcctttcctgacgcatctcctggcattcttgcctcatttgagcttgcatgtcattcattgtgtttgccatctgttgtagcatctgcatctgagcgacaaccactagatctatccgagccggtggaggtttcggaggattcatttctgtttgttgttgtctaacgatcctcctattgtgggggttggaaggtagatcgattccgccttccatcctagtattgaccatctgggttataagtacatggtaagatataattgtagatcagacgagtaattgtgaggcagaatcttttaggggtgttattagctaagtagattagtgtgtcacctactacttctaattcattaccttatggtggtacatgctagaatgccctgctatactaattcagtcaatcaaagaagcaaagcaagcatttaccatcagaacaaacatctaatcacttcaggtagagaaaataattttagttttgtcttaggtctcctatctctttgaagggtcataaatgtaggattccaaagtgtgaaatcctccttgtcttagaatagaaaagataagagtagttagagtagaacagcaaaaggtgaaacaggatcaagataagtatagaaagaatcatagtaaggtaagtaggtaaaggttttgtctagttctatctaggtttcgtcctatagtcaacatttcctctgataccacttctgtcacacccggatttaagggataaagccgggtgcgtctcatatgtgcgccaaagaagaacatcacatataatgacaaagtgtatagagataaacgtcacaagtatcattattacatagcagaagtcttacatgaataaatgataacaatacaacgaactaaataattattccttgacgtcacaagctgactaggagacgccacctagataagctcatattccttgttgtagggctccttttggaccatctgctcttcacctgtgggggattatatatcgcaagagtgagctcacaaaagatcatagctcaacaagttgtggggaataatgtgcatgaactcaccaaagttgggagctcatgtgaagtgtaagggtgatcaatgaataatggttaaagctgagcattgcttttaataagttggtcaaattttattagcagttactaagtgtaagtatatactaaaccagagtaataatacatcaaaattaataataaaccacaatgtgatgcaaatgacaaattgaacttaattccataagttactcatgtgagggtccgagccgctcatgaccgtgagcatagctgatataccagttttacactctgcagaggttgcacatctttacccacaagtcatgttacccatctgccaaggggtcatgaatcccatacacctctaccaaggaagcgaggcagggtaacactatgaggcctttacaaagttccattagcttcagaaaacccgctacagtttctaagaagccccaatgcagggatccctcgtctgaccgccatcgcagcaaaatcaacccaagaacctccctacaccgacgactcccctactgctcttgcccctttcaggcaaggtagtcctccactagctttcctaattagtcagccaagggcgtcccataccaccattgtggtagcactgtttttccgagtggtcgctccatgttccaattaacataatgatcttatcatgaatagtaaataacaaactaataataaaagtatgatcatgaataatgtgtatctcaatacccaaaaccacataaagcaatagcaggtactacccaaaagttcagtggtaaacaaggtataaagatagtcaaactagggtaacctattgggtcccataaaaattaacctatgcagatcataatgattaacaggaacattattgggtaaatacaagtgatcaagggcataacttgccttcaacgagctcctgctcagcagtctccacctgctgaacacctgggtcctcagtggcttgctcgtctactcgcaacaatacaaacaaacatggtataggagaaattatcatcacaccaaacagcagaacagaatgcatgacaatattctacgcatcgtaacgagatcgtaggaataagaatcactaaattcggagttacgattatcgagttacgattttctgaagttattaggtgattggtatagattaaaccaaatgaacaaatttaatctatgtttcatgactaaacagagttaccaagtgatagacaatattaatacaaaattattgcaactagaatggattgaataggaattaaaatgggatttctatgaattaaatgagtttctgtaattattttttaccaaaaatcaatttttatattcttttatttgatttaccaactaactggactgcgcgtgatattcctgaaaaggtcaggggctaacccgcaaaacctccatgactcagcttaacatgtggtggactgtgggtcaatttgtaaaatctctagggtttcttttgcaaaaccgccaccgccaatacatggggacagatccagaccgatgatcacgcgatgtacggccagaaggagaagcccaaccggtactaaccagtggtcgcccgatcgcccatctagggttaagattacaccggctcaggggtatcacgtactctaattccaaccgtctatcttctgatctacgaccgcgaatgcactggccaaagcgttacattttcttctaatcagggtcgttcattacgcgatcatgggccatcgtttgttcttctctacccacggtggtcggtagtcggtggacttgccagccacttcggcgaccgacatccctccacgagcaaccaagatacagacttgattaacggttaatcgatgtggatgatataacggaatgatctatggtatccataccaaagatagtggcgacggtagtgatgtcggtgacgcgatacgaaatagcggcggcacccaactccggtgaacgattacggccgccgcggacctgatctttgcgcgccgaggtattgcacggctctgccaccccgagatggttatcccgcgccacccaattggctcctaacggcggtgagagggtaagtcgacggcggcggccgccagctgggggcgaggctctcaacgtagtttaggggatttggagggttagcgttactagagaagaggtggcgcatgacagttatatggccagcggagggtggcccagccagcaacggcatcgacggaaaaaggggaaagagctcgccgcggatctcgcgtcgtctgttgtcgcggcagtgcgaagggatgacaggtgggcccaatgcactagagaaatcggaagcagcgggtgacccgtggtgactggttggaggggcccgcatgtcaggtctgcggtgtgcggaggccgactgggacacgcagaagaggggagcgaggtggaccgaaagggcggtggccggcccgatgcgctggtgcattcctttttcttttacattttcttttctagttttatatttccttttatttttaaatctcaaatttgaattcaaatgttgtttcaagttcatacttagatgaagtgctcaaattaaagtaccagtatgaacatgtgcatttatttatttatttatatattctttatatttatatagcactttccttatcctttatatcatttgtttcttttttattttctaagtggtaagtttggtcttaattccaaatttaggcactaacatattttcattaatattattattattattattatagatgcaacaactcataactccaacatgatgcatgttttattgaagaattattcaatttaaatatgtttcctaataattctcatgaataaaaaggtattacacataaatatttattcctctcttttatatttcaaagttgggtattacattgggggttgcatctaaagtatttcattattttttgttggatttgcctcaatttctttggcgtgtacaagacatctaagaaactttctcttttgcatcctaaacacacacttctctctagatttagtctcggtctagctctctagaacttagcaaaagtttcttgtagatcttttacatggtcctattatttggtgcttcaaacaattatatcgtcgatgtatgtgtttggggtcttcttctccgccgaaagtactctaggcaaaaacaccttcagcaagacaatataaagggaggtgtgacatgaagatataaaccgaagatgatacggacaaagccgaagctacgattaaaagagcttcggcttggtgtcatgataaagacgaaggacgataccgactttaagaataaaagaccgtttagtccctaatagtttgtattatgatcatagttagttatcagggacatggttatagtttcgtccgggctgcgtctcgtgcctataaatagatgaacagtacccatgtactgttcacgctgcattgtaatcgctcccgtgtctcttacattaccacattttgtcaagccgaaggtatcaatgaaatataaatattatgaacatttattcatgtttataaaatgaaatgagaatgtaaataatctatttctatgttgccattatttacattcttatatgttttatgtttctttatttatttatattcatttatcgagatgatgaaggtacacccttcttgaccttcgtcctaaaatcattatatccgaagggaaataatgtttcgaaggacgaaggtccttatccattaacaattgtgttgttttgttcttggtgtatagcatttgagagtaaggaccaacagtatgtgagtaccatttcttctgagctagttaccaacatcattggtcgtcgttctacacaggcataacaattatataaataaagataaatatagagactaaaaataaataatatgatcgtaatgtttatcattaacatagagatccaaactaattatgtagcctcttcatgagttttattattatatatgtgttaaaaaaattagcaagaaatggacatagggaagagtaagatagctttattaagaagagtgatttggtgtaatgtttatcattaacatagagatccaaactaattatgtagcctcttcatgagttttaatattattatatatgtgttaaaaaaattaacaagaaatggatacagggaagagtaagatagctttattaagaagagtgatttggtccatatgaaggttaaaaacataggatataatatatgatgttataaagatgaatgattattataacaatatatttatgttagcttgagcattttgacaggctctatagtttgataaacattttactgaagccatgtgttaacgtgtgcattaatcgcatgcatacagcatggaatggaaccagggtcgtgcctaagatttcagggactctaggtaaaaatttatatatatatatatatatatatatatatatatatatatatatatatatagacacacacaaacaaatattttgaaaggttcaaaatactattaacttgaatgatacaaacttatatattgtattatcttataaagttccttcgaacattctttgatacaaagacatcgagtaacaagcatatacttgtttagcatgaacaattgggctaaacaagtgaacattgtttaggcttattaagtaactaagagcaatttcaaaaagatgttataaaatttctcaaaaaattaggagttttttaaattggtgtcctcgattttgctagtgttctcatttttattcttagtcgtattttttgctcggctttatcccaaataacgaaacttgtgctgcacctttacaccgccagcagttcctgtctgacagtctagatataaggagaggaggctgcggagtgcggacgcgagacgtgaaatttagaggggagggacagtagagttcttggacgtgaaatttaaagggagggacagtagagttgttggagtaagaaaatcactattttttttactaatatctattttaggttggtttaagtattgccaatgtttagactaattaagagcaactccaataggggtcctaaactcatgaacaatttaaaatatagggcccgaataagaaaaaagaggtccaacaggaatcctattttaatgaaattcatcaaaaaaaattagggaccaatatcacaagcagtatatttgagacccacggtggagcggcccaatattgttcccgcttatctcaactcccacggaattttcacctagcagtttctttccttcgttgccgtcgtctttgaagtcccgttcctgctgtggccgccatcctgcagatccactggtacgtcgcccgtactacgccgaactactccttcgttcccttgttcttcccctcgttcccttgctctactgatcccgatctggatttgacggctgactcgatggatggtcggcctccttctcccctgtcacggccgacggcgaagaatcggcgtttatctttgaatagagttcttcatgcaatcagcagtggttcccagcccacccgtggcgcgtctcgccagggtcccgcactggcgtctcgccgtcggccatcaaacgttgctggcgaccatcgctttgcatcacaggcgacacaccaagctccttcgccgaacatggataactacaggtgtgagatacgtatctgaatatgtaatatctaatttatctgaatgcattgtttttctgagcttattttttgttcggggtctgtttcattggaagaaatcacagccactcctggaaagcttccattcgattgttctgtaaatgtatctgaatatgtaaaacatatttgttctatttctatttcattgaccgatatcatagtatcccctcggtagaatttctgaaagtttcaacttgtaacgtatagcatgatgcatacatactgttgaccttttcttctacaagaggtaggaatggacagtagtaacgtgcagcatcatgtatgtattctaattcaagagattagtaaactccctgctatgtcatttaatatatgcaccataaatatttattcattttatcctaaatctgtgtgactgtcaaataagttagtttatggctcctggaaggcagtggtgtggttgtttaaatgtttactcaaatgttttgcagctcc

SEQ ID NO: 658 - DNA, 10863 bp, Zea mays
  Intron number 5 from transcript GRMZM2G003732_T01 (locus G RMZM2G003732) derived from phytozome v7.0 (chr-ID 10; pos 4650531 to 4661393 reverse strand)
agcttttactctctttgtaagttctcttcattgtaataaaccacatctcttcctttctttgtctgcattaatcacagctgcaaaggtcatggttctttcttgttttacacttaagacctgtttgggagtgctccattcctgtagtccgaaaatacagagtcgtaggttaaaaatgaagttttaagcttttgtttccagtcttaagttagaacggttatagcttattgaaactccaaccctcagtcttcttccatgatccatctccaccttcatggtttgtgaaataggtggagctggaggtctcctgaacaggatttatggttgctgagtttaggtggctctaaagctgtttgctttaactatttatggattatacattactccctccatttcaaatcgcaagccgttcactgcggatctagacttaatgaatatctaggtgtgtagcaaaaactatctgtcctgaaaaagctagaatgacttacaatttgcaacggaaggagtatttaacgacactatgacatttatcttggtctagagcaaataaaggtttcaattatcggtttttgtggtagacagcaatactagaataatagatgcgtgcttaagttttatttatttgtgagaaacagcatctctgtctctctctattgtagctgggaaggtaatggttcttttctttcctgatacttggggcctgtctgggagagcagagaaagcctacatcttagtctaaatgagaacagtatggttcactggaacacacaccctcagtctgcgtctatgacacagtgccacaaattattggagctggagctctcccaaataggccattatgacagctcgcattggtgactttaaagcactttaccgtcactatttctgcattttatatagtatttaataacagtttatcttagctggagcaaacataagttatatttctgttgagtaggtccgcctagcataaaggttttagagcagattatatattattagatttgcttatgacaaaatatcaagtgaggtttgcacaaacataaagttgcaacgaagtacgttagactcattcaggtcatctactacaatattgtgactagttaccgaacaattgatggagacacgggtgactttttaattagaatatgactacatcaaggatcaggtttgagctgttacttttttgcttttgtgatggataaggtcacaagggacatacaagcggatatgccttggtgtatgtttttttggatgatgtagtgctagttaatgaaagcaagatatgattaaataaaaatttggagttatagcgggaggctctagaatccaaaggttttagactcaatagaactaatatcgaatatataggatttgacttcagcactactacacatgagaaatgagatgttagtttggaaggtcaaatagtgtccaggaaggatgcctctcgatatttaggatcaatgcagagtcggggatattgttgaagatgttagtcatagaatgaaaacaggtggatgatgtggcaccaaccaccaagcatttgttgttctatatgacaagagggtatcatagaagctagaagtcaagttttataggacgacgattagacctactatgttttatggtgccgagtgttggcctacaaaagacattttaaacaataactgttgcagaaatacgtatgttgcattggatttgtggtcatataaaaagggattaggtccagaacgatggtagatgtgatagggtaggggtagcatcaattgaaaaaaacttttccaacaacggttgagctggtttggacatattcaatggagacctccagaggcaccgatacatagcgggttcctaaggcgtgatagcattgggaagggagacaagggaagaccgaagttgacatgtaaaggacggtaaaagaagcagtgttattaaaactacgtttaaactttaaaactctaattagaggttgaaaccacgtttggcattttggcgttatgaattgtagaacgcaatgtttcatgcgttttggaccattagctatttttgggcccagtctgttagttacttttgggtccaatccggctcatgggtgaagttttggtaagccaataacctccctattttggtatttaacttcatgttattgtctgaaattatgatatattggtatttttcctatgttgttttaaactacgtttaaacaaaagtttaaacgtttaaaagtcaaaacttcacccatgagggttttgacgttttatcattttaataacattgaaaaggagacttgaaactttgaaaggatgggatatatccaaagatttagccttggaatatccccaaatatttagccttgaataggagtgcatggaaaacaattatccatgtgcctggaccttgacttgtggtttatgttgacttatggtttatgttgggttttaactctagcctaccccaacttgcttgggattaaaatgctttgttttttctagggcctagcaatgcaaagtagatttctttaacatgatgaatcaaaattttctttgacatgattaatctctctcaaactaatccactggacaatatttgcctatgtagaaactagaaacatagatatcacacaaaaggtttaaaaacaactgggaccatgaaggatatcacccaaccttggagccaatcataagcacgaattttacagtagatttttttttgtttagacctcatttcacaccaaatggttggcagttggcacaagtcaagtggtattaagaatatctctaatgaacaggtgatacgttatcagattttacaaaaccaggaaggaactactcctcagcccttgccaaaatatcatgattcccacaatcaacctaaggccaaattttatagtatctttctttttttctttagtccttgtctcagcaatttttggcatgaaaatattatgtttgagataacaagcattatatgctactgtagtcacccaaaaataccaatatggagcaaacaaccggtactatacttgggccatatggcgatttttttttctcgaacatgaatgagctgcgtatcattatattaatgaagcacatggcaaatttaattctggtaatttatttgttagatgtaatcgagtgtggtcataaatctacatcaaccttagtgatgattcaacacaaccgttaaccaatctgaggcaaagatacaaattacctcttcgatataatgcctgtgcccagtttttctagaatctagcatgaataagctgttgcctggtgacttcttttaccaccggtactttttttttagataatggaaaaatcatccgaccttggcctcaaatgaggttacggccatttattacaagggacggaagcatattgccaaaactcctcctatgaccacttcagagaaccccaactagccaaattaaagaacttcagctatcgaaccacaactactacatatttaaacgcaacgcagacccccatccaaaattgctaaagaactgtagtagcaccctctccacattacgacatgaagactttattaactcttggtcctcccttctaggctgaagctgagaccagaagcggcaccaatatgttgccctgaaggttacctgcacacatgatttaggagatgaattattgaacaccacatcatttctacttaaccaaatagcccaacaaattgccgatgcaacggttaatagtaagtttcgaactctgggaagcctcccgctcgcccaaaccccaaacaaatcattaacatcccgaggaggtctcaaccccgtgcttatctgaatcaaccgccaaatgaatgacgcatacaaacaactgaaaaataggtgctttattgtctccggtctactacaaaagcaacatatcttattaccattccaatgcctcctagccaagttatcctttgttaatgttacccctcttttgaggtaccacataaaaatcttaattttcagaggaatcctaagtttccaaaggtccttattatgcacccccaacccattgttaagagatgccagatacagagacttaaccgtaaacatcccgttggcggtcaagttccatctgaacaagtccctgtttgaattcaaatcggtatgcgcaacaagtgagaccaattgaacccattggtccctcaattgttgagccaaacccctccgaaaggatatatttaagggcaccgtggagaacacacaggcaacagtagagttcttcctcctcgctaggttataaagagacggaaaacgaagttttaacgttcccgacccgagccaatcatcctcccagaaacgcacctgggacccatcatgaatcacaaaggttcctttactaatgaatgtgtccttaactttcataagaccactccagaagtgtgaatcagtggccctacgctgcgcctgggataaggttcgattggccagatatttacgtctcaataatgattgccacatcccttcttcattgagaagtttatacaaccatttgcttaagaggcatttattttgaacctctaaattcaaaatgcctagcccgccaacctccttaggttgacaaattacatcccatttggccagcctatattttttcttatgaccctccccttgccagaaaaaacacgatctgaaataatctatcttctccagcacaccttttggtacctcaaagaaagacatcataaacatcgctagactggtcaacacagaattaattaatacgagccgccctcctactgacataagttttcctttccagctgctgagctttttctcgaatttggcctccactgttttccactcaccaattgtcaatcgacggtggtgcataggaatcccaagatatctgaagggcagcccaccagaactgcaaccaaacagccgtgtgtacctcccttcatcctcttttgccttcccataacagaatatctcactcttgtgaaagtttattttaagaccagataactgctcaaaggcacataatatgagcttcatattcgttgccttttccagatcgtgatccataaacaaaattgtatcatcggcgtattgcagaatggatagccccccatctaccaaatgcggcaccaagcccttgatctggccattttcctttgctctattaatcagggtagcaagcatgtccactaccaagttaaagagaataggagacagcggatcgccctgcctcacccctctatgggtctggaaaaaaggacccatgtgatcattaactctaaccgcaacatggccccccttcatgaaagactcgatccacctacaccaggtacttgaaaaacctttcatacgaagggattgttgaacaaagctccacttcaccttatcataagctttctcgaagtcgattttgaaaatgaccccatcccttttcttcgtatgtagctcatgaatagtctcatgtaagaccaccaccccctccatgatatttcttcctggcaggaacgcagtctgcaggggactgattacattctgcgcaacctccgtgatcctcttagtcgccacctttgtgaagaatttgaaactgacatttaggagacaaattggtcggtattgttgaaccgagattgcctcccgagtcttaggaagcaaaatgatagtcccaaagttaagactatacaaagggagatttcctgagtggaactcacgaaacaaagccataagatcatctttaataacatcccaacagatttgataaaattccgccgggaatccatcaggacctggagccttgttatgttccatactaaaaaccaccgcttttacttcatcttcagaaaatggctgggtgagcttctcgttctcaacttgagtaacttgtattatatcatctctaagatcctcatccagactaaaagacgtgttttctggggggccaaagagatttttataataaccagttatatgactctttaattctttctcgtcgtataacatacgagctccatccgtcatctggaagatgcgattcttcctgaattttccattggctatcatctgaaaatatttagtattactatccccctccaggagctccttgaccttcgctctttgataccactttatttcctcctcccggagtagctgagcaagcctgttctgtaagtagttgcgcagatccaactccgaagtactcaacagaactacttcagctctcttatctaaatcatcaagcttagctatgatctcctttttttcctttttcaacaaccccgaagtgtgcattgcccaaccccttaagtgttggcgcaccttcctaatcctggcttgccatttctccaaaggagtagaaccacttgtctcatttacccaaatatcttttaccatatccacaaaaccatccctcagaaaccagcctagttctaacttgaacggaggaattgtatgggcggttacaacacctgtgctaagaagcagaggagtatgatcggatatatttctcgacaaggcatgtaccgaagctctagggtattttccctcccattctgtagctaccaaaatccgatccaacttctcataagtcggaatatccctagtattagcccaggtgtaccttcgccccgacatctgcaattctcttagatcaagaccatcaattaccgcattgaaaaggaacggccaacgatgatcaaatctatcattatttttctcagatggagatcgtaaaatattaaagtctcccccaatgagaataggtaaagtttctgtattgctcacacggactagctcagaaaggaattcttgtttgaagcagtcctgggcagggccatacaccgagacaagagcccatttaaaaccatctgctttatcaagcaaattaaacttaataaagaaatccccttccgtgatggcaccaacatcaaagacatcagcgtcaattcctaacaacatccccccagatctaccatgaggttctttgcaatgccagataaaatttttcccagcacacaaattccttagtagatgatctgggaaggatttgcggcctgtttcagagagggcaataaaattgagaccatgttctttggtcagatccgaaatgtatctaagttttttcaaatccttgaacccattgctgttccaaaagattcctttcattggtaaacaattaattaataatcaagcccgaccttttttcttagaacacaacgaaccctgactagatggttttgtacagactgacttaatcagcccatcagtgccatccgtctcttcatgcataatatccccacacaaatgatttaaaatgaaatgatcaaactcttcgtcctctactactccctttcccataaaatcagataaatcagcctcgttcttacccactagctgatcctgaactctattaatctctaattttttcaactgaccaatagaggaagcaactgaactaggattagaacccgctaaaatgccaatatttttaaaagaatccagaatataattatcgggtaaactaataaaggaaacattgttacctttagtcggctgatcgtccaggttgtatcccgctttcagccgaattgctcgaactagcgagtcttcactcaccgaatcagagcggcgcgagctacgacgcagtgcatgcacttttcctgtcaacgcctccgggatactgcccaacttttcaatactaacagcattgaccgagagacaggtaccctgagattgatccagatccagctgtgtagggccagcgcacaccgatttcccactggtcgtgttgctgttcagcatagaatccgacaccttattaactgcccctgctgaatcctttgatgttcccttcaagctcgcccccttattccctctttcacctatattgtgatccttgttttgatcctgaaattcatcatcatcattatccccgatatgatccatatccatcggcaaaggctggtcaccttcagctgctgactccaccctgaatttcagttcatataagtagtctccaattaccacatcaactacttgcggaatcaaattcgggtcaagcacggccaccttcagccttgccctgtcaaacttccgagtaaacaacatatccacctcttttgagatgcctagcatagaaccaaccgcccagattaccgagtactctctaagttccttaggtaaaccagtgaactgcacccaagccttaggcatctcatattttatttcctctccaaacccctcttccttgacaagcatctgtgcaccaaattttgtatgaacagttccccactcgatcatacggtgaagttcacccctggaagggaaacacgtcgagaacacattgttccccacacacttcacacaccagtcccaatcagcagccaccaaccttttaagctcattcaaaatctgctcttcattcatggaaccctccacaatagacactgtaccattgcagccaccttgcctctgctttactggaatgggttggggtataaagtaaaaccccaatccctccaccgcatacccgcaaggtattgcaaaagttttgcaggcacgaaccaccggacatttcgaagttaagtgagttttgacatcacaaatttcacaaaatagctcaatattacagtcactcaactgatgacctttatttttgcacctgaaacaaaacggcactttctcttttgaacttgaaatcacagaagaacccaccttgtcatccaagtgggttggagtagacaattctttgatggtctccaactttgaactgtgttgggacccaatattcggacctgctggattccccctcgagttctgaatgtgctggctcttccccacagactgctgcagcaaggaaacaatctgttccatggtactatctggaacaggccagacaacgctaccgttgccaattgatgttgtaattgcctgttggagcaagtccacagcgtttgatacttgaggagtcaccgaagaagcccctgaacctcccagaccctgtccagcgaccatcacagaggaagcccctccatttgaaaacctgctgtgaacacctccgcccctagactgggttggcaaagtacgaccaccatagaaccggcctccggcagaagcacctcttccaccacgccacgctccagcacggccctgtccacctccccgacgtccaaaaggacggcctccgccaccataaccaggatggaacactggttgggatccaccgcgtccaaagtcagtgttcagtcccataccagcgacatatcctcccgtgcccccaagctgctgctgaccggtggaaaaacctccagcgccctcggactgatgctggccgcgactgcctccacgccctccagtatcaccaaccggcgccattgcgttccttacagcctcgacgaaggtgccaggagccacaccccgggaggaaatgtgaaccgccctggcagcagaagaactggtgcctgagcgggagaacaaggaagccagcccagcagttggcctataaggaatcctaggactgagaatcatatgttgggccctcccattccaacggggacaagcactaattaagccaacattccttgattccagcacaggatccgcatgagaatcccagaatatcgcctgacttgcatccataccaaaatcattcaaattcaaaccatcagctaaccgctccgctgataccgctcccattgaagacgtcttcttcaacctttggccgtggcaccttccaggggagcagcgccattgcgctttttctagtgcatgtccaactgtgaactccggcgaacgtcgtggcgacggcaatttgccctgccatggcttcaccttattcctagaagaagtgctcggactaggagaatgcaagcatgtactcaacgtcggtcctggtcccgacctgcatacaccgccgactacctctcctacctgttcgagagcttcattccaaatagattttggtggcgcggaactgcagtcaattagcttgccgtcaacacaggacagagacccgttcacgaaaacagagagccgaccaccctcaggtgtccgtccgctatttgccgaaccggccagatcaccaacctcctgatccagctgaacctgacaatcagcaacctccgccagtgggcggacgaccaccgcatcggtgggcgccagcgtctttcgacgacgacccttccgagcgtacgtggccaagcaacgtcgctgcatagcgcagagaacgaacgaacaaccactggcgggagaccggcctagatggccgcctcccacctctggtgtcccactccgccgagacagggggaagagcacttaccgggttacgccgcgcgcctagccgggacgtccacgcggcctagaccgccttgccgtggtcaccgcagagaagaaactcgagcgccagggtccaccgcggcctgcgatgctctctgatgagcagcgggaagttgcggcgtgcgaagcgaccggcccagcagttgagcacggcgtcgacggcgtccgcgtcggcacgaggcagcgcgagcaagcgcgcgacgacctccaccaccggtactaaagtgttaatcttacacttggccatttgtgtggaacgagatagcactagcacttgtagttattctaaatcccaaagagtgaagtctattcttggtgtatgcctatccagtccttggtccaatcatattgtggaaaagaagggttactgatacaattttagctccaacagtcaaatctcaatcctactttgtgatacagtaactaaactaaacagccaaattgggtctgtatcttgttaaatttgctcacagcgtgatgcatgttatgcttttatgtttctcctaattttgatataattttattcttaatatattcctgtaggtaacagttatcgtgacata

SEQ ID NO: 659 - DNA, 3603 bp, Zea mays
  Intron number 2 from transcript GRMZM2G066615_T02 (locus G RMZM2G066615) derived from phytozome v7.0 (chr-ID 4; pos 1 58338676 to 158342278)
tcgagttgcagaaggcagtggccgagatcgagcttgtgaggcatttctcatcccatcaccgtcgacctttgttttgttggttatgatattttggacgaaggaattatcacttcccaaactaacttaacagcagcaaggccttttagttccaagctcagctcgtctggggtaagtctaagagctagtttggagaaccattgcgtgaaaaaaataactaataaggtataatttcgagatttaagattacaaataggcaaatagcgattctatgccctcctggaaactccaaaatgagcatcacatgttcataattgttatgaatatattcactcatgtgcttccataatgtttgcattcctgttgatgactggttttattttgtgttgcagctatcgaactgcttcacacaattatttattcttgaaatcctgaactgtgtggccatattgtacggactgcggccttactgactgtttgcaacacagataattgtgatcaacataatcaacatacattatcttagatctacttattcattagttctgctgtttttgcagtatttgacgattctgtcagaatgctagtgattaacttgaactgagtttatgtctgtgcattgatcctattacacaattaagtcagatcacgtcactcttatctattcattgaatagtgtagatctgtgatgaaggaattgataaattgatgttcaccgttgcataatttcaacggtcacaagtgccactttgcacactaatagtgtcagggcccctcaggtaggttagataaagataagactagcttgggataagattagaattagagataagattacatctagtgcttagaggtcaagtaaccctctctatataagaaggattgtatcaattgaaggtaagcaaaagattagaagcaagtcttcttcttgtccgaccgtgggcaaagctctgcggtcggactccccaagcgtcggtgtcctggctctagaccccaaacataccacttgtattaaatcctatcaatccaccagatcctgatccataacaacatggtatcagagatgtccaacgatcctccatcttccacccacccgccacatccgaccttccatccaccaccacgctaggcgtgccccttcacctcctgccaatgccagcatcgccatccccaataccatcatatgcactggccccaatgggaacaatacaatatacaatgacaacaacaccatcaccatcaagaccggcatctacatctttggaacttcacccacctccatacagctaggacgcccccccctccggcagcgtcgagggtcggagtttatacagcgcaccgcaggggggtcggcctccgtacatggtggccatgtcgtctgagcccatgccgaccccacagggaccaactctctgcttctacaaggtcgactttttgacctacgacggcaccgtcgacccgctcaattggatcacagccaatgtgagcagtacttccgcgaccaacgtacgccgaccttggatcgcacctagctggcgtcgtaccacctcattgtgtcgtccagacatggtactacaccctctagcagggcgaaggcatgccagggtgagggcgcttccgtgagctttgcaccttgcgttttggaccggcagtacgcgggaccaggctgtctaagctcgcccggctgccgttcacatctacggtgcatgattatgccgaaagattcaatgagttactgtgtcatgcacacaacctctcggcgtcccaaaaggcgaagctctttgtggggggccttctggatcacataaaggttgacgtcgatctatgcgatccacaggccttcctgacggcaatagtgccacccaccaccatgacgctgacaccatcatcctcttctacaccccttcacacttgaaactgtagccgctgtggtccaggacctcaagcgatctgtggtcgcaaccatgcaggcaacattggcagccacccttcttcctctgcagcaacaaccactaccgccgatatcttatggcatgccgcgtaccagcggcaccagatttgcccctttacctcatatccatgccaccatcaccatcgccaattccattgtatgccctctcatcaacaacgtcgccgaaattcacgatggcaatgtctccttcactgaccccgttgttcgctgcccccaagcctgtgccgccacagcagcactgcgatggcgtcttctacgggggtgtggatggcattcggacatcgatggcgtagctacaggtgacgacacactgcctcctagcacgccgacaaggacaacgccccatctttaggcggcggcacccagtcgacctagcaaccttgcagcctctcacggagaggaaggcgattgcacgagcgagtgcctgcaaggtgtcagcggctgcaggctgcggcgcgtggcttcctagtgcgtcggcagatgctcgaggcaaccttggtggtggtcgacctcgacacacggcggcgcgacctcgccctgtcggacgactatcagcaaccacattggctcgctgtctccaagtgcgagcatagtgcgtgtcccgcgggcgacgaactccagctctacagcagaggcggtaggtaaggcgctcctctccttgtcatcagcgagggccgctaccggccgccacgagggcgcttccgctggtcattgttgtgtcttattccaggttgctatccacgtgctcctctttcatctagatggcgtccatgggatccaggtggctgcacacatgcaggtccaatgcgcggagggtgtttgccttatcttaaggggtcaaagaaaaaataaagagtcgcggtctaatttaggttcggaataataaaataagctgagatgtaaaagacttatttttatgtgttaagtttctgtatagcagaatcatcgttaggctgcagctcgaggacgacctgcttgtctagaaggggtgtagtgtcaggtcccctcaggtaggttaggtaaagataaggctagttcgggataaaattagaattagagataagattatattttgtgcttagaggtcaagtaaccctctctatataagaaggactgtatcaattgaaggtaagcaagagattagaagcaagccttcttcttgcctggccgtgggcaaagccctatgcccggcctccccaagcgtcggggtcctggccctagaccccaaaccttccactcgtattaaatcctatcaacccaccagattctgatccataacagatagtctccatcacatagtttttctaagacaagtttctttcttttatcattttcatacgtctgacatatgtagttgtaaagatatttggtgaaaatgaaatagttttgcagcaagcatggaatatagtttttttttactggaggggttttatactcttattacatttgtataaattgtaattgtttcgttctcatagtaaacggtgtgatattaagtacttcattttaaattgcaagtcgttatacatagcttttgctttgtcaagtcatgaattacattgtgctcaaatttattttgtaacacgagccatttcacaggagcaaaaacgagtggattttgaagagagaaaaaa

SEQ ID NO: 660 - DNA, 12470 bp, Zea mays
  Intron number 1 from transcript GRMZM2G452669_T01 (locus G RMZM2G452669) derived from phytozome v7.0 (chr-ID 2; pos 2 30479825 to 230492294)
gccgctccgcgcctgggcgggttcgaggactcgaggtccgtggcggtctggcggactacaggtggtcggccgtcggggcgtcgggcactcgggctcgggtggtcgcctggtcggccgtcggcacgaggagtcgacgaaggtacacgggcacacggcgcacggaggccgggcggcgccacgaccacgaaccaacgctcggagtcgggtactcgggtggttactgccttactggttagggacctagggtttagggaatccttgactccttgttgggcctcactgttgggctgggcgtatgggccattctgccaaaggctggttggccggctcgcgagcggctcgcgagctcgcccgagctagctcggctcggctcgccctttgcccgagctgagaaatgcggctcggctcggctcggcagcggctcgcgagccggcccgagccgagccgagccaggccgagctcgagccagctcgtcgagcccgagctttttttccaggcctagccgaggctacggctagcgtcggaacagtcggagaggcagtagtcacatgcggtcatgaagtcccgcacggcactggggttgccaagtccagagaaatcccaacagaagctgggctcgtcatcttcctcggacccagagggcccgtaggtcgagacgtccgtcagccggtcccaaggtgaccgcatacgaaaccccaaagggtttggactcgcctctacgagaacgcccgccaaagtgaagtcgctaggcgggttgaggccgaatccaaatgacgtgggatgagaattgaaagggaattaggcttacacctagtccctaattaattttggtggttgaattgcccaacacaaataattggactaactagtttgcccaagtgtatagattatacaggtgtaaaaggttcacactcagccaataaaaagaccaagttttggattcaacaaaggagctaagtggcaaccgaaggccctctggtctgggaacaccggactgtccggtgtacaccggacagtgtccggtgcaccaccggacagtgtccggtgcaccagaggactccaactcaaactcgccaccttcgggaatttccagaggcgactccgctataattcaccggactgtccggtgtacaccggacaatgtccggtgcgccaaggaggagcagcctcaggaactcgccagctttgggaaactccaacggcttgtccgctaaaattcaccggactgtccggtgtgcaccggactgtccggtgcgactccggagcaacgactatctccgcgccaacggctacctgcagagcaataaatgcgcgcgcagcgcgcgcagaagtcaggcgcgcccatactggcacaccggacagcaaacagtacatgtccggtgtgcaccggacacccaggcgggcccacaagtcagaagctccaacggtcagaatccaacggaagtgatgacgtggcagggggcaccggactgtccggtgtgcaccggactgtctggtgtgccatcgaacagacagcctcccaacggccacttttggtggttggggctataaataccccaaccaccccaccattcattgcatccaagttttccacttctcaactactacaagagctctagcattcaattctagacacaccaaagagatcaaatcctctccaaattccacacaacgccatagtgattagagagagagatttgcttgtgttctttcgagctcttgcgcttggattgctttcttccttcttgattctttccttgcgatcaaactcacttgtaaattgagacaagagacaccaaacttgtggtggtccttgtgggaactttgtgttccaagtgattgagaagagaaagctcactcgatccgtggatcgtttgagagagggaagggttgaaagagacccggcctttgtggcctcctcaacggggagtaggtttgcaagaaccgaacctcggtaaaacaaatctccgtgtctcacttgcttattcgcttgggatttgttttgcgccctctcttgcggactcgtttctttattactaacgctaacccggcttgtagttgtgtttatatttgtaaatttcagtttcgccctattcacccccctctaggcgactttcaattggtatcagaacccggtgcttcattagagcctaaccgctcgaagtgatgtcgggagatcacgccaagaaggagatggagaccggcgaaaagcccactacaagccacgggagcacttcatcggaagagtcccgcaccaaaaggaaggagaagaagaagatctcctccaacaaagggaaggagaagaaatcttcttctcaccacaaagagaagaaggaaaaatcttcttcccacaagtcgcatcggaaaggtgacaagcacaagaggatgaggaaggtggtctactacgagaccgacacttcatcaacatcgacctccgactccgatgcaccctccgtaacttctaaacgccaagagcgtaagaagtttagtaagattcccctacattatccccgcatttctaaacatgcacatttactttccgtcccattaggcaaaccaccaacttttgatggtgaagattatgctaggtggagtgatttaatgcgatttcatctaacctcactccacaaaagtatatgggatgttgttgagattggtgcacaggtaccatccgtaggggatgaagactatgatgaggatgaggtggcccaaatcgagcacttcaactgtcaagcaacgacaatactcctcgcctctttaagtagagaggagtataacaaggttcaagagttgaagagcgccaaggagatttgggatgtgctcaaaaccgcgcacgagggagatgagcttacaaagatcaccaagcgggaaacgatcgagggggagctcggtcgcttccggcttcgcaaaggggaagagccacaacacatgtacaaccggctcaagaccttggtgaaccaagtgcgcaacctcgggagcgtaaagtgggacgaccacgaaatggttaaggttattctaagatctcttattttccttaaccctactcaagttcaattaattcgtggtaatccaagatatactaaaatgacccccgaggaagtaatcgggcattttgtaagttttgagtgcatgatcgaaggctcaaggaagatcaatgagcttgatgatccatctacatccgaagctcaacccgtcgcattcaaggcgacggaagaaaagaaggagaagtctaccccaagtcgacaaccaatagacgcctccaagctcgacaatgaggaaatggcgctcgtcatcaagagcttccgccaaatcctcaagcaaaggagagggaaagactacaagtcccgctccaagaaggtttgctacaagtgtggtaagcccggtcactttattgcaaaatgtccattatcaagtgacagtgacagggataacgacaagaagggcaagaggagagaaaagaagaggtactacaaaaagaagggcggcgatgcccatgtttgtcgggaatgggactccgacgaaagctcaagcgactcctccaacgacgaggacgccgccaacatcgccgtcaccaagggacttctcttccccaacgtcggccacaagtgcctcatggcaaaggacggcaaaaagaaggtaaaatcaagatcctccactaaatatgaaacctctagtgatgataatgctagtgatgaggaagataatttgcgtatcctttttgccaaccttaacatggaacaaaaagaaaaattaaatgaattaattagtgctattcatgaaaaggatgaccttttggattcccaagaggattgtctaattaaagaaaacatgaaacatgttaaggttaaaaatgcttatgctctagaaatagaaaaatgtcaaaagctatctagtgagctaagcacttgccgtgagatgattgacaaccttaggaatgaaaatgctagtttaaatgctaaggttgattcacatatttgtaatgtttcaattcccaatcctagagataataatgatgatttgcttgctaggattgaagaattaaacatttctcttgctagccttaaagtagaaaatgaaaatttaattgctaaggctaaagaactagatgtttgcaatgctaccatttccaatcttagagataaaaatgatattcttcatgctaagattgttgaacttaattcttgcaaaccctctacatctattgttgagcatgtatctatttgtactagatgtagagatgttgatattaatgctattcatgatcatatggctttaattaaacaacaaaatgatcacatagcaaaactagatgctaaaattgccgagcacaacttagaaaatgagaaatttaaatttgctcgtagcatgctttataatgggagacgcccgggcatcaaggatggcattggcttccaaaggggagacaatgtcaaaattaatgcccctcccaaaagattgtccaactttgttaagggcaaggctcccatgcctcaggataacgagggttacattttataccctgccggttatcccgagagtaaaattaggagaattcattctaggaagtctcactctggccctaatcatgctttcatgtataagggtgagacatctagctctaggcaaccaacccatgctaagttgcctagaaagaaaactccgagtgcatcaaatgatcataatatttcatttaaaacttttgatgcatcttatgttttgactaacaaatccggcaaggtagttgccaaatatgttgggggcaagcacaaggggtcaaagacttgtgtttgggtacccaaagttcttgtgtctaatgccaaaggacccaaaaccatttgggtacctaaagtcaagaactaaacttgttttgtaggtttatgcatccggaggctcaagttggatactcgacagcgggtgcacaaaccacatgactggggagaaaaagatgttctcctcatatgagaaaaaccaagatccccaacgagcgatcacattcggggatggaaatcaagggttggtcaaaggtttgggtaaaattgctatatctccggaccattccatttccaacgtttttcttgttgattctttagattacaatttgctttctgtatctcaattatgtcaaatgggctacaactgtctattcactgatgtaggtgtcactgtctttagaagaagtgatgattcaatagcatttaagggagtgttagagggtcagctatacttggtagattttgatagagctgaactcgacacttgcttaattgctaagactaacatgggttggctctggcaccgccgactagctcatgttgggatgaagaatcttcataagcttctaaagggagaacacattttaggactaacaaatgttcattttgagaaagacaggatttgtagcgcatgccaagcaggaaagcaagttggcactcatcatccgcataagaacataatgacgaccgacaggccactggagctcctacacatggatctattcggcccgatcgcttacataagcatcggcgggagtaagtactgtctagttattgtggatgattattctcgcttcacttgggtattctttctacaggaaaaatctcaaacccaagagaccttaaagggattcttgagacgggctcaaaatgagtttggcttaaggatcaagaaaataagaagcgacaacggaacggagttcaagaactctcaaattgaaggcttccttgaggaggagggcatcaagcatgagttctcttctccctacacacctcaacaaaatggtgtagtggagaggaagaatagaactctattggacatggcaaggaccatgcttgatgaatacaagacttcagatcggttttgggccgaggcggtcaacaccgcctgctacgccatcaaccggttgtatctacaccaaatcctcaagaagacatcatatgaactcctaaccggtaaaaagccaatatttcatattttagagtctttggtagcaaatgctttatacttgttaaaagaggtagaaaatctaaatttgctcctaagactgtagaaggctttttactaggatatgattcaaacacaagggcatatagagtctttaacaagtcctcgggactagttgaagtttcttgtgacgttgtgtttgatgagactaacggctctcaagtagagcaagttgatcttgatgagataggtgaagaagaggctccatgcatcgcgctaaggaacatgtccattggggatgtgtgtcctaaggaatccgaagagcctccaaatgcacaagatcaaccatcctcctccacgcaagcgtctccaccgactcaaaatgaggatgaagctcaagttgatgaaatagaagatcaagcaaatgagccacctcaagatgatggcattgatcaagggggagatgcaaatgaggaagacaaggaggatgaggaacaaaggccgccacacccaagagtccaccaagcaatccaacgagatcaccccgtcgacaccatcctcggcgacattcataagggggaaccaaatgggtcttccgcaacaagcaagatgagcatggtgtggtgacaaggaacaaagctcgacttgtggccaagggatactcccaagtcgaaggtttggatttcgatgaaacctatgcacccgtagctaggcttgagtcaattcgcataatattggcctatgctacttaccatggctttaagctttatcaaatgaacgtgaaaagtgccttcctcaatggaccaatcaaggaggaggtctatgttgagcaacctcccggctttgaagacagtgagtatcctaaccatgtctataagctctctaaggcgctttatgggctcaagcaagccccaagagcatggtatgaatgccttagagattttcttattgcaaatggattcaaagtcggtaaagccgatcctacactctttactaaaactcttgaaaatgacttgtttgtatgccaaatttatgttgatgatattatatttgggtctactaacgagtctacatgtgaagagtttagtaggattatgacacagaaattcgagatgtctatgatgggggagttgaagtattttctaggattccaagtcaaacaactccaagagggcaccttcatcagccaaacgaagtacactcaagacattctaaccaagtttgggatgaaggatgccaaacccatcaagacgcccatgggaactaatgggcatctcgacctcgacacaggaggtaagtccctggatcaaaaggtataccggtcgatgataggttctttactctatttatgtgcatctcgaccggatattatgctttccgtttgcatgtgtgcaagattccaagccgaccctaaggaagctcaccttacggccgtaaaacgaatcttgagatatttggcttatactcctaagtttgggctttggtaccctcgtggatccacatttgatttgattggttattcggatgccgattgggcggggtgcaaaatcaataggaagagcacatcggggacttgccagttcttgggaagatccttggtgtcttgggcttcaaagaagcaaaattcggtcgctctttccaccgccgaagccgagtatattgccgcaggacattgttgcgcgcaattgctttggatgaggcaaaccctgcgggactacggttacaaattaaccaaagtccctttgctatgtgataatgaaagtgcaatcaaaatggccgacaatcccgtcgagcatagccgcactaaacacatagccattcggtatcactttttgagggatcaccaacaaaaggaagatatcgagatttcttacattaatactaaagatcaattagccgatatctttaccaagcctcttgatgaataatcctttaacaaacttaggcatgagctcaatattcttgattctaggaacttcttttgataaattgcacacatagctcattcatatacctttgatcatatctctttcgtatgctatgactaatatgttttcaagtctatttcaaaccaagtcataggtgtattgaaagggaattggagtcttcggcgaagacaaaaaggcttccactccgtaactcatccctcgccgtcactccacgcaactctccattctcgggggagacaagcatgagcatcaaagaaaaggactttggggagaaagtaagagcccaaagctaaaagatcggacttcgtctttggtataatcttaactcatttacttatgaccaaaggggaagaaagcacttcgagggctctaatgattccgtttttggcgattcatgccaaagggggagaaagtaagagcccaaagcaaaaggaccgcaccaccaccaatttcaaaaacttagtgttgaatattttcaattagtatcctattgtgttcaaaagggggagaaaatagtatttctaaaatgacatatcaaaaaccctcttgaacactaagaggaggatctcatttagggggagttttgtttagtcaaaggaaaagcatttgaaatagggggagaaaacttcaaatcttgaaaatgctttgcaaaatcttattcatttacctttgactatttgcaaaagaactttgaaaaggatttacaaaatagtttgcaaaaacaaaacatgtggtgcaagcgtggtccaaaatgttataagaaagaaacaatccatgcacatcttgtaagtatttatattggctcaattccaagcaacctttacacttacattacgcaaactagttcaattatgcacttctatatttgctttggtttgtgttggcatcaatcaccaaaaagggggagattgaaagggaattaggcttacacctagtccctaattaattttggtggttgaattgcccaacacaaataattgggactaactagtttgcccaagtgtatagattatacaggtgtaaaaggttcacactcagccaataaaaagaccaagttttggattcaacgaaggagctaagtggcaaccgaaggccctctggtctgggaacaccggactgtccggtgtacaccggacagtgtccggtgcaccaccggacagtgtccggtgcaccagaggactccaactcaaactcgccaccttcgggaatttccagaggtgactccgctataattcaccggactgtccggtgtacaccggacagtgtccggtgcgccaaggaggagcagcctcaggaactcgccagcttcgggaaactccaacggcttgtccgctaaaattcaccggactgtccggtgtgcaccggactgtccggtgcgactccggagcaacgactatctccgcgccaacggctacctgcagagcaataaatgcgcgcgcagcgcgcgcagaagtcaggcgcgcccatactggcacaccggacagcaaacagtacatgtccggtgtgcaccggacacccaggcgggcccacaagtcagaagctccaacggtcagaatccaacggcagtgatgacgtggcagggggcaccggactgtccggtgtgccatcgaacagacagcctcccaacggccacttttggtggttggggctataaataccccaaccaccccaccattcattgcatccaagttttccacttctcaactactacaagagctctagcattcaattctagacacaccaaagagatcaaatcctctccaaattccacacaacgccatagtgattagagagagagatttgcttgtgttctttcgagctcttgcgcttggattgctttcttccttcttgattctttccttgcgatcaaactcacttgtaaattgagacaagagacaccaaacttgtggtggtccttgtgggaactttgtgttccaagtgattgagaagagaaagctcactcgatccgtggatcgtttgagagagggaagggttgaaagagacccggcctttgtggcctcctcaacggggagtaggtttgcaagaaccgaacctcggtaaaacaaatctccgtgtctcacttgcttattcgcttgggatttgttttgcgccctctcttgcggactcgtttctttattactaacgctaacccggcttgtagttgtgtttatatttgtaaatttcagtttcgccctattcaccccccctctaggcgactttcaagaatcggtcggtacctcttggtcgacgggcggtgatgaagtcacgtcggggactgaatgcaccgtcgtctcaggtacgagggtgacgtccagcaagcttttcgcgagcgtgctggcgtcgtccgcttgctcgggattggcgtgtcgcggggagacgacgctcgtcttcgtctcaagcgcgaagtcgacacccggtgcgccccccgttggggtgccggcgctgtcgactcgctcgacagccgacgaggcgctgcctcctgctcggccttggttgccccgccttcccctccgtcggcggagaagagggcgggatgagctcgaaggttgttcttccaccacgcggggaagacgtcgtcgattccgccgccggcgggcggactgtcggccgccattgccgctgtcgcccgacggtggaatgagtatcatgtcgtagctgccgtcgagggacatgaactcaagactcccgaaacggagcaccatcccgggttggagaggttgctggaggctgcccatctggagcttgacgggaagctgttcgtcaacacgcaacaggtccctacctggtgcgccaactgtcggcgtttcgagaccggggagtccctgagccgacgagtgaatgtcgccgcgtgctccagcccagatgggtcgagcacgagggcgagcgcgaaggggggaaagtgaggcggccggagaccggcgtgagagaggtgagaatctcgcggccttcgtgttcgtcccgcgcccaggtcgggtacgcttgtagtagtgggttacaagcgtccacgcgggagagggagcgagcggcctcaagcgagcgcctatctcggtcctcgtccccgcgcggccaaccttctctaagagggccctggtccttccttttataggcgtaatgagaggatccaggtgtacaatggggggtatagcagagtgctacgtgtctagcggaggagagctagtgccctaagtacatgccgtcgtggcagacggagagattttggcacccagctggtgtgatgtcgtggccgtcggaggagcgatggagcctggcggagggacagctgtcggagcggttgagtccttgctgacgtcctcttgcttctgtaagggggctgagagccgccgtcgtcacagagtatgcggggcgccatcattgcctatctggcggagcgagccagatgggacgccggtcttgttccctacggcccgagtcagctcggggtaaggtgatgatggcgcctcctattgacgtggctggtctgcgccctaggttgggcgatgtggaagctcctccgaagccgaggtcgagtctgtcttccgtggccgaggtcgagtccgagcccctgggtcgggcgaggcggaggccgtcggctgaggccagggcggagtccgagccctggggtcgggcgaagcggagttcgtcgtcttctggggctgagcccgagtccgagccctgggtcgggcagagcggagttcgtcgtcttccgggacttagcccgagtccgagccctgggtcgggcggagcagagttcgccgtcttccggggcttagcccgagtccgagccctgggtcgggcggagcggagttcgtcgtcttccgggacttagcccgagtccgagccctgggtcgggcggagcggagttcgccgtcttccgggacttagcccgagtccgagccctaggtcgggcggagcggagttcgccgtcttccgggacttagcccgagtccgagccctgggtcgggcgaagcggagcttcctatggtgccttcggccgggcctgactgcctgtcagtctcactctgtcaagtggcaccgcagtcggagtggcgcaggtggcgctgtccttctgtcaggccggtcagtggagcggcgaagtgacggcggtcacttcggctctgccggctggggggcgcgcgtcaggataaaggtgtcaggccacctttgcattaaatgctcctgcgatttggtcggtcggtgcggcgatttggtcagggttgcttcttggcgaagacagggcctcgggcgagccgggaatatattcgccgctggaggggggcctcgggcgagacggaaatcctccggggtcggctgcccttgtccgaggctaggctcgggcgaggcgtgatcgagtccctcgaatgggctgatccctgacttaatcgcacacatcaggcctttgcagctttatgctgatgggggttaccagctgagaattaggagccttgagggtacccctaattatggtccccgacaatttatttcttatttcataggaagcatcaagcaggagctcaagcgttattactaattatgttggttatctcagcaaaggtcagataccaccaaaggtataatatatta

SEQ ID NO: 661 - DNA, 4538 bp, Zea mays
  Intron number 2 from transcript GRMZM2G307470_T01 (locus G RMZM2G307470) derived from phytozome v7.0 (chr-ID 7; pos 1 01146842 to 101151379 reverse strand)
aggatatcgagatcggtactcaagaagaatctactgccacttatgtttctgacccgtacgacaaggtgtacagcaacatccctgaagaaacacatatgctcaagcttgttcccaactacggttattgcaccgcgaagaagtttgagtatgagccacctgggttttgttgtcgtggtgggaaggttgagctaggtccagtggagacccctccccaactcaagaggttgtgggatagtgcagactctgatgctaggcactttcgtgataacattaggtttttcaatggccatttctctttcacttccctataatgttgcctcgatagtatgacaactaatgtaaggggttctggtatatacacgtttcgagcacagggcatgatgtaccacaatatcaagtcatttggtagggaaggtggggcagagcataaacaccttgagctttacttttatgatgacgatcccagcctcgagcatcggtaccgtaagtgccgtgaagagcatcaacagaaagacaaggaggttatcaaacagatagtcgacataatacgtggaaacccgtactccgagcaccttaggaacatggtccacgttgacaactttgatgactatcgtaaagcatcgaacctcggacagacgtcaaccagaagacatataacacacctctcacttcggaggtgggcgctgtaaggatcgaagggagcgatgggcgagcccaattcatcaagagtgttatgctccatgggaaggacagttcaagccactgcatccgctcataccatggatgctacgatgcactatcatatccattgttcttccctagaggcgaacttggatggcatgcaaaaatcccaaaggttggagtatccatggacgaagtggatgcataccgcacgacacatagggcaagtaatgcaaatgatgaagatgcgggttagttgttaatttgatatttgagatatttgcacattattaactatgctttcgacatcactcacttttcaatccttgcatatgcagaatctcctagccatttatgtgtgtctgtacgtgactactactgctacaaattccagattcgtctcggggtattcaatccaatacttcatggaaagcggcttttccagcagttcgcggtcgacacgtacataaagattgagagctctcgtttagatttcatacgtaagaaccaagatcggttaagggcagacctataccagggcttggtgtatagcatgctagatggagatattagagcagagaagattggcaagcgaactgtattgtcgacatcgtttattggcggtcctcgtgacatgagacgtcggtatatggatgctatggctctggtgcgcaagtttggtaaaccagacatctttcttaccatgacatgtaaccctaactgggatgagataaggagggagcttctccctgggcagacactgcaagatcgtccggatcttgtagtgcgtgtctttcatgcaaagctacaggagttaaagcataggctgactaaacaggatattcttggtaaggtccgagcctatgtctatgtcgtggagtttcagaagcggggtttgccgcatgcccattttctactcataatgcagaggaagtacaagctcacatgccctgagcagtatgaccttttgatctcagctgagatcccaagcaacaagtaccctaaactacgaaagatggttatcaagcatatgatgcatggccccgtgtgggtcgctaaacccctaactgccccatgcactaagggtcgtaaatcgtgcaagaatcattaccctcggaatttcagtgacacaaccttgcaagggaaggattcgtaccctgtttacagacgtcgtgacgatggtcgtaccgaaaaggttcgagggtgcgaattggacaatagatgggttgtcccttacaacccatacctccttcgtctcttcaactgtcacatcaatgttgaggcatgtgggagcatcaaggctgttaaatacctgttcaagtacatatacaaaggccatgatcgtgcttctgttgttatgagagatgcgagcaaggcagatgatgatgtagatgagatcaagcagtacagagatgcaaggtgggtgaatcctccagaagccttatggaggatatacggctttgagcttagtcagatatctccacctatgatgcagttgcaactccatcttccaaacatgcacatggtgtcgtttcacgagcggcaaatggtcgagcaagtcgtcaaccgtccaggtgttgataggtcaatgctcacagcatattttgaggcgaatagtctacacaaggaggctcgtggcatcctgtatcgtgacttccctgaatggtacacttggcagagtggtaagggaaaagtatggcaacagaggaaacgagatacgggtggacaagtcgatagaatagtctctgctcatccggccgagggggagcgctactatcttcgtgttctcctaaaccatgtgactggcgccacttcctatgtggatctaaggacagtagatggtgtcacgctaccgacttttcgtgaggcagcagagagaaggggactgcttgagtcggacaatacactggatgagtgtctcactgaacgtgctcttttccagatgccatcggcgctgcgccgactttttgccacaatacttgtgtactgtgagccaagcgatgtggttgtactctggcagaaacacctagattctatgtccgaggactatcaacacaggaatccgtgcaaaactcatgttgagcagatggtattgattgacattaggaacatgctgcagtcaatgggaaaggacataaagacattccctcttcctcctatcatggatgcgtatgacgatgctattggtactgctagggaggtttacgaggaggaaattatcgaaccagtagcaggagatgtggctctcaaagactgtcttaacaaggaacagagggccgcctatgataagattatgtctgccgttgacactgattagggcggattattctttgtggatggacctggtggcaccggaaagacttacctatatagagtgctgctcgcgacgctacgcagccagggcaagattgcagtggcaacagctacatctggcgttgctgcttccataatgcctggaggaagaaccgcccattcacgcttcaagatacctctcactattgacgatggcgatgtatgtagcttcacgaagcagagtggaaccgcagagttgctacggaaagcatctctcattatctgggacgaggcttctatgactaagagacaagccgtggaggcactggacaatagcatgcgcgatataatgggtcgacccggactgccattcggtggtaaaaccattgtcttcggtggggatttcagacaggtcttgcctgttgttcgtaaagggtcaagggctcaagtggtcgcttcttcgctacggatgtcttacctatgggagtccatgtcccacttaaagcttgttaccaatatgagggcaaaaaacgacccttggtttgcggagtatttgctgcatgtaggcagtggaactgaggacacaaatactgacggcgacatccgtcttcctgacgaggtatgtgtgccttacagtgggagtgacaacgatcttgacaacctaatagacttcgttttcccaaatctcaacaaaaatatgtctgattcgacctacatcacttcaagggcgatactgtcaacacggaacgaatgggtggatatgataaatgttaagatgattgatcgttttcaaggggagcatatggtgtaccatagtttcgatagcgccatggatgatccccataactactacccacccgagttcctaaacacactgacgcctaatgggctgccaccacatgttttgaagctcaagattggatgccctgttatattgcttcggaatatagaccctgcgaatggactttgcaatggcaccaggctggtcgttcgtgatttccaaagaaatagcattgacgcagaaattgtactgggtcaacacgctggaaaacacattttcctgccgtgtatacctctgtgtccctccgatgaagagatgttccctttccagttcaaaagaaagcagtttcctgtacggcttagctttgcaatgacggttaacaaagcatagggtcagactattcccaatgttggtgtatacttgcccgaaccagtgttctctcatggccaactatatgttgctctatctagagcgacagcccgatcaaacataaagattcttgcaatcccacccgttgatgggaaaaacgtcgaggaagggtgtaagaaagaaccccacagtagattgtgggacatatactaagaacatcgtctacaaggaggtcctaacaaactagacctacggtaagtctgtcaaaactcaattgtttgtttcaataaaaagacactgacacaagactaacactcaaatgtaattgtgacgttttgatgaggagatgttaaggagctttataaaataatattgatttgtttgtaactgttctgtttgataggttggggtattc

SEQ ID NO: 662 - DNA, 9589 bp, Zea mays
  Intron number 1 from transcript GRMZM2G418009_T01 (locus G RMZM2G418009) derived from phytozome v7.0 (chr-ID 3; pos 2 02283919 to 202293507)
tgctctgatcactggcccatcaattggcattgtaggtgttgggaccatgcttcgtcgccgaaggtcctgcaaaaagaaacagcttcggctgaagctgctcgtacgtgacgccgaaggcatcattcatgaagcttcggtactataacatatccgaagatgaagggtcgaaccgacttaaagatagaatgaccttttagcccatagaagtctgagtcattgtggtaaatttttatgaggggcatgattgtaatttctcacaggttgtgtcctgtgtttataaatagtgaacagtattcctttactgttcacgcactccggtaattgttaacgcatcattcgagaattattgtttgtcaaggcaaaggtataaatgtacctaaacattgtgttcagatattcaaaattcgtttaataagatatgtgaatgatgtcgtttattttcaatgtatttaactttaatatttcatgctttactttactttgtattatttttataagttcacttacgaaggtgaaaaccttcgtaacattatgcccgtgaccttcgtccaaggttcattaaatccttgtggaaataatgcttcggcggacgaagggcattaatatttaacattttatgttgccttgttcttaatccatagcatttgagaacaagtccccaacattggcgcccacctccggtgaactcacttccacttttttgagctgatggcttcgctcaacattcaagcttggagctgcttcggctccgaagctggtattcccgataacaggcggttcatgctcagagccagccaacaagaagcagaagaaggaggcatagagaagggtacaacatgtcggggtgcagtgaccccttcatcaagtcaagatggtctcacattccaattaccttctcccaagaggatcttcaactcaaggattacccacacaacgatgctatggttatctcttgtgtgatcaaaggattcctggtccataatgttttggttgatacaggcagcgcagctgatatcatatttgctaaggccttcagacatatgcaagagcccgaagacaaaattcatgacgccacacatcccctttgtggcttcggaggaaggcagattgtagcactcggcaaaatcacaatgccagtgaccttcagatttatcaacaacacaaggactgaacaagttgtgtttgatattgttgacatggaatacccttacaatgcaatcattggtcgtggcactctcaatgccttcgaagcaattcttcatccagcttatctctgcatgaagataccttcggaccaagggcccattgctattcatggaagtcaggaagctgccagaagggccgaaggaaattggacagactcaaaagcaatccataatatagatggagctgaagcttgtgagcaatacaagttcagaagggaaaaagctgcttcggctgatcagccgaagcccatgctcttatgtgaggacatagtagagcagaaggtgttattgggatctcaactatctgaagaacaggagaaaaccttgataaggtttttgttcaacaataaagatgtttttgcttggtcagctaacgatctttgcgagttaacagggatgttattgagcactcgctcaatgttgatccatccttcagacccagaaagcagaggcttcggaagatgtctgatgacaaggccgaaggtgctcggaatgaagtgaaaagactcctcagtgccggagttatcagagaggtaaaatacccagaatggttggctaacactattatggtgaagaaggccaatggtaaatggagaatgtgtatcgattttactgatctcaataaggcctgtccgaaggacgagtttccattgccaaggatagattccttagttgatgcagcagcttcatcagagcttatgagtctgctggattgctattcaggctatcaccaaatctggatgaagaaggaggatgaaccgaaaaccagcttcataacccctagtggaacatattgttaccttcggatgcctgaggggcttaagaatgctggaggaagcttcagcagaatgacagcgaaggttctccattctcagataggcaggaatgtgctaacttatgttgatgatatcattgtaaaaagcacgaagcaagataatcacattgctgatctacaggagaccttcgctaattttagacaggctgggttaaagctgaatccggaaaaaagtgtcttcggagtgaagaaggggaaatttcttggttgcctagtttcaacaaagggaattgaggctaatccaagcaaaatcgaagctatacttcgaatggaaccaccaagtacaaagaagggggctcaaagattgacaggaaggctggcatctctcaacagattcatatctagatcagcagagagaaatttaccatttttcgaagtgctgaagtcagcagaagtttttcaatggggaccagtccagcaaagagccttcgaagaactgaagcaatatttgatagatctaacaacactaactccaccaatgccaggggctcctttgttattatatatggcagcttcgcactcagcggtaagtgcaacacttgtccaggagaagcttgaaggccaagtcaagaagcagggcccaatatattttgtatccgaagttcttagtttatcaaagaaaaattatacagaattggagaaagtactgtatgctgttttgatggcctccaggaagcttcggtattattttcaagcttacaatataattgttccttcttcacaaccgttgaatgatattatgagaaatcgagaagctactggaaggattggaaaatgggctgcagagctcaatgaattctgtattgattatgtccatagatcttcgattcagtcccaagcgttggcggacttcattgctgactggacgccaggggctcaggaggaagaaacgaataaagatgccgaagcatggacagtgttttgcgatgggtcttggggaaccttcggagcaggagcagttgctgtgttggtttcaccttctaaagttaaaacttgttatgcggcaagacttgattttagttgtacaaacaatattgctgaatacgaagctctgcttttgggtcttcggaagttaaaggcaatggggatcagaagggccattcttaaaactgattcccaagttatttctggtcatattgacaagagctataaagcaagagatccgaagcttgaaaaatatctagatagagtccgaaggattgaggcttcctttgaaggattctctgttaaaaatattcctcgtggagaaaatgaatatgctgatctatttgccaagtcagcagcacaggggctgcctttaccttcggaagtatttttcgaaacaataaaagcaccttcggttgagcttcttaaaagagcggtcctcaacatatccccctgtctatagtgaagattggagaactaaaattatctctttccttcagggtaattttctttcagacgacgaagcttataacaggaggatagaagcaagagctagaccatatgtcataatagaaggggagctatacaagcgtggggtctgttccccgttgctcaagtgtttatccagatccgaaggtatagaattgatgaaggaaatacacgcaggcctgtgtggatctcatattggatctaggcctttgctcgagaaagtttttcgtcaaggattttattagccgaatgcagcttcggatgcagcgaatttagtccaaaagtgcgaaggttgtcagaaatgtgcaagagatcaaaaacaaccttcatctttaactcaattaatacaacccacttggccgttgcaaaggtggggccttgatttgttaggtccattaccaccagcacagggaaacttaagatatgttgtagtggcagtggaatatttttctaagtggattgaggcaaagcctctaaccacaataacttcggttactattcaaaagttttactagcaaaatattgtttgtcgctttggagtgccgaaggccattactgtggataatgggacacggtttgattctgaagctttcagagaattttgtgatcaaattggcacgaagatccattttgcatcagttcgacatccggagtcaaacggacttgtcgaaagagctaacgggatcataatgacaggaataatgaagtcaatcttcaattagcccaggggaaagtggccagacgagttaatcaaagtggtgtggagccataacacaaccatgtcaagaccaacaggctttacgccattcagactattgtttggggatgaagcaataaccccagaagaggccaaagcaggatcaataagaacggtagcttcagcagaaggtgaagacgaagctgattgctctgtggaaaaagatgctatagaagggatcagactccaagccgtggaaaacatcaataaatatcaagccaaaacgataaagtggcgtgacaggaaggttaagctgaagaacattgaaccgggacatctggtgctttgaagagtagtcaaccctgagacagtaggcaaattacagctgaagtgggaaggaccttttttggtagtatcttcgtcaagacctggttcctatagattaaaggatatggacgacaacgacattcctagatcatggaatgcggatgagcttcggcgatattatgtttagtttgatgtaattttttctattcttttttgtggcactcttttcctttccaaagggggagaaaggtttttaatggggccacaacatgtaatttttcttttccttatttcaattatataaaagtgatatcccccaaaaaaatgtaaatgtaaatgccaagggaaaagaaaagaaaacagggagaagctcaaaagtcgttcctaagggaatgcagagcttacaacgaaaagtcaacgctgattccgctgaaagtaaaaggcgaagaagctcctaagggaggcttacagcgaaaagtcaacgctgatacacaaaaataaagctgaaaagtaaaaagatttgaatcattcccatggggatgaagggctatgattatggtttttgaacatgtgtcccaatattcatctgcacaatacatttcatcatgtcatttgcattcataaacattcatttagacatatatagaatcatcatcataccacacaaaaaagataggtgcttcagcaaggaggaaagacttcgaagaaggaaaaaaatttatgcttcgtcgtgtacgaaaagaagggaaggtgtttttcgccttcggctcaaaaaagaagtttcgtccacagcaaagcagattgtacacagatagcggaaacaaaatatattacaaggtatgcacaaatttacatgagtttttccataatgatattacaaaagtctctccagaatttttgcaggaaagaatattgtagcaactatcaagcttcaggtcgtcatacttcagctttgtctacttcagctttgtcatacttcagcttcgtcatcctacgtatattaaagaacataataagaaaggtgcaaatttcaaggagaatgtaaaagtaataaatataagtttcttaccggctcaagatgacttcgagcttcgtcacccgctattttccgcccgccatttacccaaatctgggtcataaatctatttccgatgcttcgggctaggcttggaatatccatcagatctgatgatgataagctgaagtttggtctattcacaatttttccatgcgtgcagccagccttcagaaaagcggtagctgtgccccgagaagctaccagggcgcagaagtcggcatggccaccaataacttcgtcaagagcatcaacctcaccttcaatatattctaatgtgctgggcaggttttcagctgaaggtgtaaatatttcagagctggctccgatagaatgaaacacatccttcagccgctgcacgcatcggctaccgaagcttaggcatttctcttgaagttccttcaaggatttttgcaaatttgaattcttctccatctcagttttaagacttgtttcaaggtgtttcttttcctgctcagatttttctgattgtttgagcaattcattctttaaactgtcattctcggcttggacctcagccaaagagccttccatagactgaataacaaagtctttcttttctaatgcaccttcgtgttctttggacatgatctcaaagtcctggatggtgaagtccttctttttcaagacagtttcgtaattttcaactttttcttccaaatctttgatgatagttttgatcttctcctcttcgagatcttgttgcatttttagaaccttacttaatagtatactctgccaaaacaatcttcgtcagaaaacgacctaaaaacaaaaaaaataaataaatataataaaatttgttaccttaaaattagcatatagcaggcttctggcgatatggtgtcgctggtacctgcagaggtccgcttctagtttcggcaggccaacacttttggagagggttctaacaactttggcctcggtgcggttccgaaggcatcttagcttcccttcgttgaccccaccaaacagcgtagcccctggcttatacccgcaagatatggcatattttttcaactcttctttttcggcgcttgttagctcttgtccaagcaaatcttaaaagttaaaattttcttcttctaaaatgtcgtcgatctgttcttttcctttttcagttgccgtgtttaccgcggccacagcagcttcttcttcagccattttcaggagtttgttgtcaatgacttcaagagtggtttccagatttgaaccttccgtagtctcggcttcggccccggtagcttcggcttcgccggtttcaacttcggtggtttccactctggtagcttcggctgtggcaccttcggcttcagcagtctcggcaaaaacaatttttgacactgtcgccggtggcggcgtctgatgaatcacatctgctatttgaataattcttctttttttcggcagtgcagggctttctgctgccgaagcttctttgtccttctgaaaaaacttcgtcagttccggcgccagcggacttagcttgataggcaagggttcagtcattaccttcagaatctcttctacttcggcagcagaaggtgtcgcatgagtttcttcttctcgaaccaatgttttcggttctggagatgcagttttcctttttcttgcagtagccaccttcggctcagggctcagcttttcagaaatttcctttttctttttggccactttggtgctttcttcgtcaacggcgctggcaattctttttctcttcgggcctccagcatctccgcccaatcgcccataatcaggatattcaaagcctatagcatcaagcactctgtttagccttcgtttcggctgggtgccgaaggctgctgtcatcaatcggtcctcttttttagagtaattcccaagaatttcagtactcattatttcgattatttcgagccattcttggcagggtgccttaaaatatttcttgaatttataatgatagggtagtcggacaagcccccctctttcttctctcctttaagcttcggcatagcccattccttcatagttggaaatattttgaaagccagcaattcctgcaccaaatccctagcgccaatgtgctctgcaataattctgaattcagccaacgccgtttgggttggaccttctggtgtcatattacactagggtcgggtttctccgaagattagttcaagcggactctgtacaagcttctccttgtcgtcatcaactttgacgtagaatcattccgatttccagcctgccggccacttgcttcgatagttgatcacaggaaattttgtagttttccgatatgcaaaattgtaacaaccaaaattttcatgtagcccatccttcctggccttagtttggtagtgtagctcgtgtactcggcagaaaccttcggcaaatggctccaccccctggcttcggagagcccaaatataaacactaagcctaacaatagcgttaggagttagttgatggaaaaagatcccaaacttctttagcacatcggcaatcatcctattcaaaggaaatctcaaaccagctttgaggaaactcttgaaaatcactatttcatctttttgaggcttcggggtaatctcttctccaccaaagcgaatcagctttttctcatcttcgctaaagtagcccgacttcaccatctttgggaaatcagccttcgaaatggtcgactttccgaagtccagatgactaggcttgctcggtactgcgatattgtaatcaccgtcagaatcagcctcctcaatatctgcttgttctgcttcagcagcaggtgtgtcttccgatgttatcaatccagatcgcttcattgcttcagagataggaatattttccgcaccttcggcttcgtctccctcgcgctcaactctagcagtagagcgcactctggccatttaattttgaatttcttgaaaaatttcttggaaattaataaccttttcttccgaagctcttcttctgacgaagcaaacaccaaactggagcttcgtttgaatgcgaaagtcaagcttcggctatggttaaaaattttggcagcaaaacagtgcaatagcaatgaatgctgtggtaacttcacacctacccgtctgtttatatagtgttgcaggtaagaaggtgaatcgtcagaatttttacaccaggcaaacagttgctcgcacccgctgaacggtgggccgcaaaaaccagagtagtgaacctgcatggtgggaccgctacgcgctcgaaagctgtatcgtttctcgacaatgagctcagggaaggtgttttttggaccttcgacttcctgaagcctaagagacttttttgacggatcaagctcgttacaaaaaacgatctagcaccgcgaaggggctactgttgggaccatgcttcgtcgccgaaggtcctgcaaaaagaaacagcttcggctgaagctgctcgtacgtgacgccgaaggcatcattcatgaagcttcggtactataacatatccgaagatgaagggtcgaaccgacttaaagatagaatgaccttttagcccatagaagtctgagtcattgtggtaaatttttatgaggggcatgattgtaattcctcacaggctgtgtcctgtgcctataaatagtgaacaatattcctttactgttcacgcactccggtaattgttaacgcatcattcgggaattattgtttgtcaaggcaaaggtataaatgtacctaaacattgtgttcagatattcaaaattcgtttaataagatatgtgaatgatgtcgtttattttcaatgtatttaactttaatatttcatgctttactttactttgtattatttttataagttcacttacgaaggtgaaaaccttcgtaacattatgcccgtgaccttcgtccgaggttcattaaatccttgtggaaataatgcttcggcggacgaagggcattaatatttaacattttatgttgccttgttcttaatccatagcatttgagaacaagtccccaacagtagggaagtcgagtgtgaagacattcttcttgttgtac

SEQ ID NO: 663 - DNA, 6251 bp, Zea mays
  Intron number 9 from transcript GRMZM2G041732_T02 (locus G RMZM2G041732) derived from phytozome v7.0 (chr-ID 9; pos 6 6916657 to 66922907)
cacaaccattaattgatctggatactaagaaaaaggtattttgaagctgtctctgaagtccacattacttttggtctgttgatgtgttaacattggcttttttttgtctacaactctgcttgatttgatcaatgcatccttgacatatttaaacaatcagctagcacttcaaattcggtaattatttgtcatgtcacatggactgcatatcatcattatgatgactctccactccaaaggtctaacagctgggctaatctgaatagtacagttgtatggatacatgttcatataaccaatttactgaaaaagctgagaagtcaacatttccctgagacatattcaatgttgttgaggctatcattctatagtaatatctaggggtggtaacaggtcatggccctaatgctctttcataatccagctcagactatctttgttaggtcacaaacatatacaaaattcagcccagcccttttcaggcctgaatctgatacttaaaatttttggcccaaattttcagtccttactgttactaacatcagttgtggtctatttatggggatactttgcttcctggaggatatgtatgtgtattatgctacatattctttgacatgatcacaacagttgaccagtttctggttagtcggacccttcaccaaatatatgttttggatctgatttgggaattgggataagtataatgtaaatgccaaatagaaattctgaatgccatcactacagtattagatccaaaacttggacggatgtattacttagttaaatgatatgctgattatccagcatcaataaatttatgtaagctgcctatcattttaataatgtttagtgagcaatatgtggtcatttgttttgttccacaatggggatccttgaattttgttactgtgaaaagcaacataattaaagagttaaagacttgatgtctaaaagcttttgcactaagaagtctaccaaacagcaggaaacctagcttgcaacgaagcacccatggttataactgttagattggcattatcctaggggttaattgtattcctgccttagctattactggccttaatagcagatcatataggattttataggattctttccttgtatgtacactcactattgttgatacgacgtgtacgcctaggagtgtgcagtggtgaattagcggcggggatataggacttggttggaggtgagaccgttgttgctcctaggagcagtgtccgccagggtgaccgagtagcttaccccaactattgaaaacttctttgataatcttctaggtacttccaccgtcctagtttataagtcgtaaccacctctggtttaaagaccaagaaatgtatttaattctctctatatattatgggactagaattaaaagtggttacaccttatatactaggcggagggagtacgtactacgacacctttatagcacaagagccttaggacaaacccatcgctaacgaaccagggatagagatgactccttgttattctcatctactaactaattaggataaggataagctgcactactaaatcgggataaggataagctgcactactaaaccgggataaggataggcctctccctcctattctcggctaagcaactgactaacagaacctgtgtaaactctcagctagccacaatggcgctttgcataatgccgtcccataaatgagttcacaacatttccccccttgtcgacaaaagtgctcgttcgcgagctccatgtttgggtagcacaacttgaactccacctcttcccatgaagtgttagtttcagaacgaccaacccatttggtcagcacttcccaaatgactctgcagtatggcgaacaacaccttttctggaattggtatcacacgaccatggagcaactcttgaaggggaacaactcgagacagagcagcacccttgaacttctttaggagagaaacatggaaggcgtcatgaattttggttcgtggagggagctgtagcttgtatgagaccatgcccactcgttgcagaatctggtaggcttcgaaataatttggctcaagcttgaatggtgttgttgctgtaatacctattgcagtgttgctacaaacgcggccaaatccaatcgccatccttgaactccacctcacgcctcttcatgtcttgttagcatttcatggtcccttgagcttgaattaactgctcacgaatctttgactcgcgagcttgcagttgattgtctacaactgcaatacgagaagtcctcgactgataggatagtagcgccgaaggcttgcgaccatataccactttgaatggagagcgtttgagggcagtctgatatgacgaagtgtagcagagctccacccaaggcaaccacctgagccattctcgtggcctatcttcagcaaggcactgcaaatcatggtgataatgatgttcactacctctgaccgttcgacagattgaggatggaatgttgatctcatgtgaagcttcacgtcgaccagcttgaactatttagtccataataagctggtgaagatcgtgtctttatcactgacaatggagcggggcagaccatggagacgaacaataccatcgaggaaagctttggccatgtatgttgccgtataaggatggctgagggcaataaaatacacaaacttagataatcgatcgacaacagtgacaatcgtaggcttgtcacctacttttgggaacccctccatgaaatccatggagatgttgctccacacctgtgaagggaactcaacagttgtagcatggcaacatgatggaggtgtactcaatcttgttcctctagcatactgcacaaccacagatgagctctcgagcatgctggaggatgtgggggttgtagaatgtcgcctgccaatgagtgacgatcttctgaatgccttcgtgacttgtgtcatggacatgggacaacaactgtggccaaaggatagaggtgtccgacatagattttgccactgaaactgaagaggcgttgattgtcaacctcggcccaaccttcctttgcagttcctttggctagattgctgctagaaccgccaccatgcaggccatcaatcgtagccctcattgccactgctagcacccaagctgcccacgccacccaagggctggtcgtcggccgtgtgagcagaggtatatgggcatgtcttgccagcagtgttggctgcatttgtcgtcgatgttgtctcgtccgcaaggcccttctccaggagcgctaggtgctgatcatgggaatccgggcgagaattcatggtggtgagttgtgccagagtcctttcaagtttggcaaagttggacaggagccaggatcatcctccacgtcggacatggtggtcgatgtgtcgttgcgcaccaatatcgaattgataggcgtgtatgcctaggagtgcatggtggtgaacgtatgggagtcagattgtgggggagagcggagaggatatgggaatcgactggaggtgagactgttgtcacttctaggagcagcgtgcaccagggcgatcaaagtagcttaccccaacgagggaaagcttctttgatgatctcttaggtatgatcttaggatgaacccattgttaactaaccagggatagagatgactagctgttattcttatctactaactaactgtggtaaggatatgccccaccgggataagtgttagactcctgtttagggttttggcttgagccctcttgtatttacctaactaccctgtgtaatgggcttggcccacctatttggtctatataatatactcccaaccctgattaggattagggtttccaataataaggataagccacactaaaccgggataaggatagacctctccctcttattcttgactaagcaactaactaacataacctgtgcaaactctcagctagccatggtggcgcctggcataatgccgacccacaaatgagtgcacaacaattgtatatgtacaccctacaacaatagagcacaatgtataagtccatctacgagtacaaaatccacatccttaaacttttaaatctctttcatcaattataggaagactagaactctcacagggtaacagtcacagaatttatgccattggacttcaaaaccacaggacctacgccacctgacttcgaaaccggtttcacgaaaggtgttaggtttagtcccacatcagtacttgatggtgggagagcacagtgtataagatgaggtagccctcacctgtcagactagtcttctaggttgagttaggtccagtgccttggaatgttgtgggctttggtggacttgggcctaaggggcgctggttcacgggtatagtcagtgggctggatctgctgcgcatctaacaagtggtatctgagccaatggtcagaaaacctcaagggtcacatggtgacggcggagcttgttaagacggcggagcttgttaatgtcttggaggtcacatgggttgtgtgtgacataaagcattggacttggggctcggagaacgccttcttgagatcacacagggttgtgtgatgtgaagagttggtttggtgtgtgacgggggacattgtcaggtttagtcccacatcgataattgatgatgggggagcacagcacataagacaaaggcaaccctcaccttaggccccatttggggcagcttttcacccgctcatggtgggaaaaagccgcttctgcaccccaaacgactaggtttgggagcaacatctttccacaacgcttctcttccccgcgggcattacacgtaaaagttaaaccggccgcctgcccgaagcggtaaaagccacaatgcgagcaaacagctcagtcctgcatgcttttttacacgtctagaccctgaaacgagcggccccaaatatctccgtctgctcctctaatttttctactcagtaaaaatgtttttagagagaaagaacttaaaacagaactggttacttaaaaaacttaaaatagttagtaatagcgaaaaatttaaaatgctacctagtaataatgtagctacaaaagatgacattgacagggtctagaggcattcaggtcatttctcactcagcatagacagtctcttaacaaaaaatcaagatcgccaaacactcatattatacatccagtagattctcatgacagctggattatccagaaagctagtttcttataaaaaagctcttcagaattaagctgtcccaaacatgccctagtctagtcttttgtgttagagtggacgcactaaccagttcaacacaaaagcttgctaatgggagaaggtagtcaatccacatatacacttcaacacccccactcacgtgcagccatagggaaagacgcaaacgtggaaataaatggatgcatgcacaaataaagcttctgccaggattcaaactcgagacctctggttttgatatcatgttagagtggacgcactaaccagttcaacccaaaagctttaagctaatgggagaagatagtcaatccacatatagacttcaacattttgggttgagttaggtccagggtgctgactcgggtatagcagctgggcctgatctgctgcgggatgccatctttcaagtaccaacacctgccagtgctcagcgtctgcctgttggccatgatctgcttcctgctggtggaaatgtagtgcttcccgtttcagcatctctgcgccttgtgccagcatcaccttgttctctggcaattgaagacctgcccagtattgaatgagcgaacaagaggaacaaacaatctctgtaggagacttgattcttttcccctctcaaagctataacttaactttattcctcactttctagagaccccagcaaatagctgcaagccctaccatgtgaaagccttttttccattacttatatattaatttactcaaggccatagttaatcagaattactaggccaaccaaactccgaatatattttggcttagagcaccccaaaataagtgtctccatttctttttctgaacaaaaaacacacctcaggatccagttctttttcaacatgttatctttggttaaaattatacttcgaaaaattatccacatgaagatcttggatttaatggaacgtttatctttccaatttttcttatctgggagatcaatttcatccctgcgttgatggttatacattgattcaacagaggtttctattcttttgataaacccatctgggttt

SEQ ID NO: 664 - DNA, 4335 bp, Zea mays
  Intron number 1 from transcript GRMZM5G829831_T02 (locus G RMZM5G829831) derived from phytozome v7.0 (chr-ID 1; pos 2 00683106 to 200687440)
ctactggtgcgtcctgcccgcatttccgccaccaggtagcaccgcctgcgcggccctctctctcctgttctttacacctcacctccggatcgctcagatatcgagccgtagtccgactggtcgccgcgtgcctccccccatccccccgcagcagcagagcaccacagcgaccaatggaggcggtggccgttggcgtggcactgggtggcctctgtatctctgtccgtcatttctcccgagtttgcatatgatgtgtttgtgtgctcgtcgggcgaattcgagtggagactggagaggtgggatctgtgtggccaacaaggcatggctgcctggatccccgatcggatgcgaccgcccgttgattaagggaagaaggagcttggtgggagtgggctggggctgcttggggaatccgatccggcattgcctctgattggaattgacaccacatcaaggttgttgtgcgcgacttcggtgcatagttaccatttccactgccatgtagtcaacaacctcttgggcgaaatataggtatatcggaaactagggttgccttcagatgaaattgcagatttgtagtgccgagttggaatgtcagggtaagtttagcatcttgctgtagttggtgacctccggttgaactttccatgtgaatgagaattatgtaggttttgattgagacttggaagtttattcctttaaggataaacaaagaagagttcggttacttgactgttgctgcacacgtctgtccgtggtgtcctggtgacaggagctgagtatcctaaccagctagctaagctacaaactctccaggcgcagtgaagagaagctcacttgggtcgtccgggttgggagcagacgcgccttggggacccatctccactgcaggcagatgttctcgatgttcgggtggaacaccttagtcattcattcgtcagttattcagacattcactcagtcgttcattcaatcagctatttagggtgtgtttggtttaaggaatcactacatctaaattgaggtggtgcatcatgggttcattcctcaaatttgatgggatgacctcattcctcattttagtactaactaactaactatgaggaatggggtggtgatggatcaactcattctattccacaaaccaaacaaaaatagtggggagtgagaagatgatggactagctcattcctcaaaccaaacaccctattaggcactaattcagtcattcgttcgttggtttatttactcagtcattgattcgatcattcagtttttcattcattcacttagccaatcgtttgttcattcattcacttttagattaatgtttgaatgcactagaactaataattagctattaaaattagctaaagattcaaaccgcacggaacagccacatcctttgcatttgcaagcgctgcgagcctgcgacgcgcacacatgacacacccgacctgacgctccggcgcttggtgaggtgacaccgtgataggagttggcccaattaaggataagaggtggtgctgaggctatcttcggcgcagctgtatatagagttcactgtttatagaaaatatgaagtgagataagagttaggatgcgaaggttgttgaagatagcttgacaataaaaagattgctccaaatctgttttaaaataaagcaaacaaaatagaaaaaaatgactgaataataagaaagatcgcaccaaatctgtttgagaataaaattaacaagataataaaaacgattacataataaaaagtattgccttcaataggtgacataatttaatacagaaaaaataattaaacacagtgcatataccatggcaaatgtttgccgaagtgatttatcgtgtcctcaatcgatacaagtagcgattccttgtatgtatctattgtttttcatctaaaattgaaacacccttctattggcagtagtggcaacaggctcaactgagttctctctttttcctatacacactaatgttagagagatgattacattatattatattccttcttaataaggattgttaagaaaggaatggctagcacactttgtaattttgatggcttcatttattgagcgatcatattaatctgcattgtaaacatactcaatccttgtagacaaaatactttttatgtgcatcagtgcatgtgcgtcctgtgctgactacgggctcattggtcttcatctctgtctacttcattaggattatgaattcagatttgttcttaacgtcaatgttccttcccttcaatccatagatgtgtctctgtaaaaagagcaaaaggtagtcaatacacttacttttcaaccatcatttttatagtagcaatatgatgatccaagcctccaacaacttcacatcgtcagaatcaaagaacacatagtgcactgtaaaccattttaatacagatgaaactggactttacactctccaaattgcacaagcttctcagccccttaacccacccacctgcataaacatgtacacagaaaaacgccaaggctgttggagaagttcttgctgctcacagcatttctaaaattaagggacctcaccatcagtgatattccaaacatataaaggtggctgacaactctatcaactagcaatgaagaggcccatgtgatgttcttcatggcagcacactccgtgtgttaatggaaaaattctagattttaataatgcgacaattgatcatggatcattattagaaaggtaagggttttcatggcactcttgcagtcttgcttttatcctctgttttcctgataggtttatttacctcagaacatttggctggcagattgagcacttatggcttagttgaataccaaatagaagaggggaattgcaatgttagcttttttagcatgtacaaaatttctttttcatctgtatgaaggggcttaaataggctttttccaatatctaaagatagcacacatgctttccttaagatcattcatttgaaactccgctgctatcgatgcatatgtatttcgatacatgcacacattgcttttcattatccccattctacctcaaaataaatatcacaaatctcattattaccttttcaatttcgtatgttgattgattattttgaaagaatgctaaactcttattataggttgcagcccccaaaagaaaagtattatttccaaactcatactccttgcttccttatattctttagcaatgcactcaattttgtatttctagctttatgtcccttagatgaaaatatgaaacaatgttgggtccatagctacttttttacgaactaagtagtagtccatttatctaattctttgggcatgtcctcgctgcttttttttgctatcgctttagagaattatctcaaaagttatctccttttgaaggtagatattgcaaattcaagcaaactatagtaaaaatagaaaatatgaatgggtcttgcttgggtacaggttgcctcttgcaaactgatactctccgagtgaaaaggggcaaagccttgcctttctgaaaatttttgttcccaggtgcagtttcagcaaatttatgagcgcaaactaggtgctgagttccacaatgttagcttattgttacatatttgatttttttctcctgcatttcttatcaagatttgcaatcctgaagtttccttttgaatgaagtagacacaaaaaaaatcaaaagaagttcacatgagtactgttttcggcgagaactgttcctttttccatttgacactagcagaagtctcttactctctagagccccagatgaagacatcatcgactacgtgtgtatctcctaccagccagcctttaaactttaatcattctctcctcaagaaccacacaatacagatgagccaatcagtcctcaactcttcgtcaggaatcaaaacaagcttatcattggtttatgtgtgcacccaccattttaactctcaccaaacctctatcttttcagtttaggccagctaccatcttaaaggtctatacgatgatttcaaaatcagtgtaagctcaaacagcgccggtgagaagccaatgctctagatgtggcatctaaatagcacgtgttcgaagggtacgatcccaatcataagaaataagaaggatgacttgcttcgagcagctccattaagcggtatggcaggaagtgacatactgctccgaacctagtgtttgtttgttttaatatgttttgtgaggatggtcaccaagtatgtccacatggtttgttttgctgaaattgaagagctcggtagctacattgatatgttgtgattactgaactattgccattacttgatgcagc

SEQ ID NO: 665 - DNA, 3846 bp, Zea mays
  Intron number 3 from transcript GRMZM2G111926_T01 (locus G RMZM2G111926) derived from phytozome v7.0 (chr-ID 8; pos 3 3364161 to 33368006 reverse strand)
tacgggtcaccccttgcttctgtaagttttttttcctcacatgcatatttatacactattcctcttttctttccttttttggttattttagaaacttaaatcccctctggtattaattcccgagaatttcacttaattcccaagaatcccaaaaaaaattaagtttctaaactagcccttagtgagacttaatttatttgttcgccgtaagtcgattttgagatgcacatttctccttaattttccttttatagctgaccgtgcacggccttgaaacatcacgatcttttcagttaaatttaattagcacgggctaaatttttacattgcaaaagaaaataaactaatttcacacacacatatatagtatatagctagcaaactgctaatgggccagcaaaacttatggatgataacattgagcaatgaaattattgtcatgtaacggtaactatattataatagtgagtttcgatccatgatctaatatataccatataataatattgatgccacttggccccacagacaaagtagagtatagttcaagtttggagatatataaatgataataataataataaagctgctcaagatattttcattctggcgatccatgtctgtccacgatggatcgacgataaaatactcggtgtttattataatggacagggcgctttgtggggcgattattttatgttgtgttgtccctttcatgattatttattaaatataaggacagaagtccaagcaaaacacatgtgccccaagcaatagggatatatagtgacatattgtggaaatagttatatattttgggggagaatcatgtgtcagggatattgtacaatagaaaaacatttcttagtatgtaggtcctcaactgcccctgttttttctcttatttttagcagatgttcgatccacttccacaattccacttgcaggaataatataataaatatagatatatatggtacataagctgtatgtaaaatccatataataatattaatattacattatatacctcaacgaatcatttctaaagcttttattaggtataataaaaagtaaatttatattttggtgcttgtagctaggtgtggccgtgtggggcacgtgcaagcaaccttactcgttccacctcctatcttttgctccactttgtaaataatacatattacagcgtaaaactgtgtagaaagtatgattttacggctatatacacggtgtgctacgactaaaagttagggacgacctcacgccgataattggatgacagatttttttcctttgatatctttcttctctggcatgccaaatcgaattcctccctctgcctttaatttctatttgttaggattatatgaaactatttccacaagtatagttagagactcaaattcagatactagaaattaatgatggtttacaagccataaataaataaattaaaaataaacatatttagattttaatttgaatgaaaagagaacattgcttcggtttgatgcagattaacttatacagaaatcatatattatgtcatgagagacaagcaaagattggtcaacttattaccatttcttgcaaaatcaagtttgccgtattattattttgtccttttcttttttaaaagattattagctggttattggttctctgggcagttaacggggtagagtattccacagaattaaataatcaccatgcaaggaacacgcgttgtcctctacatacgattctttatttacttaattctacatcacacattttgtgcaagaacagtagctattagaaaaaaaatgtgagcatcggttcacaaccggctatagtactggattatcaactgatattagacaatcgaaattaaagaccttatttttgaaggaccggtgaaatgaccagaaggggtgaattagagccaatcaaattttattgttaaaaacttaaatttagaccttatttgtgaaggaccagaagaggtgaatgagagccaatcaaattttattacaaaaaactaaaatttagcacttaacttcaattgagatgaagaaatcgttcaaaccagaagcacatcggccaaatagtaatcttacgatttcaaaatggtacccctagatacatttggttttttgtttagaataccggtattctttggctaagttcatttggtttattggtttttgtttagaatatgggtattctaaacaaaaaccaaatgaattttgccaaaagagatggatgtcaataaaagcccacatatctatttatagaggtgatggatacatcatatccacttagccggggcaaaatggatcaactcctaggattttgatcagacgaccacgcgctctacacaaagttgcttcgcctcgacacaccctttgtgatgatgtcatgtgccacctctgattcctgccgaaaccgccaccgtcaagttttgaggcccaaactcagcaaaaccagcagatgggtggttttgaggctcaaccacaaaaccaccgcgagtagtgcatcgcatgcgcgtccccacgtcctggacacatgtcccattagtccttgaccgcatcggcgacagtgcgacacaagccactctgtcatgtcctcgcgctagtgcgtgtcctaggtgtgagccaccacaacttgtcaaccggctcctccgaccccttggtcaagtcctagtgctcgtctttcatcactctccgtctatcggcataaaccctcgtgtgaccttcacattcgccattgaacaacatacatgtacttcacacctgcacaccataagccgagagacatggttgcacaatacataactcatactctggtcagtccaccgactacatcaaaatactatccgttgacaatcacttatcatcaactcgaaccacaagggacaaatcaacttgtgttcacaattgtttgccatagagagaaagaaagcgtactccgtgtgttgcttgggtttaccgagaagcacgtgtgtaaaatgggtagcatactctagtagtactacgagtgcacgacgtgactcctacagattccaaactcttggcaaaattaatatcgcgacatgtcatcatgtccatgccattaccttagctgtattgacaggccggacctgctatttgtgtcggccgtacgtgttcttgcggtcctcgtcgggtggggtttcgctctctgaattttctgattggttccatcgatattttctgattggttccatcgaaagcgaaaccaggaccgtacgtggcgccaaattcaaccagaccacccatcccttcccggggtcatgtcacatccctgttgcttcacgttttcttacaaaattacccgctccgtccgtgaagcaaatataactatgatatccctatctgtcagagtagtttaaatttaactaaatttataataaacaatactcgctttggtcctaaatctagacacatatatatatatatatatatatataacacatacatcaagtattgtataaattcacaaaataccactatatgaacgcccttaaattttaaattaaaaaattatctaagaaaacataagcaataattaacccatgccaatgcaagttgaatacttgaattgaaaaaagttgattccagctcagggaacctataaccatggcttcgcatgagttggcgattgcctgaacaggcccatgcagagcaactaaccatagaatagaacaatacgcgatgaaattcaccgtaccctgcaacgtaatggatgtgtgattagtatcaccggcacctcatttttacccgtcatctcgttgtacctacattttcagaaaacggtgatcacgacaaagagcgtggagttcat

SEQ ID NO: 666 - DNA, 12903 bp, Zea mays
  Intron number 2 from transcript AC186648.3_FGT004 (locus A C186648.3_FG004) derived from phytozome v7.0 (chr-ID 4; po s 23644659 to 23657561 reverse strand)
ccgttggtggcggtagtcaccacagtccaggtaccgtagcggcaggcacaggcttgcccaggcagagaggaacacgacgtagacaaagaacgccgagcgcgaagcggatgccgtgtggacgaccacgaggaggcagcacgaacgtccacaaggacggtaggtggtagtttgacaatgatgcaccattagatcgatcagttttaacaagtatatcctcgagaagcgacctattttggagagcggccatgatgagtgatctattttgacaaactcctgtgggggagggggcgatacttgtcacatccgaatgtaaggataaatctagatacatctcaaatatggtctaggattaagtatcacccatatgatgactcagtttatataaaacaatgtcacatctttattactttatacgatttctgtacaaaataaattaaataaattagaccatatgacgacaacgatcctccacaaccatagttaactgagaaacggtggcctaaacctctctgaactcatcttcatcttcatcattctcctccggcggtggctattcttgtcctggtgtgactatagcaagggtgaactctcatacggtcatcgctcagcatgtgtgggaaaaaagtgtagtgtaagacttaccaaggaatatggctgaggctggcgtttaattaagatggtcaaaactttattaggaattactaagtataagtgttggtctcttgttttcaattgctacatagcatcaaaaacaaggcaacacgagttaagaagtttggaccttcgtcctcaagttatcacttcttcgaagtgttagcttgagaatgaaggttttagaaggagatgcgaatgaaacggtattgaataaaatgacactatacaattaagtatgaaactcatctcatatgccttagcatttttattccatttttcttcgtattaaacaagtttacaaacatatctttggcttcttggcacaagatagctcgaaaatacttcgaaggtaggtagaatgaagcttaaggcttttgaaagggtgtcttcgtacatggcaccgtttacctatttatagggaagttgaacaacctctcatgatattacatacatgcccacaaagcctacacacttgattaacaaatgatacaggggcaatactgccttttctctttctttcttgccgcacaagactttagcctcttccccttcgtcagttcgcactcgaagccttcatcatgccaaggctggtgatcttcggcttgtgcctttgctgtactcaaacgaagtttctttatacactgctttggtcgaaggccagcttcgtctgtccttcactatatacttgagacatatttgcttataccaaaataaaggtgttctgaggacattccgcaaggcaggcccccaatagtagtccctttcaggatgagtttgttccttcataacgaccttagatcgtagaaacacaattgggaggccttgcgccaaagttccgaaaaacaccttctcgaatctcgttgttatgaatctttactttgggaccactcttgactagtgggactcagctttcagagagtgcaacggttaaatttcaaaagttgtttgtataaaaaggaatagtgcctggtggcattggcacgacatttgctatttgccttgttgctattagagcctactacaccttcgaagcttgctttgaacgccttttcttccttcaaaccagccttagctagcagaaaagcacgtgtttttcattagaaatggccggagagcaatctgcgcctgacatgtctttggcacctccgtcatatgcgctagagacaaagattgaagacttatcctcgataatagaggctaccgcttcctagaccaaagttgctatcgtggatccatccgaagacagtgatgatatcgacattgaggaggataacactatcattcgtcctacgaagccaagtcacgtgatttcggcaaatcgaagattaaaggaggacatattaaggtacttactcagtttggttatattgacaatgttgaatgagtctgtctagggggagatgacttagtgctaaagcctaaagaggacaaagttgttgtttttcgaagtttcataaaagctagtcttaggtttcctttgcacaaggtgatagtcgttgttttgaagagatttaatatatatcttcatcagcttactccaaatgccatagtgtggctaggagtttttatttgttcctgttggggacttgttctcaaatgctatgaattaagaacaaggcaacataaaatgttaaatattaatacccttcgtccgctgaagcattatctccccaaggatttaaagaacttcggacgaaggccatgagcaaaatttcacgaaggtcacaccttcgtgatcaaacttataatacaatgtaacatgaaatataaaatataaaatattaaagaaagatataccaaaaacagataacattggtcacatattttataatatggacctaaatattaaaacatgatatttaggtacatttaaacattcgtcttggcagaaaacaataattccagcgtaacgtgtcagtgattacaagattgcgtgaacggtacaggggtactgttcacatatttataggcacaaggcgcagcctgtataaaattacatttatgccctttacaatcgactacaatgatgatacaaaacgccatgggcctttaagttatttcatctttaagtcggttcaccccttcgtcttgagatctgtcactgtgccgaagctttataggtgatagcttcggcgctgcttctgagaagatctgccgaaggtgttctcttgctttaggatcttcggctacgaagcttacccccaacagtagccccttcgcggtgccagatcgtttttcgtaacgagcttgatccgtgaaaaagtcttctaggcttcgggatgccgaagatccgaaaaacaccttccctgagctcgttggcgagaaacgattaaaataatccgcacacggagtggccccatcttgcatcagttacgcgcgccctggcgattcaccttctcggaccctgtggcccaccgttcagtgagtgtgggtgactgtttgtctggtgcggaagaccttgacgattcaccttcccacctgcggcactatataaacagacgggttggtgtgaagttaccacagcattcattgctattgcactgttttgctgccaaaatattgaccaaagccgaagcttgtttgctgcatccccaaccgaagctgtttactttgctcaagcttcgtaaaaagaaagagctttcagcgaagtaaagaaaaattttcaacttcattcaaaaaacaagaaaatcatcagatggccagagttcgttccacagctagggttacacgcgacggagaggaagccgaaggtgctgaaactgccccaatctccgaagtgatgcaacggtcagggctggtagtgtcggaggatgcaccttctactaaagctgagcaggttgatgctggggaagttgaatcagaagatgattacggtgcagcgccaagtaaacccagccacctggatttcgggaaatccaccatctccgaagatgatctgcctaagatgttgaatttgggctatttcaatgaagcgaagaaagagctgattcgtttcggtggggaagagactactccgaagccaggaaaggatgaagtagtggtctttaaaagcttttttaaggctggtttgagatttcctttgaacaagatgattgctgatgtattgaataagtttgggatctaccttcatcagctaactcctaacgctatcgttaggctttgtgtttacatctgggctctctgaagccaaggggtggagccatttggtgaaggcttctgccgagtgcacgagctccattaccaaacgaaagctagaggagatgggctacatgaaaattttggctgctacaactttgcctatcgcaagactacaaaatttccagtaattagctaccgaagcaagtggccagctgggtagaagtctgagtggttctacgtcaaagttgatgaagagaaggagaagctagtccagattccgttggaattgatcttcggagaaaccagaccccagtgcaacatgtcacaagggagtccaagtcaaattgctctggccgaatttagagttattgcggagcacatcggcactagggacttagtgcaagattttttggccttcagagtattcccaactttgaaggagtgggaaatgccgaagctgaagggagaaaagaagaagggggaatttgttcggttaccttatcattacaaattcaagaaacatttcaaagtgccttgccaagagtggctggagacaattgaagtaatgtgcaatgaaatacttggcaattactctaagaaagaagatcaattgatgactgcggccttcggcacccgtccgaagcgaaggttaaaccgagtaatggatgctctggacttcgagtatcctgactatgagcggttagacaacaatgtcgaagggcaaaagagaaagagagtggctagtgctttgaataaagacgatgaagaacaattaaaaatgaaaaagttgaagcctgagccaaaaacatatgcttctaagaagaggaaggctacatctccggagcagaaggcaactgatgaagaagaagaaactgctgcaacaccctctgccaccgatgtggaggaaattctaaaggtaatgactgaatctttacctgtcaagctaagtccactggggccacatctgacaaagctttttcagaaggaaaaagagcccgcagaataaagagagcagctaggccaaaaaagcaaagaatcattacagtgataagccatcgacgggacaccaccacaagcttcagctccaagggtcccagctgttgagagcacagcaactgccgaagttgcaccttcggaagccacagctgccgaagataccagagccgaagatattcatttagaaagcacgattgctaatatagataaaaatattgctagacatggccgcagaagaagctgccgcagccgccgaagagactatggccccggggtctgagaagaataaagaaatagccgaagaaacttcggaggatgaaatttttaactttcgaaagttagttggtcaagagttgacaaaggctgaaaaagaagagctgaaagaatatgctatatcctgcggatatcggccgggagcccttctcttcggtggcatcgatgacgaaaagttgggctgtgtccgggatcagaccggagcgaaagttatcggtactctatcaaagagtattggcttcccgaagctcgaaacagatatcagccgctaccgacgacagcacatcgtcggtagtttattttattccaatttcaaggtaagcaacttttctctgacttttattgtttttagtaacgaagatgttttctaacgaaggttgtttatgtgcagagtatgctactgagcaaagctttgaaaatgcagcaggatttggaagataaaaaacatgaggttataattgaaaatttagagagcaaaataaaagagcaatcagctgctattgaaaagaaagacttcgagcttcagacaaccgaaggcttattggcaggagctgaagctaaaatatcagatttaaatacgaagcttctctggcaatcagaacactttgagcaggaaaagcaagatcttagtgcaaaatttgaggccgaagtccagaaaaaatcattgtcaagccttcaaaacaaatgtttaaaatttagtaatcgatgtgttcaacggctgaagcaaatcttctattcggttggagccagcagcgaaaaatttaatccttcgtctgaagacctgccaggggacttcgaacaaatcgaaggtgaaattgatgaccttgacgaagttatagctggacatggtgacttctgtgccctggtagcttctcggggcatagctgttgccttcctgaagtctggctgcgaacacagaaaggttatcaatagacccaattttagcttatcaccagcagctttgggataacattcccaaccttgcccgaagcatagcaaatagatttataaaattggtatggacaaggggtggacgaagcaaagctggtgatgaagctcgaagtcatcttaagacggtaacaaaatcataccttgtgcctacctcttccttcaagcttaaactttgcttaccatactttgattcatacaggatgacaaagccgaggccgaagctgaggagtgaagagacgaagccaatgcttaacgaatgacgaagccgaagccgaagctccttggatactgacaaagcttgaataaatgtctgtagaaaaaactctaaaaactcttgtaataatttgtgtaaagaatggtgtaattaaattttacttcatggactttgtccataccttgtaatatattcttacctttccatcaatgtataaagtgctttgatgtgaacgaaattagcatttttgagccgaagacgaaaaacaccttcccttcttttcgtacacagcgaagcataaaactgcttttttttcttctttctgaagccttctctttagagccgaagcaactgcctgtgttatgatgatgatcctatgtatgtataaatgaatgtttatgaatgcaaatgtatgatgtaatgtgtcgtgcaaatgaatgtccaaacactcatacgaagcttcattcacaaccttcattccctaaggaatgactgaaatctctttttgatgcaagcttcccttagaaacttcttcgccttttatttcggtggtattagcgttgacttttcgctgtaagcctcccttaggagcttcttcaccttatatttcggcggtatcagcgttgacttttcgctgcaagctctgcattcccttgggaacgacttttgagcagaaaacttacgttgcgctcccttaggaacgactttttgtagcttcgtcgtgctctgcatccccttagggacgtcttttgagcttctccctgttttttattttctctttgcactcgatggtgcatgctcaacttttacatttacatctttgggggaaattgctctggtagagctgaaataagaaaaaaaaagaaattacatgctatgaccccattaaaaacctttctcccccttcagaaaggaaaagggtgccatatgaaaaaaataaaaaagattacatcaagctacacataatatcgccgaagctcatccgcattccaagatctaggaatgtcgttgccgtccatgtccttcaatctgtaagatccgggtcttgacgaagatactaccagaaaaggtccttcccactttaactgtagcttgcctatatctgggttagcaactatccgaagtaccaagtgccctggcttgatattttttaaccgaacttttctgtcacgccattttattgttttggcttgatatttattcatattctccacagcctgaagcctgatcccttctatagcatcttttgccacagaataatcaacttcgtcctccgccgaggccactgttcttattgatccagctttagcttcttctggggttattgcttcgtcaccaaacagcaatttgaatggtgtaaatcctgttgaccttgacattgttgtgttatggctccacaccactttgattaattcatctggccattttcctctgggctgattaaagattaacttcattattcctgtcattataatgtcattagctctttcgacaagtccatttgactccggatgtctaaccgatgcaaaatgaatcttcgtgccaatttgttcacaaaactctttgaaagcttcggcatcaaattgtgttctgttgtccacagtaatagccttcggcactccaaagcgacaaacaatattttgccagaaaattttttgaacggtgaccgaagttattgtggctaaaggcttcgcctcaatccacttagaaaaatactctactgccaccacaacatattttaaatttccttgtgctggtggaagtgggcctagcaaatcaaggccccacctttgcaacgaccaagtgggctgtattaactgagtcagagacgaaggctgtttttggtctcttgcacatttttgacagccttcacatttttggactaattctgctgcatccgaagctgccttcggccaataaaatccttgacgaaaaacttttcccagcaagggcctagatccgatgtgagatccacacaggcctgcgtgtatttccttcatcaattctataccttcagctctggataaaaatttgagcaatggagaatagactccatatttgtataactcctcttctattattacatatggtcgggctcttgcctctattctcttgctataagcttcgtcatctgaaaggcagttaccctggagaaaagatataatctcggttctccaatcttcactatgaacaggagatatattaagcactgctctttcaagaagttccaccgaaggtgcttttattgtctcaaagaatacttctgaaggtaaaggcagcccctgtgccgctgacttggctggcagatccgcgtgctcattttctcctcgtggaatattcttgacagaaaacccttcgaaggaagcttcaagccttcgaactgtatccaaatatttctcgagcttcggatctcttgctttacaactcttgtcaacatgaccagaaataacttgggaatcagttttgagaaccgcccttcttatccccattgcctttaacttccgaagccccaaaagcaaagcttcgtattcagcaatattatttatgcagctgaaatcaagtttcactgcatagcatgttctaactttggaaggtgcaaccaaaacagtggctacacctgccccgaaggttacccaggaactgtcgcataacattgtccaagcttcggcatctttacttgcttcttcttcctgagcccctcgcgtccagtcagcgatgaagtctgctaacgcctgggactgaatcgaggatctatgcacataatcaatgctgaattcgttgagttccgcagcccactttccaatccttctagtggcttctctgttcctcataatatccttcaaaggttgtgatgaaggaacaattatgtggtatgcttgaaagtagtgtcgaagcttcctggaggccattaagacagcatatagcaccttctccaattctgtataatttttctttgataaactgagaacttcgaagacaaagtatactggggcttgctttttagtttgtccttcaagcttctcctggacaagcgtcgcacttactgcagagtgcgaagctgctacatacagcagcagaggagcccctggcgctggtggagttagtgtcgttagatctatcagatactgcttcagttcttcgaaggctttctgttgagctgatccccattgaaagacttcgattgacttcagcacttcaaagaatggtaaatttctctctgctgatctagatatgaacgggttcaaagatgctagtcttcccgtcagccgctgagctcccttttttgtacttggtggctccatccgaagaatagcttcgattttattcggattagcttcgattccttttgttgaaactaaacaaccaaggaattttccattctttactctgaagacacatttttctggattcaacttcaggccagcttgcctaaagttggcaaatgtttcctgcagatcagcaatgtgattttcttgcttcgtgctttttactatgatatcatcaacatatgttagcacatttctgcctatctgagaatgaaggactttcgttgtcattctgctgaagcttcctccagcattcttgagcccctcaggcatccgaagatagcaatatgtaccactggggttatgaagctggttttggctcatcttccttcttcatccagatttgatggtagcctgaataacaatctagtagactcatgagttctgacgaagctgctgcatccactagagaatctatccttcgtaatagaaactcatccttcggacaagccttgttgagatcagtaaaatcaatgcacattctccatttgccattggccttcttcaccataacagtgttagctagtcattctgggtattttacttctttgatgactccggcactaagaagtcttttcacttcattcctagcaccttcggctttgtcatcagacattttccgaagcctctgctttctgggtctgaaggatggatcgacattgagcgagtgttcaatgacatccctgttgacaccacagagatcgttggtggaccatgcgaagacatctttgttgttgaacagaaaccttgttaggtttttctcctgttcctcagataattgagatcccagcaacaccttctgctctgctatctcttcacataagaccatgggctttggctagtcggccgcagcagcgttcttccttctgtacttgtattgctcacaagcttcggctccatctatattatggattgctttggaatctgtccagtttccttcggcctttctagcagcttcctgactaccatgaatagcaataggcccttgatccgaatgtatcttcatgcaaagatatgctggatgaagaattgcttcaaaagcattgagtgtcccacgagcaatgattgcattgtaggggtactccatgtcgacaatatcgaacacaacttgctcagtccttgtattgttgacatatccgaaggttactggcatcgtgatcttgccgagcgctacaatctgccttcctccgaagccacagagagggtgtgtagcatcatgaatcttatcctctggctcttgcatctgtctgaaggccttaggaaatataatatccgctgcactacctatatcaaccagaacattgttgaccaaaaaccatttgataacacaagaaataaccataacatcattgtgagggtaatccttgagctgaaggtcctcttgggagaaggtaattgggatgtgcgaccatcttgacttgatgaagggtctttgcaccccaacatgttgtacccttctctatgcctccttcttctgcttcttgttgaccggctctgagcatgaaccgcctgttatcggaagtaccatcttcgaagccgaagcagctccagcttggttgttgaacgaagccatcaactcaaaaagtggaagtgagttcaccggaggtgggcgccaatgttggggacttgttctcaaatgctatgaattaagaacaaggcaacataaaatgttaaatattaatacccttcgtccgctgaagcattatctccccaaggatttaatgaacttcggacgaaggccatgagcaaaatttcacgaaggtcacaccttcgtgatcaaacttataatacaatgtaacatgaaatataaaatataaaatattaaagaaagatataccaaaaacagataacattggtcacatattttattatatggacctaaatattaaaacatgatatttaggtacatttataccttcgtcttggcagaaaacaataattccagtgtaatgtgtcagtgattacaagattgcgtgaacagtacaggggtactgttcacatatttataggcacaaggcgcagcctgtgtaaaattacatatatgccctttacaatcgactacaatgatgatacaaaacgccatgggtctttaagttattacatctttaagtcggttcaccccttcgtcttgagatctgtcactgtgccgaagctttataggtgatagcttcggcgctgcttctgagaagatctgccgaaggtgttctcttgctttaggatcttcggctacgaagcttacccccaatagtgccatatggagccaaggcgttgagcctgatgacgaagctttttgtgaggccttttgtcagatccaagaattatagtttcagacgaaggatactaggggccttcacaacaacttgggtgctataattttgcttattgaagaggtgctttgtttctggctcttgcatgccaaagtaaatggtcgaatgagtgggaaaatgagtggttttatatgaagaacaacttgaaagcgaggactgatataaaagggatcattcagacatgcttcgggtataaaaaaactaacttgctatattaacttcgaagctcaagctgccatagttgctttcaaatttatttgcacgcatattgcaacaagggatcttgttcaagagtatttagcatttaaaacgtgaccactaagggttgagtgggagatgtcgaagatgtctgagaaagatgcttcagatgcgaagcctggactagtcagacttcgctataagtataagttcgaatatgaatttgggagccttgtgatgaatggttagattctattaggaaaaatgtaacaaaatacatggaaattatagcaaggcagaggcctaagctttacatcgcgcttttgcgaagcaaaaaagacgttgattgaatcgtatttttgacattgttggcttcttttaccctgactagtctcatgtggttcaggaaagaaaaaagaggaagaagaatgtgacgacgagacgcagcaaagttccaaagataaaacatagggcaacacctcatgcctcagaaacggctttacgagtaaaatgaactcttcaaatctatcattttaccttagtactattttgttgaatttgttatttataacttttgtagattatgcctaaagctacgaggttgtctgctatcgaggaaacttccttgattattgcaacttcagagaaccgagaagttactacttcagagacctaggatacaaagaccaaagaggtcaccgctctgaatgcttaaggggctgcttctcttgaatcgctccccgacaacgaagaagaagatgtggaacacatagctctagtgatgagcatattttttctaatgatgacgaagacaacaacgtcaagg

SEQ ID NO: 667 - DNA, 749 bp, Zea mays; identical to SEQ ID NO: 396
  Intron number 3 from transcript GRMZM2G101284_T01 (locus G RMZM2G101284) derived from phytozome v7.0 (chr-ID 8; pos 6 7985875 to 67986623 reverse strand)

SEQ ID NO: 668 - DNA, 2595 bp, Zea mays
  Intron number 1 from transcript GRMZM2G002420_T02 (locus G RMZM2G002420) derived from phytozome v7.0 (chr-ID 4; pos 2 23436394 to 223438988 reverse strand)
ggcgcaggcaccggcgcccgcgcccaccagcgacggtgcgcagtctcgctctttctctctcatctcccttcatttcttcctgcccgcaatcacaatgcaatccggacgccgcgaatctgtgctccgcgcgcctggatcgtggggccggacgccggaatcgcgttctgttcgttccccattgtaacaaaaaaaaaaaatctccggtgtttgtcgatctggttcttttgggaaccaagatggagaaaatctcacaactgttcatcgcacaagtttttcccagtgctacctgcattgccgtagaatttagatcccccatgtctggacgttaattaattattacagacacaataataatcgcgaatctcctgcatgtgtgctttcttctgcggcagtgctggtcaggaaaggatgcgttttcgcgaaaatacaaagttaacgcgaacagttgaggccccggaggaaactgccatctttcaattaaataaattctttcagttttgacacataactccaatgcaatttttttgttatatgcaaaacttctcttatgaagaatattcacatcttgactaaactgctgtcagatttgcacttcgtctgttgcgcctgtcagcaatgagtttggtggttttgcagttcgtagaaatcttgattcttgctatggccgtctccttgcatttacgttctaatataatactagtactctggcagctaccattgcctactttttcatggaatgcctcttagggggtgtttgggaacaaagtttttctgcagttttggaagaatactgcagtattctcaaatactgcagtattatatacataatggtgtttggcaagctgggtaaaatctctgttttcaaaactgaagtattgcaaatactatagttgttttaaggcattctaaacttagctctggacctcagttttcaaaactgcggtattataaactacggtattgtcataactaaagtatagtatagtatttcaaaaactgtagttttcaaaaactttgttcccaaacagggccttacttgttgtctgttccacaaacaaactgtcacattgccacaagtaacgggtttgctaggtatatctgatgtgaaatgaaaaatgtagtcctctttaatgatctaggctgtatgtatttgttggctgcccttgattgatcaaagagataatcctctttggtgccgttataaaagagagatggtcccctgttaatctttttatggtcctagatagatccacacaggtcctttttcttgtgcaagttcagccagcttctattttcctaccattgtttatactgccgattggttgtgcagtagttttctgcccatattggtaccttcccttggcaagcatgcctttgtctaggacgatggagattttctttgtctgaaaatgattgcaaaccaaaatttccaacgctttgctgtgtgtttgagtgatttgaagaatgtgacatttgtagctttgtctgaaaatcacttatgtttgatcagactccataaattgctggtctatggggaactgtcttatactaatggggtgtttggtttgaagaatgaatccattctagatgaggtggtgcatcataagttcaatccacaaatttggtggaatgaactcattcctcatattaatactaattattagcctatgagaaatgaaatagtgatggatcaactcattacattcaacaaaccaaacaagaaaaatgagcagtaagaaggtgatagactacctcattcctcaaaccaaacaccccataaaggttttcatgatgttactagatatacgaagggtgggttttgggtagaagaacaccccattcacaccgagtactgaaaatgacttctctttggctagtttccccaaattgttttaatgtgccaactgctgtgtcctattggttttcatgagataacagagataggaaaactgacttgatattgtgccatttgtaccgagtactctaaaggactcatccctgtcagttttcacaaatttgtttacgtataaatgctgagtactagtagcattcatggtgttattggacacagtaataataagtataaggtaatactaggaaaatgtctgaaactagcacgcagaagaaaatttccattgcttgtttcaagcatgataaaatcatcagtcagctctcaataacttgtcatgtgtatataaatgcgcacgcaaacgatctgtagtcattagggacacgtttcaaattcagatactcgtaccagtaggaattgtgcactccatgttgaacaatgtatggaaattttctcacatgcagtcattgaaaaattgcataaggtactagtagtgactgtattgttatctttatatatcttcttcttcttttctttaaaagagtgagttggatatgcatcgtcaatgcatgtacaattgataaactaccacatgtgacagtgaacagtatttttcatctcgtgcagcacacaggaatcttattcttgacgatctccagtgattccaaagactaaaacatgtgcaactgtcttgtgattgattccttgcaggcacatcaatcgacctggggattgcgtacatcctt

SEQ ID NO: 669 - DNA, 16049 bp, Zea mays
  Intron number 1 from transcript GRMZM2G117458_T01 (locus G RMZM2G117458) derived from phytozome v7.0 (chr-ID 6; pos 1 55465795 to 155481843 reverse strand)
catattcggaaccttcgccggcgagcacccaccaggtacgcgcaaccctcgtctattcctgctgtacggaaccgagcacccaaaccctaattatttgtatccggatctgatccgatccggttacaaagtgtatacatgtattatggctccaaacactgttgggtggttacactttacacccatgtcctttactgggttcgccctgtctatggccagtcaacattgaggtaatgaggctgttcgattttttggggattatgatatcttcccctgggttagaatctctgatggaaccatgccagcgagaattttgcagctgtttgatctctaccttcttgaaattataaacccatgatttctatcttgtaccaaacttctcccggtgaaaatcatgccccatctggactgaaagcatccaaatgaccattccattgagtaagctatgatgccagtacactctatttcatctcccactcaattaaactgttttcaaattctccgctgatcacctgccaacttcggacttcatcgacaccctggttccaatgtgtaggcctgttcactcacggtttccagcgctgttggtgtcaaaaccagcccaacctgctgagtgttgagcacacaaaacgtcctcgcagacggtccggccttgaggccggacggtccgcggtggtggtgcggacggtccgcacgtgcgcagaatcagttagggttccgagtttctcgcgggatttgttagctaaaaccgcaggattagcacggaaaacgaattgtagcggatccagacctccccatttatatagatgaagggctatggccgattgaaccccccacaatcgatcaaatcaagtctatttctcgtttttaccttatgcattaggagtagttctagtttagccctagtttagtctccctctacctcaaatctccacctctctttggctctacgtcgactagaggcgtcttgggtggcttgccgacgcctgacacaccctacgatctctcctccccgacggggtccctcccgggaggcgagatccaggtctgctgcgaagaagaaaaccctctgcgcaatcgcagaccgtctgagccccatgcgcggaccgtccggacgtacgtagaggaggagtcgctcctgcgtcaggtcgcggaccgtccgaccctgtgccgcggaccgtccacacctccgcaaagagcaccaccagacggtcctttctagtgtttggcgtccggatcggcgccaacacactttttggcgactccgctggggaaaggtgtctagatctactaaaaatcaagccctcaaatgtccggttctaaagatcacaccgatatctccccggacaatatcctgaagttggctgtgatgtgcgggcgcacatacgccaggcgcgcgcgtgatgtgcgcaggggaacagagcgcgcagccaggacacaggaagggaaggcaagtggttagaaggaaagttagccacctaattagttgtttcctgtgttagttatttccttattagtcgtttccttgctagttatttccttgtgagttgttaccttgttagttatttccttactagttgtttccttgttagttatttccttatagctgccccctctgtgggctatataagcatgtacgagagatcatttggaataagcaataagtcagtcctaatctccctctcttctctacaaactgacggctgaggggtataacctcgccggcgtgacggacaacggctacgagttacgtagccggggtccggccagtcggggatttggtgtccttgacaacctggtatcacggtctcgtcgatcctcacccacccgctccaaccacgcccagcagccgccaacgccaccaccttccccagcctccaccacagccatggccgagcccaccattgccgacgtcctcgctgagttgcgagcactccgcacggacgtcaacacgctgcagttcgacatggcggccatgaaggacaagtccgcgttggcctcggacaacgggggccacggtcggcgacccgaggggcagcgcgaccacgatccgtacatccagcaccgcaagtgggacttcccccgcttcgacggctccgtcgatccgatgctgttcatcaacaaatgtgactcatacttccggcatcatcgcaccttgggggaggaacgtgttcggatggcatcataccatctggacgacgtcgcgcagctgtggtacagccagcttgaagaagatgatggtgccccgtcatggggtcgattcaaagacttcctgaatgagaggttcggacctccactccgtttcgcgccgctgttcgaactttcggagtgccggcgcaccagatctgtggaggagtactctaatcgtttccagacgctcctgccccgtgccggtcggctggacgaagctcaacgagtgcaactcttcaccggaggcctcctcccgcctctcagtcatgcggtgcgcatccataatcagaccacgctcgccgctgcgatgagcctggcgcggcaagtggagctcatggagctcgagcgaccgccggtacgacagggagcgcacgatctacttccgccaccgccgcctcgaaccgctccggccgcgccaccccagcagttggctcttccaaacccgccggcgggtaacgaccagggacgacgcgagggcaaccagcggcgcctctctacggcggagcaggcggaacgacgtcgccttggcctttgttttaactgtgacgaaaagtattctcgtggccataacaggttttgcaagcggattttcttcgtggacggggttgagattgatgacaccgaacccgtcaccgacgacggggacagggacgcccctgcttctcgctgcaggcggtggctagggtgtccatgacggacaccacgcagctcgcggtcacactaggggccgcccagctcgtagccctcctcgactccggcagcacccacaatttcatctccgaagaagccgctcggcgaacgggtcttccgctccaacaacgtccccgcctaacgaccatggtggccaatggtgagaagatcacctgcgccggcgtcatccgcaaagccccactaatcatcgctggtgttgcgttcccggcggagctgttcgtcatgcccttggccgggtacgacatcgtcctcggcaccaaatggctcggcgcgttgggacccattgtctgggacctggccaacaggcgcatgtccttccagcgagggggccacaccatctcatgggcgggcctatccacgacgtcgggcccggcggtgtgcgccttgtccgctgaagaatcgctcttggatgctctcctcagagcgtttgctagggtcttcgccactccaacgggactgccccccaagcgcgcacatgatcaccgcatcctgctgaagcccgatgcacagccggtcgccgtgcgcccctatcggtacccagctgcccacaaagatgagttggagcggtagtgtgcagccatgatggaacaagggatcgtccgacgcagcgactccccgttttcgtcgccggtcctccttgtcaagaaggccgatggatcctggcgcttctgcgtcgactaccgggccctgaacgccatgacggtcaaggacgccttcccgatcccggtggtggacgagctattggatgagctcaacggcgccaaatttttctccaagctcgacctacggtcgggataccaccaggtccgcatgcgacccgaggacatccacaagacgtcgttccgcacgcatgacagcctatatgtgttcctggtcatggcgttcggactctgcaacgcgccggccacattccaagccctcatgaacgacgtcctgaggccgttcctccgtcgcttcgtcctcgtattttttgacgatattttgatctacaacaggacttgggcagatcacctccggcacctgcgtgctgtcctggaagaactgcgccgtcaccagctcttcgtcaagcgcactaaatgttccttcggggtctccgtcgtcgcctacctcggccacgttatctctgcggcgggcgtcgccatggatcccgtcaaggtgcaagccatccatgattggccgccgccgcgatccgccccgtgccgtctgtggcttcctcggtctcgcggggtactaccgcaagttcgtacataactatggcacggtggccgcgcccctgacggcgttgctcaagaaggacagtttcacttgggatgatgcagcggccacgacgttctccgcgctcaaagcggcggtcacttcggcaccagtcctcgccatgcccgacttcgccaagctgttcgtcgtcgaatgcgacgcgtcaaccatcggctttggggcggtccgggtccaggagggacacccggtggcatacttcagccggccagtagcgccgcgccaccgcgcgctggccacctacgagcgagagctcattggcatggtccaggcggttcgacattggaggccatacctatgggggcgccgcttcctcgtcaagacgcaccactacaacttgaaatacctcctcgaccagcgcctcgccacgattccgcagcaccactgggtcggcaagctcttgggcttcgatttcacagtggagtaccgctccagggccacgaatactgtcgccgacgccctatcccgccgcgacaacgaggaaggagagctgctggccatcttagcgccccggttcgacttcatcgagcgcctccgccatgcccaggccaccgacccggcgctggtagccgtccacgatgagctccgggcggggacccgcacggcgccgtggaccatcaccgacggcatggtcgccctggaggggcgcctctacatcccgccagcatcgccactacttcaggaaatcctggccgcggtccacgatgacggccatgaaggcgttcatcgcacgctgcaccgcctgcggcgtgattttcatttccccaacatgcgtcgtgtggtgcaggactttgtgaaggcgtgcgccacatgtcagaggtacaagactgaccacctgaggtcggccgggctgctccagccactgcccattccgtccagcgtgtgggccgacatcggcatcgatttcattgaagcactgccccgggtgcagggcaagacaataatcctctccgtcgtcgactgcttcagcaagtactgccacttcatcccgttagcacacccctacaccgccgagtccgtcgcccaagcgttcttcagcgacatcgtcctccttcatggtgtgccgcaatccatcgtctcggaccgcgacccggtgttcacgtcgacattctggaccgagctcatgcggctcactggcaccaagctcttcatgtcgtcggcttttcacccgcaaacggatggacagacggaggccgccaacagggtaatcgtcatgtacctccgttgtttcacaggcgatcgtcctcggcagtggcttcgctggcttccgtgggccgagtacacctacaacacggctttccaatcgtcgctccgggagacgccgttccgcgtggtctatggccacgacccgccctccatccgctcttatgagcctggtgagacgcgtgtggcagctgttgcacaagagatggaggaccgcacaaacaggcccaggcggtccaaaagcgtgtctatgatcagcaccaccgtccggtggagtaccaagttggggactgggcactactacgactccggtaacgcccgacagcatcactaccacggacctccaccggcaagctcaagccacggttcgttggaccgtatcgcgtcctggagatcatcaacgtcgtggctgtccggctcgagcttccgccaggggcccgcctccatgatgtgttccatgttggagtgctcaagaagttcgtcggcacaccaccggcaacacccccggcattaccccccacgcacaacggcgctgtggtgcccgtgccagcagtggtcacagccgggcgcctggctcgtgggattcgccagctattggtccagtggcaaggtgagccagccgcgtcagcaagctgggaggactacgacgactttcgcgctcgctttcctgatttccagctcgaggacgagctggtcttcgacggcgggagagatgtgatgtgcgggcgcacatacgccaggcgcgcgcgtgatgtgcgcaggggaacagagcgcgcagccaggacacaggaagggaaggcaagtggctagaaggaaagttagccacctaattagttgtttcctgtgttagttatttccttattagtcgtttccttgttagttatttccttgtgagttgttaccttgttagttatttccttactagttgtttccttgttagttatttccttatagctgccccctctgtggctatataagcatgtacgagagatcatttggaataagcaataagtcagtcctaatctctctctcttctctacaaaccgacgactgaggggtataacctcgccggcgtgacggacagcggctacgagttacgtagccggggtccggccagtcggggatttggtgtccttgacactggctgttgaaagtctgatggccgatgagcaacagcaatacgaggactacatgcgtcaagcgaaggagaaattcttgtcacaatacacggtggatcgccaccagaaagttgtcaaacatggagagaccgacgccgcgtctcttctgtcttcgcttcaagtccccaacgtaagtaaaccccacgacatccaatttattaaacaatatgtagatcaccagcagaatcaaatgaaacaacaaattggagggttagaagaatcgattagaaaattaacgcgtacgttggagagatctgttgctcctagttttccatcatatgaaactagtaacaggatgtctatatctaatacatcggcgacaaatggggattcacagccccaaccattatatggtatgccgttgaactcatatccaggggccaccaccgccgtccctgcttggcacatcggcgcccctggacacggtcagaccgtccgagcttttgcccggacagtccgacccttacgcagaccgtccggctttccctgccggacagtctgggaccgcaccatggctaccgcgtggcgccccaataatagcgaacacaaccgaccagttcgaatgtaccaccggacagaccagatacgcatacgtagaacctactgtcgcacactatgcaccaaattattacacaccacagcagcagtacgttccgccccctacatatttaaaccacagctgtcatgtggggccgcacctatgcgcgccaaaagtgagaggccgcaggggcgctggcagcagcgcgcgcaaggaaggcatggcaaaggaaagtgactgatttgttggctaaattgatagacctaaattgtaggggagataattccaattagtcacttgcctaattagtggttgcctagttggtcaaccggtggcctatataggcctgtacgcaggagacaaagcaataaggaatatattatctctaatcctctatctctctattctctaagcctgcggctgagggactcctcgccggagaagacaaccggcggctacgagctacgtagccgcggtccagctgctcgggggctcaacgcctttgacaacctggtatcacggtcccggtgatcctctggccggcccacttccacaccagccgccgccacctccgcctcatcaccaccacgaaccgccacgccgacctcgcctgcattctctgttgcatcctgcggtccaaccatgagcgaggccaacgacttcaaggccctcgccgaggccctcaagtcgccgcaggagtccgtcgcggccaatgcccaggccatcgccaacctcacagccgaccgcacatcctcctccggcatcaagatcggctccggcgagcaccataatgacagaccgccgagattccagaaactagactttccccggtacgatggtaagaccgatcccctaggcttcatcaaccgctgcgaatcctactttcatcaggagcgcatcatggaggaggagaaggtctggatggcctcctacaatttggaggacggggcgcaaatgtggtatatccaagtccagatggacgagggtactccatcgtggcgacgattcaagtagttgctcaacctgcgctacgggccccctctccgcacccgcccctcttcgagctggctgattgccatcgcacgggctcccgtcgcggactatcaggaccgtttccaggcgctcctcccacgtgcaggacacctcgacgaggcgcaacgggtctagctcttcacggggggtctccttccttcgctcagcctcgacgtccaggtccacaacccgcagtccctcgcggctgccatgagcctggcacgccagctggagctccgggagcagtatacacagacacctcccaaggtcgcgtcccgtggcctgctgccggccccggcaccgcgtctcgcctgtcctgctccatcggccgacaaagcagcctcgcccgcgatcatggcggatgggcgcaagcgcctgtcccggcaggagcaataagagcgccgccagcaaggcctctgcttcaactgcaacgagagctacacgcgggggaacaaccgcgtctgtaagcggatcttctacatccagggcgtcgagttggacctcgccgacgatgccgccgcgggagatgatcagaacacggagacgccggtgttctccctgcacgccgtcgccggggtggccgtctgcaacactgtacaactgcaggtggccgtcggcgccgctactttcatcgcgctcattgacacgggatcgactcacagcttcattggggaagcggctgtgcggcgctcggggctcaccatcgagccgcgaccacgactcatggcaacagtggccaatggtgagcgagtggcctgcccgggagtccttcgccaggcctcgatcgaagtaagtggcatggtgttccgcgtcgacctctttgtgatgaccctagccgggtacgacgtcgtcctcgggacgcactggatggccacactcggacctatcgtctgagacttcaacgcccggaccatggcgttctagtggaagggacacgacgtccgctggcgtggcgtgggccctccatccgtgccggctctcctcgccgccacagcggacgacgacctcgtcgacgggttgctgaacgccttcaccgacgtcttcgccgaaccgatcagcctacccccagctcggggccgcgaccaccacatcatcctcaaacccggttcctctccggtggcggtaagaccgtacatgtatcctgcggctcacaaggacgaactggagtggcagtgcgccgccatgattgagcagggcatcgtccgccgcagcgactcagcgttctcatctccggtcatcctcgtcaagaagccggacgggtcgtggcgtttctgcgttgattaccgagcgttgaacgcgctcaccgtcaaggacgcattctcgaccccggtcgtcgacgagcttctcgacgagcttcatggggcgtgcctcttcaccaagctggacctacggtcggggtaccaccaagtgcggatgaggccagaggacgtccataaaacagcgttccgcacacacgacgacctctacgagttcttggtgatgccgttcgggctgtgcaacgcccccgcgacattccagtctctgatgaacgacatactgcgcccctagctccaccattttgtgcttgtcttctttgacgacattttgatatacaacacctcgtgggcggaccacctacgacaccttcgcgtcgtcctcgacaccctgcgccagcacaacctctttgtgaagaggtccaagtgctcgtttggcgtcggctctgtcgcctacctcggccacgtcatctcggcggctggcgtcgctatggaccctgcaaaggtccaggccatccacgtctggccccaaccgcgatcggcgcgggccgtgcgtggcttcctcggcttggcgggctactaccgcaagttcgtccacaactatggcgccgttgcagcacccctcacgacagttctgaagaaagaggggttcacatggaccgatgaggcgaccaccgctttcagcgccctcaaaggggccgtgacgtcagcaccagtactgacattgtcggacttcaccaagcccttcgtcgtggagtgcgacactctacctatggcttcggggtcgtactcatacaggagggtcacccgatcgccttcttcagccgaccggtggcgccccgccattgctccctagcggcctatgagcgagaactcattgggctagtgttggccgtacgacattggaggccatacctatgggggtgccgcttcgtcgtcaaaacggaccactacagcctcaagtaccttctcgaccagcgcctggccaccattcctcagcaccattgggtgggcaagctcctcggtttcgacttctccgtcgagtacaagtcgggagcaacgaacacagtggccgacaccctctcccgccgcgacaccgaagaggacagcacgggggctctccaggcgatctcggcgccccgcttcgacttcatcagccggctccgccacgcccaggccactgacccggccctgaccgccatccacgacgaaatcaacgcaggcacacgcgcggctccttgggcggtgaccgacaacatggtcctctacgacaggcggctctacattccaccgtcctcgccccttatgcaggagattgtggcagcggtccacgacgatggacatgagggcgtacaacgcacgctacaccggctccgctgtgtcttccacttccccaacatgcgtcgcgtcgtgcaagaccttgtgcgggcatgtaccacttgccagcggtacaagtcagagcatcttcacccgacaggtctcctcatgccactaccaatccccacagtcgtttgggcggacatcggcctcgacttcgtggaagcactgccccgtgtcaacgggaagtcggtgatcctctccgtcgtcgaccgcttcagcaagtactgccacttcatcgccctcggccacccgtacactgccgagtccgtggcgcaggcctttttcgccgacattgtgcgcctccatggcgtgccacagtccatggtgtccgaccgcgacccggtgttcacctcgacgttctggcgtgagctcatgcggctcatgggcactaagctgcacatgtcgaccgccttccaccccagtcggacggccagacggaggcgtcaaaccgcgtcatcattatgtacctccgctgcttcaccggagaccgtcctcgacaatggcttcgctggctgccatgggccgaatatatgtacaacacggcctaccagtcctcgctacgggagacaccgttccgggtggtgtacggtcgtgacccgccttccatccgctcgtatgagcctggtgagacgcgggttgctgcggttgcacacgacatggaggagcgcgaggccttcctcgccgatgtccgctatcgactcgagcaagcacaggcaatacagaagcgccactatgacaagcaacaccggccagtgacctacacggtcggcgactgggcgctccttcgtctacgccagtgcgctccgtcctcgctgccgcaacagacatcgggcaagctgaaaccccgcttcctggggccatatcgcgtcatcgagctcatcaacgacgtcgccgttcgcctggagctgcctccacaggcccgcattcacgacgtattccatgtgggcaccctaaggaagtttgtggggacgcctccatccgctccaccgcccctgcccgacatccatcatggggctattgttccagaaccggttcgggtggaccacactcgcttagcgcgtggtgttcaacaggtgctagtccattggaagggtgaaccggcaacttcggctacctgggaggacctcgacgagttccgcgccaagtacccggcttttcagctcgaggacgagctggacctcgagggggagagagatgtcatgtggggccgcacctatgcgcgccaaaagcgagaggccgcagggggcgctggcagcagcgcgcgcaaggaaggcatggcaaaggaaagcgcgcgcaaggaaggcatggcaaaggaaagtgactgatttggtggctaaattgatagacctaaattgtaggggagataattccaattagtcacttgcctaattagtggttgcctagttggtcaaccggtggcctatatataggcctgtacgcaggagacaaagcaataaggaatatattatctctaatcctatatctctctattctctaagcctgcggctgagggactcctcgccggagaagacggccggcggctacgagctacgtagccgcggtctagcttctcgggggctcaacgccattgacaacagcacgccatacgatgacaggccgatcaccattatcgatcggtcacggcaagaaggtcggcataacaatgcccgatcgaatgagccccacagcctagggtccggtggtctgccaccgggcgcaatagagaaaattagggaagagatggctgaactatttcgagataggatcggagttggtgtagctagagtggggcaatcatatcagaagccatatgatcaccggtttgacaactgtcccatatccacaaggggcaaggataccagagttttctaagttttttggtgaaaatgggagaaacacacacgaacatataggccagttcctagcacacctaggcgaattggccgatggggaagcatttcatgttcgtttattttctttatcccttactggtaccgcttttgcatggtacgccgccctgcctcctaattccattaatccctggaatgatttagagagtaaatttcacgaacatttcttttccgaagaatatgagttagagctacctgatttagcttcagttcgataaggatgcgaagaatcgattaacgattatacccggaggttccgggacactagaaaccgatgctttcagatccatgtcgcagacaaagagctagcatggttagcttttaaggggttgctatcctacttaagagacaaattagatgggacccagttcttttcaatagctcagctgtatcagcgggctttagcctgtgaaatccgatttaaagagacatcaaaatcggccgcccgtactatacatctaatagagcgtgataattcagatgatgaatccgcatatgtatataccgctgagtttgtttggccaacaaaggccaaatcttctgcatgttcttccttacatccggttcaaaagaatcggcaagaagagattaaatttacctttaatgttgccaaatgcgataggatatttgacgagctactaaaaatgacaacattaaattaactcatactattcatcctatggatgaattaaagagacatgcttattgtaagtggcataattctttttcccatgccaccaatgattgtaatgttttttgtcgatagatacaatcgaccatatatgagagccggttggcttttcaggagatgcaagtggacacacaaccatttcctatcaatacaatagaacccacatgcaaaaaggtcttggttcggtccgaagtggccgataaaggcaaagacaaaaacaccatcattggcgatccttgcacgtcaaaaatatcacaagggattgctcggaaagctccggacagaaagactaacaagtccggagtcaccggggggcaagctcaaccaagcagccgagcaaaactccttgactcgagcatcgcagactgtccggcacctgggtgcggacgatccggtgctcatgcggacggtccggctgactcagccagacagtccacccatggccataagcgtcagcctccacacaaagcaaggaaagagatgcaagggcaaagccaacatgccacacatggtcggctggtaaaagttggccctacttttgatcaattgctagccaaatatgctggcaagaaggcttttctacgtgattggccaacaaagaaaccccggtcacccactaaaacaaaacgaccgagtaaaatggcccgaaagacgatgcaacaagcatcgcctattcgtcctgtcatgccaggatgctttccacccacctactcatcgtcgatgtgttgtcctgttcaaatatggaatggtacgacgatgaacccatggtacatgtgtactccctttgtctattcaggctgggggcacctccattctattccttttgattcattgatcaaatggtcacggccgaaaaagatgcaatcctaaacggcctttatgcattggggctctattgaatgatcaccatattggattggaaaagccggtgacttgcatcaggcttagttcttatgcttttggttcgtcaacctccaccactgagctcactgattcatgggttgattctaggtgggttaggtggattgaaccataagaaaactatttgttgtgctgaattaggagcaagtgcatgtgggtcatatctatgatcatggagtccagtaatgctagttgtgcagccgccgccttgattccaaaatccttgatccttcatgcagctgtcgacctcccttcgtcgatttgttctctctctcgcccatgcgggaccgcttttcgtctagggccacatgctctgtcttcaagcgccaaggcatgctctccctgactgccactgcctccatcagcatcgttgcagcccacatgctgcatgtcgtcagtgctcggccagaggatgcagcagtggagcaacgccctgaggtccatggtcaggaccttcttcgtcgctgagtgctggacagcttgttccatagcatgtcggcgaagacattcttctgttagatctcccgtgtgttggactcattgaacacctggcagaggactaacgcgttgaagatcatggtgctgttggccttctcattgatgccaaagatgtcaaggccacggaacggcagtgccagaaggcggtgaggttgcgccacatggtgttgttgatgagcagcaccatgtgcggcacataagcgccatggtggattggtgggcatgatcgttgctatcgtcagcatgctcatggtgcagcctgcgatgtcgatgagttcaatggttttctggatgggttaatcacttaatccaacccatttgaaacctgtattgcggttggtccaggttgagctggtgggttgaaaggtttggaaccaaactatgaacaggcctaccagtggagaccacagtccataaccacattgaattcactacaaaaaaacaacgacaacatagccttttgtcccaaccaagtttgggtaggctagagataaaacccccaagaaacaaggatagaaaaaaaagacaccgaaagtgtaaaagaaagagtgtagagttaaggttaaacagaaaaaagacaaagatcatggttcgggtatgttgattgctagtctccaggcgcacctatccttagctaattgcttggaaatatttcactccttaagatctctcttaaccacattgaattcactaatggttctatattcggtacatccccttgccgctatcacttgttggtttggatggtaggattcaggactattcgtattgaatagcacaaggccacaagggcagaggtttgcttgtatgtgtctggttttggcatggttgtagattatgtgttcataatggctagtaatttgtgttacgtagagtttgtgataatcaatggtagtataatgacttatgatagaaaatagcaactgtagtaaggggttaaaaatccagcaattgtattggaatttaagttttctatttgtcaaatatttggtttaagagtactttgccaacacatcatgcactgagaaactatgcaaagtggtatgttgataaaagtatgctggagtgtaaatagtacttgaagctcatgtgctgattacaccagtacacatttccccccctgggatgcagctcaaagattaatcttgcttattccaatgctcttgaggattaactctacttccagtctttgcttactccactaaggattttcatttatctattaattcactaagattttgttttatttggcaggattttttttgtacatctaag

SEQ ID NO: 670 - DNA, 3344 bp, Zea mays
  Intron number 2 from transcript GRMZM2G008095_T02 (locus G RMZM2G008095) derived from phytozome v7.0 (chr-ID 2; pos 2 14149873 to 214153216)
acttccaaggaggtaatgcagttaccccgctttgcactactgttacttctacgtttcctgtagtctaaatattaagtctcactttatcatttgggagggcggtatgctgttgctgttataatcatttactatggtcgtgcccgtgcgttgccacgagagtaaaaaatttagtgtgaaacatagatacggaacgacaaatattactatattatacaaatctgtgtgccaaggaaaatttctcactaaacaaaatgcaatgcaatgaaacttgttatactcttgccatgctacacaagctttagtttcacaaagtcaccacaagcaattcgaccaagcagaaacactgcagcacatttgctagaggtctacactgtttctgtttcccatttgacgattctatctgcaaagaagtgaatcactcctggtccttgtatttgtttttttccatcagttgacgcatctcgaaggacaatctgcctctattttagatagtggcaggcaatgtccttttcacatttactatgtcctaaatgctaaacctttagaattcagaacacattactatgcccttttcacatttacttaaaataccctaaatgctaaaccttcagaatttggaacacattactatgcccttttcacatttacttcaaatcttaagaaacctctagtttcagttaactcttcactgaactaacagccacttggacaaccatgagtccttgactgtgacatcttcccacggcttcacccaaacctttgctctgtacagacagactcttttttccatcctcagctgcctccagtatcaggtcatgtagggtctcggtcaccacctgctgcttggatttgagcaccctagtaaactctaaagcagcaccctacaagaaaattatccaagcatcatgaagaactccgagggtgatataaccaccacaatctttgttgttaatagagctgggatctgaaagcagagagactttcctgccagcagagttatcaatgtgagaaaaggaagacgaaactaccatccgcatggggaaaaacaaaaaaaaaactacataagataaagaagagcattacagagaacacacctaattataagaatatgactgttatggtcgctagatcggtgagggattggagaggggtatcgatgggcaggaagccaggaacgtcggccgggggcctctacccacggccgagcaacagaagggtttctcccttctaattcttgcctaatttatttctcatacattgattatataaataggccggctggccgcccctgtcactttaaaactctcaacaaactaactgataaccttcctagataatctcaactaatctcataaataatctcaactaatcttctaatcttatctctaactatccttgtccaatctcccttggagggcctatggttgttgctgctgcagcccctccgtgggcctctttaggcgctgacaatgacatacaaaatatttgatgtggtgatagggacagtgttatgacattacaagtaaaaatagcaatcaccatatacaatgtttgttgttgcagctgcagtcgaaagcaagctatcttaacggttcctcgtatattctatttccataataacacatgaaagctgatcaaatccacaattactaagaagaattcccagtctaaaaagggcaaaactatatttaagaaataaacacgaaaattgattcatagctccatacaaatgtataaacgatggtcattggatcctaaaaataactgtggcacaggaacaaatcactgcagcccatgaaaatcagcggcataagtggctcctcaacgagcacacacgatccgactttaacgcgtaaccacacataacagtagcagctcctatactgtgatgaatcggttacaatagcagcaaagcaggtatttatatacatgcttttaattggttggtagctagttaatttgttctcattggctattagttcccttgttagtagtttaataacatagcaggcctaatcgctgtcctgtagaacttgactttcaacttctgtggcactctcttgacgcataggacttccgatgcttaacgccatttcatccacctcgctttgattttatggctaacatcttgatcaatatcaccatctctctgtagcatcgatcccaaataacgaaaggtgtccttctttggtagtacctggcctcccaagcttacatctccatcccgagttcctcactaattgtagtaccaaagtcacatctcatatactcggttttggtcctcttaattctaaatccttttgactctagggtctgacgccataactctagctttctatttactccttcccagctttcatctactagaactacatcgtcagcgaaaagtatacaccaagtgatatctctttgtatatccctcctgacctcgtctaacactaaggcaaataaataagggctcaaagctgaaccttgatgtagtcctatgttaatcgggaaaacatttttatcaccatcagttgtccggacgctagtcacaaccttgtcatacatgtccttgatgagcgtaacatattttgttgggactttatgcttatcgaacattgtcttgatgtctaccaatgaatatttctctacaatcaactgtaggttatccgtgctcactgcctcattggcattaaaatgttcttttctattgtgtcacttcagtttttttctatgttttagggcaattctactttttgtgaaatcgaagtaagggttccttatctcccttctgcttgatatatagattatttcacacaagaaaacataaaatatcaaacaagcaatccagaggggaaatatcatcaatctaaacaaacggcttgtgttccttaagcataaaatatttggctcaatattctgagcattctaataaactttgttacagtaatttgtctacaatagatctgtggagtgtggatgaaatactctctgatatacgtaaggcttttcttagcttggtccaaactccaaaagctatagcaactttgtgatggactggatggttgcagacttggagcaaccaaaaattcacaggaacaacctccttccaacccactattgttattttaagtcattagcaacaattggaaaatatataatgaagccttttattgtttctgtctttctgtgtaagtaactgtacatgaatatttaagaatattaagtcagtacatgaatactgccttaatattgttgaataactgtaatatctgtaacatgggaagcacatgatgtctgatgacgaattttgtctgctttcctatacagaggctaccgttttcagttggatttattgg

SEQ ID NO: 671 - DNA, 4173 bp, Zea mays
  Intron number 2 from transcript GRMZM2G106980_T01 (locus G RMZM2G106980) derived from phytozome v7.0 (chr-ID 1; pos 2 03649100 to 203653272 reverse strand)
ccgagccatactcgacctattgaccacatctacaggtatatttaatttattacaaatacatactgtatctgctttctgttttccattcaagcgtccgagtaaaactagatacttctaaggccattctcggtcataaactctctcgtcgtagagcttcatgacgcagtttgataggctaacatgcgatatatataaatgttgcatataaataaattgctttcaacggtgcgctttctaataccttgaaaaggggttggcatatagtttggtgatgatgaaactaatttcacctatttcataataaatatagtgtcatgtcattaaaaatcctatatgacatactaattaatgcaatggaatctcacgtgaaacttccattgataacaacctaacttgaaatagccaggaaactagttgtaagtcggacgataaaacaatatttttcaccagctttgggaaattctcttctagagtgggatggaaatagacgagatcgatttcacatatttcaccaacgtgatggtttatacaacattccctttataggacgtactttgactatccaagtgacccttgaccacaaattctctatgtaatattatttaataattgaaaaatcatgataactaggaagcgattttaagaaatgaatctaatggtgtcgttttgttggcatatataattaatttattattgaaatagttgttgtcaaaacataaacttggatagtcaaagcaagccttataagattttttttatttcagtactccatgcttgttttaatatcaatagttctaaaaaaccatactagagtatggttagtagagctccgctcccagcgattctgtatatatgtaccaaatggttaaattcactactagaattcggctttttgccgagtgtcaaatgttttgccgagtgttttttcggcactcggcaaaaaagctctttaccgcgtgccaagaaaaaaacctttggtaaaagaaaacactaggcaaaaaaactctttgccgggtgttttatttttgacactaggcaaagagtgtctttgctgagtgctttttttaatactcggcaaagagcttctttaccgagtgtcaaatatataacactcggcaaagagctattttgccgagtgcttttttaaacactagataatgacaatttaaaaatcacattctaaatcagtaaattaattcaaacgaaaaagtttttaattataaatttgtataactcatcatgatgtgcagtttatattttaaacatttcttcatatgacaaaataaaaataaatttgtttataaaacatatatctctcccctagtttatgaaactacgagagagatgtattagatttgtgcatattgttagaaccatcatgtgagatgaacaaatgaccaaacaaccaaaataaactttatagatctttagaagttatagaattttgtagttgacaactttttcatttgaagtcatattgtcaactaaaactacgtctaaatttaaaaattttaaaaattgaattttgaaaacggcctcgaaagaaaaaaccaccaacataaaagttgtaggtattgaagagttatgaaactttgtagttgacaatgttttggtttgaaatcaccttgtcatgcaaaactatgtttgaattttaaaatttgaatttttgaaactacctcggatggaaaaaccactaaaataaaagttttaggtcttaaaatttaatgaaactttgtaattgacatttttttgatttgaaatcatcttatcattgaaaattttgtgtgaagttttcaaatttaaaaatcaaaatttttaaacgacctcggatgtagaaactatcaaaatagaacttgtagatcttaaaaagttatgcaactttatagttgatcacatttgcaaatgaatttatttagtatctcaaataatcaaattactctcggtttgttatagttaatgaggaatgaaaacgtagtatagatataattgatgtagtagtgtaatggtagaggagagtatgcgtgagagagattgcgagttcgaatctcaccattcaaaataatagtgaaaaatgatagggtgatgggtatggtaatgggtagtggttggagagttgttgtttacataattttaaaaaatgttttgctattttttggttttttttgcgattcttaatttgcggagtgttttttttgtcgagtgcttttcgacagtctttgtcgagtgtccgaaaaaatactcgacaaagaaccatttgccgatgaaatgtctgccgagtattctatgccgagggtaacactcgggaaaggctttgccgagtgtcttagacattcggcaaagaacgcgattctgatagtgattgttactgaattctagtggagagttaaaaagtgaatgaagaaaaaactactgcaagttggaaactaaaaaccactactcggagtacccattcaatcaccaccaaaatcacttctcacctgcatcccaacatccatccaccaaaatcactccaccatagaatcaaggagtgaagaattagaaagtggagctctacccaactagttctaatatatttcatccattgtaaatacaagattatttgttttttagttttccatgtacaatatttttcttactagcttcttttattgtcattatattgcatctcttctcaattattgattttccatgtcataaaaactagtcattgatctcaataagagcatgtacgctccacatgttgtcaatccaaaaagggaagaatttcacatgctttgaggttgttataagttatgatgtactagcataaacaggcacactccgccacatgctttgaggttgtcataagttatgatgtactagcacaaacaggcacactctgccaggctgaactttttctagtgaacagtaaacagtagcaaacaacaaaactagatgggttgtaagaaaaaaaaacgataaaacagtaaaaatggacgaacggtaatagaagatcgatatatagtgtctgagtaggaaataaataacgcacatcagcatatgctacagtaccgacggtggaatgaacagtgtagaacaatgtatgagtgtctaaggcgttgagaacacaaccatccgtgtgttcagagatcttattgtgcaatgaatcaaagtacgttatcaaataatttagtactacctccgttcaaaaatatatgacaccgttgattttttcgaaaactttgaccacttgtcttattcaaaaatataaaattttaagtcaagcacaaacttaaggtagataaaacaaatcacaaaaaatgataactcattattttctttgaataagacgagtggtcaaatcttttaaaaaattcaacggtgtcatatatttatgaatagagggagtatgctacttttagattcctaattccattttattattgtaaaactgaaatatctgtattaggtttcttagagtcagcatcaattcacacatattttttctctagaaacgaactttgataaatgggatatgatatgatatgatatgatcgttccagcttcatttcaaaattccttaggtcatgactgtttcccatgattttctcataataactcaataaatacacaatgtcgtatttgttataaggaccatgagagaaatttgtaacaaaaagtttagttttcttcatagttagcattaagaatttatcctttttcaattaacacaacctagtgcataaagtataaaagggtacatataatttacatatatagaatgtgcatgaaatctaattaccacatacttattttatttcctcaacatgcctttatcatcgctaattcatagtcaatactcattcttgctggctatcaatgtatggttcccaagttggtgagggctcaaggaaggtcaccacgtcaaatgggtaccaaggccatgacttaagaacggtcagcacatcatatgcatctcaagatggggacaactcatggaaggccaccatgtcatatgggttccaaagtggtgagggctcgaggaaggtcaccacatcatatccgtaccgagggcaggacttaaggatggtcagcacatcatatgtatctcaagatgaggacaactcatggaaggtctcaatgccatctaggttccaagttggtgagggctcaaggaaggtcaccacgtcaaat

SEQ ID NO: 672 - DNA, 3921 bp, Zea mays
  Intron number 12 from transcript GRMZM2G147026_T01 (locus GRMZM2G147026) derived from phytozome v7.0 (chr-ID 4; pos 221518569 to 221522489 reverse strand)
acagccgttccaataatctgcatcctgagagattggtaagccaagtttagttaatgagtgttggatataatcttgatgtacttaatcatgtttgtatggtgtggagtcttgaggctatgaactcgatatacacataagtttagaagtgttgcactgttagcatgcattagtgcatgctggagagcacttgcattggaagtgatctaagcacacattagtcatcaagtgtatggcatgagtttagctgtagagttagtgaacaaatcatgtagagtgtgttacaacgtctgcatgtatgtggttagacccgggactggcttggcattagtccaagatccatttggattttggcacttggactccattgggtttggactcggttggacatggcatccattctgtatagatccaatagctttggattctgtacaaaaaaatttggagaacccaaattctattggacttatactaggtagcaggaaactggccacaacatcatgcatatctcacggctggctcagatagtccttcgcgatggcctttttaacactccactcccctgtgctgaggaagatgccaagatcagcccgcccgcctggacaacaggcatcgacagtactcgagccctcatgtctctgggcgcccacaggtggacatagatcacatgatcatcagctatgcaagagggaacagcagtggatgcaccacaatccactcggtgccacaaaccacttggttaggaatctgttgactgggtgtgcccacttgaatttggttggcacaatggtgaagcatgaagctcgctgaccaagcacctggggtttgctgcggatgcaggcaaaggccaccaccctctccatcccttccgggtacgtgcacataactcctgcaagttaccagtgagggtgaggtggcggctggcagcagggtcttgtggcacgccgaggtcattgctgacgcagaaggagagatcgtggagcgccccaatgtgtggccacgagatgcagaaagcataaagcgactaattcctgatcctcagctttagtctggtcattattggattggaaactctggtaggttgtgtggagtttgcagcaaagaggcaactagtattggatggatttgaatttagaggagttggattcgtctggattggatatctccactaattattaggattggataggagcatgattttaattggacgttgattggattggatttggatgttcgtccatcaacaggtctatatgtggtgcacacaccagtgacatttgtaggtgaactagtacagtgcccgtgcgttgcgacggcacacgacggatcctctcattctccttcccgtcatctctatcccggttaacttttgaaatagcatacctggagggaagcaatcaccctgcatagaggtaataacctttgacttctcctgaattgctttctccaggttccgatggcatcatccttattcttcagttcttgagatcgctctgctatgtatgactctgtagcatgaaaacaaacataatgatggttcctgagggatctcaaaattggaatgaatttggtaggcagatacagaatgacgaagtggcaaagtaaagcttatgacagaaatgagatcacgatgagaagatgttatttccatgtggtacaatttgagtttatactcttcagtagtacaggcatctttagagcactatgaatttactgttctgcttcaattaatattgttaagactttcacaggctattcaattcaagaaagattacgagccagtatggtctgtgcgaagtgtatttggttggaattttcagtacacagacacgatgagcagttcaaattctctagcaatgctgcagattggaaaatgagcttctccagttgtctatgttgatgggacagtaacgtatcatgcaaaccatttgggtctatggaagcacacataaatattccagaaaaatacttcctgctgaacatttgaggactgtcttattgaacctcgattcgacattcaagtatattgattctttcccaataaacgaagactcttctctgtaaatactgcatatttgattccattatcgtacgatactactacatttattcttgacatcgagctgatgggggaattgaaaaatgtgtctcccgcccccctgccctcctccaccccctcctccccccgacgcccaaaccacctagagctcacgctgacgtctactccaggctcggcggccacaaccctcccctccctagcgtcgggaccctcctctccagcttcgttgcctgttggcggcaaggtttttaagtcgagtcgacaaggtaccgacttggtgactagtcgataagtcagtcgtctagtcgtcgacttgccaatatattggctgttttgcgtatataatggcttcatatagactatatagcatttatatatgaagaaagagcatgttttacctcatttgaagcctgaaattgaacgaaactgaaataaacagcaagtcttacctcatttgaagccttaaactgaaccaaatcagccacataagtgataagtcataaactcataagtcataacagccatatagttcaaattggaaaacaaatagcaagaaaatatagttcaaacttgaaaggaaataagctccattagatagctaagctgctgctgcagctagatagatactagatagtagataccctaaatatctcccaaatcaagaaaaaatgttgtgtaatgggcctttgggctgtttgggctgaactggggcacaagtcggtcgactgagaattttcagtagttgacaagtcgtccgacttgccagaaaagtctagccgactccccaagtcgagctcccaggaccgactggacgactagtcgacgacttgaaaacaggggttggcggctccaaggcccaacgctggcgcgatgatggtggcgaccatcctgataggcggccttcatacaaggacgtgcttgtctcctcctccagccctcttgtctcaccccattgccggtgatggctgggtgacggtcgttagtcggcgtgctcgctggcgcctttcccgcccttcgaagactccacccaggcctatccttgccgacttgcgtgggaagtgcttcaattgtttctccccctcccatcacgtggcggtgtgtcgttgtttggtgaggtgcttcttctgcaggctgccgaggcactgtgctcacgtgtgctcgcgccggcggacgacacctgcggctcttgtttttcgcatctgacttgtcccgcacagcttccgtatgctgcgttcggaagcgctcaattttaccctcgagtcgtcgcctctcggcagcgaactccgaggtcagagcgcccgacgcaacatgatcggcgaaggcagccgcctgccatgaaaagtccatcaaattcacaatcacataaacacaacaaactgacgaagtccaagacgacttacatgcttcagctgctacatttagcatatgccatgaagttatgtactataaatattgagaacacaaggcaaaaaggcagtatgtaggcatgtagcttctatgtaaatgggtgcgactatgttcttcctccataattgtctttgagaataaactatactgaaagagcttcatgagtgagtttccataagttgtgtgtgttggacattttttgagagagtgacagacattcaacttcaactaggaatactcacctttctcattgttgatgatgttgaattttagcatatgctgtttatttctttgcttgcataatctttacgtgctaattgaattttagagccattttggtcttcgtcacaactctatacattttatagctgttaggctttcaaagtatgatttgcatttccttgtggtaataatgtccccccatttttcactgcagggagtgtctgctagtcataata

SEQ ID NO: 673 - DNA, 5397 bp, Zea mays
  Intron number 2 from transcript GRMZM2G025143_T01 (locus G RMZM2G025143) derived from phytozome v7.0 (chr-ID 5; pos 1 430132 to 1435528)
agaacgagggatacctattcgctgggcaatgtactaatttcaatatttttatgatatgatacaaatgcttatataaatacatatatgtcttactcattgtttccaacaaaatatcagatgaggataccgatgaggatatagagatcgatggtagtcaagatgaatcgagtgccattgatgttcctgacccgtacgacaaggtgtatagcaacatccctgaagaaacccatatgctaaagactgttcccaactgcggttattgcaccgcgaagaagtttgagtatgagacacctggtttttgttgtcgtggtgggaaggttgagctagccccactggagacccctccccaactcaagaggttgtgggatagtgcagactctgatgctaggcactttcgtgataacattaggttttttaatggccatttctctttcacttccctatactgttgcctcgatagtatgacaactaatgtaagggattctggtatatacacgttccgagcacagggcatgatgtatcacaatatcaagtcatttggtagggatggtggggcagagcataaacaccttgagctttacttttatgatgatgatcccactctcgagcatcggtaccgtaagtgtcgcgaagagcatcaacagaaagacaaagaggttattcgacagatagtcgacatactacgtggaaacccgtacttcgagcaccttaggaccatgggtcacgttgagaaccttgatgactatcgtatcgcgttgaacctagaccagacgttgaaccagaagacatatataacacctctcacttcggaggtggccgctgtctggatcgaagggagcgaagggagaggccagttcagcaagagtgttatgctccatgggaaggacagttcaagccactgcatccgctcataccatggatgctacgatgcactatcatatccattgttcttccctagaggcgaacttggctggcacgcaaatatcccaaaggttggagtatccatggacgaagtggatgcataccgtgcgacacatagggcaagtaatgcaaatgatgaagatgcgggttagttgtttgtttatattttgaaatatttgcgcattattaactatttttcatcatcactcactttataatccttgcgtatgcagaatctcctagccatttatgtgtgtctgtacgtgactgccagtgttttggggtccgaccgcacacccggggttgcccctcaaggtgtttttaggagtaggacggtgtcaacgactgtagcaaaatggttcgtgccgatcgcacgagggacagtggacaatatttgcaggttcgggccgcttagagatgcgtaacaccctacgtcctggtgagtatacgagtgtggttacaagagggctctctggattgaaggcacagagagttaatgagggtggctaagtaaaaatagggtcgatcgatctgaaggggtgccccctaggccttatatactcgaccgtggggcaatacacgtggatatgataacaacaagtagctaaaaggtagtgaacctcttgaatttatccctacgtaacccttgccgacttatcctcgcatggctctgttgcatgggggctttagcgcgggaaagtcgggtctctgttgcgatttactcgctcgacgttgtgggccgtccgggtttgcatcaatccggtcttacgtcttctctgctttgttgattgtttctcctcaggcccacgaaggaatgaccttacgatttattgggcccttgggcctttcgtgaggtcttttacttctttagtggacccgggggatatccatcccccacagtgactactactgctacaaattccagattcgccccggggtattcaatcctatacttcatggaaagcggctttttcagcagttcgcggtcgacacgtacataaagattgagaactctcgtttagattacatacgcaagaatcaggatcggttaagggcagacctgtaccagggcttggtggatagcatgctagatggagatattagaggagagaaggttggcaagcgaactgtgctgtcgacgtcgtttattggcggtcctcgtgacatgagacgtcggtatatggatgctatggctctggtgcggaagtttggtaaactagacatatttcttaccatgacatgtaaccctaactgggatgagataaggagggagcttctccctgggcagacaccgcaagatcgtccggatcttgtagtgcgtgtctttcatgcgaagctacaagagttaaagcatcggctgactaaacaggatattcttggtaaggtccgagcctacgtctatgtcgtggagtttcagaagcggggtttgccgcatgcccattttctactcataatgcagaggaagtacaagctcacatgtcctgagcagtacgaccttttgatctcagccgagatcccaagcaacaagtaccctgaactacgaaagatggttatcaagcatatgatgcatggcccgtgtgggtcgctaaaccctaactgcccatgcactaagggtcgtaaatcgtgcaagaatcattaccctcggcctttcagtgacacaaccttgcaagggaaggattcgtaccctatttatagacgtcgtgacgatgaccgtaaagaaaaggtccgagggtgcgaactggacaatagatgggttgtcccttataacccatacctccttcgtctcttcaactgccacatcaatgtcgaggcatgtgggagcatcaaggctgttaaatacctgttcaaatacatatacaaaggccatgatcgtgcgtctgttgttatgagagatgcgagcaaggcagatgatgatgttgatgagatcaagcagtatagagatgcaaggtgggtgactcctccggaagccttgtggaggatatacggctttgagcttagtcagatatctccacctgttatgcagcttcaactccatcttccaaacatgcacatggtggcgtttcacgagcggcaaatggtcgagcgagtcgtcaaccgtccaggtgttgataggtcgatgctcacatcatattttgaggcgaataggctacacgaggaggctcgtggcatcctatatcgtgacttccctgagtggtacacttggcagagtggtaagggaaaagtatggcaacggaggaaacgagatacaggtggacaagtcggtaggatagtctctgctcatctggctgagggggagcgctactatcttcgtgttctcctaaaccacgtgactggcgccgcctcctatgtggatctaaggacagttgatggtgtcaccctaccgacttttcgtgaggcagcagagagaaggggactacttgagtcggacaacacactggatgagtgtctcactgaacgtgctcttttccagatgccatcgtcgctgcaacggctttttgccacaatactggtttactgtgagccaagcgatgtggctgtactctggcagaaacacaaagattctatgtccgaggactatcaacacaagagtcagaacaaaactcatgttcagcagatggtattgattgacattaggaacatgctgcagttaatgggaaaggacataaagacattccctctacctcctatgatcgacgcgtatgacgatgctattggtactgctcgggaggtttacgaggaggaaagtatccaaccgacagtggaagatgtggctcttaaagactctcttaacgaggaacagagggccgcctatgataagattatgtctgccgttgacaccgatcagggcggattattctttgtggatggacctggtggcaccgggaagacttatctatacagagtgctgctcgcgacgctacgcaaccagggcaagattgcagtggcaacagctacatctggcgttgcggcttccataatgcctggaggaagaaccgcccattcacgcttcaagataccactcactattgacgatggcgctgtatgtagcttcacgaagcagagtggaacaacagagttgctacggaaagcatctctcattatctgggacgaggcttctatgactaagagacaagccgtggaggcactggacaatagcatgcgcgatataatgggtcgccccgcactaccatttggtggtaaaaccattgtcttcggtggagatttcagacaggtcttgcctgttgttcgtaaagggtcaagggctcaagtggtcgcgtcttcgctacgaatgtcttacctatgggagtccatgtcccacttaaagcttgttagcaacatgagagcaaaaaacgacccttggtttgcggagtttttgctgcgcgtaggcggtggaactgaggaaacaaatagtgacggcgacattcgtcttcctgatgatgtgtgtgtgccttacagtgggagtgacaacgatcttgacaacctaatagactttgctttcccaaatctcaacgaaaatatgtctgattccacctacatcacttcaagggcgatactgtcaacacggaacgactgggttgatatgataaatgttaagatgattgatcgttttcaaggggagcatatggtgtatcatagtttcgatagcgccatggatgatccccacaactactacccacccgagttcctaaacacattgacgcctaatgggctaccacctcatgttttgaagctcaagattggatgtcctgttatattgctccggaatatagaccctacaaatggactttgcaatggcaccaggttggtcgttcgtggcttccaaagaaatagcattgacgcagagattgtactgggtcaacacgttggaaaacggattttcctaccgcgtataccgttgtgtccctccgatgaagagatgttccctttccagttcaaaagaaagcagtttcctgtacggcttagctttgcaatgacggttaacaaagcacagggtcagactattcccaatgttggtgtatacttgcttgaaccagtgttctctcatggccaactatatgttgctctatctagagcgacagcccgatcgaacataaagattcttgtcatcccagctgtcgatgggaggaaaaagtcaaggaagggtgtaaagaaaacccccaccgtagattgtgggacatataccaagaacatcgtctacaaagaggtcctaacaaattagacccatggtaagagttgcatgttcagctaacaaactaataggatgatgtttatcttatgtttgattggtctggtgtattatcaagtcatgtttgcatgctacaattgtttttattagagacgcacatgtttgtgtattattagagcatgcatactatcttaaagtattgttgagttttggatcatttgtgaaattagcaataataatttttatgcatctaacaatttgttatgaatgtaggtttttgtcccgcgaga

SEQ ID NO: 674 - DNA, 2547 bp, Zea mays
  Intron number 2 from transcript GRMZM2G482232_T02 (locus G RMZM2G482232) derived from phytozome v7.0 (chr-ID 8; pos 1 71552402 to 171554948 reverse strand)
gaaggactgccatttaaattcaagcattccataaggtcagtagtcattactggtttctgacctagctaacagtgtatagctagctctttgccataattatttgttatgatcttgcttatcttttgccaatgggccagatatacacatctgatgtggattactttactacatttattgtgtgaatgaaaaccttcatttacccctgtatcagtgatgtagtcatgttaacacgggtgtcatctattagaacttatcatgtcctacatttgcttatgtagtggattgaatcttatgaatgtttatgtgtgtagctatgttgttagtttatcagtgcctctttgagtatccattacagtccctgggtactgtcttggtttaggtaggcccaagcatctcttgacatttatctacattatcaatttgatctaacctatggaatgtttattcagtacgatttttgaacaatctctgagttcgttgtatggcactgcatgtgtaaatgacagctgctccaggctcccacctcccattcacacgtgtgtcatatatggatttcagggattattccatggcgtagtcataatttttaaaaaacagaaaccctacaattaatgtcaaaaactaacctttcgttgcagctgcagtcaattctaggtgaaaccactccttggataaaatagataagtagatttggatatattgatatggtcatgcttgtatagaattcatgtcagagggggattcaagaagaggtttcatgcctgattcaacattgggtagtggaagcaaagttggtgtggatgtgttttgtgtatgtacattaaatgccccctcaaatttagctttgtatttacgcttcttgtgcatagtttgccagtaaattttagccaactgcatgtattgcaaaccatgagcagaagttccttagatttttattgtcctgcttcattgcaacatgttcagttctgcttcattgcaacctgttcactgacaatgttctttttgctgtagctacactgggtatgggaatggaggtcgttgagatgaaatccctactactattaagcatgtagtgtagactcctagcgctaccacgcccccacctccctctctgcgcacgcgcccgcccgcccaccctgctcggtgcccatcccctttgatatggtccaatcataatacagtctcttctccctttgatatatagatttgggggtttggctccacctcccgcgcctgatccgggccgtccttttttctcttatctctttttccttgataaatatttaatcggtttctatgtgctgttcacgcaaggatcatcagagaggaatctcaaagagggtcgtctcatcctaggttcatgtatctggccaccctgcatccaattattttttccgattctttatatttttattttactttttcttgttgtttgtatttaagtttgtactgatgttgtgctcctaatttactatcatacttaaaaatgcttgatttttctattcaggtttggagggagaatatggagatagaagtctcgcatgcattgttaaccaattggaaatcattcattatttactttatgagccaataataatggtttcattctgttgcattgctaaaatatctaaattgttgaaactttttgtattactcaatgtgttctggatgccttcataggcaagacctatagctgtcggtccaggatagagaaggcctaggtagtccaatcgatgcctaaagggggtgaatgagataagcacatgagataagagtaaatattttagtctttatccttagagatatggctagattaggatgaaagagatcttcggactcaagtttccatacagttagactgtacctttttgtaatgttttcttcttgccctcttcaatctaggttaccaatgccctagcacatgctggtctcgagtcttctaatctgattgtcaggatcaagagcaacatttggatagagttttgttaaattttggtagttttctatgtatcttagcatgtttgattgaactaagttgaatgtctttgtttagatgatcattcaagtatgttgaaataattttaaccttccttttttctagaggcaccaacattctctcttttcccctacacaaacgatatttttttattaatgcactgtacatgtcccatttttagatgacatgtaaaggatgtgtttatattttttacttccatttctggattgggaaagattccagctaggtacgttttctgtgactgctcattcttttgcgatgagtgtaattcatcaagaaatctgagatttaaatgggacattcctcaagaaaaagatgtcggtattggtgtgcagattgtcgtgatgattatggagatactcaattggaatctagggagagaatcaggaataacaatagaagttacaacactgtattttaaagttatatcccttaacttgtacgaatattaatatattagtcgtctgttcatgtgcctgattggagactgactctaacatgtttttttcgtttttgtccctatgtgcagg

SEQ ID NO: 675 - DNA, 19585 bp, Zea mays
  Intron number 5 from transcript GRMZM2G167886_T02 (locus G RMZM2G167886) derived from phytozome v7.0 (chr-ID 2; pos 1 73175013 to 173194597)
ggtggtacattacgtaatccttattgtattttgtttccttatgtgcttaaaccacttacaattaaatacacaaatataatttgttcatcatggttttttagtgatcaacagtttaaacaatactagtttgtcatacatgttttttatgctgaatatttttctaaatttatattttaaaaggagacacaagtgtctcagatctgatgtatactaaggaaaacaatacattttgacaaagagtgaccaatatatataaaaagtgtgcaaagaggccctttgatgtcatcatcatcctccaaaattacactgcttgttggaaattgaaacacacactgtttgctggagattgaaaaacgcaccgcatattttccatttcacaacaaatttattagttaaggaaagcattataaagagaagctagagatttgtttctccattggaaaagtacatttgtgttagattgggctgatcaggcctgccatgtgtggtgattaggcctgccatatgtgttagattgggctgatcaggcctgccatgtgtggtgattaggcctgccatatgtgttagattgggttgatcaggcctgccatatgtgtcttggcgtttatggtagtcgatcatagattaggcaaggatctctattgattgggtgttttctataaaccttagatgatccttgtctatatattgtacaccacttgtacctatataatcaagctactataccccaagccatatctcctttcatggtatcacgagtccatgtttcaccttggcttccccctcttccgctgccctagcacactggccctccaccatgctgcgtttacgcggcggcctcctctgtcgtgccatggctactctcctccccaccccttggcaccatgttccccacgccaccacagtcgtcgaagggcaacacaataagacggatgacaatggcgtgttagattgggttcaggctgcctgtgttttcaagtcatccgattaatcgcgattagttggctgatcggttttgggtggccgatctgggcaggtgacccgattaggacacctgatcgccctggtcgttcgagtcgccgactagctatgattagtcgctcgatcaagagatcatgactgaccagggtccggcgcgcctcaaattttcatgggcttttttctggcgggcggcccagctgcaaggaggtgaaacgccccatagaaccttccctgacgcctgacagaatgtttccaaaacatctcgattcccgtcgtctcaatctcttcccttttgcttctcgttgttctcattccacctctccacggcaaaccggcgcgcggctgccacttgatcgccggcgtctccagttcaccggcgcgtggcttcatcctgatcgttggcggctccagttcaccggtgcacagcgggtctagttcacatgcgcgtgcatgagttcatcgtctggaggttggtctgaagtctgaaccctgatattatctgtccatcttgtttttcaaaacctctgttcattacctgtccatggtctgaaattctctgaagtctgaaccctgatattatctgtccatcttgttcttcaaaacctctgttgattacctgtccatggtctgaaattctcaatctctgttcattacttgttgatgaatttcagttcgacgaagatcttctttaggtcattggtagagtggtagtaagtgtttctttgctgttttgaacacctgcattactttagggtcattgtggagctactgttttcagttggatgaacaaatatcttctcttaaatcagtattacagaattcatgtcatgtttactctttatatactatatatatgtcctggatggacaggaagactagtggatgatcagggtcgactagaggtcgattagtcgacctagtcgtcgtcgactaatcatcaatagtcgcctggtcgaacccctaggtcgagctggtcactcgaccaacaaacatggcaggctgtcgtatgtgcttatcaggcctgccatatctaccttggcgtttatggtagttgatcatacattagacaagaatcttcattgattgggtgctttttttaaactttaaacgatccttgtctatatattgtacactcttgtacctctataatcaatctactattccccaaaccatatttcctttcaatttgtcatcagttctaaccaattgttgagaagattgctgatcagctccccaattggaaggcagatctcatgactagagctgggaggagagtgcaggttcagcatgttctcacaagtatgatggtgtaccttgccatggcagttgacattccaaaatggggtctggatgctattgataaaatacgcaggggttttctttggaggggccgaaaggaggcaagaggaggtcattgtcttgtagcctggggtcgagtttgccgaccactgcagcttggtggacttggcatatctagttttccagaattatgttgggcccttcgaatgtgatggctctggctgcaaaagactgatcccacacgcccttggtccgatctccacataaaagttcctggaaaagctagagctttcttcatggaggtggtcattactgaggtgggagatggcaccaatacaaagttttggaaggataaatggttaaatggtaagcgaattaaataccttgctccaactccaactttgtataatattatacccaagaggattgtcaatagtgaaagtcacctagagggggggggggttgaataggcgaaacctgaaatttataaacttgaacacacactagggccggggttagcgttagaattaaatccgagtgcgaaagaacgtttctcttgccacgagttgctcaaatgatgcggatgacgtttgggagcaaactcaaatcaatattggcaaggaaacattagagagaggaaagagggcaaacaaatcaaatggaaatcacacaagtggacacgatgatttgttttaccgaggttcggttccaaagaacctagtctccgttgaggaggccacaaaggttgggtctatttcaaccctttccctctttctgaaacggtcactaagaccgagtgagccttctccttaatcaaacgggtcactaagaccccgcaagaaccaccacactcttggtgtctcttgcttagcttcacaagcacttagaaaaggaatgagaaatgaagaaagacaatccaatcgacaagagcaacaaaagaacacaaatgatcctctcacaagcccttaggcactagcgttgattttgggaactttgagtggattgattgctttgattgtgtcttggagtgttgcactttgctcttgcaatgaatgagaaactcagaagcttggatggcttgaggtggttggggggtatttatagcccccaaccacttcctagccgttgctggcgatggacgcaccggacagtcactgttcactgtccggtgcgcgccacgtcagcacgtccgttagggtttggagcagttgaccgttggagacgtttgtctttttgctgcaccggacagtccggtgctacatcggacaatccggtgacctctgacttctgtgcgtcactgttcactactgtagactctgcgcagtcgaccgttggcgcgcagggagccgttgctccgctggctcaccggacagtccggtggcacacctgacagtccggtgaattatagtggagcacgcctggatgaaacccgagagtggctggtttgctggctgcctgggctggcgcaccggacactgtccggtgcgccaaattttagcacactccaagtcttgctccaatctttgattgagttcctaactgaatttctttcttggtttgtgctgaacctaatgcacctgtgataaatgatatttagacaaactagttagttcacgtggtttgtgttgggcgtcaaccaccaaaatcgattataggaaatgattaagtctatttcctttcaatctccccctttttggtgattgatgccaacactaaccaaagcaaatatgaagtatagaaatgtagctagtttgcaattgaaatagttgtgcataggttacttggaattaaaccaatgaaaggctttatgcatatgaatggattgcttttctcttatttaacattttgaaccacatttgcaccacttgtttatttttgcaattcttttggaaaaatcttttcaaagtcttttgcaaatagtcaaaggtatagaaatatgattgcaagaagcatttttgagatttgaaattcctccccctttttaaatgcttttcctttgactaaataaaagctccccctgaatgaattctccccttagctttaaagagggtttttgaaatgaatttcccttttttttttgaaatggatactaattgaaaattttcatactaataagataccaattgaaataaactcaaatactaattgaaataagcatttgtgaatttttttgaaatggtggcgcagtccttttgctttgggcttaatactttttccctttgtaattaatcgccaaaaacggagaacttgagagccctcgacactttctcctaatactttctccgcattgataaaagaaatatgagtgaagggttataccaattgagagtttttgagtagcggcaaaggataagtgctatcgtccgagttggagtggaagtcttttctttgccgaaagatagaaatacacttgaaagcaaaatagtcttagcattggcacaagaagaataaaaaatatgcatttgtaccaaatgaaagagacatgatcaaaggtatataaattaacaatgtgtgcaatgtttcaatcaaagttccgagaattaagtatatttagctcattttaagtttgctaaaggtcttctcatctaatggctttgtaaagatatcggctaattggttgtgtgtgctcacataagctatttcgatatccccttttgttggtgatctattaaaaagtgataccggatgtctatgtgcttagtgcggctgtgtttaacgggattatccgccatgcggattgcactctcattatcacataggagagagactttgctcaatttgtagccatagtctctaagggtttgactcatccaaagtaattgcgcacaacaatgacctgcgacaatgtactcgacttcggcggttgaaagagttacggagttttgtttctttgaagcccatgacactagcgatcttcctagaaactgacaagtctcagatgtgttttttctaccaattttacaccctgtataatcagcatcggaatatccaattaaatcaaatgtggatcacttgggtaccaaagcccaaacttaggagtgtaaactagatatctcatgattctttttacggtcctaaggtgaacttccttaggatttgcctgaaaccttgcacacatgcatacaaaaagcataatatccggtcgagatgcacataagtagagtaacgaacctatcatcgaccgttataccttttaatctacggatttacctcccgtgtcgaggtcgagatgcccatttgttcccatgggtgtcttgatgagtttgccattcttcattccaaactttttaagtatgtcttgaatgtacttagtttggctgatgaaggtgccctcttggagttgcttgatttgaaatccaaggaaatactttaactcccccatcatagacatctcgaatttttgtatcatggtcctactaaactcttcacaagatgacttgttagtagacccaaatataatatcatcaacatagatttggcatataaacaagtcttttgcaatagttttagtgaagagagtaggatcggcctttccgactttgaagccattagtgataagaaaatctcgcaggcattcataccatgctcttggggcttgcttgagcccataaagcctctttgagagcttgtacacatagttagggtactcactatcttcaaagtcgggaggttgctcaacatagacctcttacttgatagggccattgaggaagacactcttcacgtccatttgataaagcttgaagccatggtaagtagcataggcaagtaatatacgaattgattcaagcctagctacgggtgcataggtttcatcgaaatctaaaccttcgacttgtgaataaccttttgcaacaagtcgggctttgttccttgtcaccataccatgctcatcttacttgttgcagaatatccacttggtacctacaacattttggtcaggacgtggaactaaatgacatacctcattcctcgtgaagttgttgagctcctcttgcattgccatcagccaatccggatctcttagtgcatcctccaccctgtatggctcaatagaggacacaaaagagtaatgctcacaaaaatgtgcaactcgagatctagtggttacccccttgtgaatgtcaccgagtatggagttgacggggtgatctctttgaattgcttggtggactcttgggtgtggcggtttttgatcctaaatttcttgatcatcttccttatcttggttatcttcatctccccctcgatcaatgtcctcctcttgaggtggctcatcgtcttgatatttattttcatcttattgagcctgatactcatcttgggtagttggagatgcttgtatggaagatgacggttgatcttgtgcttgcgtgggctcttcggattccttaggacacacatccccaatggacatgttccttagtgcgatgcatggagcctcttcatcatctagttcatcaagatcaacttgctccacttgggagccattagtctcatcaaacacaatgtctttttttttctcgaaagcgcaggagaactgcgcatcattatattaagtagaaggaaaagaggatccaatgtcacaagaaacttcaactaatccagtggacttgttgaagactctatatgcccccttgtgtttaagtcataacctaataaaaagccttcgatttgtgaattctttaactccgtcccattatcgcttctaatctttttgatcctcaattcgaactcattttaagcccgtctcaagaatctctttaaagtctcttgggtttgagatttttcctgcaaaaagaatacccaagtgaagcgagaataatcatccacaattattagacaatacttactcccgccgatgcttatataagcgatcgggccgaataggtccatgtggagtagctcaagcggcctgtcagtcgtcatgatgttcttgtgtggatgatggactccaacttgctttcctgcttggcatgtgctacaaattctgtctttctcaaaatgaacattggttagtcctaaaatgtgctctccatttagaagcttgtgaagattcttaattccaacatgagcaagtcggcgatgccagagccaacccatgttagtcttagcaattaaacaagtgtctagttcagcttggttatcattaaaataaactaaatatagctgaccatctaacactcacttaaattctattgaatcatcacttcttctaaatacaataacacctatatcagtaaagagacagttgtagcccattttgcataattgagaaacagaaagcaaattgtaatctaaaaaatctacaagaaaaacattggaaatggaatggtcaggggatatagcaattttacccaaacctttaaccaaaccttgttttccatctccgaatgtgatagctcgttggggatctttatttttctcatatgagtagaacatccttttctcccctgtcatgtggtttgtgcacccgctatcgattatccaacttgatccaccggatgcataaacctacaaaacaagtttgtgccttgttcttaggtactaaaacggtcttgggtcctttgacattagaaacaagcaccttgggtacccaaacacaagtcttgggactcttgtgtttgcccccaacatatttggcaactactttgcctgatttgttagtaagcatataagaagcatcaaaagttttaaatgaaatgttattctcatttgatgcattaggaattttctttttatgcattttgatatgagtggtatgactagaactagaagcctcatttttatacataaaagcatgatgaaacatagtatgaggtttcctagcacgaactttcataattttatgctcaggatagtttgcaggatataaaatgtaaccctctctatcctgaaccatgggagccttgccgtttacaaaattagacaatttcttagaggtattaagtttggtgttgttttggtcccttgttggaaaccaatcccatccttaatgccagggcgtctcccattatagagcatgcttttagcaaatttaaatttttcattttctagctcatgctcggcaattttagcgttcaatgtagctatgtgatcattttgttgtttaatcatggcaaagtgatcatcaatagcttcaatattaacatttatacatctagtgcaaatagcaacatgttcaacagtagatgtagatgctttgcaatcattcaatttatcaatcttagcaattaaattatcattctcaattctaagactagaaattgaatcattgcacatgctaagctccttagataagttttcacatttttctacttctagagcataagcattttttaacttaacaaattttttgttctccttaacgagcaagtcctattggcattccaagagatcatccttctcgttaatgatctctattaattcatttatatttttcttttggcccatattaagattggcaaagagagaaattaaatcatcttcattaacactagagctaccctcatcatcggatgtagtatatttaggggtggctctagagtataccttcttcttgccgtccttagccatgagacacttgtggctgacgttggggaagagaagtcccttgttgacgacgttctcatcggaggagtcggtggagctctcgtcggagtcccactctcgccccatgtgcgcctcgccgcctttcttcttgtagtacttcttctccatcttcttattccccttcttgtcttcgtccctgtctctttcactagaatatggacatttagctataaagtgaccggacttaccacaccggtagcacacccttttggagcggggcttgtagtccttccccctcctttgcttgagtatttggcgaaatctcttgatgatgagcgccacctcctcgttgtcgagcttggaggcgtcgattggaagcctacttggtgtagactccttttcttccgttgctttgaatgcaacgggttgcacctcggatgtagaggtggcaccttgctccaagttgataatatgtttggagtatttgatcataagttcaaagttcacaaacttgctaatcacttcctcgggagacatctacttatatctaggatcaccacgtattaattgaacttgagtaggattacgaaatacgaggtatctaagaataaccttgaccatttcatggtcatcccattttgtgctcccgaagttgcgcacttgattcaccattgttttgagccggttgtacatagcttgcggctcttctcctttgttgaggacgaatcgaccgagctctccctcgatcgtctcccgcttggtgatcttggtcacctcgtccccttcgtgcgccgttttgaggacatcccaaatttctttggcgttcttcaacccttgcactttgttatactcctctcgacacaaggaggcgaggagtatagaagttgtttgtgagttgaggtacctaatttgggcggcctcgtccgagtcatagtcctcatctcccacctgtggtacctgcgctccaaattcaataatgtccctgtcatggaccttcggtccatggggatagctgtcttctccggcgaggttatacccctctgccgcaggcttggttctagggtagcagccctaggcgcttgagagggtcattgcaagggagagagattggtttgataatgatcttgcttgatttattccctgctgccatgcggcttataaatagccctatggctaaccaacttctcctacaaactctcaactaactcctactttcttggacttatctgctgctaaccaactctccacaattctctcatctcaatcttattctctagccttatcccagcctggctgttgcctctcgctccctatgatgcccatgacatctccccctcccttgaggaccagctcgtcctcgagctgccatagacttacctgacacgacttaaggttaagccttttacatctcggcttacctttattatttaagacgaaaatacaaaataattgtggaactaaaatataaattttaactgcagctatgtcctcctgtcctcctggatcccaagggaagagctgaactgcggacttcacgttggatgaaaggtgaaggaggaaccgacccgttcttatgttgggtctgtccagcaccaaggtagttgcccgaatgaaggagacgaccctcttgggccgtgtagggggggctgcatacccagatctcaacttctgcagggggttcaaaaagtatagacgagacctggtggttgggcgcgcaggctgcgagttggtgcagcgatgagctgatcagcaagtgcagcttccgcaccgcccgcctaacaaggaagccgcgcactgtggcttgcaggcgcaccacggcctgctcatgtgatgacgaccatggggtggccctggaggccacagcaaggtgcttctccccacgaagggactgtacctggcggcgtgccaggaaccctcgcgctgccgcctgaagccgcaccgctgcttggagttccttctctgtcttttccttgtagcggtggaacatcacaacgaactgatcccacttctctgcgagacggccaaaactctcttcgagccgagtgaatgcatctggagttggagagggcgggtgggagggcgttgcggcggctggtggtggtgaggataacctggagctgataccatggggatagctgtcttctccggcgaggttatactcctctgccgcaggcttggttctagggtagcagccctaggcgcttgagagggccattgcaagggagagagattggtttgataatgatcttgcttgatttattccctgctgccatgcggcttataaatagccctatggctaaccaacttctcctacaaactctcaactaactcctactttcttggacttatctgctgctaaccaactctccacaattctctcatctcaatcttattctctagccttatcccagcctggttgttgcctctcgctccctatgatgcccatgacagtcccatatgctttcgtggagtgagtgtcacacccgtgttttagggacctgggcgcgaacataatcaccaggtgtgctgaaaccaattctcacacatatgatgaatcatggtacagaaacgaatgtcacaactttattatacaattggagttctgtacaaaataaataaataattacatcgtaaggagacaaagatccaacaacccaaagttgagtgggagacgacgacctagacctctcacgaacacatcgcagcaacctccatgcgcctcatcctgtgggggggtgtgagacagcaagggtgagctcacacatgttcatcgctcaacaagttgtggggaataatgtgcatgaactcatcaaaggtgagagttcatgtgatgtgcaaggctgatcaacaataggggttaaagatgagcattgcttttaataagttggtcaaattttattagcagttactaaatgtaagtaaataccaatccataataagaatagaacaaaattaataaataataccatgcaatgcaaatgacaaattgaatttagttccataatttaatcatgcgaggcgaaagggcctgtagcataatggttaagacttccgagtagcacctccaggtcctgggttcgatcccctcgggggcgaatttctggcttggttaaaaaaatcccctcgttgtgccccgcccgctcttgggttacgtactgcgcgtcaccctccagctgggctgttgcagagtgggcggtgacggccccgctagtgatgaggggccagggttcggggattttctcggccgggaccatgtttcggtctcttcttaatataataccaggagggcggtctttccctccccggtcaagttaatttaatcatgcgagagtccggagctgctcttgaccgtgagctagcgtataccagttttacactcttcagaggttgtaccctgtacccacaagtcatgttacccatctgccaaggggccatgagtcccatacagctctaccaaggaagcgagacagggtaacacaacgaggcccttacaaagttccactagcttccgaaaacccgctacagtttctgggaagagcaattgcaaaaatcccttgtctgaccgccatctcagcaaaatcaacccgagaacctccttgcatgcctactcccctactgcccttgcccctttcgggtaaggtagtcttccactagctttcctaattagtcagccaagggcgtcccattctacccttgtggtggcacatgtttctcaagttaagctccatgttctaattaaagataatgatcttgacatgaacataaataaaataacagaataattggaacatggatataatgaaatattaacccaaaaccatataaagcaatagcaaaactactcaaatgattcaggggtgaacaagttaaaaatgataactactctagggtgacctattgggtcccatcaaaattaaacctgtgtatggataagtgatattcaagaacattattgggtaataaaagtggtcaagggcacaacttgcctaggacttgagattccaggtaccaggatgatcttcaggtgacacgtgacctcacagctagtcacaacaattaaataagtttctggaattatttttatattaaaaaccaatttctataattatttctctgttttctctatttcctggattgcgcgtcaattctcaagaagtgtaggggcccatgcgcaaaaataactaagacacaggttaccattaggacggactgcgggtttatttggtaaaagaatagggtctcattcgcaaaatgagcggatgaaggggtacgggcgcgctaccgccgtaggatcagatcccaacgaccccgattaacttcttcgattcaatgaaacggtgcacgagattctatgtggacgaaggggtatacgtgatctaatctaaaccgttgcttcgcggatctgcgatcaatatcctaccgccatcccgatctaatcctagacgcccccaaccgatccaacggccaggaggccttctacctaagcctacgccggcggtgccagagcgtatgccgcggcggcggacatcgccggcgagtgcccaaaccactctgagggccccaaacaaccattcgagcgacgctacacgcagagacgatgagtacaaacacaagggttggtagcataccatcgatcagagcagagtgggccttgcccacggcggatggcggaacaacgactctgtaggagtccagggagcaatttcacccacaccagtcgacttccgcgcatggccgccacattcgcgtgttctcagtgcttgagcgaacgtcctgggcatgcatccaacctgcgcacggcagtggagtgcgctgcccacggagccatgtgggtacgccgccatgagttctcacaagcgagcgacactggtgaacacaaggccatggtggcgccacttccctcaggatctacgggtctacatgctctttcggtcaaggagggtccacgaccctgggtatttatccgtagcatcgatatggaaggtggagtccacccgagatcccggcgactcacaaggcggagccccgcacgaaccgaagatctagggcgaacccgggtaacacggcgcacgatgcccgattggatgaggggaaaactccggtttatatggccacgggcgaagagtaccgctggcgattcgaactccggtcatcacggggaagtttgttgcacatgcaacaatattgcgtggacgcaggcggagaggatagagctgaccggtcggtcccacgagtcagggacataacgcgatgggcgtggacacgggtgagggaatgggccgacagggagaaaaggaatgggctgtcgctggaggattaggcccaaagcgcgagttggagtcttttttttctcttttttttctgtttcagttttaacttttaagttttgaattcaggtttccaaaaatagatgcacaagaaaaagaaatactaatatgagatgcaatattattatatatatatatattactgatttttttaagcaaacacttttaatcatgccacacacatattgttctctttaaagaaaacattattttgaatttgaagtttatttgaaagtcatttccactatttttttccttatacaaattttgggctttacagtgaggttagatgatgccttatcactccacatacaataatcttcaccatcaaaatagggtagtttgcctaagggaacggaaagtagaggagcgcgcttggaaatacggggatagcgtaggggcatcttactatacttcttgcgctcatggcgcttagaagtagtggacgactcggtgtcggatgtggagggtgttgaagagtcggtctcgtagtagaccaccttcttcatcttccttttcttcttgtcacccctcctatgtgacttgatagaggaagatgattcctgcttttacttgttgccggactcccttgagagtctttcccgagcccgcgggcttctcgccggtcatgatctccagatatcacttcgagttggttagactcttaatgaagcactgactctgataccaattgaaagtcacctatgggggggggtgaataggcgaaacctgaaatttataaacttaaacacacactagggccgggcttagcgttagaattaaatccgagtgcgaaagaatgtttcttttgccacgagttgctcaaatgatgcgaatgacgtttggaagcaaactcaaatcaatattggcaaggaaacattagagacaggaaagagggcaaacaaatcaaatggaaatcacacaagtggacacgatgatttgttttaccgaggttcggtaccaaagaacctagtcccccgttgaggaggccacaaaggtcgggtctatttcaaccctttccctctctctgaaacggtcactaagaccgagtgagccttctccttaatcaaacgggtcactaagactccgcaaggaccaccacactcttggtgtctattgcttagctttacaagcacttagaaaaggaatgagaaaggaagaaacgcaatccaagcgacaagagcaacaaaagaacacaaatgatcctctcacaagcccttaggcactagcgttgattttgggaactttgagtggattgattgctttgattgtgtcttgaagtgttgcactttgctcttgcaatgaatgagaaactcagaatgcttggatggctttgaatgaggtggttggagggtatttatagcccccaaccactttctagccgtttctagcgatgggcgcaccagacagtcactgttcactgtccgatgcgcgccacgtcagcgcgtccgttagggtttggagcagttgaccgttggagacgtttgtctttttgctgtaccggacagtccggtgacctctgagttctgcccggcactgttcactactgtagactctgcgcagtcgacagttggcgcgcatggagctgttgctccgctggctcaccggacagtacggtggcacaccggacagtccggtgaattatagtggagcgcgcctggatgaaacccgagagtggctgttgctggctgcctgggctggcgcaccggacactgtccggtgcgccaaatttcagcacactacatgtcttgctccaatctttgattgagtgcctaactgaatttctttcttggtttgtgttgaacctaatacacctgtgataaatgatatctggacaactagttagtccacgtggtttatgttgggcgtcaaccaccaaaaccgattataagaaatgattaagtccatttccctttcaaatatcaggactgtttatgaggcaattacagatagaaaatggatctctgatattaaaggtccactgacagcgggagtcttaacagattatctccaggttgaggataaacatgttttcagtattactcctaatggcatctattcagcaaagactgcttacgaaggtttctttttggggtctgtatttttccctcatcacaagaaaatttggaaaacttgggccttgccaaaatgtcgtttcttcatctggctggttgcacaaaatcgagtctggacagcggatagatttgctaaaagagggctgagtcatcctgagaagtgccccttttgtgatcaagaggatgagactattgattatctcctcgttacctgttctttctccagggaattctggtatctgttgttaaggaaattcggtcagcattctttggctcctcaacttgatgttggctcatatctaggctggtgggaatcggtggggaatattgctactgggctcacaaaaaaggccttgattcccttatcattctgggagcctggaccttttttttccttttctggaatacgcaggagagctgcgcatctttgtattaatagaagaaaagaaaggggggagagaaccccaatacaacacacacaccactagagactaactacggatcaccgactaaaacatggaagaaacacgacccacaccgctgttttaagccaacaactcatcgacttggaggaaggacaaggccttggcaccagtcatggaccagagcaccgcctcttccctagccatcctaagggccatgaccaagctgggattacaaccatcaaaaacacacctattcctatgcttccaaatggtccaagcacctagaatcactaaagaattgaaaccttttctcacaagatccgatgcccgggagctgctagacttccaccacgactcaaaggattcctcatgagctggatacagatcccgcagccccactgaattaagaaaatcaaaccagaactgcttagcaaaaacacacttgaccagcaaatgatttatggtttcagcctcttggtcgcacaaggggcactgctctggtcggtctagccctctttttctgagcctgtcagcagtccagcacctattatgttccacaagccaaataaagatcttgcacttcccaggagcccaagatttccacacccgctctgctggttcgaactgaactgaaccaaggaatagagcattataagcagaactagatgaataatcacctgaagcgctgaatttccataaatgacgataccttattccagctggagcacaacaacatcaagtacttcacaaagttccaggaattcagcgatgactctgactaagattgccctttgcacattggagagccaatggaaattagggagagcatctttgaccaaccgaatgttggcaagacgcaaaggcaccaactcaaacaaagcaggagctatgtccttaatacatctcccctccaaccatctgtccttccagaaaagggtattagctccatcaccgagcttagtaataatggttgcagcaatcagatttttaaccaccttacaaacatgaatgaggaagtctgcccaaggcctactggggtctgttttctgcagccacgaccagcgagctctcaaagcccaacagaggttctttaactcactaatccccagaccacccaactccttgggacgggtaaccttaggccaagccaagaggcagtgaccaccacggaactctttcctacccctccagaggaagcccttcctcagcttatcgattgctttgatggcccaaacaggaaggtcaagtgccagagctgcataaatcatcttagccgtcatgacaaactgcacatgaatagctctaccagccctggtcataagttcagctttccatcctggcaaaaggctggccactctatcaacaatggcctgaacctggtcccttgtgagtttcttgggagacaaaggcaaaccgaggtacttacagggaaaaactgaaatattgcatggcagcaagtcctgtaaacaattcacctcttcttccccacagcagattggaaacacactgctcttctggacattagtccttagacctgaaactgaaccaaataaatgaagaatatccataaccatactgatatccggggcagtaggacatagaaataacactgcatcatccgcatacaacgagatacgatgctgcatattcctagaagaaagaggctgaagaaacccttcctcagaggctcgctgcacaagcagattcaagacatccattacaagaataaacaacataggcgatagaggatcaccctgcctcagtccgcgttgatgcccaatacattcccctggcagaccatttagtaaaattttggtagaagatgaagctaacagcccgcatattatatcacaccagatctgtccaaaacccagttttttcaagacctcgagaagaaaggcccacgataccgagtcaaaagcctttgaaatgtcaagtttgagaaggatacgagcctgcttctgacaatgtaagaatctggtcgtctgctggactagcatgaagttgtcaagaataaaccgtttttttataaaatcggtttgattgggggaaaccatatgttgcagccggtctgctaatctgttagccaacaatttagttaccactttcgcgaaactatgaaccagacttattgggcggaagtctctcacactagtggccccctccaccttgggcagaagagtgatgaatgctgaattcagcgaacccaagtttctgaaatttctggcccaaatgcagtgaatggccgccataaaatcagccatgattaccgaccaacaactcttgtaaaatctaccagtgaacccgtcaggacacggggatttgtccgaagggagggccttaattgtatcccagacttcctcctccgagacaggcgcatccagggcaacgaggtcaaaagatggcatccctagagcatccagatcaactgtaacatctcttacttctgcagttccaagtaacccttgataaaaattaaagaaggctgctgcctttccttcatgggcagtccagatttgcccatcctctgagtgtattgctgcaatgaaattctttttcttatggaaacatagaaacaaatgcgtttttgatgactgcaaccctagtgttaccatgagtcttagagttgttgatgaggaaaggacgcaatgggagattgctggtgccaaggggccctgccatttagctgtacctttagctgagaattaaggagggtctaatggattcatttatgtatgcttcttactggccttctttggccactcccttttcttcttcttaatatattatggggcgcagttctcctgcgctttcgagattttttttttgtcacagaccaatatcattctgatttctgagtatctatgtattaaggtggttttctgttgcaggttagattccatcctcagcgttctgatattcttgc

SEQ ID NO: 676 - DNA, 1586 bp, Zea mays
  Intron number 3 from transcript GRMZM2G409997_T01 (locus G RMZM2G409997) derived from phytozome v7.0 (chr-ID 1; pos 7 066142 to 7067727 reverse strand)
cttagagtaagctttgttaggatgccactgagtaggtccatctgccaccttaggacttgtttgttttgctctcaatccatgtggattgggtgggcttgagtgggtttaaatcctaaacaagtcaaaaccttcataatttttttcaatcccataatccacatgtgattggaataaccgaacaagcccttagacgtagaataaactacaatgttttttatgccatttccaattccaatcattagctgacaccaaagttcatctccaactccaacttaatcagacagcttcattaaacaattcccttcttccgagttctgacccttattcaagtatgaagcctttcctgggttaccttttgaaaataagttgcttcactaacatgtaacatataccctatttttaatatatatttgcaaccttgccctatgacttgtttgagatttggagttggtgatcatttaatttgttttatctggacaatcatgttttgatttcaatgccgttttttatttggcatctggtagtcatgttttaacaacttcctaggaaagtatcgtacctcttttactcaatttctaggcttcaaaatggaggggtatgcaggttcatttgtttctaggaatttatgcttagagtataaagttgtctcagtgttagtgttaacttttctcttttggtggcactgattatagtcttattttctactttgcttgtttagccatcaaggagggaatttggtctgatggttgtgtattatgccaagcgaggtgataagcatcacgctcgtgcaacatttgagaacatgagagcaagaggaatagaacccaatgtgtttgtcttcacaaggtgggtgcattgttactgctgtttagtagttatttcttgttttttcttcatcacatggtaaaatgcaccatggcaacctaaacttacacagctgggccaactaaattgactcactgaaaagaaaaaaaatcattttatactgctaaactaatttaagtaggtcaagagagctttggcacagtacggatatgttatttttgcttgttatgttttggagctctggctcaagttcagagatacacagtgaactttactcttggtaatgccaccaaatgacctgtataaattgctatctgaataaatggtaattttaatatgtaaagaatacttgctgaccgcttgagatgtaactcaattatctacaacattgtttgttagttaagtctataattgacattctgcacaagtttgcattccttgtcaatattttgtgatctgcaaagttcaacaaacaattttaattccaagaatatattaagtcaaggaggttttggcattgtgtataaaggttgtttgagaaatggcttgtgtttcatatccttgatattatgaatttacataatatagtttaatctgaaagatagtttttcaggatcaagcgatagcgtgcgtgcatgagacttagatggcggcttcggaggcagcaacgacaatgttaaaaatagttttttctcacaaaattaaaataactatcttgcttttcaggcattgccagaaatagctcaaaagattacacggtt

SEQ ID NO: 677 - DNA, 1991 bp, Zea mays
  Intron number 2 from transcript GRMZM2G066189_T02 (locus G RMZM2G066189) derived from phytozome v7.0 (chr-ID 6; pos 1 50743172 to 150745162)
gctaggcctgttattgctaaggtaaagttgctctggtaattacatttttttacatataatgaccaaaaatgcatcctattttcttaaaagtagatactacttattttcttgagatctaatagacattatggcttacagtatgtttagtagtgtgcacatgcgcatgttggaacaaattattagtattataattacaacatcatcaaaatcactgatgtaactgatgtgacttttggaaaccattcagctcttctgtataatttcatgtctgtttcagtagaacatgatatgcttcctgatatgcatagacttatcatttttattaccttttatttcttatatttgctccaaaaaaatttcagctacatagagtacaaactcatggatgactgttttttgcttttgtcaattgatcttctagtcttgcagtttggtggcgcttatttatcattggaatgatctgttcagttaatctattgttaatcatgtgaacataatgcagtagagctattagcagaacaagcattattctgctggtagggcacgttatcacttgtaacacataagaaacagagggactcattttaatcaacaatccagtaaacttatgtttaattggctttgctcactaagtcactagtttgccatctgtggggatcactcaaggagccagggctggagttttggtagctgttgcctaggttcaaccatggcataagtctattcaagccactcaactttattacatgtgcacttgatttactttttgtgtgagttatttcttcatatcagtgtttatgctctctttatctagttatttgatctatgtagcttttggtagctaaccttgaatatttaattctctttgctactctgcttttagatttagactagaagcttgttggtacttgtgaatgatttcatccccaccgccacagtggttgtgattggcttcagtagttagatttgttcttttatcagaggatggatcctctatccctgctgggaaatagaatcccttgttgttacctttttttgtttcaataagctattgttttttcctatgtttttttaattcttctgtttattttccttcgagcatcagtgatgttacatccaattaaactcatccttgcactttgagctgcgcggtgaagaaaccattggggaaagttatctgagatgctctcatgcttttctcgtcttgttttattcttctgtttgtattttgtggattttcgaattcttttactttgaatctgtattggtgatgctattattatacatgttaacttttctgcaacctctaaggtgctgaagaataccattatctgctgagatccatgataaattcactaataatttgttgcatcagtttgaacagaaaggggaaagggcttatcgaagttcttatggaagcagaacaggcacacacaatgtcatttatttaaaaatctctacgtctaggaggccaactaatcagatgctaaaagatttggcataagtaaaccaaatatgttggcagatctttttgtggagggggagggtgcatctgtgaaggaacgttacccctttctagtaaagaaaacaatgtgggggatgttccaagattctcctttcatttattttttgtgcggtttggaaaatgaggcttgtgctgttgcatcaatgaagctgtttggctaccctatctacagctgcggaacagtaaaccatctcacaaatgaagtagcagcctgcagcgacagcaaaaaaaggctgccggacggcttgaataagcacaaatcaaaagaagatggtttcatacacatgaatattgcatatttgtgaaactattgtttacctgcatggttttagctcaaaatttctcctatgagggacaaattggagaagccttccatggctgcatatgtgtttcagtgttattttatttgtagtggttttctctaattcataacatgttttaagtaattacatctccactgtaggca

SEQ ID NO: 678 - DNA, 711 bp, Zea mays
  Intron number 8 from transcript GRMZM2G110000_T01 (locus G RMZM2G110000) derived from phytozome v7.0 (chr-ID 1; pos 4 6076922 to 46077632)
gctaagcactctgttcataacgtatgttattttgagctgtatacaatcatgtgaatctggaacttgttatatcagacaactgatctgcagtaggaagaaactgagtctagctcagctactggaaggtgtgggtatacaccctaacctccctggttcaagtctattttaccttgaatctgggtgcctatttgctttgtaatacaaaaatatagtcttgtttgcgagtttccatcgtcatagagtttcaactttgttcttttagtagttctcagcttgaataatacctatttttcggcagaattctgtgccttcttggagggtacattttgattggagcagtttacagatattatttccttggcattcattctgtagaggtaaagcttgtctttcaagagtcctccaatttatatgcctcattcgttttatgttaaattatgtggagtatgatgttataaacttggtaaggtaactttaagagacgtatcaataaatcaaatctgaataataacactttgtaaacattgaacattcccttgaaattgtgatataaagaatcaacctttacttttgctgatatttctactctacaagcagttaaattaggaacccgctccatccattatacttcatgatgcttttgaaccacttgtcttactcatttcttatattgtaggccattccgaacctggaattttggattggtttgcc

SEQ ID NO: 679 - DNA, 28758 bp, Zea mays
  Intron number 1 from transcript GRMZM2G117633_T03 (locus G RMZM2G117633) derived from phytozome v7.0 (chr-ID 10; pos 117027758 to 117056515)
gaagatccaacagagaacctgggcattttcaagtttgtttctcttcccatttcattgctatcatttatataaatgttttattacttattcacctcattgctgacgaggtgcaatagcagttcaaaatgcaactttacaactgcgccataaaacttgttgctcctattttcacacaatattcctcaaactatccgatttagctcagagaaaagaacagggcgtttccaatgtcctccacactacagtaaactaacaaacatccgacggccaccttatctccgacggccagacacccatgtgattcatagtaatagcaaagcagtctaattttagtccatcttctgtatttggtaaacccagtggcagagcacaccccagaaacaaggtatggccgggggaggaagatggacgttgtcacgctgagatgctgcatgttggagttggagagggaggagcggagagagttgccgctgtgccgcatgagcgcaaaggggcgaccacaccgagaagggccaacaaccgcagtggcgcacgccatacaggagcaggagattggagaaggtggagctcagtgtcagagctggcgagccgcgagcacaggctgcggatggagctggagaggagagctataatggtggtgagcacaggctgcggatggagctggagaggagagctagaatggtggtggcaggcgtcgaagaaacaagagtgcggtgcggcgtgcgggtgaagggaaggtatggcgtgagccatatcaggcactccaccgctgggtaaaccccaactagtgtagattaactacatgttcttgtagtccaggccacattcagagcatactaaagatgggtatttatcgcaaaattagccatggcaccttaacgcaccaagttcaggtctgcatcagtcattctttgtaacactccaacggcagctagtcatggaacaaactgttgaagaataagacgcacctaagactatctccatatcatactccctatctcaccgtttatttcaaactctactctatgtaaaacagttctctgctggagatggccagcacatatacatacgagaatctacagagagatcttcacatttctcaaagaacagtgcttccgtactgtctctgctcctcaagcttgcaagtgtccaatgggcgaaattctccgcgagctaatcgctcgctcgatgtctctcacccaacccacgttgtcgattaccactaaacgcaaaagtaggtctgaaatacctcaccttcgggtcaacgctagagccggcggcgacgcgtagtggccgcagctcggcattggggcgccggagggagactgggagagaaaagcaggactcggcctgctgggacgccagcaagcaggcagcacggcagcccgagctaattcctggggtcgtgtcacgagtcacgacccttggccagcgatggaatcaacgcaagcacaagcagagaagaacagaggcaagtgtttcgacggttgaaactgattagattccttttctcattttgcatgtctgccacaagacgcacgagtataatatatataggcacaccatcaactcccctgacctattaattacgatccaagatggcacttatacggcctaagcagcccacaattccattacagactcgattaccatctccataatagcgaaatagaaattgcctgactgacctcattcgaccatcctctcgcaccactcccatttcccacagatctactttaggctgcatcttcagtcatgacatctccccggaccttagataacgcttgtccccaagcgtttgcctccggaaaccttgccttggccactgaataatcctcccatattgcagcttccttaggcaccctagtctatttcaccaacacttgaacaatatctcgattgccctttctcaccatccttcgatccaggatctgctctggctctatacccccttgaaacaaatccaccacagtaggtagctctgagaaaattggagaataacagggcaaaaatggcttcagttgtgacacatgaaagaccggatgtacttgtgcatccccaggtaattccagcttgtatgccaccaccccaatcctcgatatcaccttgaaaggaccaaagtacttaaatgccaatttagggcagggtcggttcaccacagtcttttgtgcataaggttgtaatttcagcaaaaccagatcacccacttgaaactccctgggagttctgcccttgtcagcatactgcttcatgcgaagctgagctcgtgctaactgctcctttaacatgactgaaaaggcattcctttcagcaatccagtcagctatctccctatcttcaattcccaacagttttggtgtaatcagcaatggtgcttcatacccatacaacaccgaagggtgtacactccagcaccgaatgataagtagtattataccagtactcagctaaagcgatccagctcttccacttgttaggttggtcatgcacaacacacctgagatacatttccaagcactgattcacacactcactctgaccatcagtttgagggtgatatgcagtggacattaacaacttcactcccataagttggaatagatttttccaaaaggcaccggtgaaaaccttgtctttgtcagacactatagaccttgggaccccatgcaacttcaccacattctcgagaaatacttgggcaacacctttagcagtaaaagggtgctttagaggaagaaaatgactgtatttcgagaatctatccaccactaccagaatggtatcaaacccttcagactttggtaatccttctatgaaatccatagtcacctcttcccaaataccttgtggaactggtaaaggctgtagcagccctgctgggtgcaccctctcagccttagccttttggcagactgcacattgctgcacatactgtgtcacatcattcttcaaacccttccaccagaacaccttctttaccctctgatatgtggcttgaattctagagtgccccccaactgcactatcatgcagtgctgcaattagtttagtacgcaaggctgaattgcatccgatccagattcagtttgcttttcttataataccttgctgcaaagaaaacccctgctcgtccgggctctgaattaacagttgagtgatcaattgttgtgcctcctcatctgtggcataggagttcactacttcttgaatccatataggttgaatttcagagagaacagacaaccccatcatatgctccctccttgataatgcatccgctactacattctctattccctttttatacaccacctgaaattgcaagcccataagcttggtgaaaggaaaataggcttacaccttttcctatatgaattttggtggttgaattgcccaacacaaataattgaactagctagtttgctctagattatgagttctacaggtgccaaaggttcaacacaaaccaataaaaagtccaagaaagggttcaaataaaaagagcaaaagacaacccaaaggcagccctggtctggcgcaccggactgtccggtgtgccaccggacagtgtccggtgcaccagggaatccaactccaaacttgccaccttcgggaatttgggaggccactccgctataattcaccggactgtccggtgcgccaagcggagcaacggtcgtccacgccaacggtcgtctgcaacgctacagtgcgcgactgcgcgcgcagaagtcagagcaggcgcagaaggcgcaccggacagtcactattcactgtccggtggcccagttgttagaagctccaacggtcggaacccaacggcctggtgacgtggctggcgcaccggactgtccggtgtgccatacgacagcagcctccaccaacggttcttttggtggttggggctataaatacccccaaccaccacacttcaatgcatccaagttttcagccatcaaacctcatacaagagctccagacttcattcaaagacacaaacaagagatcaaatcctctcccaagtccaaagatcactccaatcaaatagtgactagagagagagagacatttgtgttcatttgagctcttgcgcttggattgcttttcttcttccttctttcttgtttccaactcaattgtaatcaaggcaagagagaccaattgtgtggtggtccttgtggggacttagtgtcccgattgattgagaagagaagctcactcggtctaggtgaccgttttgagagaggaaaagggttgaaagagacccggtctttgtgaccacctcaacggggagtaggtttgcaagaaccgaacctcggtaaaacaaatcaccgtgtcatccgccttatttgcttgtgatttgttttcgccctctctttcggactcgtctatatttctaacgctaaccccggcttgtagttgtgcttaacctttataaattttggatttgcctattcaccccccaagataagtcagagatttgtgatatgttttaatcacaaaggcacccctctgcaaatattgtctccacctgtccactgctaggatcagagccaaaaactccttctcataaattgaaagatgtttgttcttctcacctaatgccttgctgatgaaggctattggtctgccttgttgcattagaacagcccccaatcctatatctgatgcatcagtttctactatgaaaggcaagtcaaaccttggtaaagccagaactggagtagaggccataacctgtttcaagttttcaaaagctacctgagcttcttcagaccatgcaaacccttgttgtttttgtaacagccttgtgagaggtttagccaacaacccatagttcttcacaaatcttctgtagtaacctgtgaggccaagaaatcccctaagctcagtgacattcctgagctggggccagttcaacattacttcagttttactagggtcagtagataccccttctcttgaaatcacatgccccagatacttcagttcagatttcataaatgaacatttcttccttttcagataaaactgatgttctctcaacttatccaaaaccagcctgatatgttgcaaatgagcatccatactggaactgtaaataagtatgtcatctaggaaaaccatcacaaattttctgaggaaactctgcaataccaattcatggcacactgaaaactagctggagcattggtgagcccaaatggcatcaccctgaactgataatgaccatggtgtgtcttaaaggcagttttgaactcatcctcagcccccgttcgaaaatggtgataacctgaggtcatgtcaagacttgtgaagaatttagttccagctaattcatccaatatctcctctaccagaggcattggaaatctgttcttaattgtcatgtcattcaattttctgtaatccacacagaatctccaacttccatctttcttttgcactaataacactggagaggcaaaaggactcacactagggactatcgaaccagcaaccaacagctcagacacctgtttttcaatctcagttttgtgatgtggtgaataccggtagggtctggaattcactggtatagaacctggcaaaagtggtatatgatggtcatatggtctagtgggaggcaactaggtgggcacagtaaacacatcctcaaattcttccagaattcctgttagtgtctcatttccagccacatcttcctctcctttaacctcctccaacatcacaaacacccatacttcatatccattcacccacttctccaactacaacacaaacacctgctgcacctccctctttgggtctgcatccccctgtagtctgacctccaccccctgatcacaaaaggttagcaccttgttgatccagtcataatgcattggtctatgttgtttcaaccagtcataccctaatatcacatcataagcctccaatgccaacactctcatggcagttctatagacatgccccctagccttccacttcacctccctgacattttttcacacaccatgatctccccattagctaccttcaccttcacaggaggacagtcttctatgctcaaccccagtttagtcaccattctatgactaataaaagtagtggagctactggaattgaaagggaaatatggtcaaaccttttcctaaatgattttggtggttgaattgcccaacacaaataattggactaactagtttgctctagattataagttctacaggtgccaaaggttcaacataaaccaataagaagtccaagaaagggttcaaataaaaaggagcaaaaccaaccgaaggctgctctggtctggcgcaccggactgtccggtgcaccaccggacagtgtccggtgcaccagggagatccactctgaactcctcagcttcgggtttttggaagagccctccgctataattcaccggactgtccggtgtagcaccggactgtccggtgtaccatgcggagtaacgactacaacgccaacggtcgactgcaaaagtgcacagtaacagtgaacagtgcggaatgcacgcgcagaagtcagagcaggcgccagaaggcgcaccggacagtgaacaggacctgtctggtgcaccaccggactgtccggtggcctagctgtcagaagctccaacggttgaaccctaacggttgggtgacgtggctggcgcaccggacagtgtccgttggcacaccggactgtccggtgcgcccgtcgacagacagcctccccaaccaccacacttcaaggcatccaagttttcagcccacacattcaatacaagagctagtgcatttaatacaagacacaaatagattgaatcaaaatctctccaagtccaaattccactcaaagcaattagtgactagaagagagagttttgccgtgttcttttgagctcttgcgcttggatcgcttttcttcttccccatttcttgttcccaagacatttgtaatcaaagcaagagacaccaattgtgtggtggtccttgtggggactaagtgtcccaattgattgaagagaagagctcactcggtataggtgaccatttgaggaagggaaagggttgaaagagacccggtctttgtgaccacctcaacggggagtaggtttgcaagaaccgaacctcggtaaaacaaatcaccgtgtcacactctttatttgcttgtgatttgttttcgctctctctttcggactcgattttatttctaacgctaaccccggcttgtagttgtgcttaaagtttataaatttcagattagcctattcacccccctctaggtgactttcaggaatcaatcaacataaccaacacccgatcttagatcagagattgcaccctcatgcaaccatcacactctgtcccctttatggcattccaggacaactgatgtaatccttgagagcacctagaggggggtgaataggtgatcctgtaaaacttgaaacttaatgccacaaaacttgattaagagttagcacaataaagccaagtggctagagagaagttcttgcaagacacgataaccacaagaagaacaatcatagatagacacagtggtttatcccgtggttcggccaagttcaacacttgcctactccacgttgtggcgtcccaacagacgagggttgcaatcaacccctctcaagcggtccaaagacctacttgaataccactgtgttttgctttgtttactttatcccgtttgcgaggaatctccacaacttggatcctctcgcccttacactttgatgttcacaaagaagcacggagtaagggagggatgagcaacgcacacaagacacaaaatcagagtgacaatacgcacacaagtcacaactcgagctcacaacacaacccaaagagttctctactctaatggagctctagttgctatcacaaagaatcgaatgcgcggaattggagtcttggtgcttaggaatgcttagagaattcttggtgttctcctccatgcgcctaggggtcccttttatagccccaagtcagctaggagccgttgagagcattccaggaaggcaattcttgccttctgtcgcctggcgcaccggacagtccggtgcaccaccggacactgtccggtgcggatttcttttcttctttggcgaagccgaccgttggcggttcagagccattggcacaccagacagtccggtgctcccttctgaccgttggctctgccacgcgtcgcgcgcggattacgcggccgaccgttggccgggccgactgttggctcaccggacagtccggtgcaccataggacagtccggtgatttatagtcgtacaccgccgtcgaagtcccgagagcggtcagttcgccagagccagcctggcgcaccagacactgtccggtgcaccaccggacactgtccggtgcacccagaccgagcagccttttggctgtacacaaccaacttctccaaaattgtttctcctgtttctagcacttagacacagtacattagtcttcaaatcaatgtactaagtctagaaacatacctttaactttgatttgcacttcttgagtccttggcacaatttaacacttaggcacttgtgttggacacttaatcaccaaaatacttagaaatggcccaatgacacatttccctttgaatccttccactatatgctcttcctcctattctagcttcagcaacacttcatcagttagaactgtgctcatatcctccactgtcaactgatgtacttgagtcactactctcttgggacatttggcttgatgctccagttcaaatttgtctccacatatgaaacatagcccattggcccttctataatatcttaactgtctttccttactcaattcaggattcaggatcccactcctactccccattgcctcagtcttgatccccataaccccttctgacttctcatcttattcttctcggcaatttcctgatataattgagctaatctcatggccttatccactgtcttaggcgtccgtgccatcacttgggactaaattttaggcttcaaccccttcacatagtgggtcacaaacaaagtctcatccaactctgaattatgcaaggtagctgcatatctgatatcattgaaagcctgagagtattcttctaccccatgttgttgttcacattgactaacgctctcatggcctgagggtactcttccaccccaaatttctccctcatcgcatgggtgaattgctcccagtctcccaaaccatgtttcagtttatacacctgcagccacttcaacgcatttccctccatgtgcatcgaggcaatgcttgcccagatccactcgggcacctgataaactgtgaagtattccatacacctatcaaaccagatccctggatcattcccttggaactttggaaacgaccacttcggtagagaatagggtctgaactcccttccttcaccccattgacccctccattctctacctccttccctgccaaaacctccgcccctctcatcccagcgaggaacacggtcttctcgctcagagttggattcgttaccttccaagtccttcgccagcaactcgagtcggagacgcgagacaactttctcggtttcctgcagttgacgagccatcagcgcccgatcctcatcagccttcctctgaccgacctccattgcttccatcttgccagtcaggcgctccaccgccgtcatcacgcgctcccaacactcttctcctttctgctcaacttgcgccatggcttccagaatcagccgcgtttgcaccgacggcttggtagatggcgccgtggtgctctcctccgaagaccaatggctctggtaccacttgtcacgacccttggccagcgtggaatcaccgcgacgtgagacgcaagaacaagcagagaagaacagaggtaagtggttggacagttgaaactgattatattccttttctcattttgcatgtgtcggggaccataattaggggtaccctcaagtctcctaattctcagctggtaacccccatcagcacaaagctgcaaaggcctgatgggtgcgattaagtcagggatcaatccattcgagggactcgatcacgcctcgcctgagcctagcctcgggcaagggcagccgatcccggaggatctccgtctcgcccgaggcccccctccagcgacgaacatacttccggcttgcccgaggccctgtcttcaccaagaagcaaccctgaccaaatcgccgcgccgaccgaccaaatcgcaggagcatttaatgcaaaggtggcctgacaccttttatcctgacgcgcgcccttcagtcgacagagccgaagtgaccgtagtcacttcgccgctccactgaccgacctgacagaaggacagcgccgcctgcgccacaccgactgcagcgccacttgacagagtgaggttgacaggcagttaggcccggcctcaggcaccataggaagctccgctccgcccgacccagggctcgaactcgggctaagccccggaagacggcgaacaccgctccgcccgacccagggctcggactcgggctaagccccggaagacggcgatcaccgctccgcccgacccagggctcggactcgggctaagccccggaagacggcgaacaccgctccgcccgacccagggctcggactcgggctaagcccctgaagacggcgaactccgctccgcccgacccagggctcggacttgggctaagccccggaagacggcaaactccgctccgcccgacccagggctcggacttgggctaggccccggaagacgacgaactccgctcagcccgacccagggctcggacttgggctcagccccagaggacgacgaactccgcttcgcccgaccccagggctcggactcagccctggcctaagtcgacggtctccgcctcgcccgacccaggggctcggactcgaccacggccgcggaagacatactcgacctcgacctcggaggagcctccacatcgcccaacctagggcgcggaccgaccacgtcgataggaggcgccatcattaccctaccccaagctgactcaggctacggggaacaagaccggcgtcccatctggctcgctccgccagataggcaatgatggcgccccgcacgctctgtgacgacggcggctctcagcccccttacggaagcaagaggacgtcagcaaggactcgacagccccgacagctgtcattccgccaggctccagcgctcctccgacggccacgacaccacacgaaccggatgccaaaacctctccggctgccacgacggcatgtacttagggcgctagctctcctccgctagacacgtagcactttgctacaccccccattgtacacctggatcctctccttacgcctataaaaggaaggaccagggccctcttacagagggttggccacgcggggacgaggacgagacaggcgctcgcgcgaggccgctcgctccctctcctgcgtggacgcttgtaaccccctactgcaagcgcacccgacctgggcgcgggacgaacacgaaggccgcgggatttccacctctctcacgcccgtctccggccacctttctccccccttcgcgctcggcctcgcgccgacccatctgggctggggcacgcggcgacatttcactcgtcggcccagggaccccccggtctcgaaacgccgacagttggcgcgccaggtaggggcctgctgcgtgttgacgaacagcttcccgtcaagctccagatgggcagtctccagcaacctctccagcccgggacggtgctccgtttcgggagtcttgagttcatgtccctcgacggcagctacgacatgatcctccttcccccgccgcgcgacagcagcaatggcggccgacagcccgcccgccggcggcagaatcgatgacgtcttccctgcgtggtggaagaacaacattcgagctcaccccgtcctctcccccgccgacggaggaggaggcggggcaaccaaggccaagcaggaggcagcgcctcgtcggctgtcgagcgagtcgacggcgccagcgccccaacggggggcgcgtcgggcgtcgacctcgcatttgagacgaagacgagcgccgtctccccgcaacacgccaattccgagcaaacggacgacgccagcacgctcacgaaaggcttgctggacgtcaccctcgtacctgagacgacggtgcagtcagtccccgacgtgacttcatcaccgcccgtcgaccaagaggtaccgaccgattcccatctcacgcctttcggattcagcctcgacccgccaagcagcttcgctttggcggacgctctcgtagaggcgagtccaaaccctctggggtttcgtatgcggtcaccctgggaccggctgacggacgtctcgacctacgggccctctgggtccgaggaagatgacgcgcccgacttctgttgggacttctccggactcggtaaccccagtgccatgcgggacttcatgaccgcgtgcgactactgccttgccaactgttccgacggtagccgcagcctcggcgacgaggactgcggcccaagccgcgaatgtttccacgtcgatctagggggtccctccgaaggcaaccatcactgtatgccggaggacggtgatctccctaggccggtgcctcgcgttgacatcctacgggagctagttgtggtccccgttcaggcggggggtcatgacccacagctcgagcaaatccgcggggtgcaggccaggctcgacgagggagcaggagcacttgagccgatccgccgggacgtcggacaggaatgggcgggccaacctccggccagagaaatgcgtcatctaccccagggcttccagcaccacatcaccgacaatgtcaggatgaggccgccacccgcttccagtggggtcggccagaacctggctgcagcagcaatgcttctccgtgcgatgccagagccatcaaccaccgagaggcgacgaatccagggagagctcaagaatctcctggaaggcgccgcggtccgacgggccgagagctccgcctcccgaaggcaggggtaccccttggaacatcgcaccgcgacttcccgattcatgcgggaagcctcggtccacaccgggcgcacgcgcaacacagcgcctgcggccccgggtcgcctcggcaacgagcaccatcaccgtgaccgtcgggcccacctcgacgagagggtgcgccgaggctaccaccccaggcgtggaggacgctacgacagcggggaggatcggagtccctcgcccgaaccacccggtccgcaggccttcagccgggccatacgacgggcgccgttcccgacccggttccgacccccgactactatcacaaagtactcgggggagacaagaccggagctgtggctcgcggactaccggctggcctgccaactgggtggaacggacaatgacaacctcatcatccgcaacctctccctgttcctctccgacaccgctcgcgcctggttggagcacctgcctccggggcagatctccaactgggacgacctggtccaagcctttgccggcaatttccagggcacgtacgtgcgccctgggaattcctgggacctccgaagctgccgacagtagccgagagagtctctccgggactacatccggcgattctcgaagcagcgcaccgagctgcccaacatcagtgactcagatgtcatcggcgcgttcctcgccggcaccacttgccgcgacctggtgagcaagctaggtcgcaagacccctaccagggcgagcgagctgatggacatcgccaccaagttctcctctggccaggaggcggtcgaggctatcttccggaaggataagcagccccagggccgcccaccggaagatgcccctgaggcatcaactcagcgcggcgccaagaagaagggcaagaagaagtcgcaagcgaaatgcgacgctgccgacgcggaccttgtcactgccgccgagtacaagaaccctcggaaaccccccggaggtgccaacctcttcgacaagatgctcaaggagccgtgcccctatcaccaggggcccgtcaagcacacccttgaggagtgcgccatgcttcggcgccacttccacagggtcgggccgcccgcggatggtggcagggctcgcgacgacgacaagaaggaagatcaccaggcaggagagttccccgaggtccgtgactgcttcatgatctacggtgggcaagcggcgaacgcctcggctcggcaccgcaagcaagagcgtcgggaggtctgttcggtgaaggtggcggcgccagtctacctagactggtccgacaagcccatcaccttcgaccaagccgaccaccctgaccacgtgccgagcccgggaaaatacccgctcgttgtcgaccccatcgtcggcgacgtcaggctcaccaaggtcctcatggacggaggcagcagcctcaacatcatctacgccgagaccctcgggctcctgcgcgtcgatctgtcctcggtccgggcaggcgctgcgcctttccatgggatcatccccgggaagcgcgtctagcccctcggacaactcgaccttctcgtctgcttcggaacgccctccaacttccgaagggagaccctaacgttcaaggtggtcgagttccgaggaacctaccacgcggtactgggaaggccatgctacgcgaagttcatggccgtccccaactacacctacctcaagctcaagatgtcgggccccaacggggtcatcaccgtcggccccacgtacaaacacgcgttcgaatgcgacgtggagtgcgtggagtacgccgaggccctcgtcgccgacctggagagcctctctaaggaggtggcagacgcgaagcgtcatgccgacaacttcgagccagcggagacggttaagtccgtccccctcgaccctagcagcgacgcctccaagcaagtccggatcggctccgagctcgatcccaaataggaagcagtgctcgtcgactttctccgcgcgaacgccgacgtcttcgcgtggagtccctcggacatgcccggcataccgagggatgtcgccgagcactcgctggatatccgagccagagcccgacccgtcaagcagcctctgcgccgattcgacgaagaaaagcgcagagccataggcgaggagatccacaagctaatggcggcagggttcatcaaaaaggtattccatcccgaatggcttgccaaccctgtgcttgtgagaaagaaaggagggaaatggcggatgtgtgtagactacactggtctaaacaaagcatgtccgaaggttccctaccctctgcctcgcatcgatcaaatcgtggattccactgctgggtgcaaaaccctgtctttcctcgatgcctactcagggtatcaccaaatcaggatgaaagagtccgatcagctcgcgacttctttcatcacacccttcggcatgtactgctatgtcaccatgctgttcggcttgaggaatgcgggtgcgacgtaccagcggtgcatgaaccatgtgttcggtgaacacattggccggacgatcgaggcctacgtcgatgacatcgcagtcaagataaggaaagcctccgacctcctttccgaccttgaactgacattctgatgtctcaaggcgaaaggcgtgaagctcaatcccgaaaagtgtgtcttcggggtaccccgaggcatgctcttgggattcatcgtctccgagcggggcatcaaagccaacccggagaacatcgcagccatcaccagcatggggcccatcaaggacttgaaaggcgtacagagagtcatgggatgtcttgcggccctgagccgtttcatctcgcacctcggcgaaagaggcctacccctgtaccgcctcttaaggaaggccgagtgcttcacttggacccctaagaccgaggatgccctcggggacctgaaggcattcctcacgaacgcgtccgtcctggtgccccccgttgctggaggagcaggctaaaatagcctcggggcgaataacggttcccccggaagccttctcccgagacctgcaccaaccctccgtcaagatcgacgacacgcccgagcccgaggtacccttggctcggtccgaggtacccacaattcggcccgaggtacccttggcccccgagggtgaggcattgcgcgtcgaggaggagcgaagcggggtcacgcctaatcgaaactggcagaccccgtacctgcaatatctccaccgaggagagctacccctcgaccgagccaaagctcggcggttggcgcggcgcgccaagtcgttcgtcttgctgggagatgggaaggagctccaccaccgcagcccctcaggcatcctccagtgatgcatttccatcgccaaaggccaggagcccctacgagaggtgtgaaagcgaaataggctttaaaccttttcctaaatgattttggtggttgaatgaccaacacaactaattggactaactagtttgctctagatcacatattctacaggtgtcaaagattcaacataaaaccaataaaaagaacaagacaaaggtcaaaagaaaggagcaaaaagaaaccgaagtgctccctggtcgggcgcaccggactgtccggtgtgccaccggacagtgtccggtgcaccaccggactgtgtccgatgcaccagggaggattgccttcaaactcttcaccttcgggtttctcaggcgcagcccgctataattcaccggactgtccggtgcaccaccggacagtgtccggtgctccagagtgaagcggctccgaactggccagcttcgggaaaatgggaggccgctccgctataattcaccggactgtccggtgttgcaccggactgtccggtgtgccagcggagcaacggctacctcgcgccaacggtcgactctgacagtaaacagtgcggaacagttctcgtggcagaagtcagagcagagagtcagagaggcaccggactgtccggtgtgcaccggactgtccggtgccacatgaggacaaagcctccaacggtcgaccagctccaacctcaacggataggatgacgtggccggcgcaccggacatgtccggtgtgcaccggactgtccggtgcgtccatcgccaacagacttcatcaacggctagtttttggatggtggctataaataccaccccaaccggccacttcaaggtgtgggagttcaagcaacattccaagtcacctagttgacatactcaagccctcccaaccacatatattcattgatccatcctatacacaagatttagtccactacaaccaacacaagtgccacaaaagagagagcaagcaattgagagctactcaattgagtttagccctagcgcagtgtgagattcattgagagatagtgtgatctacatctttgtgttcatttgcgcgtggagttttgactcccattcaaacttcctccaaagtgttggaggcttgtaaaagctagcaagagacaccaaagattgtggtggtccttgtgggatcgagagtgatccttgagaagaagaagagctcaccgatccttgtgtgatcgggggagagagggaaagggttgaaaaagacccgtccttaagtggactcctcaacggggactaggccttcgagggccgaacctcggtaaaacaaatcacccgtgtccattgtgtttattgcttgtgatttgtttgttttcccttgctctaagtttttcttgcacctttatttgctaatatcatttggtgttgcttcaagttaaatttccatttagtgaagcaacacattgcaagaaagaacttgtcctagtgctcttctcatctaaggcttcttgctttgttattctataacttactagttgaattgatttatcacttccgcattatttagcaatacccttttcaagcaagaacttagtttctattctccgatatttgtatatcttgttctaaccactaatcaagggatctagttgggggataaagttttaatttacaggtgtcgcctatccaccccccctctaggcgactttcaaggtgcactcgggggctcgcgaccatcgcgcagcaccccgagcccttgttggagacgccttccgacaaggtttctaatggccggcggcggtggccgacgccacccgaattgtccacacccgcgaagggcgtcagttctacgcaaggcagacccaccccttgcggaagacccccgggggctacacacacccctgggaagggccgctcgtcatcgccaaatttctgaagcccggaacaaacaaactggccgacagtcaaggcgaggtctgcaccagcacttggaacgtctaacagctacgtcgcctctacccttaagatgctttcaagttgttcgtatacctcgctcccacgcaagttttagtcatcaaggaagggtcagccttgcctcggtagagcccgaccctccctcgggggctaaaaaggggggaacccctctgcgtcaaaattttcaatcgaaaaggcttttgcgttcccctcgctatgtcggaagcaggaccccaaggagcgaacgcgggtgcatgtaagtggcaaggctgactgagccaagggactcctacgcctctgggttacggacacctcactcgtcacccaccacgaaaagtgactcctacttggggaagccacccagttactgacgggcggggccggacacgcaaaatgaaaggaaaaggggcatgactttatgcaacgataataaagtgttcaggcctcagtggccgcaaaaagacacacgtgcatccaacagaaactgctccgacagagttaggcgtcgcccggggaaggaggcgcgccttcggcttcgcccccgccctcggcaaagtccatcccggcttcggacgacggcgcgggcgggaagatctctgcctcgaaggtggtcgccagcactgcgctcggacccgcggcggccgcgtcgagcctctggacttctgccagggcagcttcatcttcgtcaggaaggcaatacccctcgctgacccgctccaggtccacgacatagtgggaagcgagcacggcgaaggcccgcctgacgccgtggtgtagcgcctcgcggagtctgccgcgcacatgatcgcccaaggcctgcaggcgactttcaggggagcttcctgagggacgtcgccgaagccaaggacacggcagaagtccgagccggccttggacatggccgcatggtcggcctccctctgctcagccgccccggcaagcgcctcagcaagcgccttggcggactcatcaagggcggactcgagctctgcgaacagccagaacgaaagatctcaaacacaagcggaggaaacaagctgaaacgaaaaccgaaaatggccagggcgtacctccggctcgggtacgctgctccgagactgcaacctgggctacggctaggtcggctgcaagggctccagcccggctttcggccttggcagctcggccccgagattggtctccctcattggcgacctggtcgaactccggctgctgtcgtcgcacctctacgtgtgccgctgcagcctctgtgcgtgctgctgccgcctcggctctcagatcggtgcagagcaaccgaaggtccgccacctcggcgccctgctgagagaggcgcgcagtagccccggcgagcgaggtcctcagggatcgcagcgagccccagacgtcgacctcgtggcggatgaacgacgacttggcggcgctcagatccgtcagatcctgagggaaggaagcggggcgtcacaaaagacgccttggtcaaaaaaaaaggtatgcctgaaaccattacctagaggattttggggacgtccctgcagaaaacctccagcgacgacccgagcgaccccaccgttgcttcggcacactcgcggagctcgtcccaagactgctcctcccattcatcgtcaagaacgaagaagggatccgaggcctcacgggtccggaaccggagcaactggcaccgaccctcgaagctctgccgcacagcgacaaggctgccgctcggcgggacggatcgcgtttccacaccccctcctccgaggcaccgagcgccgacgcctcggccatctcagcgtcggcagcaacaggtcgctccccgactgggacggcagcggcttcagtagcaataggtgccagcaccgccggcacgtccggtggggccggggccatgtccacgtcagccgcctcctctagcacgatggccgcctcggcagaagagccgacctcgggaactcgctccacggcgactggtgccgcctgagccccctgttgtggagcgccatgcgagaaggtcagctgaacagcaaggcccggagcggcaccggctgcggaagctgacgccgtcttaagggcctttcggggagccagatcggtcaggccatggcttcgcttgctgaggaggaaagaaaagtcgcggtcgggacatacgaatggaaagctaggacgaagacattccaagatacttacccgctccgggccatgatcaaccgtgcctgaggggaggtctctcggatctcgacccccaaaggcgccgccgaggtctgcctcgccggcagcttcggcaccacccttgcttcggacaccctggacgcccaggagacggactgcccaggcactgccacggcaacctgagggtcgcactacagcgctgccggcgtgggcgacgactctcggggaacagatgcctcggcctgactccccggggtcacctcaactcccccggccgaggggtcaagtaccctctcggtctgcccccgctcttcgggccgggacctcggcgtcccgactccggggactgacagcgctagcccactcgggggctggcttgacggctcctggcctaacctcaagcccgggctgaagccgaggcgggaggccatgtcgtcatcctcgtcatcatcttcatcatcgtcgtcgtcgtcaggcgtttccggcgacggctccctcgggagcccctccctctcctgccgacgacggagcttttccaaggcgtctcgagcccgcatccgctcgcgggcccgggccttctccgtgtccttctttttcttcttctcctccgcggcaacccgccgcgctgctcggtccaccgcatcctctgggacccatggcagggaaggcttgtgccaccctacctcctggagacggatggaaatcccgaccgtaagaaccaggggcaacccgacgcaagaagaaggaaggagcggacactcaccagagtcacgcacccttggtcggggcgcatcaagggctgggaaagggcgctagcgtccggtttccccagcgcgacggccacccgcccgtggagaacgtcgacgggaagaggatccgaggacatccgcgagccctccaagtcagcctccggtgtcatctcccaaagcggcaaccgccgcttcgccaagggaagcaccctccggcggtggatggtggcaatcactcccgcggcggtgagtccccctttccgcagcgcctccagggccttgagaaggggctcgaggttcttctgtctgtcgtgcggggtcccgtggcgccaagcatcggcggcgacggtaaccactcgctgggaaaacggcgggagcatctcgccgtcgttccggaggtagaaccacctgcgctgccaccctttattcgaggacgcaaggatggcaggaatgtacagcgatgctcacaactgcctcagctggaggatgcagccgccggcccacactgccgcgcggtctcttctctcccccgtcggcgaagcaaaaagctccgcagaaaagatatgagtccacaagtcccagtgggggggcgatccccaaatacccttcgcacaccgctacgaagatggcggcttgcgagatagagttggggctgaggttgtgcaactccaccccatagttgtgcaggatcgcccgcataaagcggctcgccggcacaccgaatccccgctcatgaaaggagacaaagctcacgacgtaccccggcggcggggacggagcagctccgcccgcagggggaatccactccggccgcctctcatcagagagagggcggagtaaaccctcagcaacaagatcctccaggtcacccgtcgtgaccgtggagaaaggccatggatcgcgcggcgagatgatggtcacccggtcggccatcaccgagcaaaaggggtggcggcggaaaagactgggtgagcggtttccttttctctggctaaacctctcgggttgcgaaaacctaagggggaggcgagaagcggagcaaagaaccatcgccagaccctcctccaagtatataaaggccaggacgagacccgttcaacgtttcgtccggacccgccgcgggattcaaaaaacccaaagcgaaacggccgctcctcgaacggctcgcgcacgcgcaacgaccgcctcgcgaaccactcgccccgtcgcattaacccagcggcgggacaggcggcgcctctggcaggagaagcaagcgacgcttcgccttcgccataatgaccgcatcaaaaaaggtacgccacgtcgttcaatttcgtatccttttccttttcctctttctctctcttacaacagggaccgggaaagggggataccccgaaaaggatccttcttcgtgaaggaaccaggctccgagcctccctactgatcagaggttcgaaggctggcccctcggaggggttcgacagccgcctcagagcgcgtgggctccacgcccactactggtcagaggttcgaaggccggcccctcggaagggttcaacgaccgcctcaggctactcaggctctgcgcccactactgatcaggggttcgaaggctggccctcgaagggttcacagccgccttagacacagagcgagggatgaccatgggtacgttcgatacataaccaaggctcgggctacgctcccgaggtaccctaggacatttctgagaccagcgggaatgatcttgtaacggaatcccatcagagggaggcatcgagccctcggaccccgtcgataggggaccgggtccggcagatcacccgcaggtacttttgggcgcgcctctgggcctctagccgacccctagcaaatggggcacggacgtccgctcggattacccgccagcagctcaccggagacaccatgttcggcgccctccgagggcaacatggcgctttcccccctcctccttgcggaaaggcgacgcaggggcgtatgtaaaaaagtcgagtctgcccctgaccgtcctctcgccctgtgcagaggctcgggggctgctctcgcaaacccggctccggccaaaccgttgacagcgtcaacataccagcccgagaacttgggacccgaccgtgcacccgggaacgaccagaccagccaaagcattgtgcaaggcattaagacctcggaggagtcaaaccactcctccgaggcctcgggggctacacccggcgggtgcgctcgcgcgcatccaccggaacaaaacgcaaccgagaaaggctggtccccttgcaaaaaagtgcgacgaaagcctccaagcgagtgctaacactcccttcgaggctcgggggctactgtcggggaccataattaggggtaccctcaagtctcctaattctcagctggtaacccccatcagcacaaagctgcaaaggcctgatgggtgcgattaagtcagggatcggtccattcgagggactcgatcacgcctcgcccgagcctagcctcgggcaagggcagccgaccccggaggatctccgtctcgcccgaggcccccctctagcgacgaacatacttcctgcttgcccgaggccctgtcttcgccaagaagcaaccctgaccaaatcgccgcgccgaccgaccaaatcgcaggagcatttaatgtaaaggtggcctgacacctttatcctgacgcgcgcccttcagtcgacagagccgaagtgaccgcagtcacatcgccgctccactgaccgacctgacagaaggacagcgccgcctgtgccgcaccgactgcagcgccacttgacagagtgaggctgacatgcagtcaagcccgacctcaggcaccataggaagctccgctccgcccgacccaaggctcggactcgggctaagccccggaagacggcgaacaccgctccgcccgacccagggctcggactcgggataagccccggaagacggcgaacaccgctccgcccgacccagggctcggacttgggctaagccccggaagacggcgaacaccgctccgcctgacccagggctcggactcgggctaagcccctgaagacggcgaactccgctcccacccgacccagggctcggacttgggctaagccccagaagacggcgaactccgctccgcccgacccagggctcggacttgggctaggccccggaagacggcgaactccgctctgcccgacccagggctcggacttgggctcagccccagaggacgacgaactccgcttcgcccgaccccagggctcggactcagccctggcctcagccgacggtctccgcctcgcccgacctaggggctcggactcgaccacggccgcggaagacagactcgacctcgacctcggaggagcctccacatcgcccaacctagggcgcggaccgaccacgtcgacaggaggcgccatcattaccctaccccaagctgactcaggctacggggaacaagaccggcgtcccatctggctcgctccgctagataggcaatgatggcgccccgcacgctctgtgacgacggcgactctcagcccccttatagaagcaagaggacgtcagcaaggactcgacagccccgacagctgtccttccgccaggctccaacgctcctccgacggccacgacaccacatgaaccgggtgccaaaacctctccggctgccacgacggcatgtacttagggcgctagctctcctccgctagacacgtagcactttgctacaccccccattgtacacctggatcctctccttacgcctataaaaggaaggaccaggccctcttacagagggttggccgcgcggggacgaggacgagacaggcgctcgtgcgaggccgctcgctccctctcctgcgtggacgcttgtaaccccctactgcaagcgcacccgacctgggcgcgggacgaacacgaaggtcgcgggatttccacctctctcacgcccgtcttcggccacctttctccccccttcgcgccgacccatctgggctggggcacgcggcgacatttcactcgtcggcccagggaccccccggtctcgaaacgccgacagcatgtctggcacaagacgccgagtacaatatatataggcacaccatcaactcccctgacctattatttacgacccaagatgacactaatacggcctaagcagcccacaactccattacagactcgattaccaactccataatagcgaaatagaaattgcctgactgaccttattcgaccatcctctcgtgccactcccatttcccacagatccactttaggctgcatcttcagtcatgacaggtcggcagctggcggagctagggttcgctgccgcggatgcgacgaggccgcgcaggaggttaccgccatgctgccctatctagccgaaaaaggaaaatgaataatgactagtttagtaactctattttacctaatgattttcatttaactttgtaaaataaaatcattttaaaaaacgagattttgaaactagccttaaaaagaaaaatggcaaatgccgtgccgctgacccattgaggaattgacgcctctcgatgctgtccgttcgcaggcgggccacgccgtccgttggatcacggggcgggacccggtccacagataattgaggcgggcgggacggctacgtcagcactcagcagccggcaggccgcaacccgcaaccgtggcaccctgcgcgcctcgaacaatctcgtttcgtactcccgtttcgtttctccccctcgctccccagccgcatctcgagcgcgctctcggcggccgtccacgtctcggtcccacgcgctgctcgcttgctcgccggcggggcgcgagggcggtggcctaggtcgtacccagcgaagcgcggcgtgccacgaggtgggggttggctcgggaccatcgagcctgtccggaattttttctggcgcgtgatttgccgctgagaaagcatcggaaaagggaacggggatttactctcagtagccgcgagctacccgccgtcccctggtcgattcagtgcaaatcctccaggtttctgggtcttaatggcttcctcaggtaatcctccgcgctaatttgtgggattgataggagagagcctccattttctcccacctagtacttattcgattattttctctgggtctacctgtgaatgtaatggtttggtatcaggtgatccataagtggcttagaatgaatggagttatggtgcaatttcattggaatcctttttttcgcgatctggtgttgttcaaataaaacaaaaaatatatgttctattttcgagccaagtaaatgccctgactgtctgtttatctttatctttggcaaagatagtaccttctgtggggagttgtcaatagttcttaattttttacgcaatgaatatttattaactagccaagttgtggatcacatggaaattccaactgtttgcaaggggccttgttaactgctctcatgtaattacctacaacaactttaatcgatctccccactacctactcataacgaagagagaattaataggtagggatgacaggatttgaacctgtgacattttgtacccaaaacaaatgtgctaccaagctgcgacagccaacacttgagatttgtatcaaatctgttagaaaacaagtaaaattgaggaaagacgatcctctcaccaaatagcaaagacatgtttttcccccatttctcaaacagttcatgaaatactatattgtttgtttgatattgaagtagactacaaaggttataggattctaatggagacccaatgtggtataatagagatcgtcataaaaaaaactcgacctgcgggggtagggggggggggggtaacaaggttattaaaacggtaaaaagttggaacgctcatgggtgaattttgacttttaaacgtttaaacaaagtttaaacgtagttttaaacaacacaggaaaaataccaatacatcattatttcagacaataatatgaagttaaataccaaaatagagaggttagtggcttaccaaaacttcacccatgagctggattgaacctcaaaagtaactaatagactgagcccaaaagtagctaaccggtctaaaatgcataaaacactgtgttttacagtttagaacgccaaaacgcggtttcaatctctaattaaagttttgacatttaaacgtagtttaaacatcgtttaaacgtagttttaataacactgggggggtaagacaaccccaggcattgtattaagaagaagacttcacacaggtcgagaaaaacccggacctctacccaatccatacacagcggcaccatagcccatgtgagaacgacaacgacctggggatttttttaaccactgaaattcgctcatacggggagttgaacccaagacctgatgagtgctactcagaccacctaaccaactcagctagaggctctttcactacagagatcgtcatcagtagttgtaagttgtatcctgtatcagggactatagaaatacggaaaaacaactccctcaggtacatgtgtcaatggaatcctctaactaagtgtgctaccttagtgctgttatttgaggcgataaactgctatcctaattcttcatttaggatcaaggttgttaggtatatcaatgtggatcctagaaccttatactatgatctatcaagccaaaacgatactgaacccaccatgcatccgaaattgtatagcaccctatcctacatagaagtttcatataatcccatatcggtaagatcttgcataggattccgatcctaaataataatggatatatatgacttttggaatgatttgatcgtgataaattatgaggggagttaaggcttttttatggttgatccttgagtccttgaccacagttcgcatcctaattctatccgatcctaacaatcttgttttgaattgtgctatgctagagcatggcaaaggctatttctgtgagatatgccatgtgtgtatatataaaggggatgcagtctcactgaactttccttgtaagcgtagtcatataaaaactcggccggggagggaaagaccgccctcccggtattatattaagaagagacagaaacatggtcccggtcgagaaaaccctcaaaccctggccccccatcactaacaggccgatcaactgtccactctgcaatggcccagccggtgggtggcgcgcaggagtctgatccccaagagcgggcggggcacggcgagaggattttttttaaccaagcccgaaattcgccctcgagggagatcgaatctgggacctggatgtgctactcgaaagccttaaccatcacgctagtggccctttcgcgtaaccgtagtcatatgcccatcattaattgtcgctaaggaatattttgcatcaagagttacatgtctgcaggatgttgtatattcgtgttgctatgtcttgtttctggattgtttttacgtgatatatactgatataataatgtcttctcatgcagatatctctgttgatattcgtcctgacataaactca

SEQ ID NO: 680 - DNA, 2863 bp, Zea mays
  Intron number 9 from transcript GRMZM2G048804_T02 (locus G RMZM2G048804) derived from phytozome v7.0 (chr-ID 8; pos 1 5973945 to 15976807)
gatttgattcagttcatcaagtatcttttaccaacgtaagtttgtcctattctttccgtatcttttatcaatgcaacaatgttctctttcagactggacaaattgttgcaggacaagtgttgcagttttgtgtgaatagttttgaattgtcatatgcaaatagattgcctaattttgtgtgaccttctaacctaagattcatgttttgctcttgatgaattgatataaaacagttagggctcctatggaacataggaaattataggaattttaaaggattgagttcctaaggaaaaaaaatcctagaaggcttctttggctgatacaaaaacaaagcaaaatttccctaggatttaatcccatgacaaggattccataggaaaaataaaaagagcttcaacctcatggaaaatttcctggcaccaaaagcaaacgctcccgcgtcggctagagagcctcgtgagcacagagcaacaacagctagttccaaacttaaaaaaggatatttcaaacttcttacttcctttactttttcctatggtgtagccaaacaagccttctatcatcttcctttggttttgaatcctacagggttagaaaatacatccattctatttcctgagtttttcctattcccgtgtttctgaaatcctatgttccaaaggagtccttagtaacatacatgtcctggtttctttaggaagacctaattaaggaataaggacaatggtcattcttgtggcttggtggatctggaagtaggggtgacaatgagctctcaatttacactataagatttaaggatcggattaggatcagaccatatttctattcatttttgaactaagatttatttagggcactaccattttgtgaagaagcatttggatcgcgatccattaccacccctatctggaagcatagaaatgcttgtgttttttatggtgtttctccaaacacgagttcagttatacaacatatccatgaggatgccaggctttgagaattggtaggtgctaaggccttgagaaggttgtggccttgatttgaggatgtcttagttgtttccctggaagtggtggcagtttctgtttttgttggtgctctatttttctaggctcatgaggcctttttttttccttttctgtatagtttttttgtttgtttttggttttcttctttctttgggtgtttatcaccttgtactttgtcttctttagaccttttctctcttcttaatataatgatgcgcagttctcctgcgtcttcgataaaaaacatatagtttttgtgaatagttataatcgaaggcaatttttgtttttattttgatgtatacaaggccataaagtaagttaatatgccaattggacaacttctctttcttttgttttagaatagttttacttctctcttgacaacttcatactttcatagtgagctttagttaatgtttttttggtttagtgcaaactttttggtttgtttaatgatttgatgttgtatcgtgttttgctttctgaagcatatatttgaataccagtatataacaaatcgatgctatcatgttctattatttgatctcttctgtgctatgttctcctatactaagagatcaataattcgttagtgtccgagtgttcaggaattgtcctctttaggaaaaaaaagttatgccaacatgttgcagtggttcaaaaatcatcacacaatcatgtaggtagtgcacaattcaataaatatgcacaaatttaatctcaaattcatcttgcatgcggacattgagaaaacgtttttttatgcggaatatagtagggaagccactatgtgcatttcatttaaaaggaagaaccaaagttgcagaataagaaaaacaaaacctgtgttttaaggcacaaaaaaacacaggacaattcatcttttgcatttcaagattctctcatcattttgggagcttgtactttatggaatcatcggaataaatgcatttttggtggctgcaatccaagtatgtctttaactctcagagctgctgatgagaaaagaagaagatgggaagtagctggtgcaaaaggcctcgctcatttggttgcacccttggtagagccttaggaagacttgagtagtttgtttttttaatccccttatggatctatatttgtatgtctgtttggcctccgtaaggaggttcttctgtagacctttgttttttcttttttttttctgcttaatatataatggggcgcatgcgcgttcgagaaaaaaaattatacagagaaatttgacgtagggtagtgaattacaaactattttacggaggctagacctttgttttttcttttattctgcttaatatataatggggcgcatgcgcgttcgagaaaaaaaaattatacagggaaatttgacgtagggtagtgaattacaaactattttaaaaacactactgtcagtatgtgatgaacagtgccagattgactgctcctttattttgatcttgacatctagggaaaaaatttgaaactgagttgttgtagctatatttaactttatatgcactataaacaaaattattttcatgaattttgaaatattgctgcacgaaaaatttcactaatgggggatattcatgcttctggatacaaaatctgtgctattaagagattcgctaggtattttctttatgacaaactggtcctgcactttgaacatattaatgtcacgatatatgcttgaaataatcttaatggaacatttcatgttgtttcaacttttgttacttggtatatgtcatggaatatattttttgtttccagcactctagcttttgtaacatgtgacgctgtttacagacttgagagag

SEQ ID NO: 681 - DNA, 6733 bp, Zea mays
  Intron number 5 from transcript GRMZM2G432050_T01 (locus G RMZM2G432050) derived from phytozome v7.0 (chr-ID 10; pos 12636762 to 12643494)
gtataaccaaagaaaaagaggtaagtgtagctaaatgttattttgtttcctttttctttttgagatggacctaaaatgctatgtgatgaaataaaggtctaaaataattgaaatgtattgtttggggtctgttgcttaggttagagttctaactaatttgtagaagtaaatatgctagtaacaataattgttatcaatgcaaacaaaacaagatatattggttggggatggaaagagtagattgtagtggaaggaggtcaaagggtgagggacgagtgctcgtaggtgacacatggtgcccgtgcggtgggatgttgggcagtagcgatgatgcaccaccatggctaagaggtggttttgtccacaatgaggtggaggaactagagtagcaatctaagtagaagtgttcttgtggatccactggcattactgaggcgttgatgatagtttatgggataccaacttcaagtagtagcatatatgtagtaggtggaggtcaattgaagttatgtatctacgatcctcatagagaaggatgtagtatggtatcccgcggcatacaagggtggtgcttgcaagtggagttgtagtgaggtcaaacaacttgttgaagacgatgttgaatttggatctaggtcgaccggctatcgtcttgctgggttgcttggcgggcaggttggtcggtagcctcgcctcgctgtgttgcttggtgggcaggatgatgatagtttatgagataccaacttcaagtagtagcatctatgtagtaggtggaggtcaattgaagttctgtatctacgatcctcgtagagaaggatgaagtatggtatcccacgacatataagggtggtgcttgcaagtggagctgtagtgaggtcaaacaacctgttgaagacgatgttgaatttggatctaggtcgaccggttgttgtcttgttgagttgcttggtgggtaggtaggtcagcagccttgcctcgctgggttgcttggcgggcaggttggtcggcggcctcgcctcgctgggttgttcggcgggtagcctcgcctcgcctcgctgggttgtttggtcggcaaccccaagaatgaggccctttttttggactaaacattcggttgattcgatccacattcgttgtcaaacaatgtttcaaatcagatgtaagaataggcactattatttggtttttctaagtacaagagaagcttgaatgccgaaaggggtaaaaagaattaacatgcataaaaagaaatcgatggatgagaactgattcttccttcgcaacacgtattacccaagaccgtgttcataagtgcagttctgaccaggctgggccttggatggcgctggaaactaggttttacgggggccgaccttatcgtactgggatttggacaaatgtaacctcgttatgcgggaagagttcattctcatgctacctttcggacgtaaggtttggggtcgacctaaaccgcccgagctctgccgcgcatctgacttcgaggggtgagcagtgcctggttgaggctgttggctgctaccctgaacaccatgagcttgtggccgacggcttgggtctggggaacactggcatggagagcttccatgggccctcctcaccgcggctggctacctcatgcatgatgaggttgtcgaaggcgcaactcattaatggcttgcttgctggtctccacccgcacgtcgagggatttgggactcaatcccctcaagtttgtgcggtggaatgccgtggccgccacatacgctgggggaccaggatgcagaccagcatagtggactgcgctagccttgctcctggcccatgggaccccaccaatggtttctagggaggtcatgttggcaaatgcataaccttcgtcattatgtcttcccgaaacccattggcgggtagaagtcacccccccgcgagtgggggaggtgactctacctactatggagcatagtggctgatagccggcgactgccttgctcacgtttggctgctggatggtaatggccaccttgaataccaccgtgctctgccagggatcgccgcctgcgatctcgggcatgacagagcctgggtgagagcctacggtcgtaacctcaagcaaagtgctcgagactcccatcgccttcttcctagtggcgtcggcttggctgttgtggcgccgcttgagatcgacgacgagcatcttgagatgttgcttttcagccttttgccatacgccggcgaatcctcctcgattgagcttgttgggaaactgtcgtggtttttggaactgtgggacaataaggtttgtgtttggcagggggtgttagcgtggactcacttcgaatggtgagctacgaggggcttgagggtggatttgaggcgagttggttatattggttcaggtcggagccctagtctagtgcaatactgattgtagtattgcttagagcgtgaggagtttggtctccagcttctgggcctcgcagcacctgttgtctcgtctgttgggtcatgcttctaggccttgttgcccctatggagtcgtatgtcgaggcgtgcgtcgttgtacctctcgcatggcgtcgcgtcttgtccgccttcctgtagctacttcgatttagacgtagcggtgcttggtgggctttgttgagtcagctcaaggagtggtttagggatgtcttcagtacaacttcatcttccatcatcccctagcgtcatctttcatcatgcgcagacgcatatttggtacgtcgtattgtcgtgtcccctccaatgtatgggtcactgtagagaccctaatgctgaggtttctatggtcggggtcgtccggtcccactggtcagcagggttatgtattcgtcgtcatgtttgacagagacccctcggtatcgcttccaccgtccggacatggctcggtatgtcccatcgtgctgatgtggcttgatagtactaggtcagttagctgtcgtcttgctgggttgctcgacgggcaggttggtcggcagcctcatctcgctgggttgctcggcgggcaggttggttggtaacctcacctcgttgggttgctcagcgggcaggttgctctgctgccttaccacgctaggttgtttggtgggcaggttgctcggtagcctcgcctcgctgggttgctcagcgaatatttgtttggtgggtaggttgctcggcagcctcgcctccctgggttgctcgatagacatttgttcagtgggctgatcggcttggtgggctgtccccgggtggccttttgggccttcccatcgaactgctttgtaggcgaactgttttttggaggtctgccttctttgggtaccctgttttgtctcttaactaaggctgatgaagatgtggtgaatgtcgaagaattggcattctgcatcattgaagagagactactcatgcaccatgtttttagggcactcctaggccatcaaggatgcttgttagcaagtgtgtggaagttaatcactaggagacgaagttgttagcaaggagggactctatgaggttcgatagtatcacatatgaagttgagggttaggcatgtcaatcaaagtagatgatgttgccatccatggatcatccttaggtggttatacttttgtatggagtaagtgatgaaatgtagctctaacacctcttgcaccacttgtctgtcaatatgagtggtgaggtgtagttgatgttgaaggcattgagtcatcaccatactgatgagctttgttgcgtttagagttgttatagtgttggtgcacctgtcacacacatgaaaactggttcgaaggcataggaaaaaaagacatggatggttgaagcatgtcacgtccctatgtgcacacatgtcagcagggatttgaagtttagcttcaagtaagagagtggatgagggaacgaggaaaggtaagtatgggtagttctaaataggaaagagcatatagaaagggggagaaagagtgactaagggttacctatctatgggggatgactacataactatgactacataactcttggaggggtgagatccacctatagtacttaccacctaggccaatagtggggcagcatgtggtgtctactacaagtgatatgaggaaaggacaaggtggatgatagaagggaagatttgtaccatctacatttgtccaaccatgaggcaccatgtgggcatggtgtggctcgcttggcgatgacgtggaggaatccaaatgaaggggcaatttgggttgtggcgttgggttggaaggatgatagaagggagagtatgccagggccaaaaatggattgtagtgatttttcctcttctctcacttgtatatatatatttggataaactattcctaggttgtaaacgacccatgaaaaggaactcactgcaggtccctagggtgtggtctcataattaagttagatatggctttaacctatgtagcttatatttttttctaaaaagttgtgatttagggttcttttatggattgttgttacaaccatggtatggggaaacaatgtcgcaccatagtcatcgttagattcaatgacattagcatgaccgcatgttagcaccatccaatgacatctccatgtccttattagctcaacatatatcttttggggttccattagttcttttgtgtagatgctcacttgctaaaagctcatcaagaggtcccatctaagtcacatgtgagaaagcgcttggggtagacatccacattgcatatcttgtattgccttgtcatgtgcaaggtatatacattattacgctcctgatgataaatgaaaagatgcgtaccacaccttttcattattgggatccaatgtccttggatattatgggtgatgatgtcaaccttaagggccacaactagtgccttgatcttggtgacagctatgggaggttgtcactattgttggccattgatgagtgtagattgattaagcaatcatagatttattggaaggaggttagagggtgacacaagagaggctaacaacctaagaaatagcaacataagagaggctaacaacctaagaaatagcagtgacacaagagaggatggcatgcaacacatggatagataggaagaaaagcatcatagagggatacaaggctaggagatctaaggccttcacttctttgtttcaatagtacaagatatctatttatttatattccctatgacttgactcctgttcaatcttgaggtaaggtacttgtagatttgaactctcctttttttgaacaatctctatttcctaaattgattatcccttttatatttctaattgaagttgaattaactactacttagggtaggaccgattggctagggggacccatccactcttggcatgcttccttcacaagcacctggctaggtcttagcttggctactctgaacccaccaccttgggtaccaattgaactcataacataataattatactctttgtataagtgtattagcattgtagataattatcctatataacaagctttttactagcaaattgctctcaaacaatctcacaaagcagagcaaaatagtgaaaaaattatggtgcatcacataatatctatagagcttgtatcatgcagagaaagatcaacaatgaacatgggtttaaagaatcacgacatagcttttgcttcaaagccacgctgttgccaaatttctatcgaagcaataaacaaccaaaggatacaagtcatcaggtgataatacttctaaacatttgtgcaactatggtttccaattttggttgttactaaagatccagtgaatctcactgaaaatgcaaaaaatgatatcatttcttattcaatgacactggttacttaacatttttatattaagcaaaattggtttctaaatctaaaattatattaaagtttgtgtgtttcttaatcttactagtatcctatgtggagctcaacaacatgagcttcgtatgacacattacattaaagcatatcaaataaattatagaagaaatggttaccatgatagggagatattatctcttccacctaataaaatcaatactttaaagggtcatgtactagacaactcacaaatttcaagatgtttcaaatagtaaatgacacgaaagcatgagaaatacaaatgttcacttgaaaaattagaatgtttcatcattgtgccttttcagtcctgtttaacaacaatttggttgacatgatcattattttcttcctttgtattgctacaagttgctctattgtattggcttcagaagaagcacttacctaaattatatttttagcacatcaaaatgttgtttattggttcatcaaataatggcaagttactattgtgatactcacaccattctatctttctattctgttagaaccataaataaatgaatgccaaaacatgaatgggttaaagaatggttccattcttattctaatagtttgaatcttgtactcgtgacactatcttttcatttcactatgtagagtcataaacaaatgcaaatattgaataaaaattgtttaggctgcagaatgatggaaaaaaacccatgtgaagcttttgtctcggaagacaccattgaaaattgtcacctactagatttgtattttgtccctttcaccactgcagtgtttttgttttataaatttctaatggtttctaatggcgagttggttgcaggctactcaagaaatcctaagttcttcgaagtctgg

SEQ ID NO: 682 - DNA, 4691 bp, Zea mays
  Intron number 1 from transcript GRMZM5G890190_T01 (locus G RMZM5G890190) derived from phytozome v7.0 (chr-ID 7; pos 1 56205234 to 156209924 reverse strand)
acgctgcggaggagcacaagggtaaactgggtttctactcttatatttgcttgttgtgcatgtcatagggaggttgccttcatcatccatacgaaaatgcaccaaaatttaactcacaataacaatgggataggacaatgcccgcaacaaatttactatcgattcattgactctgacgaactctgggttattctgctcccaaccgcagagttcgtcattctttcttccatgatggaagctcgtagtttgttacttcacggcagctaagtgttcagagtttttttaccatgaaaataggaagttctcaaaacacgtcactgaatctgaacacccagagttcatggcgccgagctcggccacgtcggcgccgtgtcagccttcgtcgccagcggagcacgcgcctcggcgccaagatctgtggcgccgaacaaagggtccaaaaaagagattaagtcatccaagtgtctaaacgtgaatatttatcaagaaaagggctaaaatacaaaaaattcgggtaagccttcccccgcaaataccgagaggttgcttcgaaccgctacctggtgactcagtgagacagctctcaccactgcactaggtctaagcagtcattctaacttgaatagaagtacgtagcaaggattgctgctacacatttcctttatatgaacaatatttggttctggttatcctctaggacgtctgcttcatatggtattacagtactttgtggaacttgattgtttggtggaacaacctggtgtatcaagactaggtttagtaaccatgggccctttttagtgatgtaagattgcccatgtagggttgtggtaaccacgtttcatcaattctatgtctccttggttcagtttttcctactgaagcgtctagaatttaggctgcaagcattctactattctacatgctctggtaatagtccatttagttctattaagttttgagattttggcaggaactaattatgaaacctcattttcactatcagcctgagaagacagtttattgatcatcactttatgtttgttcttgcctattataacatttggctggagacacctgaattaaaatttcaatggtagatttagccttgttttcctataaaagaaagaggtactgatatgtggttatgccacaacttattaatgctaaagcggggatttactagaacatttttttcttcttatggttaggttcattatataggatagcatttcgaggccatataaatcagtaaacacaaaaaaagaagtggggacagcattctcagaattttacttctatcacttctcctttgcatcagtggaaagttgacaactatatggttggatgcatttttggcctctgaaatacagttgctgaatgttcttcagtaagcagaattagctgtaacatctgtcatatactaacctagacatgttcttgcaattgcataacccattaaagaaaatgcccatattttggaaacctgacgctgttatccattttagtaattaaaccaaaacatggccttctccctactattgtcaattagggctggaaggagactgagcttgtgccacttggtgatcaaatcgatctttgtgcttagtctcctgtactgccatgagtgcgagtcacctgcagtatgcagatcacaacgaagtgctagcttctacatgaccatctattccaggatacccatactatgtcccctttggagatagaggtgactggaatccatgatatctggccgcagcatgatgtcatctgtttgcttcatgcaaccaatcgatcaatgtattaaaaatgtcctgtgtaaagaagcttgtctttcccttatccattctgtgagctgtaagcctacacttaagcatatgtagctaccaagttatgtacctttgtcgttggctttagctgaaatggagacaaactgcagttgcagtttggtgtgcttgtatgagttagtcttccttggggttctttggtattttttttacaaaataacttccatgaggtcattaggggaacagaatagggtggtactggatttataagtttttaggtagtgggatctatttgggtgttatccaaatcatgctaaaagggaggaaagaccatgtagttctgtgtggcaagtatttagtaaataaataggtagactctttgctttcatgtgataggtcgggtgcatgatttccccattcgcacggcacaatgttgctctccggcctaccaatgctcctagctcatctttctaccaatgccagttgtggcgtcacagctcatgtgcttccaatgcgtcacgcctcacggctcctggaagtgccacgtctgccataagctcaatcaacctgctgcgccaccacttggattgtcatgtaggtgagcaccttgccacaacacatacataatacaaactttagaaaacccttggtcgaggagaaaacccccgaaccccttcccacccatgcatagtggtaccgtagcccatgtgagaacgactggtcgagggaatttttttaaccccagtctaaaatttgctccacggggagtcgaactcgggatctcaggagtgctactcagaccatctaaccaactcagctaaaaggcccgtaagcaattggattgaattagatatggacatatctgttatggccgcagctagattgagggagcgtaaggggggcggttgggggccttgcccacggcttagcaagagggaagggttttctttaatttttgctcgattagattaatacatccctctccttatgtagagaggcttacttgaccccctaagaaaatatcctaaccaaaacaatctaacttatctctttccttataatcgctccattttttatttgtcgcgttttagttcaaaaatgaactagcgagcgacaaatattcgagaacggaggtagtactaactaaccaaatcaatctaacttatttcttttctaacaaaccaaaccaatctaatctgcccaacactgttcacaagatattgtttatgcgttatagtgccacgtgggcccctggaccggctccacttttcataacactactccacccttccaagacagctcatccttgagttgtgctagtggccatggttgcagatgtcgatattcccatggagacgcggggcttacaagggcaccattcagacgatggagttgcatgtgtacaaccacctggatcacatgtcgtagtctggtgggtgttgagacctgggagtgttcgcaacgacgactagcagagatgccctcctagaggctggttatggaatgcagcagtgctatgtagtgcacacctgttgggttgagggagcacaaggggcccgactggtgccttgttcatggtcaagcaagtgggaatggttttccttcttagtcttgctttattagattgacacatcttctctacttatatagagaggcttaattgacccctaagaaaatatcctaaccaaatcaatctaattaatcactttccttatcctaactaaccaaatcttttctcatactaactaaccaaaccagtcaaacttatcttttttgtaacaaaccagaccaatctaatctgcacggcactgctcacaaggtgcccccccctgcctccacctgccataaaatcttatatcggatgcgtcttggtccgatttggatatggatcttgatctatccctccccttctcaaaattagatgatactattagttatctgaatcgttatgctccctttgtcattgatattcaatatgtgcaaactttaacatatgctcttcggttggctggttaaattttatagaatgggtgatgtcatttcacaggtttttgttaataaatcaatgtgagggaactagggaaggcgctaggcgctctctggcctccaccttgagtttatatgtgccttggcatgtgccatacacttaacaagagatcagtgggcctaccggcctagcattggacagaaaggcctgtcaaagcagcccaagcccaagtctgaatggccagtccttattcttatgctcccaccttatccaattgctgattgatgctctcccctcccctgttcggtggccccagttccaatccagccatgctcgtcaccactgatgttcccgcctccctgccttggtggatctgcatgtggaggccactgaggacatcatgtctgctggccttcggcatggtacccccacctgctcagcttggataaaatagcaagtagctgtcattaacaagttgaagatgttgacataactctgccttttctgttatgctttcaatggaaaatatattaagcatcacaaactttactgttgcaccatagtttcatatttgtgaaatagcttgatggcaatcgttattcctatccaaaaaatccaattagtttatgtatcacagtcacagctttgatcagtgaaagggttagcttacgcttagattcctttagctgagttttcatcatctgtgtgctattccatatcaagctgtgagctaatgttttcttattagttagtgcctgaaaaactgaactgttctcaaatgttttaacgtttgaatttactgcatcattctcattaatttttatggtggctttaatggaaaaaaacagtttgcatgtatcatatcaatggacctttgtggttaattaggctaatatctagaagtggtgcaatttctgcag

SEQ ID NO: 683 - DNA, 368 bp, Zea mays; identical to SEQ ID NO: 605
  Intron number 2 from transcript GRMZM2G081826_T01 (locus G RMZM2G081826) derived from phytozome v7.0 (chr-ID 5; pos 1 83482142 to 183482509 reverse strand)

SEQ ID NO: 684 - DNA, 30219 bp, Zea mays
  Intron number 4 from transcript GRMZM2G125785_T01 (locus G RMZM2G125785) derived from phytozome v7.0 (chr-ID 5; pos 8 0852408 to 80882626)
gggaggtagacgcgacaggtggtttcattttatagtgtcgacgtttcgaccccgggggggtccctggaccgatgagtaaaattgtcgctacgtgtcccagcccagatgggttggcgcgagatggaacacaagggggaaaacacggctcgtgttatcctgcgccagggggatgcgctcgtagtaggggttacaagcgttcgcgagggggagagagtgagcctgttcgtcagcccgtcctcccgcgcgaccctctcgcatgagggccctggaccttccttttatagatgcaaggagagggtccaggtgtacaatgggggtgtagctatgcgctaatgtgtccggcagagaggtgcctgagccctgtgtacatgccaacgtggctgttggagaggtgctagagccctgtgtacgcggtatcgtggccgtcggaggagcgcttgagccctatagaagcacagctgtcggggctgctgggatcttactgacgtctccttgcttccgtagggggctgagaaccaccgtcgtcatggacgcacgcagggagccatcattacttgttaccggggcgagcctggatgggacatcggtcttgttcccccatagcctgagctagctaggggtagggtaatgatgtatcccctatggcgtggtcggtccgagcccaaggtcgggcgaggcggagactcctcctgaggccgaggctggggtcgggcgaggacgcgattcctcccgaggtcgaggttgaggccgagccatggggtcgggcgaggcggagaccaccctctgaggccgaggctgaggccgagccttggggtcgggcgaggcagagtcctccttccgaggccgaggttgaggccgagccctagggtcgggcgaggcagagtcctcctttcgaggccgaggttgaggccgagccctggggtcgggtgaggcggagcttcctgttgcgcctgaggctgaacttggttgttgccagcctcactctggcgggtggcacagcagtcggagcagggcgagcgatgctgttttcctgttaggtcggtcagtggaagggcgaagtgactgcggtcacttcgaccttgccgactgaggcacgtgtgtcaggataaggcgtcaggcgatcctcgcattgaatgcgcctgcgatacagtcgattggtgatgcgatttggccaaggttgcttcacgacgaagcctgcccgagctggggttcgggcgagtcgagggtgcgtccgttgcttgaagaggcccttgggcgaggcgagaattcgtctaggactactgttcccgcccgaggctgggctcgggcggggcgagatcgcgtcccttgagcagacgaagccttgacctgaatcgtacccatcagtctctacaacttgtgctgatggtggttaccagccgtgtttaagagtgttggggttacccctaattacggtacccgacagtagcccccgagcctcaaagggagtgatggtactcgcttggaggctttgccgcacttttttgcgaggggaccggcctttctcggttacactttgttccagtgggtgcgcgcaagcgcacccgccgggtgtagccctcgaggcctcggaggagtggtttgactcctctgaggtcttaatgtctttcgtgatgcctcgaccggtctggttgttccctcatgcgacttgattgtagcccgggtgcatggtcaggttccgagttttcaggctggtttgttgacgctgtcaacggtttggccgtagccgggtttgcgggagcagcccccgagcctctgcacggagcgagaggacgatcaaggactgtctcgacttttatcatacgcccctttgtcgcctttccgcaaggaggaaggggggaaagcgccatgttgccctcggagggcgccgaacatggtgtctccagtgagttgctaacgggtgatccgagtggacgctcgtgccctgttcgataagggtcggctagtggcccagaggcgcgctccaaaagtacctgcaggtgatttgccggacccggacccgttcgataaggtccgagggctccatgcctccctctgatgggattccgttacaaaatcgctcctgctggtctcggaaatgtcctagggtacctcgggagcatagcccgagcctcgaccatgtaacggacgtacccagagtcatccctcgctctgcgtgctctggggcggctgtcgaacccttctgaggggccagccttcgaacccctgatcagtagtgggtgcggagcccgagtgctttgaggcggctgtcgaaccctttcgaggggccagccttcgaacccctgatcagtaggagggctcgaggcccgcttccttcacggagaaggatccctttcgaaatatcccctttcccggtccctgtagcaagagagagaaaggggaagaggaaaaggatatgaatttaaatggcgtggcgcaccttttttgacgcggtcatcatggcggaggtgaaacgatgccgcttcgcctgccaaaggtgttgcttgccctgccgaggagttaatgcgacgggacgggcggttcgtggggcggtcgcgtgtgcgagccgttcgaggaacggaacacgggcgcgtcgtcttcacgccgtgggagagggctcccctgctgctccaggaggggacgtgagcttgtagacgatttgactgccgcttccgctcgcctgctgccgccattactgccggtccacttttggccatatcaaccgtcgcgcctcctcctgcggctgactgacccgtgatcgatgtgctcgattggcactattgggccacgcgcagggttgcctcaagtcacggcaccggttccgcagtcgagaatgtgcggcattggcgaaagtggcggtgcggttgcttgcacgtagtaactggcgcgccggttacatgacgtgtgggcctgggcctccatgctggatgcgacgaagccgaaggggtgcgcccccgcggtgcggttgtacgccacctgcatggcggtccgccctttcgaccgctggttttcggcgaggatggaggagtacttgtaaccgcggggcggttacacgctccgcgtgtggcggtttggcttcttccgtttcggggcagcttgcatgacgcgtgggacccagcccccatgtcgtagggggaggaccctggagcacgtcggtgaagactttgtccatgacgcttgaggatgcgagtagggagagctgcctttaaaaagggggtcgatcccccgggcggtagccatgccttcgtactcccctcatgcatcgtgcccttccaccttccgagcccccggatggggagcacccgcgttgccttcgtcttgctgccgttggaggagcgcgacctcgcggggttagcacctttcagccatcgctcggcttcaaggattttcatcatgcagcccggctgcattccctcaccaatggtcatctaggatgatgaccaccagttcgatggtggggagaagcaagccgggctgcagcctctgccccgccctcagcttcaaggatcttcatcatccttgctggggaggagggcggggaggtcgggccctcctccgcgtgagcagcggcccgctccttccctcagcgatcgggggaaagggcgttcgcttgtccggggagctggcagttgcacgtgtctggctccccggtctgagcggctctggcgctgcttccggtgccacctcccaccgctggggcgaagcgtggctgcccgtccgccacatgggtgtcggttgcgccgtgtgcgggccagccacgtccaggccctccctgcgccaccggctgcacaacacgtcgtacgccgtgagggcggtactcgtgttctgggacggtcccgttctcgttctcgtggcgagaacgggagtgaggacctaccagtgcgctttggggcggccgccgcttgctggtgcggtgttggtgggcaggtggctgccgttgtcggtgctgaggtggtggcagccacctagagtttgttgtcccacaggccctctggtgtggaggttgttcatacccgtaggagtggaaccagagttccgtttgtaatggcaccctgagtgtgggtgtatgttcattgtggctgtcggggcctgaacatctaggtattttggcgtgaagccgtgtttcttcctcatttcgagcaccaggactcgcctgtcggctagctgaaccgcttaaccgagtgtgagtttccctgcgcggaaggtgacgagtgaggtatccgtatcccggaggcgtaggagtccctcggctcggttgaccttgccgctcaaggcttcccttgctcagtttgagaaccttcggccgctctgcgatgagctggagccggaggctgcggtgtcagcgtggacagaagcggagtcggctcaaaaagaggcttcgtcggcccaggagcgggtggcttcccaggccgaggaggtgcagcggcggcggctggagcctggctaggtcatccgtgagcgggaccaacctcggagtcacgctgtcgaggccgtgagccggggtgatgtcctcgggggacaactggctgaggctacggagcggccggtcgaggtgtctgctcgggtcgggacccttgcggagaccctggctacgatggcccaagcgtggtgctggtgtcctccttcgaggtggagatccttccggccgtgtcgccgtccgaggccgggccagatctcgccgaaagtggaaacgacgccgagggtgctgctgctccctctgtccagtggcggacccaggattttatggcagcctaggctgtgagccagtgctgcggtgcaggcctgcggtagcctgggctttgcatccttttttgaactggggtcaaatacatgctccatacagacgcgcgaggcagcccaggccgtggcctgtggtgcctgtgtactgcgtccgcctctgcctctgtcgatgtctgaacctgcaggaacagtttgtctgtagtatgcttatgtttttcgcggccgctgaggcccaaacatattattgtcgtgttataaagttgtgtttcctttcgtcttgtttcgagtatcaggacttgttcgtcggtagcagaatcgcttatccgagcgagagttacttttcgcgtaaggtgatgagtgaggtatccatatctcggaggcataggagtccctcggctcggtcggccttgccgcttatgtgcactcttactcgtccgtaggattctgttaccgatatagtcaagaaggcacaaaaatcgttctggcagaaaagttttcgagcgttaggacttgtaccgcagcagaatcgcttattcgagcgtgagttacttatcacggaaggtgatgagtgaggtatccgtatcccggaggcgtaggagtccctcggctcggtcggccttgccgcttacgtgtactctcgtcgttttcaggatcccactatcgaagctgtcgaaaagcgcgaaagatgttctggcaaaatgactttttccgaggaaaattttgaagcagagggggttcccccttctagtccccgagggagggtctggctttgccgaggcaaggctgacccttccttgacggttagactttatttgtgtatgtatagaaaactaggtatatgaacgatttgaaaacatcttaagggtaaaagcgacgtagttgtcggatgttccaagcattgctgtagacctcgccttgatcgttggccagcttgtatgttccgggcttcaaaatcttggcgatgatgaacggcccttcccagggaggagtaagcttgtggcgccctcgggcgtcttgccgcagccgaagtaccaagtctcccaccttgaagcctcggggtcgaacccctcgggcatggtagcgtcgtagagactgctgataccgcgccgagtgtagtaaggccacgtcccgagcctcttcgagctggtccagtgagtctgctcggctggtctggttgcttcggttgtcgtatgcctttgtcctcggggaaccgtattctaagtctgtgggcaagatagcctcggccccatagactagaaagaacggcgagaaacctgtggctcggcttggcgtcgtcctcagactccagaccaccgagggtagctctttcatccatcgcttgccgaacttgttgaggtcgttgtagatcctcggtttaagtccctgcagaatcataccgttggcatgctccacctgcccattcgtcatggggtgagctacggtggcccagtccacacggatgtggtggtcctcgcagaagtccagaaacttcttcctagtgaactaggtgccattgtcggtgatgatggagttcgggaccccaaagcgatggatgttgttggtgaagaacgccaccgcctgctcggacctgatgctggttaggggtcggacctcgatccacttggagaatttgtcgatggcgaccagcaggtgcaagaagcccccgggtgccttctgcaagggaccgacgaggtccagaccccacacagcaaacgactaggtgatgggtattgtatgcagggcctgagcgggcaggtgcgtctatatcgcatagaattggcacccttggcaagagcgtacaattctagtggcatcggccactgcggtcggccagtagaagccttgtcggaaggcgttcccaatgagggctcgaggtgctgcatggtggccgcaagcccccgagtgtatttcttgtaatagctcctgtccttcggcgacggatatgcatcgttggagaatgcctgaggggctgtggtggtagagctccttttcatcacccagtaagacgaacgacttggcgcgccgcgtcagtcgccgagctttgaccttgtcgaggggtagctctcctcggtggagatattgcaggtacggggtctgccaatttcgattaggcatgaccccattccgctcttcctcgacgcgcagtgcctcaccctcggcggccaaggatacctcaggctgggccgaggcctcctctgggtggatcgaggcctcctcgggctcgggtgtgtcgtcggtcttgacggagggttgatgtatgtctctagaaaagacgtccgagggaaccgttgtccgccccgaggctattttagccagctcatccgcagtcttgttgtaccgtcgagcgatgtggttgagctcgagcccgtagaacttgtcttccaggcgccgaacttcgtcgcagtaggcctccatcttccggccgcggcagtgggagttcttcatgacttggtcaatgacaagctacgagtcgccacgagcgtcgaggtgccgaacccctagctcgatggcgatgcgcaacccattaaccagagcttcgtactcggccatgttgtttgacgtcgggaaatggaggcgcaacacgtagcggagatgcttcccgaggggtgagatgaagagcaggcccgcgccggctcctgttttcatcagcgacccatcgaagtacatggtcaagagttccggttggatcggagttgttggtaattgggtgtcgacccattcagccacgaagtccgccaagacttgggacttgatggccttccgaggagcgaacgagattgtctcgcacatgatctccaccgcccactttgctatcctacccgaggcctctcggcactggatgatctcccccagggggaaggatgacaccgcagtcaccggatgagactcgaagtagtgtcgcaactttcgtcgcgtcagaattactgcgtacagtagcttctgaatttgcgggtagcggatcttggtctcggatagcacttcactgatgaagtagaccgacctctagacgagcagtgcatgcccttcttctcgtctctcgactacgatcgcggcgctgatcacctgagtggttgctgaaagggaaatgtgcccttgggccatttctaagtattttggtgattgagtgccaacgcaagcgcttttgtgttgatctatgcaatgtggtagacaaagtgcaaatcatgtcgaaaggtacgtttctagacttagtacattgttttatggactaatgtattgtgtctaagtgctggaaacaggacagattgaattggaaatgagatggctatgttctgccagagtcaactcggtctgggtgcaccagactgtccggtggtgcaccggacagtgtccggtgcgccaggctgggtcaggcgaactcgctgctctcgggaaatgattaacggcgtacggctataattcaccggactgtccggtgtgccaacggtcgccgggccaacggtcagccgcttaatccgggcgcgacgcgtggccgagccaacggctagaagggggtaccggacagtgtccggtgcgccaacggctccaaggctgccaacagtcggtttcgccaaataaggaaggaaatccgcaccggacagtgtccggtggtgcaccggactgtccagcgcgccaggcgacaaaaggcaagaattgccttcccagattgctctcaacggctcctagctgccttggggctataaaagggacccctaggcgcatggaggagatcatccaagcattccttgagcatacttgatcactcacacttcatttttgcgcacttgttcgacattctagtgatttgagctccgttctagtgtgctagtctttagagcttaagtctgggtcttgtgtgtgcgtatttgctgtgatctttgtgtcttgtgtgagttgctaatccctcccttactccgtgcttctttgtgaacttcaagtgtaagggcgagaggctccaagttgtggagattcctcgcgaacgagataaagaaaagcaagcaaaacatcgtggtattcaagtgggtctttggaccgcttgagaggggttgattgcaaccctcgtccgttgggacgccacaacgtggagtaggcaagcgttggtcttggccgaaccacgggataaccaccgtgccatctctgtgattgatctcttgtggttattgtgttttgttgagactcctctctagccacttggcgattattgtgctaacgcttaaccaagtttttgtggcttaagtttcaagtttcacaggatcacctattcacccccctctaggtgcccacatttggtatcggagccgttctcttcaagaaagggactaaccgcccgaagagatggatcctaaggggaagggaatcgtgatcaatgacaaggagaaggagtcattcgtcaacgagccaaaggatgacaagcctaccgactcgggctcgggccacagacgcaaggatgggaagaagaagaagacaaggcgcatcaaggagatcgtctactacgacgacagcgacgagtccgcttcttcccaaaaggacaatgaagacaacgactacaagagaaggaaaccggttaattcgaacttttcttttgactactctcgtattccgcaaagtactaatgctcatttgctctccattccacttggcaaacctcctcactttgatggagaggactacggattttggagccacaaaatgcgtagtcacctgttctctctccatccaagcatatgggagagtgtggaaagtggaatgaaatttgatagctcggatagtcctatgtttatcaatgaacagattcatagaaatgcacaagctactactgtgttattagcctctttgtgcagggacgagtaccataaggtgagcggcttggacaatgccaagcagatctgggacaccctcaagatctctcatgaggggaacgacgtcaccttactcaccaagatggagttgatggagggcgagcttggaagattcgcgatgataaggggcgaggagccaacccaaacatacaaccggcttaagacccttatcaacaaaataaggagctacggaagcacatgatggacggatcacgacgtcgtccgcctaatgctaaggtcctttactgtacttgatccacatttggtgaacaatatttgtgaaaatcctaggtacaccaagatgtcgcccgaagaagtccttgggaaattcgtgagcgggcgaatgatgatcaaggaggcgagatatgtggacgacccgttgaacggtccaatccaggagcctcaacccattgctctcaaggcaacaaggagcaaggaggcgctacctagcaaagtggcgcaagttgaggcggccgggctcaatgatgaagagatggccctcatcatcaagcgcttcaagacggcgctaaagcgttgcaagggacagccaagcaagaccaagacaaaggggaagcgttcatgcttcaaatgcggtaagattggtcattttattgctaactgtcccgataatgaaagtgaccaggaacaagggagcaagagggagaagaagaaggcatacaagaaggctaagggcgaggcacaccttggcaaggagtgggactcggattgttcgtcatccgactctgaaaatgaaggactcaccgccaccgccttcaacaagtcaccccttttcccccaacgagcgtcacacatgcctcatggcgaaggagaagaaggtatgtactcgagacagtactacttatgattcttctagtgatgatgagtatagtgatgaagaaatagattactctagtttgttcaagggattggatagaactaaaatagataagatcaatgaattgattgatgccttgaatgaaaaggatagactcttagagaaacaagaagaccttttatatgaagagcatgataaatttgttagtgcacaaaattcacttgctctagaagttaaaagaaatgaaatgctctctagtgaattgtctacctgtcatgacgctatctctagcttaaagagaattaacaatgatttaaatgctaaactagaagtagcaaataaatctaactcttgtgtagaacatgttgtaatttgcactaggtgtaaagattttattgttgatgcttgtagtgaacacctagattgcatttctaaattaaatgatgaagtagctagtcttaatgcccaacttaagactagcaaaagtgaatttgagaaattaaaatttgcaagggatgcctacacgattggtagacacccctcaattaaggatggacttggcttcaagagggaagctaagaacttgacaagccataaggctcccatctccgacaaggagaaagggaaggcccctatggctagtagtgctaaaaagaaccatgcttttatataccatgataggagacgatctagaaatgcttacaggagttgtaatgcttatgatgcgtttgattctcatgccatgtttgcttctagttcttcctatatgcatggtagaaatatgcctagaaagaatattgctcatgctcctaggaaagttaatgaatcttctacaatatatcatgcttgcaatgcttcatttgctatttgtagaatggataggaaggtgattgctaggaagttaggggcaagatgcaagggagataaaacttgcatttgggtccctaagacaattgtgactaaccttgtaggacccaacaagagttgggtacctaagacccaagcctaaatttgccttgcaggtttatgcatccgggggcacaagctggattatcgacaacggatgcacaaaccacatgactggggaaaagaggatgttctcttcctacgtcaagaacaaggatccccaagattcaataatattcggtgatgggaaccaaggcaaggtaaaagggctaggtaaaattgctatttcatccaagcactctatttccaatgtgtttttagttgagtcgcttggatataatttgttatctgttagtcaattatgcaatatgggatataattgtctattcacaaatgtagatgtgtctgtctttagaaggtgtgatggttcactagcttttaagggtgtactagacgacaaactttatttggttgattttgcaaaagaagaggccggtctagatgcatgcttaattgctaagacttgcatgggctggttgtggcatcgccgcttagcacatgtggggatgaagaaccttcacaaacttctaaagggagaacacgtgataggtctaaataacgtacatttcgaaaaagatagaccttgtgcagcttgtcaagcagggaaacaggtgggaggctctcatcacaccaaaaatgtgatgaccacatcaaaacctttggaaatccttcatatggacctcttcggactcgtcgccgatctaagtataggaggaagtaagtatggtcttgttatagttgatgatttttcccgcttcacttgggtattctttctgcaggataaatctgaaacccaagggaccctcaagcgcttcctcaggagagctcaaaatgagtttgagctcaaggtgaaaaagataaggagcgacaacgggtccgagttcaagaaccttcaagtggaggagttccttgaggaggaagggatcaagcacgagttctccgctccctacacaccacaacaaaatggtgtggtagagaggaagaacaggacgctcatcgatatggcgaggactatgcttggagagttcaagacccccgagcgtttttggtcggaagccatgaacatggcttgccacgccatcaaccgggtctaccttcaccgcctcctcaagaagacttcgtatgagctgctaactggtaacaaacccaatgtgtcttattttcgtgtatttgggagcaagtgctatattcttgtgaagaaaggtagaacttttaaatttgctcccaaagctgtagaagggtttttattaggttatgactcaaatacaaaggcgtatagggtcttcaacaaatcatcgggtttggttgaagtctctagcaatgttgtatttgatgagactaatggctctccaagagagcaagtcgttgatcttaatgatatagatgaagaagacgttccaactgccgcaatgcgcaccatggcgattggcgatgtgcgaccacaggaacaattggagcaagatcaaccttcttcctcaacaatggtgcatcccccaactcaagacgatgaacaggttcatcaggaggaggcgtgtgatcaagggggagcacaagatgatcatatgacggaggaagaagcacaatcggcacctccaacccaagttcgagcgacgattcaaagggatcatcctgtcgaccaaattttgggtgatattagcaagggagtaactactcggtctagattagtcaatttttgtgagcactactcctttgtctcttctattgagcctttcagggtagaagaggccttgctagatccggactgggtgttggccatgcaggaggagctaaacaatttcaagcgtaatgaagtttggacactggtgcctcgtcccaagcaaaacgttgtgggaaccaagtgggtgttccgcaacaaacaggacgagcacggggtggtgacgaggaacaaggctcgacttgtggcaaaaggttatgcccaagtcgcaggtttggactttgaggagactttcgctcctgtggctagactagaatcaattcatatcttgctagcatatgccgctcaccattctttcaggttgtaccaaatggatgtgaagagcgctttcctcaacgggccgatcaaggaggaggtgtacgtggagcaaccccctggcttcgaggatgaacggtaccccgaccatgtgtgtaagctctctaaggcgctctatggacttaagcaagccccaagagcatggtatgaatgccttagagactttttaattgctaatgctttcaaggttgggaaagccgatccaactcttttcactaagacttgcgatggtgatctctttgtgtgccaaatttatgtcgatgacataatatttggttctactaatcaaaattcttatgaagagtttagcagggtgatgacgcagaaattcgagatgtcgatgatgggcgagttgaactacttccttgggttccaagtgaagcagctcaaggatggcaccttcatctcccaaacgaagtacacacaagacttgctaaagcggtttgggatgaaggacgccaatcccgcaaagacgccgatgggaaccgacggacacaccgacctcaacaaaggaggtaagtccgttgatcaaaaagcataccggtcaatgataggatctttgctttacttatgtgctagtagaccggatattatgcttagcgtatgcatgtgtgctagatttcaatccgatccaagggagtgtcacttagtggccgtaaagcgaattcttagatatttagtcgctacgccttgcttcgggatctggtatccaaaggggtctaactttgacttgattggatattcagatttcgactatgctggatgtaaggtcgataggaagagtacatcggggacgtgccaattcttaggaaggtccctggtgtcatggaattctaagaaacaaacttctgttgccctatccaccgctgaggccgagtatgttgccgcaggacagtgttgcgcgcaactactttggatgaggcaaaccctccgggactttggctacaatctgagcaaagtcccactcctatgtgataatgagagtgctatccgaatagcagaaaatcctgttgagcacagccgcacaaagcacattgacatccggcatcactttttgagagaccaccagcaaaagggagatatcgaagtgtttcatgttagctctgagaaccagctagccgatatctttaccaagcctttagatgagcagaccttttgcaagttgcgtagtgagctaaatgtcttagattcgcggaacttggattgatttatagcatacatgtgtctatgccattgatcatgttcatatgcattgtgttgtttattaatgatgctcaagttgtacaagcactcaccggaccttacaagtccatttgcaagtgatgcatatatttagggggaggtttgttacaacttgactctttaggactaaccatgtgcttgagtgcttgatttagtctcaaaggtgaattgaaagggaaaaggtggacttggaccatgcaagacttccactgcactctgatgaaagagtaactgtttaccaagttcatttttgtactcctattgcctttttactcttagttgaagattttggtgaggcaacaaggttaaagggccaagattgatcccgttttggtgcttgatgccaaagggggagaaaataaggccaaagcaataaatggatcagctaccacttgagaattttgaaaataatagaatagagttttcgttttgtcaaaacactcttatcttgactccttctgtcaaaagttgatctcttgtggggagaatggttgattatgggaaatagggggagtttttgatactatgatcaatttctatggaacaactctctttatctctctataagtgtgtttgacttagagataggaaattgaggttgatttgcaaaaacaaaccaagtggtagcaaaggatgatccatatatgccaaatttgagtcaaaacaaatttgagttcttatttgaattgattttgtacttgttctagttgctttatgttgtgttggcataaatcaccaaaaagggggagattgaaagggaaatgtgcccttgggccatttctaagtattttggtgattgagtgccaacgcaagcgcttttgtgttgatctatgcaatgtgttagtgtcacacccggatttcggggcaccaagacccgggcgcgaacataatcaccaggtgtgctgggaccaagtctcacacatatgatgaatcatggcacaggatcgaatgtcacgtttttactgtataataggagttctgtacaaaataaataaataattacattataaggagacaacggtccagcaacccaaagttgactgggagacgacggcctagacctctcacgaacacattacagcatcctccatgcgcctcatcctgcggtacctgatcttgacctgtggggggtgtgagacagcaagagtgagttcacatacgatcatagctcaacaagttgtggggaataatgtgcatgaactcgccaaaagtggaagctcacgtgaagtgtaaggcttaccaaagaggatggctgaagctgagcattacttttaaagttggtcaaaattttattagcaattactaagtataagtaaataccaaacccaattaagtaatagaacaaaagtaacaacatcacctgcgatgcaatgcatatgacaaattgaatttagttccataaattaatcatgtgagtgtccgagctgctcatgaccgtgagcacggctagtataccagttttacactctgcagaggttgcgcatctttacccacaagtcatgttacccatctgccaagagacggccaatcccatacacctctaccgaggaggcgaggcagggtaacactacgaggcctttacaaagttccactagcttcagaaaccccgctacagtttataggaagctccagtgcagggttcttgcctgaccgccatcgcagcaaaatcaaccaaggacctccctacactgaccactcccctactgcccttgcccctttcgggtaaggaagacctccactagctttcctagttaatcagccaagggcgtcccattaaacccttgtggtagcactgttttcccgggtggttctccatgttccaattaacataatgatcttatcatgaacagtaataaacaactgataataaaagtataatcatgaatagtaatgtgtatctctatacccaaaaccacatatagcactagcaagtactacccagaaagttcagtggtaaacaaggtataaagatagacaaactagggtatcctattgggtcccatcaaaattaacctatgcagatcattatgattaatcagaacatgactgggtaaaaagaagtgatcaagggcacaacttgcctagcacttgagattccaggtaccaacttgctcttcaggtgactcgtaacctcgcgctagtcgtagcagtacagacaaacagggtataggcaaaattaactttacaccaaacataagaacaaactatataataataatctacgcattgctacgggattaacgcaacttgaacggatcaaatcggagttaaaacggaggagttatgattttctgaatattctatatgttttgtacaagattaaataggatataaattttaatgtgactttcatgtcaaaacagtggtactaggtgatagacaataatattacaaaattataggaattggaacggattaatttgggcttaatatgaattttctatgaattacccaagttttacaattatttttatactcaaaatcaatttctaaatctattttttcggttttatttaattcctggactaggccattattattagaaagtgcaggggctcggcataaattttcccaagactcatcctacagctgcatggacggcgggttgttttaacacaagtccagggtctctttaacaaaatagcctgtgaagaggtatcgatgaatatgggtcgttggattataaaccgatgcacacggattaggaccgaaccggtacgcgatttccaccttcggatcagggatcaacggctgtctgatccccacggcatacactagccctcggccgtcggatcggatccaaccacccagatcacgcccatgaatgggtatcccgttacagatctgagccgctgcttttcctatctacggtcacggtgtcctcttcttcctcggaaaatataagacccagcgccgtcgtatgcccacggcggagcagccccggccgggcgcggtgattgcgatttagcgccctaaaactacatccgaaaagtgctatgcgcagcggagagtgagccaaaaaggatgggggtggttttacctcaaattggggcggtgaatgctctgcccacgcgacgatgtggctccgcggcggagcactggcaacgacgacgaatcgccggttctccggtcagcgaacccggacgaggacaccgcggacaccctccaaagctcccagcggacccccgcacgccagccgtggcgaggactacgccagcgaccacccggtttgtggcactctcccagcagtattccgggcgcaggtgaatctgtgagctcgagctaatccgagatgcggctatagcctgggtcccagggggctgtggggtcggttttatacccaggcggcgcccggagtccgagcgggtgcgagcagcgagatctgcgggtcggcccggtgtggagggatcccagcgcttaggattggggaaaaagaaatccgagctagaggaaggacctgccatgcaggccccacatggtggtgacacagaagccaacccctggcgcgcctggtgtgatcccgaccagtgggccccacgcgtaagcgacccaggaaatatagaaaaaagcaagggagttgagtgggccgcgcagcacgcttctgctggtgggccaaatagatggtgagaggcccatttagctgagttagtttttattctttttgttttctattccttttcctttctctctattttcaaacccaaatttgaattcaaacttaagctcatcactataatttatgtttgtggaattaggggtattaattgtggatatatttatttatatatattatttatatttttcatatcatttttcttcttctcatttgcaaaaccctaaattttaatttaggggtcaattcaacctttagaattattattttattattattattaacattattattttatttaatgcacaaacaataacactccaacgagatgcactttcttttatcttagtgtctttgttttgatttaatcacttttccttctatatatgctcttttcatgatgcaaataaggcacataaaataaggaaatcaccatgtatttcttgtacacaattttgagtattacaaatcctaccccccttaaaaataatctcgtcctcgagatttgtaagaaagaggatgcaacaagtttggtttgtagtctatgtttcaatttcttaagggttttaataccaaaagatttttttgttcaagtttataatacaaattagcatgtgattacgaaaacatgggtatatgtatatccactttattatgtagggtaaaagatatttttaaagcatatgtaggtttgggtaataaggagtagggtaagaaaagactccatccaagattgtggatcttgattcccttgaaaatctggcttgaatcttatccttgtcgatgttgatcttttcttctccggtcttgatctcattaattcgaggttaatgtatatcatcggggttggggaatatggttaagataaatatggatgagatagactacatgatgtaggtcaaaagtccgtctggtgttaggtggggatagacaaattatgcaatccatcatgactctattggctaggttggatcttatgcccatggttgagttggtctaatgtgcgaagttaagttaatatctggctagtagggtctaatctcttctaccagtatcactaatctgtttaaatagatcacattagattagatcaggctctagagtagattggatatgactagattagactagttaagatctaattaatttgcattagatcatggttgttaaactagggcagataagtatgcttattaggataagatggattcataaatataagatagaatcttttgaggtcagttagatctattaggatgagataaaatcttttcaagataagatgaatctattaagataagagagtatcttttaagataagatagaccaattaagataagagagggtcttttaagatatgagggatctatataaaatagatagactttaatgaaggataaactaggttgtttagttatcttatgaattttatttatttatatttatacctatatgtatatgcagatgtaattgtggatattgatccacaacccatcacactcaatcaaagatccaaatcaggaaaatatcataagaacaagcattcaagcatataaaaaaatagttttgtttttgttcctaagattaggtctcctattcctaaaggtcactttaggcacaagatttcaaagtgtgaaatccaagtttgtctttagaagaaaaaaagtaagaataatcagagtaaagcggaaatagatgagaaagattaagaaaagataagaaaagaatcagagtagcaaaggtaagtaagtattggttgtccagttctatctgggtttcgtcctacagtcaacattcctctgataccacttctgtcacacccggatttcggggcaccaagacccgggcgcgaacataatcaccaggtgtgctgggaccaagtctcacacatatgatgaatcatggcacaggatcgaatgtcacatttttactgtataataggagttctgtacaaaataaataaataattacattataaggagacaacggtccagcaacccaaagttgactgggagacgacggcctagacctctcacgaacacatcgcagcatcctccatgcgcctcatcctgcggtacctgatcttgacctgtggggggtgtgagatagcaagagtgagctcacatacgatcatagctcaacaagttgtggggaataatgtgcatgaactcgccaaaagtggcagctcacgtgaagtgtaaggcttaccaaagaggacggctgaagctaagcattgcttttaaagttggtcaaaattttattagcaattactaagtataagtaaataccaaacctaattaagtaatagaacaaaagtaacaacatcacctgcgatgcaatgcatatgacaaattgaatttagttccataaattaatcatgtgagtgtccgagctgctcatgaccgtgagcacggctagtataccagttttacactctgcagaggttgcgcatctttacccacaagtcatgttacccatctgccaagagacggccaatcccatacacctctaccgaggaggcgaggcagggtaacactacgaggcctttacaaagttccactagcttcagaaatcccgctacagtttataggaagctccagtgcagggttcttgcctgaccgccatcgcagcaaaatcaaccaaggacctccctacactgaccactcccctactgcccttgcccctttcgggtaaggaagacctccactagctttcctagttaatcagccaagggcgtcccattaaacccttgtggtagcactgttttcccgggtggttctccatgttccaattaacataatgatcttatcatgaacagtaataaacaactgataataaaagtataatcatgaatagtaatgtgtatctctatacccaaaaccacatatggcactagcaagtactacccagaaagttcagtggtaaacaaggtataaagatagacaaactagggtatcctattgggtcccatcaaaattaacctatgcagatcattatgattaatcagaacatgactgggtaaaaagaagtgatcaaaggcacaacttgtctggcacttgagattccaggtaccaacttgctcttcaggtgactcgtaacctcgcgctagtcgtagcagtacacacaaacagggtataggcaaaattaactttacaccaaacataagaacaaactatataataataatctacgcgttgctacgggattaacgcaacttgaacggatcaaatcggagttaaaacggaggagttatgattttctgaatattctatatgttttgtacaagattaaataggatataaattttaatgtgactttcatgtcaaaacagtggtactaggtgatagacaataatattacaaaattataggaattggaacggattaatttgggcttaatatgaattttctatgaattacccaagttttacaattatttttatactcaaaatcaatttctaaatctattttttcggttttatttaattcctggactaggccattattattagaaagtgcaggggctcggcataaattttcccaagactcatcctacagctgcatggacggcgggttgttttaacacaagtccagggtctctttaacaaaatgtagcctatgaagaggtatcgatgaatatgggccgttggattataaaccgatgcaacggattaggaccgaacaggtacgcgatttccaccttcggatcagggatcaacggctgtccgatccccacggcatacactagccctcggccgtcggatcggatccaaccacccagatcacgcccacgaatgggtatcccgttacagatctgagccgctgcttttcctatctacggtcacggtgtcctcttcttcctcggaaaatataagacccagcgctgtcgtatgcccacggcggagcagccccggccgagcgcggtgattgcgatttagcgccctaaaactacatccgaaaagtgctatgcgcagtggagagtgagccaaaaaggatgggggtggttttacctcaaattggggcggtgaatgctctgcccacgcgacgatgtggctccgcggcggagcactggcaacgacgacgaatcgccggttctccggtcagcgaacccggacgaggacaccgcggacaccctccaaagctcccagcggacccccgcacgccagccgtggcgaggactacgccagcgaccacccggtttgtggcactctcccagcagtattccgggcgcaggtgaatctgtgagctcgagctaatccgagatgcggctatggcctgggtcccagggggctgtggggtcggttttatacccaggcggcgcccggagtccgagcgggtgcgagcagcgagatctgcgggtcggcccggtgtggagggatcccagcgcttaggattggggaaaaagaaatccgagctagaggaaggacctgccatgcaggccccacatggtggtgacacagaagccaacccctggcgcgcctggtgtgatcccgaccagtgggccccacgcgtaagcgacccaggaaatatagaaaaaagcaagggagttgagtgggccgcgcagcacgcttctgctggtgggccaaatagatggtgagaggcccatttagctgagtttgtttttattctttttattttctattccttttcctttctctctattttcaaacccaaatttgaattcaaacttaagctcatcactataatttatgtttgtggaattaggggtattaattctggatatatttatttatatatattatttatatttttcatatcatttttcttcttctcatttccaaaaccctaaattttaatttaggggtcaattcaacctttagaattattattttattattattattaacattattattttatttaatgcacaaacaataacactccaacgagatgcactttcttttatcttagtgtcgttgttttgatttaatcacttttccttctatatatgctcttttcatgatgcaaataaggcacataaaataaggaaatcaccatgtatttcctgtacacaattttgagtattacaggtagacaaagtgcaaatcatgtcgaaaggtacgtttctagacttagtacattgttttatggactaatgtattgtgtctaagtgctggaaacaggaaagattgaattggaaatgagatggctatgttctgccagagtcagctcgatctgggtgcaccggactgtccggtggtgcaccggacagtgtccggtgcgccaggctaggtcaggcaaactcgctgctctcgggaaatgattaacagcgtacggctataattcaccggactgtccggtgtgcaccggacagtgtccgatgagccaacggtcgccgggccaacggtcggccgcttaatccgggcgcgacgcgtggccgagccaacggctagaagggggcaccggactgtccggtgtgcaccggacagtgtccggtgcgccaacggttccaaggctgccaacggtcggtttcgccaaataaggaaggaaatctgcaccggactgtccggtgcgccaggcgacagaaggcaagaattgccttcccggattgctctcaacgtctcctagctgccttggggctataaaagggacccctaggcgcatggaggagatcatccaagcattccttgagcatacttgatcactcacacttcattcttgcgcacttgttcaacattctagtgatttgagctccgttctagtgtgctagtctttagagcttaagtctgggtcttgtgtgtgcgtatttgctgtgatctttgtgtcttgtgtgagttgctaatccctcccttactccgtgcttctttgtgaacttcaagtgtaagggcgagaggctccaagttgtggagattcctcgcgaacgagataaagaaaagcaagcaaaataccgtggtattcaagtgggtctttggaccgcttgagaggggttgattgcaaccctcgtccgttgggacgccacaacatggagtaggcaagcgttggtcttggccaaaccacgggataaccaccgtgccatctctgtgattgatctcttgtggttattgtgttttgttgagactcctctctagccacttggcgattattgtgctaacgcttaaccaagtttttgtggcttaagtttcaagtttcacaggatcacctattcaccccccctctaggtgcccacagttgcggctacgtagatcaagagggcttctcccgcagcgggggggcaccaagatgggcgcgtttgtaaggagcgcctttaagtttccgagggcttcctcggcctcgggggtccaagtgaagcgctcggtcttccttacgaggcagtacaagggtaggcctttttcgccgaggcgcgagatgaagcggctcagagccgcaaggcatcccatgaccctttgtactcctttcaaatctttgataggccccatgttggtgatgcccgcgattttctctgggttggccttgatgccccgctcggagacgatgaaccccaggaccatgcctcgggggactccgaagacacagttctcggggttgagcttcatgctcttcgctctcagacacttgaatgccgtttcaaggtcagagaggaggtcagaggctttcctcgtcttgactacgatgtcatcgacgtaagcctcgaccgttcggccgatgtgctctccgaacacgtggttcatgcacctttggtatgttgcacctgcattcctcaagccaaatggcatagtagtatagcagtacatgccaaaaggtgtgatgaaagaagtcgtgagctggtcggactctttcatcttgatttggtgataccctgagtaggcgtcgaggaatgatagggtttcgcacccaacagtggagtccacaatttgatcgatgagaggtagagggtagggaacctttgaacatgctttgtttaaacaagtgtagtctacacacatcctccatttcctacctttctttttcacaagcacagggttggctaaccattcaggatggaatacctctttaatgaaccctgcaaccatcagcttgcggatctcctcgcctatggttctgcgcttttcttcatcgaaacagcgcagaggctgcttcacgggtcgagcaccggctcggatatccagtgagtgctcggcgacatccctcggtatgcggggcatgtccgagggactccacgcaaacacttcggtgttcacgcggagaaagtcgacgagcactacttcctatttggggtcgagcctggagctgatccggacttgcttgcaggcgtcattgctggggtcgagagggacagacttaaccgccttagctggttcgaagttgtcggcgtggcgctttgcatctggcacctccttggagaggcactccaagtcggcgatgagggcctcagactcggcgagtgcctcagcatactccacgtcgcattcgtacgcgtgtcggtacgtggatccgacagtgatgactccgttggggcctggcatcttgagcttgaggtaggtgtagttggggacggccatgaacttggcgtagcacggtctccctagcaccgcgtggtgggttcctcggaactcgaccacctcgaacgtgagggtttccttttggaagttggagggagttctgaagcagacgggcagattgagttgtccagggggcaggacgcgcttcctagggatgatcccgtgaaagggcgccgcaccggcccggctcgtggacagatcgatttccaagagccagagggtctcagcatagatgatgttgaggctgctgcctccgtccataaggactttggtgagcctggtgttgccgatgacggggtcgacaacgagcgggtactttcctgggctcggcacgcagtcggggtggtcgccttggtcgaaggtgatgggcttgtcggaccagtctaggtagattggcgccacaacctttaccgagcagacctcccggtgctcctgcttgtggtgctgagccgaggcgttcgccacttgcccaccgtagatcatgaaacagccgtggacctcggggaactcctctgccttgtcgcctcccttcttgtcgttgtcttggcctttgccaccttccgccgggggccaagccttatggaagtagcgccgaagcatgacgcatgcctcaagggtgtgcttgacaggaccctagtgataggggcatgactccttgagcatcttgtcaaacaggttggcccctccgggaggcttccgagggttcctgtgctcgacggcagcgacaagatctacgtcggtggcgtcgcgcttcacttgcgacttcttcttggccttcttcttcgtgccacgctgggcggatgcctcgggaacgtctttctgctggcgtccctgaggctgcttgtccttccggaagatggcttcgaccgcctcctgaccagaggcaaacttggtggcgatgtccatcaactcgctcgccttggtgggagtcttgcggcccagtttgctcaccaggtcacggcaagtggtgccggcgaggaacgccccgatgacatccgagtcggtgatgttgggcagctcggtgcgctgcttcaaaaatcgccggatgtactctcgcagggattcccctggctgctggcggcagcttcagagatcctaggagttcccagggcgcacgtacgtgccctggaagtttccagcgaaggctttgaccagatcatcccagttggagatctgcgcaggaggcagatgctccagccaggctcgggcagcgtcagagaggaacagggggaggttgcggatgatgaggttgttatcgtccgttccacccagctggcaggacaaccggtagtccgcaagccacaacttcggccttgtttcccccgagtacttaatgatggtagtcggggctcggaaccgggtcaggaacgacgcccgtcgtatggcccggctgaaggcttgcggacccggtggttcgggcgaggggctccgatcctcctcactgtcgtagcgtcccccacgcctggggtggaagcctcggcgcaccttctcatcgagacgggctcgacggtcgcggcggtggtgctcgttgccgaggcgacccggagctgcaggcgtcgcgtcccgcgtgcgcccgatgtggaccgaggcctcccgcatgagtcgggaagttgctgcgcgatgctccggggggtacccttgccttcggaaggcagagctctcggctcgtcggaccgcgacatcctccaggagattcttgagttctccctggatacgccgcccctcggtggtggatggctccgacattgctcggagcagcattgccaccacagccagattctggccgacccagctggaggccgggggcagtcttgccctggcatcatcaacgatacgacgctggtcgtcccgggcctgatgacgcgcttctctggcgagtgctcggcctgcccactcctgctcgatgttttgccggagctgcacaagttgccctgcttcctcgtcgagcttggcctgcatctcacggatttgctcgagctatgtgtcctgacccctcgcagggactgggaccatagctagctcccgcaggatgtcaacgcgaggcgcagacccagggggatcgtcatcctccggcataccaaggtggttgccttcatcgtgaccccctagatcgacgtggaaacattcacgacttgggccacaaccctcgtcgtcaaggctgtggccatcatcagagcaatcggagaggcagtagtcacatgcggtcatgaagtctcgcatggcacgggtactaccgagcccggagaaatcccaaccagagtcgggctcgtcctcttcctcggaacccaggggcccgtaggttgagacgaccgtcagtcggtcctaggttgaccacatatggtaccccggaaggttaggatatgccttaacgaaagcgctcaccgaagcggggtcgcttggtggatcgaagctgaatctaaaaggcatagggtggaaaacggacggtacctctcgatcgatagacggtgacgaggtcacgtcggggacggactgcaccattatctcaggtacaaggctaacgcccagcaagtcctttgcgagagtgctggcgtcatctgtccgcttggggttggcatgttgcggggaaacgacactcgtcgtcgtctcaggcgcgaggacaacgcccgacatgtcccccgctggggtgccggcgtcgtcgactcgctcgacagccaacgagatgccgcctcctgcctggccacgattgccccgtttcctccttctgcggcgaggagggcgacgggacaaacccgaatgctgctcttctgccacgggggaagacgtcgtcgagtctgccgccgccgggcgagctgacggccgtcgttgttgccgccgtgctgcgggggaaggagtaccatgtcgtagctgccgtcgagggacatgaactcgaggctcctgaagcggagcagcgtcccgggctaaagaggttgctggagactacccatctggaactcaacgggaagttgttcgtcaacacgcaacaggcccctacctgtcgcgccaactgtcggcgtttcgaccccgggggggtccctggaccgacgagtaaaattgtcgctgcgtgtcccagcccagatgggttggcgcgagatggaacacaaggggggaaaacgcggctcgtgttatcctgcgccagggggatgcgttcgtagtaggggttacaagtgttcgcgagggagagagagtgagcctgttcgtcagcccgtcctcccgcgcgaccctctcgcatgagggccctggaccttccttttatagatacaaggagagggtccaggtgtacaatgggggtgtagctatgcactaacgtgtccggcagagaggtgcctgagccctgtgtacatgccaacgtggctgtcggagaggtgctagagccctgtgtacgcggtatcgtggccgtcggaggagcgctttagccctgtaaaagcacagctgtcagggctgctgggatcttgctgacgtctccttgcttccgtagggggctgagaaccaccgtcgtcatggacgcacgcggggagccatcattacttgttaccggggcgagcctggatgggacgccggtcttgttcccccgtagcttgagctagctagggggtagggtaatgatgtatcccccgtggcgtggtcggtccgagcccaaggtcgggcgaggcagagactcctcctgaggccgaggcaggggtcgggcgaggacgcaatttctcccgaggttgaggttgaggctgagccctggggtcgggcgaggcggagaccaccctccgaggccgaggctgaggccgagccttggggtcgggcgaggcggagtcctccttccgaggccgaggttgaggccgagccgtagggtcaggcgaggcggagcttcctgttgcgcctgaggctaaacttggctgttgccagcctcactctagcgggtggcacagcagtcggagcggggcgagcgacgctgttttcctgtcaggtcggtcagtggaagggcgaagtgactgcggtcactttgaccttgccgactgaggcacgtgtgtcaggataaggcatcaggcgatcctcgcattgaatgcgcctgtgatacggtcggttggtgaggcgatttggccaaggttgcttcacgacgaagcctgcccgagctgaggttcgggcgagtcgagggtgcgtccgttgcttgaagaggccctcgggcgaggcgagaattcgtctgggactactgttcccgcccgaggccgggctcgggcggggcgagatcgtgtcccttgagcagacgaagccttgacctgaatcgtacccatcagtctctgcagcttgtgctgatggtggttaccagccgtgtttaggagtgttgggggtacccctaattacggtacccgacacatagatcagacgaaagcggaggcaaggcacttaaagctg

SEQ ID NO: 685 - DNA, 4867 bp, Zea mays
  Intron number 1 from transcript GRMZM2G018462_T01 (locus G RMZM2G018462) derived from phytozome v7.0 (chr-ID 10; pos 141478320 to 141483186 reverse strand)
gcgggggtggccatccgcggcgtactttgtggcaggtaaggtggattaagcaaacatttcattgggattgtgaaatgatgatgtgtagggctgcatagttatgatttctcactgaatcataggaagttcggtattcttgtggtggggtggggaggagttgtgtccgaaattctttgctcttttacctttacattacatggctagctatgcattgtttgtattgagttgatacgtaagttagaaacatactgacttcagggacacgttggaggtataattggttcgttttaatttgagtggatggtcatcggtgtttcacaaatgggacctgtccaatgcaagtgttgttccagacatttttgttccatgttattagtttttaccattttgaaatgtgatgtaataagtctagaacttattggtacattatttgtgcggttgaagttgaaatgtttcaaaacgtaagttgatttaaaggagtatgttttctgccttaactcacctgacagtgaaacctgtgtttgttgataacctaatgtgagtctaaacaatgcctgtactcaaagcaatgtgcctttgggcagtctagccgctagctctagcccttgtaactatggagtttggagggttatgtgctccataacagtttcttagaattttgagatattattttgtaaatgatgactcccaggctcccagccatgtgagatagcacagttaagctcggtatacatgtgaagatgaattgtcatgaacgtaggtggcatataagtttgtcaaaatagtgatcctaaatggcatcggaactcaaatggtaggattgcaaatcgtaggatcataactaatagaattgcaaaatcatatatttaccaaatagaatcgtaaaatcaacctgatcaacaagattgtatagtcgcaaaatcagatgatagacttgcatttttataaccatgctgcttgtcatatcgaccctgttgaaatttgcatggagattggttatgtatctgtttcactcggaatacatgacgttccttaagatattttgttaatgacaattagttctgatagattgagaaggtattgttttttgtgttgtgtatggcctagtttctgagatatagcaaggcagaaacagatacttatcacttaccatgttggtatgttctgtttgcatgttattctcattcttatgtgttatcttacaattatttcctcccctatccctgttaagttgaaacttgaaaacgtctttgctatctgtataaatgataccatgcttctgttctgtagttctctgtgctttctgtacgggatcaatttatgtatgccctcagttcctcacaaatttatgtgaagcaaaacagttatgcattacagtattcctttagatgtgctattaaagcagaatcattttgggaattgaaagaattgcaaataaggcacatactatccctttcagcacttgttgattcagtaaaaaattcgatcatgctgtgctaaactgctagcagaaacattcattttcgtatttggtttgaatgtactggtaacaaggcatgatgtggactttaaatatcacttcgtatttcggtcatgctgtgctaaactgctagcagaaacattcatcaatttggcttattttagtttggagaattttggcagttgctgtgttaaatgaggattgaagaaaaaaatggttggcttctagcttgatggtggatatttgataaacgaagtttagacattttgttgattgtttgtgtctggtcagattttcacaaatgtttgtaaaggtggccactgttagactgtgtgtgtgggccggcactactgttgggctgctgacctattaaggttagggtcatgtgagtctatatactgtacctcatctcctatgcaatacaatgaatattgtcattatcttatatggtatcagactaggttagggttagggttttcccttctacccccacagtcgccacccctttctctgcccaagtccagccgccccccggaggctcatccctcactcccgggggcggccacatcccagccgttgccccctctcctctgctccccgcccccagcagccgccgcccaccggcgcgagcgcccgcagctcgtcgcgttcggccccgcccccaacctccgtagccgacgtttggcgggcgcggtcgtccgccccgcccccaaccggcggtgccctccctcccccgacgccggcgcgggcacgacccagcacccgctccaccgcgtcggctccctcctcctgttcgccggcgcagccccccctgcgcgtcttccgttagcagatggtcatggccccctcggcggcgccaaccacggcggcgcgcatgcgggtccagcagccggcctagatccgttggtggcggccctcatggcagtcgatgccgccgcctccctggtcacgagcgcggctttcctcccccatctaggcacgggtgcgggtctccgccccgtcgtcctgctcaccatgggcttcctccctgctatgcgccgccgctggccccctgttcaaacccgtcgccatcctggccacggacgcggtcccccttctcgcacccgccggtggcggccttcttccgcacagctggtcgcgtggtcccccatctcccctgtgaagccggcggcctgcaacctgccgctgcggccacgcgggcgcgcgtgcaggcgccgctgcgggacgcaggggagcagcgggcgatcccgtccccaacagtcgccgacccttcctcccctcatcctcgcgctgaccacctcctaactgcccgcactgatgcccaacagtgccaaatctttcaagtttctcccgtcgccggcgtcatcgcccccttgtctggttgaatctggcgcaagcctctgcccggctggaaccgccccgtcgccctttccccttctacgtcgccttcgttggattcgtcactgccgcggccttaccgggtggattcaccgttgctgtgacattcctggctagatccgccatccctttggccggatcgccgtcttctcgactggatctgtcgctgtcgtggccttcccggccggatccgccgttacccattctattctgccgcgggcgcagccaccatgactggcgcaaacacgtgcgctgtcgccggcctccctggcagggctcctcgatgttcggacaatctaagaagcaagaaggtcggcgtgctggtgcgcttttgttgtgtcgccctgtcgatcgttgacgctcgaacgtcgaccctctcgaagaacaggctactgttgtgtgtctcccgaccacgaccaccttgactttggctaactcggcatctaggggctatcgtcttctcggagtccacatcggtctctaccccagccgcaacattcgcgccctcacgacgctgcgactacgggagatttcaacccgtcggctcctaccttcggcttctactctagccttatcgtgtgtggtgccctccttgcgactgtggggggatgttagactgtgtgtgtgggccgacaccactgttgggctaccagcccattagggttagtgtcctgtgagtctatatattgtaccccatcttctatgcaatacaatgaatactttcattgtcttacaaccgcgaaagggcctctagctgagttggttaggtggtctgagtagcactccttaggtcctgagttcaaatctcaatgggagcgaatttcatactgaggttaaaaaaggtcactcgctggttctcttagttttgtgcacacaagatgagatgtatggaggtgaatcctcgtgtaggggctaggagggtttaaagcacgagtaaagatttagcctatagggggctgatcctcatgctgcacgaggggccaactttcgtgaccttctcggccagggctccgattgaacttcttaatataataccatgtaggcggtctttggccgaggttttttttttgtccaggtggtcagagttttttggtctccttaggctccaaagtgaccagggccagaaatgtttgggtaaggcaggtcacaatttcagtagtatgtgtagttagttgaaattttttcatggtggctagttcatgttgcatgtggaattaggttggggttatagtttgccgatggttttgtttgtcagcagttgaccattgtttaactgtatctaacaagtatcgagccttgtatctggttgtctgtaaaccatatatacatgttttggttggaaaaaagaagaattatgttcttttgtttgtggagtgtagacttcttagctggataaaacaaaaaccttcattctttcagtttggctatcaggattcaggagtcagacctttggttctgcactgagagccatgttttttcttattctagaatttgattggttgacatttcgcttctcttgctctgctgttgtcattgtctgttacttgttagtttaaatagttagtgttgttcaaaggaaaaattctgcgtccagtggagaaatcaaggaaagatcctactgaaactgacaatgataaaagttaatcctatgctgattcactcctggcgtaagttgattcactttcatcaagggagcattttacgcccgctttattttgtatcctagggctgcatttcaagccaagccattgctaccaagcttaaatctgtcccaaaaccattggtcctcagttcagtatatgcctgcagtgtcaagcattggagatcttttatctaacgttctgaagtggcttcctgttataaaagggacattctgaaacggtagttgagatgcaccaataaccatatatgaatattatctcttatctgaagcctcactgtgttcgttgtgtaggctcctactgaagaggcagctggggacagtgaagg

SEQ ID NO: 686 - DNA, 5885 bp, Zea mays
  Intron number 3 from transcript GRMZM2G327459_T01 (locus G RMZM2G327459) derived from phytozome v7.0 (chr-ID 2; pos 1 79452439 to 179458323)
aggtaccatgtttgtttcttccaatagtttgtcatgttttccaatatattgaacatatgtactatactatttgaattgttcatcatttggcaattggtgtgtaattcactggttctaacttgttcattcttgttagccctatgataaattggtagcatttgtgatactagttcaccgtgaattgacttgaaattggtaacattattgttcaaagttgtgaagggcagggctggtgcagtggcgagaactgtctcaataagtcattaggtcatgggtttgaagcagctgttggcgctgatccgggcgccaatcactgcgttgagaacctgcggcggtgctctctgcacaggcgcggacggtccgtggctaggagacgaacggtccgcgacctggcgcagggctcgggttccctgcctgacgggccggacggtccgcgcgtgtgcaggggcggcagagtttgccggcggcgcctgaatctcggtcccgggagggaccccgtcggggaggagagatcctaggcttcgtctagggtcggcaggccaccctagacacctctaatcgacgtagagccgaagagaagcgaagaatttggggcagagaaggctaacctagagctaaactagaactactcctaatgcataagtaaaacaagaaatagacttgatttgatcgattgtgggggttcaatcggtcgtagcccttcatctatataaatggggtgatctggatccgctacaagtcgtttcccgagctaatctcgtggttttagataacaaatcatgcgaaaaaactcggaaccctaactgattctgcgcaagcacggaccgtctgcgccaccatcgcggaccgtccggaccgcggaccgtccggcctcagagctggaacgtctgcgcggtcatttcctgcactcaacatatgccccctgtcttttggtggaggttgacgaaccaaaagcatatgaactaagcctgatgcaagtcaccgacttttcaatccaatatggtgatcattcaatcgagcctcgatgcataaagaccgtttcagattgcatctttctcggccatgaccatttgatcaatggattaaaatgaatagaatggaggtgcccccagcctgaatagacaaagggactatgcatataccatgggttcatcatcgtaccatcccatatttgaacaggacaatatatcaacgatgagtaggcgggtagaaagcatcctggcatcacaggatgaataggcgatgcttgttgcgtcgccttttgggtcgttttgttcgaccgttttgttttatcgggcggccgaggtttctttgttggtcgatcacatagaatggccttcttgctagcatatttggagagcaactgatcaaaagtagggccggctttgaccagtcgaccatgtgtgctttgcccttgcgtttctttccttgctttatgtggaggctgacgcctctggccatgggcggactgtccggctgagttagccagaccgtccgcatgagcaccggaccgtccgcacccaggtgccggacagtctgcgatgcttgagtcaaggagttttgctcggctgcttggttgaggatgttcctttgtgcctccgaactgttagtctttctgtccggagctttccgggcaatcccttcttgtgatacatttgacgtgcaaggatcgtcaatgatggtgtttttgtctttgcctttatcggccagttcgggccgaaccaagacctctttgcatgtgggttctatggtattgacaggaaatggctgcgtgtccactcgcatctcctgaaaagtcaaccgaccctcatttatggccgattgtatctgtctggcatgggaaaaagaattatgccacttacaataagcacgtctctttaattcatccataggaggaatagtatgagttaatttaatgtttccattttttagtagttcgtcaaatatcctatcgcatttggcaacatttaatgtaaatttaatctcttcttgccgattcttttgaaccggctgtaaggaagaacatgcagaagatttggcctttgttggccaaataaactcagcggcatatacatctgcggattcatcatctgaattatcacgctctactagatgtatagtacgggcgatcgattttgatgtccctttaaatcggctttcacagtctaaagcccgctgatgtagctgagctattgaaaagaactgggtcccatctaatttgtctcttaagtaggatagcaacccaaaagtcagccctgctagctttttgtctgcgacatggatccgaaagcatcggtttctagtgtcccagaacctccggatataatcgctaaccgattcttcgcgtccctgttggactgaagctaaatcagctagccctaatttatattccccggaaaagaaatgttcatgaaatttactctctaaatcattccaggaattaatggaattaggaggtagagcgacgtaccatgcaaaagcggtaccagtaatggataaagaaaataaacgaacacgaaatgcttccccatcggccaattcgcctaggtgtgctaggaactggcctatatgttcgtgtgtgcttctcccattttcatcagaaaacttagaaaactcttgtatccttgccccttgtggatatgggacagtgtcaaaccggtgatcatatggcttctgatatgattgccccactctagctacactaactccgagcctatctcgaaatagttcagccatctcttccctaattttctccattgcgcccggtggcagaccaccggaccctaggctgtggggctcatttggtcgggcattgttatgccgaccttcttgccgtgaccggcctatgatcgtatgacgtgttgtggtttaaatatgtagggggcggaacgtactgttgttgtggtgtgttataatttggtgcatagtgtgcgacagtaggttccgcgtatgcgtatccggtctgtccggtggtacatccgaactggccagtcgtgttcgctattattggggcgccatgcggtagccctggtgcagtatcagacggtctgcgtaagggctggactgtccgggcaaaagctcggacggtccgaccgtgttcaggggcgtcgatctgccaagcagggacgacggtggtggtatttgccctggatatgagttcatcggcattaccatataatggttggggctgcaaatccccatttgtcgccgatgtattagacatagacatcctgttactagtttcatatgatggaaaactaggagcaacagatttctccaacgtacgcgttaattttctaattgattcttctaaccctccaatctgttgtttcatttgattctgctgatgatctacatacggtttaataatttggatgtcgtcgggtttacttacgttggggacttgaagcgaagatagaagagacgcgacgtcagtctctccatgtttgaaaactttctggtggcgatccaccgtgtattatgacaagaatttctctttcgcttgacgcatgtagtcctcttattgctgttgctcatcgaccgtcagactttcaacatccggcttcaggatattgtctggggagatatcagtatgatctttagaaccggccatttgaaggcctgattttttgtagatctagacacctgtccccagcggagtcgccaaaaagtgtgttggcgccgatccgcgcgccgatcactgcgttgagaacctgcggtggtgctctctgcacaggcgcggacgatccccggccaggggccgggcggtgcacgacttggcatagggctcaggttccctgccggacggttcgcggctagaggccggacggtccgcaggggcggcagagttcgtcggcggcgcctgaatctcgctcccgggagggaccccgtcgaggaggagagatcctaggcttcgtctagggtcggtaggccaccctagacacttctaatcgacgtagtgccgaagagaagcgaagaatttggggtagggaaaggctaacctagagctaaactagaactactcctaatgcataagtaagacgagaaatatacttgatttgatcgattgtggggggttcaatcggtcgtagcccttcatctatataaagggggagatctggatccgctacaagtcgttttccgagctaatcccgcggttttagataacaaatcccgcgagaaactcggaaccataactgattctccgcacgcgcggaccgtccggcctcagagctggaccgtccgcgcggtcatttcctgcactcaacatcagcctccgtatttgcgggggaaatacttgcctcagtttattccttccccagaccccactcatgttccttcgacacaggatctgtcctttattgtttaaagttgtatcttggaaactgtgaactctaaagtgacttatttgcggaaggatgatccagataataacacaaggtctgtcctttattgttcaaagttgtatgttggaaactgtgaactctgaagtgacacttttttgtggaaggatggtcgagataataactgtggtgtttgtatgagggattgcttcatactaggctagatttgtccaacatggcatcaacctataacattggtggatgatcacagccacatccattgtttttctactaatatggttatgggagatgaaaaaatattagtgggacaacttatcaaattcatccaattaaatattgcctctgtttcaaatggtagttcatttgcggtttgtcctgagtcaaactactttagcttcgaccaagattttggaaaatacattagcacctacatgtccaaataaatgcattatcaaaacttattcatggctctcctgcgtatttgagagagaacatatgtcatggataatttaatagaaacaatttgatgttttagatgttagtgcatattttgtgctaggaaacaatacggcacaaactcaacaatggtcctccttagaatttggatcacaaactcaatattttgaagttggataagtttgacttaggacaaaaaccaaagtggactataatttggtacggagtaagcatgattggttcacaattggattggttaaccatttgcagtcagaaaattaacagccttggttgctgacccggggatccatctgcagaacctgtttgtctggcctttgtaacctgtacacagtggtctccatgggagtgtatattgtgtattgtttggtctttgtgggtacaacggttgactgtatcaggtggcctggtgtttcagtgactgaataatcatctatcacccctaatagatgttatagagtgttcagtgtttcaggggggggatcgagttacaatacccttgctatatcaacatgacctatttgtatgtagctaatgttatttgcgaatctgatatgttctcatctatgctagcttatttttgtaaacaagtactgtagctgttttctgtgcatcattttatgctggctggctccttttttttcctacttgaaattgtcctctaaaacttgggtgctgtgtggtttatatgtttgtaatgtaataggtaacaaataacgttaaatcatgtttgtttaagtctaaccgtaatcggatactacattagaaattgatatcggcctattcaaacttgttaccactggtaatcgaatgcaaaccattaccgttaccatttacgttacattttaggaaccaaacggcaccttggatcttgttcattcattatttcttgcagtcattacagttagcaatctgtacttcagctgtccattattttgagtataatctatctatgacagtttctggtttgtagctgccggccaagtaacgtgctgtctttccctatttgcagttcgtcacatctgctctgaagcagccaggcttgga

SEQ ID NO: 687 - DNA, 13095 bp, Zea mays
  Intron number 5 from transcript GRMZM5G813143_T02 (locus G RMZM5G813143) derived from phytozome v7.0 (chr-ID 1; pos 2 39519383 to 239532477)
cagctgtagaacgtgttccatcagaaagtctattggtaaatgaaatttacactatcgtaataattttctacagtaatgttattgttagactatgttgtgtatgtgtgtgtggaacatggtttttaaaacggtatggcgagacaaggggttggaccgccgccttgatgcctaggcggcgcctaggcgaggtaggcgtccaaggcgcctaggtgttggaccaccgcttggacgcctaggcaatgcctttaaaacagtggtgtgggcctatatcctggtgtgtacagccaggctgcctggtcatatatggttaatttgttagagagtgatggggaggtcattgattggtggtgtttctgtaaatctcagtatctccttagcctatataagtgccatcctggcatcttctctaatttatcaagcattccacataatcactctctttcatggtatctgatcgcctaggttctacctacctgttttccttccgcaccgagcggaccatcttctccggcgctactccatggctacacccgtccgctgctgccaccactgactctagcgcgccgatgaagagactcgtgctgaggatcgcgagtgagtggccaaggccacccgtgatgctctcgcccgcgcgacaaaggcagaacgcgaggccgctcttgctcaatccaagtgtgacatgaccaatgctcgacttcgcaacgccctcgtacgcgctacgagcacacggtcacggagttgcaccattggtgtgatgtacaagttgacctttggcttcttgactaggtaatcaagattgagcggtgaaaactcgccgaaagtaattgttggtctatgagcgctaggtctatctatatcctccgtcttccttgattaaggtaagcttgcttatgttggaacataaaaaatatgagtgataaaaggactttttccggtataaggtataaatagaaattgaactcgcataaggactctgacactctgtcaagggcgtacgtgcccaaggacgctggacctcgactacgaagctcgtagccccgacccgtggtagctggcagggttatgccccctcgccgttctttgctggttggggtgtacccccccacccccaatgatttcaagtcgcctagtcgaaccctgggaccgaccaggcgactaatcgcgattaggcgacgactagggcgactagtcgacccctagtcggtcctagtcggtccttggtcgtcctagactagtagttatacttatataggtatatatataaatatacatgtatacattatataaattagaacaaacagctaggataaacaaagtaacatattgcttcattgtttagggtttagggttatttatggtttaggggggagaagtgggggagcaggagggaccttcagatgacgtgctcatctggtcactggttcgcagccaccgccggttggagactgcagcagtgcagcaagcgagcaggactgcaggaaaaggggtagggaacgcagggtgctgtagccgctggtgtagccgccgacaatcaggagttcaggactgcaggggcggtgccaagagaggagaggagacatgcaggttggagactgttggcagctaggttagaacaggagaggagagggtactctaaattagactgtagatgggctaaaaaaggcccaataactaaaccctagccgggacgaccaggacacctaacttggacgactagtcgccctagtcgacgattagtcggacgactaggtcttctagtcgagtcgtccagcaaatcgtgtcctaattgccgaccaacccgactaatcgcgattaatcgcgattagtcggacgacttgaaatcattgaacccccctgaccgacggcttgagagagagagatagagagtagatggaattaatctttgcttctccttctcattgtctcggtacagatataaatagcccaccggctaaccaatcactcctaagattaaggagataataagggaagctaataaccaactcctaagattaaggagataataagggaagctaataaccaatcactcctacgattaaggggataacaagggaagctaataaaagggaaactaatctttatcctttctaatcctgtatgtgcccagcgtgctccgcggcgcgacggatgtctcgagcccgccggcgcctgctgtacgcgaggccccacatgacagactccgaaaataccaggtcctacgcaagcaaattgtttataaaaccccaaaatagcttttttttgactcaatccacttcttgtgttgaggtagactagttcctcactaggaacgtaggccaatacgaataaaatcaatgacatgggcatgaaaggaattccagcatgggaaagggaacgctcgagcaagggaaattcaagcaaagggctttaaccacttcccctctatgccctacggggccacgccctccggggttgacgccagggatatatgctttttataatgaaatattggtctactccctgcttcctattcgagtatgaggagcaagagcgaattaaagaaattaaagcgtagcactagcgtgccgaatcaaagctgtgaagtggagtgtagctacacgaacagaggaaagtgagcctatttgttctaggaaagcgtattcgttcgaagtcgtattagttggcattgtcactgcaatagtttccttgatatcatctgtgggctctccattggtttggtccggcatcttaggtttcgcaggatcacttcacttatttcatttcgagaaagagaacgattcttcttcgatctagaaagaacgattcttcttcgaagcatgaaccaacccgcacctgccctcaaagcagatacgattcacagaaactttatctcttctgaagcacagaactagaaaacccatggcctgctgcttgattagaaaaaggagatccacggcctgtgagtaactacgccatgttacgaatcacaacctgacttcctctagatgaaagcataggtagtgacgacctattgttttcttctcagcggacccaatgagtaactacgccatgttacgaataaaagcgagggaaaatcggataagcaacttttgcagctatatgaaatgcactttggaaaatccagattcgaggtcttgaggacgaaaacacgagaaaatggacttgcctacttttgcaccgaagaaactcataagtaatcaaatttccgaggacacgaacaaaagtaagttgtttttggtattcatatcggaattagccagaagaagaaacattttcactgcccttcattctttggcctgccgggttatattttgaatcatgaatttaaactcgcgcaaaatttgggggttttgggaagggggaaaccctttttaaatcccaacctttccaatccccaaatttatctggccaactgaatccttaactcctccattaaacttactagaaaataaaaccatacctgttgttttgtccggtatggagccagcatcgtcataggtatatgccgccacaaaagacacttcagtcacgtagttgattttgcggtcctcgacgttgctcttcttcaacacaaggtcgcggtcctcctaaacctgcatgctgaagccgtcgctatgcagataatccacgctcttgtgccactgctaggccatcatactctgtcacgtttgtcaggtaggccatcatacccatcatcatgtggtacccataatttctagttaattcattgtgatctttggatgtctcctgtcatgtaatatcccaattttcaacatttgaataaaggtcattttaaaataattaattgccaaattaacttagttttacgacatcaagattacgcaaatcatgtctttcatctgctatctctcgtttttttcttctagcaacctcgagctctagccgagcttgtctctcgccgtggtaaatttcaccctaacaagttgctgatacccccaccataactcacgcccagacggaaggagcagataaccatccatagcaagaacatgcgtgtagaaaccgcaagcctgcctctgacctccttggcgaccgggtactccagcaagcccccacctacacccattgccataaagcaaccttgtcgtgcccaacgagctattgagttaaagtgttgtattgcagaccttgaaatgatgcctcagtgcatagagctactactctggtaagaccacgtgcacccacctgagcacacgctagccatgcaccgcagtcatcgccgaacgtgtgccccaccatgagccaagttgccctgccaacctcgagaggttgtgactacattgtgataactgataacgtcgtccgccgcttacagtacaccgattgagattttgtcctctattgtgaaccgtcattcctcagcctataaatcgaccctgatgaccataccataaagcctcacacctgcttaagccatcaacatatccatcaaattgttgttgctcccccgcagcccaaacatcacttgccttactcttcaaattggagaggaagccatcttcaacgagagttatcaccaccgatcttagctgcaggtgagcgcacccatgatctctgacttcttgctctctctcgaagccattcctaaactctagaatctatgaccatgacgctcgtcgggacaacctttcccatggccatgtccttgacccggttattaaaatatgcaagaaaaatttcactcaaatatttgtcatacaagaaccatagccaagtttctaaaagtttctacaataatcatgacaaaccttaaacataaacaaacaagacaagcttctggaaccttctaaaaccttcttcaagcaaacatagctaattatgagatatgcataaaataaggcaaggttctaaaatctcctacaacaatcatgataagccatgaagcttagatatttgtatagacctctcttgaatatggcaagatgtcactcatgcatggctcaaggtgtcactcatgcatggctcatgtgtctatataaggaaagtgtgaccccttgccatgatataccacacaaaacccattatatcacctcattccatacaaatctaagggcaaaatgtagtgatagagtgtaggagcccttgcgtaatcattaaagtgttcttgttttaagtctttcgcttgtgttgtaatttttttatttacttagtgcataagatatgatgtatcaaaagtagtgctctatctcccgagatcatgatcataaggcttcaaatgtaggtagacactaccacccggaagacaactttatctataggtcggtactgctaccctgaagcaaaaatggctagctctgccgcctattgtacattaagggcctttttggttcgctgcttcacttgccacagtttgccacgcctaaggttatgcgggtttgaccgagttaggcgtgcgtttggtttgtagccacagttgtggcacgatttttctcctgctgcgtagatcccacttatcaatgacttgtaaaagtgtggcaaaattctcttaggcgtgccacagtgtgctgcataatttgagtgcctaaccttaggcaagtggggtagaaaacgtgtggcaatttttggcaccttagacatgcagccaaacatgtcgtaagtaacaagaaattaagcgtgaactattataatttttagttacttaagatagttacttagtacacacttaattcgtaattacttagtgcacgataggcggcagagccgactattcttgcttacaggtagcagctacactgtcacacccgggctttaagggataaagccgagcgcatctcatacatgcgccaaagaagacaacatatataataacagagtgtatagagataaatgtcacaataagcagagtatttattacatagcggaagacttacaaaataaattattaatataaaacgaactaagtcaactgggagacgccacctagatcgaatcgaactcctcgttgtggctccacttgaaccacctgttcttctcctgtgggggggggggtgtgagacagcaagggtgagctcacacaagttcatcgctcaacaagttgtggagaataatgtgcatgaactctccaaaggtgggagttcatgtgatgtgtaaggctgatcaacaataggggttaaagttgagcattgcttttaatatgttggtcaaaattttattagcagttactaaatgtaagtgaataccaaactataataaataataatagaacaaaattaataaataatctcatgcaatgcaaatgacaatttgaatttcagttccataaattaatcatgcgagagtcctgagctgctcatgaccgtgagctcgactagtatatcagttttacgctctgcagaggttgtaccctgtacccacaagtcgtgtatcccatgtcgccagggtttgcaaagcccttagacactaccgaggtgaatggctagggatccactacgaggcctttacaaagttccactagcttccgaaaacccgctacagtttatgggaagagcactagcaagaatccctcgtctgaccgccatcgcagcaaaatcaacccgagaacctccctgcatgcaactcccctactccccttgccccttttgggtaagctagtctttcactagctttcctagttagttagccaaggggctttacaggtgaaatggggagtaggggagttgcatgcagggaggttctcaagctttggacaactggcgttgggttagggatattgggagtcatcttgctatgcttgggctgcagcagtatttaaaattatgggatgagattggacaggtgactctttcacaagaggcggccaggcttgtttggagacacacgacttctgggcagttttcctcaaagtcttgctataatgccttcttcctggggtccattttatttgagccttggaaacgattgtggaagacttgggccccccctaaatgcaaattttttctttggctggctataaggaataaatgttggactacggacagacttcagaggagagggttacactacccggcgagttgccccctatgtgatcaggagcaggaaacaatccaacatatcctttgcaactgcagtttttctagggatttttggcatctcattctgtcatccatcgggcttggtaacttcactcctattgctgcggaccagtcctttgctgcgtggtgggagagggtatctaaaagagtccttaggtgcaagaggaggggtttcaatagtgtcattatccttggagcttggtgcttgtggctctctcgtaatagggctgtttttgatggagtgagcccttccattaatttgacaaagaggttgtttctagatgagttgattagttggagtaaggcgggagcaaagcatttagacagtttgggaattattgtcgctttaaatagggtctcgtagggcccgtcaggcttcccctagtgggggaagcttgagggtttggtcttggtgttgtaattcggtccactttggacctttcctttcttactataatgatgcgcagctctcctgcgctttcgagaaaaaaatatccataagatgagaattaatattaaggcaattaaccctattagttacctaattataaaagtagtggatatcatataacaaatgttgctactgcgtagtaaatattcatacgagactaacacaacttgaatggatcaaatcggagttaaaacagaggagttatgaattttctaaggttttatgtataagattaactaggatataaattttaatgtgacttctatgtaaaaacagtggtactatgtgataaacaataatattacaaaattatagagattggaatgaattgatttggacttcatatgcattttctattaattacacaagttctaggaattgttttcatataaagattcattttctaaatgattttatatgtttttctcactgtccggactgcttctcaaattccagagacaacaggggttaatctacaaaaattcccgtgactcagaaaaccccgaggatggaccgcgggtcaattatttaatttcttaggttctcttttggaataaggctggccgaaggggtatcgagcgaccacagccgtccgatctgatccacggtccggattaaatctccgccctcgcgaaccggcacgcgtttcagaccattggatcgcgatccgttggacgtgggacggccacaccacgatccgatctaaaccactcattaccgaatcaacgccccagatttaatgtcgcaaagaggtatcccacgatctaatcttacgcgtcggcaacagatccaacggtgaggatccccaccaacctaaacgttatctggtgattaaatcctgagcgcatgatggctgatcaacggtcgagaaaagcccaagctgaatcggtgcacagatctaatcgcagcccttcattaaagaatcaacggccacccgattctcttcctccccaaccgaacactggcgacccatcacgccgcgacggcagcggatcaccggagctatctccgatctggtgcttcgatggcctagctgcaacgccaacagctgctaagcgatgcgggtcccatggcgaactcgagggtggcgcattaaccggtgatgagaacgaatccgcggctgaccacagcggcggtaggacgcccgcgccaaatccccgcaactaatcatcaccactataactaatcctgggtgcgccagtatggaagagcaaaagcgaaggcgcagggatactcaccgaggttggaggtgaaggcagtgccggatagggatggatccggatatttattcggatgtcaaatttttggtcttctttcttcgattatgaacgaataacatatagaatttgctatgtaaatttatattcttgtttttagcattgaggctattaatcttcacaaaaaataaacattaaattcattctatatatttttaaataattgatataaaattcggatgtctattcgaatacggattcagatgttttttcacccttttttgttgtagggagaaaattatatacataaaaaattatataaaaatttatttaaatacttcataatattcttaataacattgccaaaaattagctttaaattctatgtatatctatgctaaaatattagatttgtgatacaagtcggatgttttaggaacatccctagtgccggacacggtggacggcggctgtgcaaacccgccacacaccgacgagggaacgagtcgtcgccgggcagttacgcgcgactccgcgaacaccagtacgatcccggcccccaagtgaactcacacgaaccccgacggaagtccccgcggtgagaaccgagtggtttgcaatggcggcggcgaactcccacaactccccacggcaacaacacccgagattcaatggtgtagggtaccgggaagggtcacggggagatccctctttatacctaggaggaagggtctgactcccaaataaccctgcgcgtatcaagccggcgaagggagacccggaacatcgtcatccgttgcgcggatttctcccacgacgcgcgcgagctgcggaagagaccaatctgacaagaggggtccatatgccagagagagagcggggaagaaggcagtggctgactcgctgggtcccgcgtggaagtgatgcatgtgggcgacgtggtaatgggccgcgcggtgaagggaattggggtgcgcagacgtgggagggagagaagtggaatgggccgaggccaagaatttggcccaacgcaggtaatgctcctttttatttttattttataattcctgatttgttttcctattcattattcttttgaatttgaacttcaaataaattcaattctgaattttaacaaataacataatcctagcatgatatgatgatattttatttttactatatatattattttattattatttgaataatatcgattgcctaattcgtgagggagagaaaataataattcacccgaaattagaaatctttttattaaaagattttcaatctcgaattttagtgttgagaaatctatctttgataaaaataaaaatatataatattgccctttacttatttccaagaaatatgtactaatctaataaaatacttattcatttgtttattgttttctttctttttagaaaaaaatagtattctgaatgtgggataaaaagtaaaagttacttcaaacttgaatattcatgtaaataaatgcttatggtgcatcagttaatgaaatgcataatcatttagttgaatagaaaaattttctattactccttttttaaatatttcttggttttcaaaagtcagtccccaattttcaactctcaaatataatttgagatatctggattcactattttattccttcatatatttattttatttttttttcttatacaaattttgggccttacatacactctaccactactcacttctatcttgacatttgatgtgtgtggagtggagcggtatggtgggtttgtgtgatatggcaaggagtggcacttttcttatatagtcacatatgagcctttaggattatggggaggctacactagtgcaaaacaaaaattttgacctcataaaaccaagaactgtcgctgttatagataacaggattacgattgggaacaaccatccctgattccggtccctcttaaatttcctgatttttcccatttcccgtattttttgaaaaaaactatatacggttggtttacatggtatacaacatcggtcggggcgggattttcccgtcccgttttcatccataatctatacacatccaagtgcaaggtagaagtgagtagtggtatagtgtaggagttcttgcgtagttattgaagtgttcttgttataagtcttccgcttgtgctgtaaaatttctatttgcttagtggataagttgtgatctatcaagagtgctctatctcttgggataacaaggcttcatctctaggttggcactgccacccgaaagcaagaatggctggctctaccgtctatccatatatcgtccactatgtacctatattgatatatattgtcttgctcgttgtatatctatgcgtgacgtcttttgagcagagccgatttcaaaggagaatccaaaaaagccaagacataaagaatgtgatgtcgcatacaagtatcataatgcatgttagttgtatgaatatttgataacttataattgatgaaacttaatgggaatgagactagagcagcatggtaagtgttagtgcatgtgccaccgtggtggtagacttgcgaccaagctctgtcgtgatgacatctcgagtttgttagatttggttgtggctgctccgctgagcaataaggactaggtgttgtggttctatctcacctaactacttccagtacgaccacattagtttgtatgggcaagctttagtttaatctcactggtttacctagttctttgggtttcacttagtagcccagtgttgattttttggagacattcagtcctgttgtcaagccagctactatatggactatcctgtcctctctctggctatctcccactcatggtctaccgtctatccattagcttgaggttaacgatgcattccaccatgtttctttgtttgagacagtttactgtgctcagccttctggatttgaggaccccactcatgctagtcacgtgtgctggctcaaccgttttctctatcggctgaaacaggtgcccctcacatggtacaataggtttgcctcccaccccctgtagcttggttttgctaaggctatgtcagcacatcacacatccctcatcgtctatcgtcctggagtagatagaacctatctcctattttatgttgacgacattgtgtcgactgcttcctctacgggcccacactttggtgtattattgctgccctttagcgggagttctgcatgaaggatttgggtgctcttcatcattttctaaggatgcacatctagcacacaggctctggtctctttctctctcaatggtagatatgattgagatccatgaacatgctgacatggctgactgcaagctctgctccatgctggacgctcttcaatatctagcggaaggcgcaccaaatctacagaatttcacaatctagcggacgctcttcaatatattacctttactagaccagatatctcttatgcgcttcagcaagtctgtctccatatgcatgatccatgggagcctcatcttgccactctcaaacgtatcccatgctacgcccgcagcaccttgcatatgggcttgtttgtgtgcctctcgcctcatttcggcttggtcgtttactccgatgctgattgggctagttgtcctgacacctgtcggtcaacctacatatatgcattgtttcttggtgacaatctagttttgtggtcgtttaagcgtcatcatataatttttcgctccagtattgaggttgagtatcgagcagtcgccaatgccgtggttgacgtcacttggttacgccaactcttgtctgagctgcacactcttgtgcgcaagacaattctggtgtactacgacaacatcagcacaatctatatgtcctccaaccatgtttagcactagcgcatcaaacatatggagatcgatctacacttattttggagtgcattgctcttggtgatgttaatgtccctcacatttctacgatgtctcagttcgccgacatcttcaccaaggggttgcctttctgtttttacaaagttctgatctagtctcaatgtctattccaccgtcgattcaactgcagggggtgttagactatgctgtatgtgtgggcctaatgtgtgggcctagagcctggcctgtacagctagcctgcccagtcatatatggttagtttgttagaaagatatgaggagatccttgattggtggtgtttaaaccccatgatctcctcagcctatataagtgtaatactggcatcttctctaatttaatcaatcattccacacaatcactatctcttttagttttttatgttctttgagttaatgtctcctctgtccctcctcagtctaaacatccaagatattctggggaaaacttgga

SEQ ID NO: 688 - DNA, 17618 bp, Zea mays
  Intron number 4 from transcript GRMZM5G806432_T01 (locus G RMZM5G806432) derived from phytozome v7.0 (chr-ID 6; pos 1 39177787 to 139195404)
tgcgaggatcgaaggtgggcgcggttggaagggggcggggatcacagtgtggcatgcagtgcgatgatggggcacgacggcgctggaatcatgggcttcgggagacgggggcgggggcacgctgcgggtgcgtggtaggcgggggcaggcgggggcaccacaaggtgtggacgccctccttgctctcttaatagagtagtaaagattcacatattttattatatgaacctaaataccaaaacataatgtttaggtacatttataccttctccttggcagaaaataataattcccgagcaatgtgtttgcaattacaaaattgcgtgaacagtaaaggaatattgttcactatttataggcacaagacacagcctgtaaggaattacaatcataccccttataaaagtttacaacaatgactcagacccttatggactaaaaggtcattccatctttaagtcggttcgatccttcatcttcagatacgctataacaccgaagcttcatgagtggtcgcttcggcatcacatataagctgctttttccgaagttgtttcttcctgcaggaccttcggcgacgaagcatggtcccaacagtagccccttcgcggtgctagatcgtttttcgtaacgagcttgatccgtgaaaaaagtctcttaggcttcgggaagccgaaggtccgaaaaacaccttccctgagctcgttgccgagaaacgatacagtttacgagcgcggagcggtcccaccatgcaggttctctttctcggtttttgcggcccaccattcagtgggtgcgagcgactgtttgtccggtgtaaaaattttgacgattcaccttcttacctgcagcactatataaacagacaggtaggtgtgaagttaccacaacattcattgctattgcactgtttcgctgccaaaaatttagccatagccgaagcttgacttttgcattcaaacgaagctccagtttggattctgctttgtcacgagaagagcttcggaaaaaaggttattaatttccaaggaattttcaagaaatctaaaatcaaatggccagagtacactccactgctagggttgagcgtgatggagatgagaccgaagccgctgaaactgttccgatttccgaagcaatgaggcgttctgggctggtttcatcagaggacacacctgctgccgaagcaacacaagctgatgttgaagaagttggttccaaagatgagtacagctgcgggatgccaagtaaacctagtcatttggactttggaaagtccaccatttctgaagctgatcttcctaaaatggtgaagatgggttattttagtgaggccaaaaaggaattaattcgttttggtggagagaaaactatcccaaagccaggaaaggacgaggtagtagtcttcaaaagttttcttaaagctggtctaaggttccccttgaacaagatgattgctattgtactgaagaagtttgggatttaccttcatcagctgacccccaatgctattgttagattaagtgtttacatttgggctcttcgtagccagggggtggaaccgttcggtgagggcttctgccgagttcatgaattacactaccagactaaagccagaggagatggtctgcactaaaattttggctgctacaactttgcttatcacaagactacgaagtttccagtgataagctaccgaagcaaatggccaaccggacggaaatctgaatggttttatgttaaagttgatgaagatgaagataaattggtccagagtccgctagaactaaccttcggagaaacgaggccccgatgcaacatgataatggggagcccgagttagactgctttggctgaatttcgagtgatttcagatcatattggcactagagacctagtgcaagattttttggcttttaaggtgttcccaacattgagggagtgggaaatgccgaagctagtgggagaaaagaaaaagggagaacttgttcgattgccttatcattacaagtttaagaaaacattttaaagcacccctgccagagtggctgaacacaattgaaattatgtgcaacgagatcctcggcaattactctaagaaagaagatcaattaatgactgcagccttcggcacacgtccgaaacgaagattgaatcgtgtgctagatgccttgaattttgattaccctgactatgagcaactggtcggaggtgccgaaggctagaaaagaaagaggattgcgagcgcccttgacaaagaaggcaccaaattggctaaaaaggacaaggaaacttctgaaacactgagccctgagagcacctagaggggggagtgaataggtgatcccgtgaaacttgaaacttaatccacaaaaacttgattaggcgttagcacaataatgccaagtggctagagaggagtctcaacaaaacacaataaccataagagatcaatcacagagatggcacagtggtttatcccgtggttcggccaagaccaacgcttgcctactccacgttgtggcgtcccaatggacgagggttgcaatcaacccctctcaagcggtccaaagacccacttgaataccacggtgttttgcttgctttactatatcctatttgcgaggaatctccacactttggagcctctcgcccttacactttgatgatcacaaagaagcacggagtaagggagggatgagcaacacactcaagacaagaaatcacagcaacaccacgcacacaagtcgcaacaagagctcacaacacaactcaatgagttcacaactcaactagagctctaattgctatcgcaaggaatcaaaagcgcggaatcgatgtcttagtgcttaggaatgcttagagaatgcttggtgtactcatccatgcgcctaggggtcccttttatagccccaaggcagctaggagccgttggatgcattccaggaaggcaattcttgccttctgtcgcctggcgcaccggacagtccggtgcggatttccttccttatttggcgaagccgaccgttggcagccttggagccgttggcgcaccggacactgttcggtgcacaccggacagtccggtgccccctactagccgttggctcggccacgtgtcctgcgcggatcgcgcggccgaccgttggctcaccggacagtctggtgcacaccggacagtccggtgaattttagtcgtacaccgttaattacttcccgagagcagcaagttcgcctgagttagtctggcgcaccggacactgtccggtgcaccaccggacagtccggtgcacccagacagagctggctttggctgaacaaggccatctcttctcatattcgatttctcctatttccagcacttagacacaatacattagtctctaaaacaatgtactaagtctaagaaacatacctttatacttgatttgtactttgtccaccatttgacacttaggcacttgtattggacactaaatcaccaaaacacttagaaatggcccaaggacacatttccctttcaatctccccctttttggtgatttatgccaacacaacataaagcaagtagaacaagtacaaatcaattcaaataagaactcaaatttgttttgaatcaaatttggcatatatggatcattctttgccaccacttggtttgtttttgcaaatcaaactcaatttcctatctctaagtcaaacacacatgttgaagcataaagagagatatttcacgagaaattgatcaaggattcaaaaactccccctttttcccataattaaaccttctccccacaagagaccaattttttgacaataagatgcaaacaagagtattttgacaaacaagaactctaactctactatttcaaaaatgctcaagtggtagctgatccatttcttgctttggccttattttctccccctttggcatcaagcaccaaaacgggatcaatctcggccctttaaccccattgtctcaccaaaatcttcaactaagagttaaaaaggcaataagagtatagagatgaacttggaataagttactctttcatcggagtgcagtggaagtcttgcatggtccaagtccaccttttccctttcaaaccacctttgagactcctttgttgaggtcggtgtgtccgtcggttcccattggagtctttgcgggcttggcgtccttcatcccaaacctcttgatcaaatcttgtgtgtactttgtttgggagatgaaggtcccatccttgagttgcttcacttggaacccaaggaagtagcttaactcgcccatcatcgacatcccgaatttttgagtcatcaccctgctaaactcttcacaagacttttggttagtagaaccaaatattatgtcatcgacataaatttggcatacaaaaagatcaccatcacatgtcttagtgaaaagagttggatcggctttcccaaccttgatagcattagcaattaaaaagtctctaaggcattcataccatgctcttggagcttgcttaagtccatagagcgccttagagagcttacacacgtggtcggggtaccgttcatcctcgaagccagggggttgctccatgtacacctcctccttgattggcccattgaggaaagcgctcttcacatccatttggaacaacctgaaagaatggtgagcgacatatgctagcaaaatgcgaatggactctagcctagccacaggagcaaaagtctcctcaaagtccaaacctgcaacttgggcataaccttttgccacaagtcgagtcttgttccttgtcaccacctcgtgctcgtcttgtttgttgcgaaacacccacttggttcccacaacattttgcttgggacgaggcaccagtgtccaaacttcatttcttttgaagttgttgagctcctcctgcatggccaacacccagtccggatctagcaaggcctcctctaccctaaaaggctcaatagaagagacaaaggagtaatgctcacaaaaattaactaatcgagatcgagtagttactcccttgctaatgtcacccaaaatttggtcaacgggatgatccctttgaatcatcgctcgaacttgggttggaggtgccggttgcgcttcttcctccattacatgatcatcttgtgctcccccttgatcacactcctcatgttcatcatcttgagctgggggttgcaccattgttgaggaagaaggttgatctcgctcatcttgttcctgtggccgcacatctccaatcgccatggtgcgtattgcggccgttggaacttcttcttcatctacatcatcaaaatcaacaacttgctctcttggagagccattagtctcatcaaatacaacgtcgctagagacttcaaccaaacctgatgatttgttgaagaccctatacgcctttgtatttgagtcataacctaacaaaaacccttctacggctttgggagcaaatttggaattcctacccttcttcactagaatgtagcatttactcccaaaaactcggaaatacgaaacattgggtttgttaccggttagtagctcgtatgacgtcttcttgagaagtcgatgaaggtagaccctattgatggcgtggcaagccgtgttcacggctttcgaccaaaagcgctcgggggtcttgaactctccaagcatcgtcctcgccatgtctataagcgtcctgttcttcctctctaccacaccattttgttgtggtgtgtagggagcggagaactcgtgcttgatcccttcctcctcaaggtaatcctccacttgaaggttcttgaactcggatccattgtcgctccatatcttcttcaccttgagctcaaactcgttttgagctctccttaggaagcgcttgagggtcccttgggtttcagatttatcctgcaaaaagaatacccaagtgaagcgggaaaattcgtcaacaataactagaccatacttacttcctcctatgctcagataggcgacgggtccgaagaggtccatatgtagcagctccaggggtcttgatgtggtcatcacatttttgctgtgatgcgctcctcccacttgtttacctgcttgacaagctgcacaaggtctatctttttcgaaatgcacgttagttaaacctatcacgtgttctccctttagaagcttgtgaaggttcttcatccccacatgtgctaagcggcgatgccacagccagcccatgctagtcttagcaattaagcatgcatctagaccgacctcctcttttgcaaaatcaactaaataaagtttgtcatctaatacacccttaaaagctaatgaaccatcacttcttctaaagacagacacatctacattagtgaatagacaattatatcccatattgcataattgactaacagataacaaattatatccaagagactcaactaaaaacacattagaaatagagtgctcagatgaaatagcaatcttccctaaccctttcaccttgccttggttcccatcaccgaatattattgaatcttggggatccttgttcttgacgtaggaagagaacatcttcttttcccccgtcatgtggtttgtgcatccgctgtcgataatccagctagagctcccggatgcataaacctgcaaggcaaatttaggcttgggtcttaggtacccaactcatgttgggtcctacaaggttagtacaaatatccttagggacccaaatgcaagttttatctcccttgcattttgcccctaattttctagcaactatcttcctatcctttctacaaatagcaaaggaagcatttaaagcatgataaattatagaaggttcactacttgttttcctagaaacatgaacaacatttcttctaggcatgtgattaataacatttctcttcgctaaatttctatcatgcacaacatgggaactagaagcagtcatagcatatgaaacaactttattgcaatgaacattcctagaatatttcctatcattgtataagaaagcatggttcttttgcacactatttgccataggggccttccctttctccttgatggagatgggagccttatggcttgttaagtccttggcttccctcttgaagccaagtccatccttaattgaggggtgtctaccaatcgtgtaggcatcccttgcaaattttagcttgtcaaattcattcttgctagtcttaagttggtcattaagactagccaattcatcattcaatttggaaattgaaactaggtgttcactacaggcatcaatgtcaaaatctttacacctattgcaaatcataacatgttctacacaagagttagatttactagctatttctagcttagcattcaaatcatcatttatgctccttaagctagaaattgtctcatggcaagaagatagttcacaagaaagcatttcatttcttttaacttctaaagcatgagatttttgtgcctctacaaatttgtcatgctcttcatataaaaggtcctcttgtttctctaaaagtctgtccttttcattcaaggcatcaatcaattcattaatcttatctattttagttctatccaatcccttgaacaaactagagtcatctatttcttcatcactggactcatcatcactagaagaatcataagtggcattgtttcgagtacataccttcttctccttcgccatgaggcatgtgtggcgctcgttggggaagagggatgacttgttgaaggcggtggcggcgagtccttcattgtcggagtcggatgacgaacaattcgagtcccactacttgccaaggtgtgcctcgcccttagcctttttgtatgccttctttttctctctcttgttcccctgttcctggtcactatcattatcggggcagttagcgataaaatgaccaatcttaccacacttgaagcatgagtgcttcccctttgtcttggtcttgcttggctgccccttgtgaccttttagcgccgtcttgaagcgcttgatgatgagagccatctcttcatcatttagccctgccgcctcaacttgtgccaccttgctaggtatcgcctccttgcttcttgttgccttgagagcaaagggttgaggctcattgattggaccattcaatgtgtcgtccacgtatctcgcctccttgatcatcattcgcccgctcacgaacttcccaagaacttcttcgagcgacatcttggtgtacctaggattttcacgaatattgttcaccagatgtggatcaagtacagtaaaggaccttagcattaggcgaacgacgtcgtggtccgtccatcgcgtgcttccgtagctccttattttgttgatgagggtcttgagccggttgtatgtttgggttggctcctcgccccttatcattgcaaatctcccgagctcgccctctaccaactccatcttggtgagcaaggtgacgttgttcccctcatgagagatcttgagggtgtcccagatctgcttggcattgtccaaaccgctcaccttatgatactcgtccctgcacaaagaggctaacaacacagtagtagcttgtgtatttttatgaatctgttcattaataaatataggactatccgagctatcaaatttcattccattctcaacaatctcccacatacttggatgaagagagaacaggtgactgcgcattttgtgactccaaaatccgtagtcctccccatcaaagtgtggaggtttgctaagagggatggaaagaaaatgtgcatttgagctatgcggaatacgagagtaatcgaaaaaaagttagaattaaccgtctttcttttgtcgtagtcgttgtcgtcgttgtccttttgggaagaagtggactcatcgctgtcgtcgtagtagacgatctccttgatgcgccttgtcttcttcttcttctcatctttgcgtttgtggcccgagcccgagtcggtaggcttgtcatctttgggctcgttgacgaaggactccttctccttatcattgatcataatcccctttcccttaggatccatctcttcgggcgattagtccctttcttgaagagaacggctctgataccaattgagagcacctagagggggggtgaataggtgatcctgtgaaacttgaaacttaatccacaaaaacttgattaggcgttagcacaataatgccaagtggctagagaggagtctcaacaaaacacaataaccacaagagatcaatcatagagatggcacagtggtttaacccgtggttcggccaagaccaacgcttgcctactccacgttgtggcgtcccaacggacgagggttgcaatcaacccctctcaagcggtccaaagacccacttgaataccacggtgttttgcttgctttactatatcccgtttgcgaggaatctccacactttggagcctctcgcccttacactttgatgatcacaaagaagcacggagtaagggagggatgagcaacacactcaagacaagaaatcacagcaacaccacgcacacaagtcgcaacaagagctcacaacacaactcaatgagttcacaactcaactagagctctaattgctatcgcaaggaatcaaaagcgcagaatcgatgtcttagtgcttaggaatgcttagagaatgcttggtgtactcctccatgcgcctaggggtcccttttatagccccaaggcagctaggagccattggatgcattccaggaaggcaattcttgccttctgtcgcctgtcgcaccggacagtccggtgcaccaccggacactgtccggtgcggatttccttccttatttggcgaagccgactgttggcagccttggagccattggcgcaccggacactgtccggtgcacaccggacagtccggtgccccctactagccgttggctcggccacgtgtcccacgcggatcgcgcggccgaccattgacccggccgaccgttggctcaccggacagtccggtgcacaccggacagtccggtgaattttagccgtacaccgttaattacttcccgagagcagcaagttcgcctgagtcagtctggcgcaacggacactgtccggtgcaccaccggacagtccggtgcacccagacagagctggctttggctgaacaaggccatctcttctccaattcgatttctcctgtttccagcacttagacacaatacattagtctctaaaacaatgtactaagtctgagaaacatacctttatacttgatttgtactttgtccaccatttgacacttaggcacttgtattggacactaaatcaccaaaacacttagagatggcccaaggacacatttccctttcacctgagccgaagataactgctccgaagaaaagaaaagccgcatccccaaaaccgaagacgtcggcccgagaggaggaagctcctgcaacaccttctgctgccgaagtggaagagattctgaaggtaatgactgaacctttgcctatcaggctaagtccgctggcgccggaactgacgaagttttttcagaaggacaaagaagcttcggcaacagaaagtcccgcaaagccgaaaaaacaaagaattatccaagtggccgatgtcattcatcagacaccgccaccgacatcggcgtcaaaaattgtcactgccgaaaccacagtcaccggagccgaaaccaccagagccgaaacaaccggagccgaagctaccggagcaaccactgaagtcgaagccaccagagccgaaactgagatcaccgaagatcctaatctagagaccacacttggtgatattgacaatatacttctgagaatggctgaagaagaagctgttgcggttgcggtgaacacgacaattgaaaaaggaaaagagcaaattgaagacactttggaagaagaaaattttaattttcaagatatacttggacaagagttaacagacactgaaaaagaagagctaaagaaatatgctatatcctgcggatacaaaccagggtctctgctatttggtggtgtcaatgaagggaaactaaggtgccttcggaatcgaaccgaggccaaggttgttaggactttctcaaaaagcgttggcctgccgaagatagaagcggacctctgcaggtaccagcgacagcatattgccggtagcttgctctatgctaatttcaaggtaaaaactcaactttatattgttttttgaattaatatgttctctaacgaaggttgttttgtcagagtatactactaagtaaagtgctgagaatgcaacaagatcttgaagaggagaaaaacaaagctaccatcaaagatctagaaaacaaaatcgaaaattatgaagctgctctgaagaaaaaggacttcgttattcaagaccttgaaatcaaagttaaagatcacgaagctgccttggaaaagaaagacttcatcattcattctatggaaggttcactggctgaagcccaagccgaaaatgacaaattaaacaatgaattacttataaaatcagaaaaatctgagcaggaaaagaagaatatcgaaacaagtctcaagaccgaaatcgagaagaattcaaatttgcaaaaaacattgaaggagcttcaggagaaatgcttagatttcggcagccgatgtgtgcagcggctgaaggatgtgtttcactcaattggagccagctctgataagtttacaccttcagctgaaaacctgccaaacaccttggaatacattgagggcgaagttgatgcacttgacgaagttattgctgggcatgctgatttatgcgccctgctagcttctctaccgctttcctgaaggctggctgcacgcacgggaaaattgtaaataggccaaacttcagtttgtcaccggcagatttggttgacatcccaagcctagcccgaagcataggaaacaggtttatgacccagatttggataaacggcgggcgaaaaatggctagtgacgaagctcggagccaccttaagccagtgagaaacttatacttgttacttttaccttctccttacattctgcacctttctctatccgttttaatatgtacaggatgatgaagctgaagaatgacgagctgaagcttaacagttgctgcaaaagacttttctgcaaaaaattctagggaaatctttgtaatataattgtagagaaacttatgtaaatttgtgcataccttgtaatatatttctcatttatccgtgtacgatctgctttggtgtggacgaaattttatttttgagccgaaggcgaaaaacaccttcccttctttttgtacacaacgaagcatgaaaatttcttctttctccgaagttttttcctcatagccgaagcatctgccttttctgtatgatatgataatgatcctatatatgtctaaatgaatgtttatgaatgcaaatgtcatgatgtaatgtatcgtgcaaatgaatatccgaatgtatattcgaaaccataatcatagccttcattcccttgggaatgactcaaatcttttcaccgtttacttttcggcttcaccgtttacttttcggtgtatcagcgctgacttttcgctgtaagcctcccttaggagcttcttcgccttttactttcggcggaatcagcgtttatttttcgctgcaagcctcccttaggagcttcttcgccttttactttcggcggaatcagcgtttatttttcgctgcaagctctgcattcccttaggaacgacttttgagcttctccctgttttcttttctttttcctttgcactcgatggtgcgttctcagcttttacatttacatctttgggggatatcgctcttatagaattgaaataagaaaaagaaaaattacatgttgtggccccattaaaaacctttctccccctttggaaaggaaaagggtaccacaaaaaagaatagaaaaaattacatcacactaaacataatatcgccgaagctcatccgcattccatgatctaggaatgtcgttgtcgtccatatccttcaatctgtaggaaccgggtcttgacgaagatactaccaaaaaaggtcattcccacttcagctgtaacttgcctactgtctctgggttggctactcttcgaagcaccaaatgtcatggcttaatattctttagccaaacctttttatcacgccattttattgtttcagcttggtatttattgatgttttccacagcttgaagcctgatcccttctatagcatctttttccacagagtaatcagcttctgcttcgtcttctatcgaagctactactcttattgatcctgctttggcttcttccggagttattgcttcgtcaccaaacaataatttgaatggtgtaaaacctgttgatcttgatattgttgtgttgtggctccacactactttgattaattcgtctggccactttctcctgggctgattgaagattaacttcattattcctgtcattatgatgccattagccctttcaacaagtccatttgactccggataccgaactgatgcaaaatggatcttcatgtcaatttgttcacaaaattctctgaaagcttcggaatcaaactgcgttccattatccacagtaatagctttcggcactccgaaacgacaaacaatattttgccagaaaaccttttgaatagtgaccgaagttattgtggctaaaggctttgcctcgatccatttagaaaaatattccactgtcactacaacatatcttaagttcccttgtgctggtggtaacagacctaacaaatcaaggccccacctttgcaacagccaagtgggttgtattaactgggttagagacgaaggttgtttttgatctcttgcacatttctgacaaccttcgcacttttggactaattccgctgcatccgaagctgcctttggccaataaaatctttgacgaaaaacttttccaagcaaaggcctagatccaatgtgagatccacacaggcctgcgtgtatttccttcatcaattctataccttcggctctggataaacacttgagtaatggagcacagactccatgcttgtacaactccccttctattataacatatggtcgagctcttgcctctatcctcctgttataagcttcgtcatctgaaagaaagttaccctaaaggaaagagatgatctcagttctccagtcttcactatagacaggagatatgttgaggactgctctttcaagaagttcgaccgaaggtgcttttattgttttgaaaaatacttccgaaggtaaaggcaacccttgtgctgctgacttggctaacaaatcagcatgttcattttctcctcaaggaatatttttgacagaaaacccctcaaaggaagcctcaatccttcggaccgtgtctaaatatttttcaagcttcggatctcttgctttataactcttgtcaatgtgaccagaaataacttgggaatcggttttaagaaccgcccttctaattcccattgcctttaatttccgaagacccaagagcaaagcttcatactcagcaatgttatttgtgcaactgaaatcaagtcttgttgcatagcaagttttaactttggaaggtgcgactaacacagcagctgctcctgctccgaaggttccccaagaaccatcgcaaaatactatccaaacttcagcgtctttactcgcttcttcttcctgagtccctggcgtccagtcagcaataaagtctgctaacgcttgggattgaatcgaagatctatgcacataatcaatgcagaactcattgagttccgcagcccattttccaactcttccagtagcttctctgtttctcataatatccttcaatggttgtgaagaagggacaattatattgtatgcttgaaaatagtgccgaagcttcctggaagccatcaaaacagcatacagcaccttctccaattttgtataatttttctttgataaactaaggacttcagagacgaagtatattggagcttgctttttgacttgcccttcgagcttctcttggacaagtgccgcacttaccactgagtgtgaagctgccacatataacaacagaggagcccctagcgttggtggagtaacgtcgttaggtctatcaaatattgcttcagctcttcgaaggctctctgctgaactggtccccactgaaaaacttcggctgactttagcactttcgaagaatggtaaatttctctctgctgatctagatatgaatctgttgagagatgctagtcttcctgtcaatcgttgagcccccttctttatgcttggtggttccattcgaaggatagcttcgattttatttggattagcctcgatcccctttgttgaaactaggcaaccaaggaatttccccttctttactccaaagacacacttttctggattcagctttagaccggcctgtctaaaattagcgaaggtctcctgcagatcagcaatgtgattttcttgcttcgtgctctttacaatgatatcatcaacataagttagcacatttctgcctatctgagaatggagaaccttcgctgtcattctgctgaagcttcctccagcattcttgagtccctcaggcatccgatgataacaatatgtttcactgggggttatgaagctggttttttgctcatcctccttcttcatccaaaatttgatgatagcctaaatagcaatccagcagactcataagctctgatgaagctgctgcatcaactagggaatctatccttggcaatagaaattcatccttcggacaggccttgttgagatcagtaaaatcaatacacatcctccatttgtcgttggccttttttaccataacagtgttagccagccattctgggtattttacttctctgatgacttcggcgctgaggagtctttttacttcattccgagcaccttcggccttgtcatcagacatcttctgaagcctctgctttctaggtctgaaggatggatcaacattgagcgagtgttcaataacatccctgttgactccgcaaagatcattagctgaccatgcaaaaacatctttgttgttgaacagaaaccttattaaggttttctcctgttcttcggacagttgagatcccaatagcaccttctgctctgctacgtcatcgcataaaagcatgggcttcggctgatcggccgaagcagctttctcccttctgaacttgtattgctcacaagcttcaactccatctatgttatggattgcttttgagtctgttcagtttcgttcggcccttctggcagcttcctgacttccatgaatagcaatgggcccttggtctgaaggtatcttcatgcaaaggtatgctggatgaagaattgcttcgaaggcattaagagtaccacgaccaatgattgcattgtaagggtattccatgtcaacaatatcaaacacaacttgttcagtcattgtgttgttaataaatccgaatgttactggcattgtgattttgccaagtgctacaatctgccttcctccgaagccacaaaggggatgtgtggcatcatggatcttatcttcgggctcttgcatctgtctgaaggctttggcaaatatgatatcagccgcactgcctgtatcaaccaaaacattgtgaaccagaaatcctttgatcacacaagagataacaatagcatcattgtgtgggtaatccttgagctgaagatcctcttgagagaaggtaattggaatgtgagaccatcttgacttgatgaagggtccttgtacccctacatgttgtactattctctgtgcctccttcttctgtttcttgttagccggctctgagcatgaaccgccagttatcgggagaatcagctttggagccgaagtagttccagcttggttcttgaacgaagccatcagctcaaaaagtggaagtgagttcaccggaggtgggcgccaatgttggggacttgttctcaaatgcttcgaattaagaacaaggcaacataaaatgttaaatattattgtccttcgttcgctgaagcattatctccccaaggatttaatgaacttcggacgaagaccatgagtagaatatcacgaaggttacaccttcgtgatcagaattacaaaataatatgaaataaaatataaaatatgaaacattagaggaagatgtaccaaaaatagataacattattcacatattttattatatgaacctaaatatcaaaacataatgtttaggtacatttatacctccgccttggcagaaaataataattctcgagcaatgtgtttgcaattacaagattgcgtgaacagtaaaggaatattgttcactatttataggcacaggacacaacctgtaaggaattacaatcataccccttataaaagtttacaacaatgactcagacccttatggactaaaaggtcattccatctttaagtcggttcgatccttcatcttcggatacgctataacaccgaagcttcatgagtggtagcttcggcatcatgtataagcagctttttccgaagctgtttcttcctacaggaccttcggcgacgaagcatggtcccaacaatcactttttccattcattctttgaattcaattgtattttttctttagattcattgacatcatgatttgtgttttaggtatagacct

SEQ ID NO: 689 - DNA, 823 bp, Zea mays
  Intron number 2 from transcript GRMZM2G040329_T01 (locus G RMZM2G040329) derived from phytozome v7.0 (chr-ID 5; pos 3 6066761 to 36067583)
ttacactcgggtaacgacggcaaatattaacaactgcaaaaacaacatattaaaacatgaatagcgtcaagtaaatcctgtaggatctcaaaagttgctaaatattgataagcatgggtacattctgcgagacataaccttccaaaacaatacataatttagaggaaggcaattcatatttaactacaaatcatagtcattagtcatagtcttcaaaccaacggctttaacctaacgccccatttggatccttggaattgaattccattctaataattgtaatttagatataggtcaattaagctaaaatggttttatatacatgatacaatatatttgtatactactattggccttatgggggagatatttatatgctgcatttctactataggggagcaaaccaaagagcgtgttataagctgctgagtagaaacataaactagtgatacataaaatcaattttcacccccctcatcctatgaattttggataggcttatatataaactttgaaaagtgctcgaatatcaaattccaaaccaaataacttaatctattaagtaaattccaattccttcaagatgaagggatccaaacagcccctaattgcatttccctcctatgaatttctaaaaattaacggacaagtttgaattatgaagtcagtgtgtctgtcattttgcaaaagtgaggtggtaggaaataagtagcaagcacactattctgacttccaactattggcggtagtgatgtggtagaaaacaataccaagaaactgacttacagttctgcagtgatatcctagtgttttcaaatttcaa

SEQ ID NO: 690 - DNA, 9219 bp, Zea mays
  Intron number 2 from transcript GRMZM2G107167_T01 (locus G RMZM2G107167) derived from phytozome v7.0 (chr-ID 1; pos 1 60267680 to 160276898 reverse strand)
caagccaagggagcacttcatcggaagagtcccgcaccaaaaggagggagaagaagaagagctcctccaacaaagggaaggagaagaaatcttcttctcatcacaaagagaagaaggaaaaatcttcttcccacaagccgcatcggaaaggcgacaagcacaagaggatgaggaaggtggtctactacgagaccgacacttcatcaacatcgacctccgactccgatgcgccctccgtcacttctaagcgccaagagcgcaagaagtatagtaagatccccctacgctaccctcgcatttccaaacatacacctttactttccgtcccactaggcaaaccaccaacttttgatggtgaagattacgctaggtggagcgatttaatgcgatttcatctaatctcgctccacaaaagcatatgggatgttgttgagtttggtgcgcaggtaccatcaataggggatgagaactatgatgaggatgaggtagcccaaatcgagcacttcaactcacaagccacaacaatcctcctcgcctcactaagtaaagaggaatataacaaagtacaagggttgaagaacgccaaggaggtttgggatgtactcaaaaccgcgcacgagggagatgagctcaccaagatcaccaagcgggaaacgatcgagggggagctcggtcggttccggcttaacaaaggggaggagccacaacacatgtacaaccggctcaagactttggtaaaccaagtgcgcaacctcgggagcaagaagtgggacgaccacgaagtggtaaatgttattttaagatctctcatttttctaaatcccactcaagttcaattgattcgtggtaatcctagatatactaaaatgacccccgaggaagttatcgggcattttgtaagttttgagtgcatgatagaaggctcgaggaaaatcaacgagcttggcgagccatccgaagctcaacccgttgcattcaaggcgacggaagaaaagaaggaggagtctacaccaagccgacaaccaatagacgcctccaagcttgacaatgaggagatggcgctcgtcatcaagagcttccgccaaatcctcaaacaaaggagggggaaagactacaagtcccgctccaagaaggtttgctacaaatgtggtaagcccggtcattttattgctaaatgtcctatgtctagtgacagtgaccgaggcgacgacaagaaggggagaagaaaggagaagaaaaggtactacaagaagaagggcggcgatgcccatgtttgtcgggaatgggattccgacgaaagctctagcgactcctccgacgacgaggacgccgccaacatcgccgtcaccaagggactcctcttcccaaacgtcggccacaagtgcctcatggcaaaggacggcaaaaagaagaaggttaaatctaactcctccactaaatatgaatcttctagtgatgataatgctagtgatgaggaggataatttgcgttccctttttgccaaccttaacatagctcaaaaagaaaagttaaatgaattagttagtgctattcatgaaaaggatgaccttttggactcccaagaggattgtctaattaaagaaaacaagaaacatgttaaggttaaaaaggcttatgctctagaagtagaaaaatgtgaaaaattgtctagtgagctaagcacttgccgtgagatgattgacaaccttagaaatgaaaatgctattttaaatgctaaggttgattcacatgtttgtaatgtttcaattcccaatcttagagatgataacattgacttgcttgctaagattgatgaattgaatgcatctcttgctagccttagattagagaatgaaaatttaattgctaaggctaaagattttgatgtttgcaatgctactatttccgaccttagaactaagaatgaaatgttgcatgctaaggttgtagaacttaaatcttgcaaaccctctacatctaatcttgagcatgtttctatttgcactagatgtagagatattgatgttaatgctattcttgatcatatggctttaattaaacaacaaaatgatcatatagcaaaattagatgctaaaattgccgagcacaacctagaaaatgagaaatttaaatttgctcgtagcatgctttataatgggagacgccctggcattaaggatggcattggcttccaaaggggagacaatgtcaaacttaatgctcctccaaagaacttatctaactttgttaagggcaaggctcccatgcctcaggataacgagggttacattttgtaccctgccggctatcctgagagcaaaattagaaagattcattctaggaagtctcactctggccctaatcatgcttatatgtataagggtgagacatctagctctaggcaaccaacccatgctaagttgcctaagaagaaaattcctaatgcatcaaatgatcatgccatttcatttaaaacttttgatgcatcttatgtgcttactagcaaatccggcaaggtagttgccaaatttgttgggggcaaacacaagggttccaagacttgtgtttgggtacccaaagttcttgtttctaatgccaaaggacccaaaaccgtttgggtacctaaagtcaagaactaaatttgttttgtaggtttatgcatccgggggctcaagttggatactcgacagcgggtgcacaaaccacatgaccggggagaaaaggatgttctcctcatatgagaaaaacaaagatccccaacgagctatcacattcggggatggaaatcaaggtttggtcaaaggattgggtaaaattgctatatctcctgaccattctatttccaatgtttttctcgttgattctttagattacaacttgctttctgtttcccaattatgtcaaatgggctacaactgtctattcactgatgtaggtgtcactgtctttagaagaaatgatgattcaatagcatttaagggagtgttagagggtcagctatacttggtagattttgatagagctgaactcgacacttgcttaattgctaagactaacatgggttggctctggcatcgccgactagcccatgttgggatgaagaatcttcacaagcttctaaagggagagcacattttaggattaacaaatgttcattttgagaaagacaggatttgtagcgcatgccaggcagggaagcaagttggagtccatcatccacacaagaacatcatgacgaccgacaggccgcttgagctactccacatggatctattcggcccgattgcttacataagcatcggcgggagtaagtattgtcttgtaatagtggatgattattctcgcttcacttgggtattctttttgcaggaaaaatctcaaacccaagaaaccttaaagggattcttgagacgggctcaaaatgagttcgccttaaggatcaagaaaataagaagcgacaacgggacggagttcaagaactctcaaattgaaagcttccttgaggaggagggcatcaagcatgagttctcttctccctacacgccacaacaaaatggtgtagtggagaggaagaatcgaactcttttggacatggcaagaaccatgcttgatgagtacaagacaccggaccggttttgggccgaagcggtcaacaccgcctgctacgccatcaaccggttatatcttcaccgaatcctcaagaagacatcctatgaactcctaaccggtaaaaagcccaacatttcatattttagagttttcggtagcaaatgctttattcttgttaaaagaggtagaaaatctaaatttgctcctaaaactgtagaaggctttttacttggttatgactcaaacacaagggcatatagggtctttaacaagtccactggactagttgaagtctcatgtgacgttgtgtttgatgaaactaacggctctcaagtagagcaagttgatcttgatgagataggtaatgaagaggctccatgcatcgcgctaaggaacatgtccattggggatgtgtgtcctaaggaatccgaagagcctccaaatgcacaagatcaaccatcctcctccatgcaagcatctccaccaactcaaaatgaggatgaggctcaaaatgatgaagagcaaaatcaagaagacgagccacctcaagatgatagcaataatcaagggggagatgcaaatgatcaagaaaaggaggatgaggaagaaccaagaccgccacacccaagagtccaccaagcaatccaacgagatcaccccgtcgacaccatcctcggcgacattcataagggggtaaccactcgatctcgggttgctcatttttgtgaacattactcttttgtttcctctattgagccacacagggtagaggaagctctccaagattcggattgggtggtggcaatgcaagaggagctcaacaatttcacaaggaacgaggtatggcacttggttccacgtcctaaccaaaatgttgtaggaaccaaatgggttttccgcaacaagcaagatgagcatggtgtggtgacaaggaacaaagctcgactcgtggccaaagggtattcacaagtcgaaggtttggatttcggtgaaacctatgcacccgtagctaggcttgagtcaattcgcatattattagcctatgctacttaccattgctttaagctttatcaaatggacgtgaaaagtgccttcctcaacggaccaatcaaggaagaggtctatgttgagcaacctcccggctttgaagacagtgagtatcctaaccatgtctataggctctctaaggcgctttatgggctcaagcaagccccaagagcatggtatgaatgcctaagagatttccttattgctaatggcttcaaagttggcaaggtcgatcctacactctttactaaaactcttcaaaatgacttgtttgtatgtcaaatttatgttgatgatattatatttgggtctactaacgagtctacctgtgaagagtttagtaggatcatgacacagaaattcgagatgtcaatgatgggggagttgaagtattttctaggattccaagtcaagcaactccaagagggcaccttcattagccaaacgaagtacactcaagacattcttgctaagtttgggatgaaggatgccaaacccatcaagacacccatgggaactaatgggcatctcgacctcgacacgggaggtaagtccgtggatcaaaaggtataccggtcgatgattggttcattgctttatttatgtgcatctcgaccggacattatgctttccgtttgcatgtgtgcaagattccaatccgaccctaaggaatcacaccttacggccgtaaaacgaatcttgagatatttggcttacacacctaagtttgggctttggtaccctcggggatccacatttgatttgattggttattcggatgccgattgggcagggtgcaaaattaataggaagagcacatcggggacttgccagttcttgggaagatccttggtgtcttgggcttcaaagaagcaaaattcggtcgctctttccaccgccgaagccgagtatattgccgcaggacattgttgcgcgcaattgctttggatgaggcaaaccctgcgggactacggttacaaattaaccaaagtccctttgctatgtgataatgagagtgcaatcaaaatggccgacaatcccgtcgagcatagccgcactaagcacatagccattcggtatcattttcttagggatcaccaacaaaagggggatatcgagatttcttacattaatactaaagatcaattagccgatatctttaccaagccacttgatgaacaatcttttaccagacttaggcatgagctcaatattcttgattctagaaatttcttttgctagcttgcacacatagctcatttgaatacctttgatcatatctcttttatatgctatgactaatgggttttcaagtctatttcaaaccaagtcataggtctattgaaagggaattggagtcttcggcgaagaaaaaggcttccactccgtaactcatacttcgccatcactccaagcaactctctatcctttgggggagaaatgagcatcaaagaaaaggacttcatccctgggggagagagtaaaagctcaaaagcaaaaggaccggacttcatctttggtataatcttaactcattcatttatgaccaaagaggaggaacttacttcaagggctctaatgattccgtttttggcgattcatgccaaaaagggggagaaatgagcccaaagcaaaaggaccgcaccaccaccaccaaattcaaaacttagtgctttccaagagtatttatcatttggtatcctattgtgttcaaaagggggagaaagtagtatttcaaaaatggtatatcaaaaccctcttgaacactaagaggtggatctcttttaggggagttttgtttagtcaaaggaaaagcatttgaaacagggggagaaaatttcaaatcttgaaaatgctttgcaaactcttattcatttacctttgactatttgcaaaaaatctttgaaatggatttacaaaaggaatttgcaaaacaaaacatgtggtgcatacgtggtccaaaatgttatataagaaagaatcattccatacatatcttgtaagtagttatattggctcaattccaagcaactttacacttacattatgcaaactagttcaattatgcacatctctatttgctttggtttgtgttggcatcaatcaccaaaaagggggagattgaaagggaattaggcttacacctagttcctaaataattttggtggttgaattgcccaacacaaatctttggactaactagtttgcccaagtgtatagattatacaggtaaaaaaaggttcacactcagccaataaaaagaccaagttttggattcaataacagagcaaaggggcaaccgagggcacccctggtctggcgcaccggactgtccagtgtgccaccggacagtgaacagtacctgtccggtgcaccaggggactcagactcaaactcttcactctcgggatttctcggaagccggcgcgctataattcaccggactgtccggtgtgcaccggacatgtccggtgctccaaggaagctcggcctcctaaactcgccagcctcgggttcgcgcggcagccgctccgctataattcaccggactgtccggtgtgcaccggactgtccggtgtgccagcggagcaacggctccctgcggcgccaacggctccctgcggtgcattaaatgcgcgcgcagcgcgcgcagaagtcagaatcgcccatgccggtgcaccggacatcaaacagtgcatgtccggtgtgcaccggacacccaggcgggcccacaagtcagaagctccaacggtcagaatccaacggcagtgatgacgtggcaggggcaccggactgtccggtgtgcaccggactgtccggtgcgccatcgagcagaagcctccagccaacggtcaagttttggtggttggggctataaataccccaaccaccccaccattcattgcatccaagttttccacttctcaactactacaagagctctagcattcaattctagacacactaaagagatcaaatcctctccaattccacacaaagccctagtgactagtgagagtgatttgccgtgttcatttgagctcttgcgcttggattgcttcttttctttctcacttgttcttgagatcacaactccattgtaatcaaggcaagaggcaccaattgtgtggtggcccttgcggggaagttttgttcccggctttgattagagaagagaagctcactcggtccgagggaccgtttgagagagggaagggttgaaagagacccggcctttgtggcctcctcaacggggagtaggtttgcaagaaccgaacctcggtaaaacaaatctccgtgtctcacttgcttgttcgcttgggatttgttttgcgccctctctcgcggactcgtttatatttctaacgctaacccggcttgtagttgtgtttatatttgtaaatttcagtttcgccctattcaccccccctctaggcgactatcagacccgaaacgctgcatcgcccgcccgcgcttttggcaaggatcctagtcatgctgccgtgtgtgttcattgcaaggaattggtcaagtattctaatcatgctctactgcctgctctttgctcctaatcaaacgtttatcaagcatatataaaatgtatacataaatataaaatgcatacgtaaatattgatacatttaattctaagcaaagaatattgatacatttaatacgcgtccaagtatatatgcatttatatattgctctattgttggttcgggccagtggctggcccggtacgttgaggcccaccgggccaacgggccggcccggcacgatttttctctgtccgtgccgggtttgggcatgtccctaagcacgtgggccagcccgacccggcccgaagcatcaacgggccgtgcctggcccggccctattcgtaccgggccgaaacgggttcgggccgggtccgtgccgggtggcccgtttggacatctatacgtctggggtgtgctcagcagcggggagctccactgctggcgttggcgcggcctcaacatctccagggacctccggtttgccgccgccgccgtgggtgacagcttcgtgtgtgggatcctcaaagggatgccggcgtccatccgttgcttcgggaacgacacggcggcggccgccgtcgccggattccaccatccgctgcttgggcgacggcgtggccgtgccgtcggccggactcgcgcgcgcctagttcctcgatgtgcgcgcgtacggcaaggccttttgcggcgtgctcatggccaactactccctagtctgttggggcggacctaagttcaacgccaccaatcgccttgtcttcggtcgcgtcttgccaggcccctgcctctgcctgcccatgtcctcgtgccaatgcggcgtcttgctaggctccgccaacctctgcgacaacaaccgctatgtctgcgtcaactgcgcgttcgagctcaacgtcgctaggcccaacgcatcgctcatccccgtgaagggcggcaggagtaggaggaccatgtggattgccatcgcggcgggggccaccgctttccttgtcttcttcgtggaattgcagttcgcgctggtcct

SEQ ID NO: 691 - DNA, 2568 bp, Zea mays
  Intron number 1 from transcript GRMZM2G010452_T01 (locus G RMZM2G010452) derived from phytozome v7.0 (chr-ID 8; pos 1 15788878 to 115791445 reverse strand)
tccgtccaggcttggattgatttcttatctgcgcggtaaggaaacctaatcccgttttttgctcggataaattgtttttgtcggtggtgggatcattcgcttcgatgctgccgctctaatcttattgttggtttcaatcgaatccgtagagttcgtcggggatgtgcttgcttcctgcgtgagtaatgcagtgctctagtagaggttcattttccgttttttttttgtttggggtttagcggaatcctcctgccccctgtcatataggtgttgatttgcgcggtaggctttatttcgctgccttgcgagttatagggttatccgtagttttcagcgttttgaagttgttcatgcttcatatcacgatttgaaagatgattatgttcactaagtatcggtgacggcatgaagaaggatttagggctttcacactgggtaaccgttccaaacgattctgcacaagtgcttctgttgttgcggagtcctcttttggcagtgttccctgttgccaatgtttgggcaaagctagccggtaatgaagttggggtcagctccactaaaatgatagaattttaagctagatatctaaaggatttgttaagaaactatagtatttcgtcggggttggtggacccctgtgaaagggcctagctcagcttctgtaatgttgtaataaatacctccatctggcctggcttcaatcaaatcctgtgaagcactttggtgtccacatgccttagaagctaggatcttgtcaggtttgccttttttatttcttggattttaactgagacacaggctgtatgtgcttaatgggggtctttaatatggttgaaactcatgatcatgttgtgcctaagtttggtcgaacaatgcattcatacattggggtgtagatatgcgtgtttgttctctggggtgatatagctttgttatctgtcagtcgatatcatttagtttgcattggatgctgatgatattagggtactaacctgttcgtcctaaaatatatttatttgcaattttttcattgtccattggtagctctgttgcacagtgctcttttctgtttttaattttggtgtacaatatttacagtgttgcttttctttatgtttttttctggaacacacaagagggctgcatatcattatattaagaaggaatatttatgttttttggtcatgtaatattcagttgttcatgaatattgttgctgtgtaatttcttcattgtccataggctgcacggtgtccttttcttttattaggttaaaaatcgtttatggcgttaatcattttctgctgaagttgtatacttgtattgtatgatttatggcttctctgagcatgctctttagctttgaatggtcaatcagatgcattggttgatttagctgtttagtgataatcttggattgttgatgaggctaagcaaatattatgggtatgtgctttaatatggatgaaattttttcctacagtacccaaggttttaaagtcagctagtcgactctagtcgcctgagcaccgataaggtgactaatcgcgattagtcgtcgatttactcgattagtcgactcctagtcgtccacctataacaagaccatatgtatatatcgatatataaagttgtagaaggactgcaatacaacagtacactagttgtagcaggatagcagtacactgatttcagcagcacactgattcagtggtggacccaagatttcttgactgggtatgcgagatcaagagatgtcctaggcacattgccgtagtggcctagtgggtcgggaggatagccgcggaaggcagaaactaatgggtatgataagatcgtggaggaagttttgaagagtagagatagtgttgcatacatacatatactatatgctatttatattttgcaaaacagcgctggaggggggctctacagactacagccaccgcatgatggagggggcgcagctgacactcgagtagagggccgtcagagcacagcagcggcaggagaggagggtggcggcgatggagaaggtgcgacggcgctgggaaagggtgcacgcgcgagcgtgactatgagctgcgtaatgtgtgtaccgtattggtacaagtaggacaaaatagtgtttgtgttgtacagatggtgggtcggcccatgtaacagagatcggattagtgacccaaaacatgtaaaactagtcgaccattatacctagtcggacgactaatcgcgattagtcagcgactaggacgactaatcgcttcctagtcgttctagtcgagtcggagaccctaatcgagctccctctagcgataaggccgactaatcgcgattagtcggacgactttaaaaccttgacagtacctttgttgaatgagttgtttggctaatatctgtgctgtgaacaagttgttttgaatgcaaaaactttaagctatgttcatctgtctcagtgtctgactgacctttactaatctgcactgttgattattatgttgcttgttgattttctctgattcctttctgactgacaaaacttatatatattttatgtaggatacagcc

SEQ ID NO: 692 - DNA, 3134 bp, Zea mays
  Intron number 6 from transcript GRMZM2G133721_T01 (locus G RMZM2G133721) derived from phytozome v7.0 (chr-ID 10; pos 111856498 to 111859631 reverse strand)
ttcctggaacattccacattgcaacttataggacagtacatcacttttattttctatagatttttgtggcgagcttatattattttctttttgatgcttcgtgaatagttttaccgcaggtgtttggtatatttttttaacgcaattattccaagtctttgtaactcgagaagtttacagtggatttccatcctgatgttgcagccttcttttatttgtggcatcttaataatatggagtgaaaagtattttggtgcaagcaggcagacaaggcatccatgttggatgaaatctctactattaattatgtgcctatcgtaggcgtccacaattcccagtggtgcacggttctgccgttgcgctgcgcgcctaccatctccctccttccttccttcgacgatactccttccttcgacggcccacaacggctcccctcgaatcccgcccgcgcgccacctcgcatcccggccgcccgccgctcgcctattatggaatgggcgtccctcgcatcccgcccgtagcggatccctcaaatcccgtcagcggcgactccaatccccgctcccatcgccattgcttgataaatgatgacaatggtgatggttatgatatatgctcaatattgtattgatcttttttcgagtgttaggctgtcatgttgtttgctggaatggagatatttcattgttcacttgattcatgtgacagagttaattaccttatttccgtcctttcttagtaccctttttctgagatttgagttgtaaataacactttcctaatcgtgttgtcattataactcaatgacattattaaaatcatatatagaagtctatatggtactgatggttgcaatgtaatggtgaaatagctagattaaaataacaaaatttatgtacgggtaggatcacaaatggattccgaaacattttctcataacaatataacacacatatatacataagttatcgtgttattatacggttccgttgcaacgcacgggcactcacctagtgattgaagaagaccaaacggccgttgcattgcactgattcaaaatgttcaaattgaagtagcacaccgtcagtcactctcacttgcgtcactgttccctccattgttccaggatgtgatgtgaactcatagtcaacaggtgactttaaaaacaactatatactccatgtattctaaattataaaacaatcttgattttctctcacagtgagttgaatttactattagatttaggcatataaagggagcagaaagttaactgactcaagattactgattcgatcctcttaagagcaaaaacgttcagaggaggttgcattcggtcttgtaaaccaaatacaaacaagaaataaatctagacaaatttggactagataagcaaaacctaattataagggacaacccatgctctcctccgagatttacgccgcgcgacacagctccaatccctcaacaaccatgctactccgctccctcagcaaacctgtcgcacgtagtatagatttcgttccgcgacggcgccaatccatcactcgtgcgcacgtaggaaccagcgtgaccgcgatcgtgagcgggcggcggcgcggaagctgtaaagcccgaaatttgtataagaaaaaaaataaaataaagaaataaagaaataaaatagtaaattcagatatctcaaattatacttgagctttgaattttgaggacagaattttgaaacaaaaaattaatttagaaaagaagtaatagaaaggttttctattcaactaaatgattattcatttcattaaatgatacactatactcatttatttaaaagagtattaaatttagatgacacaaatcttgactagactttttaaatttaactcataaaattgaagctcgggaaaataaataatagtgagatactccattgatttgttctcctcataaagtatacatactcttaaaataattaagaaacccttaaatgaaagtatacaatacattctttcaaaataaatagataatgaatgtttatttctgaagtaactttaattcttattccacattcaaaatgctattttcctaaaaagaaagaaacaatataagtgtgtttcatatttcaaacatctaccaagcaaataaaataaatatatatctattgcatcatgattgatttttgagtgagcattatgtttgagttttgaactttatttgaatcggaattaagaaagaatagaaatttgaaaaaaaaagaatatcaaaacaggaaaatataaaaaaacaagaaacctggcgcctgggctgtatcccttactcccggtcggcccaatttggcaattcgctccccgcgcggcccagcttccctggcgcatgcacactcactggcatgtgggccattttggtcaggcccacacgccagcctttccaccacgcccacccatgcgtttctttggatcactgccttgcggaccccgcgccgtcagcctcttcgctcaaccaacaactcgtgcgtgtgtgccgttgttgcgtgggtccatcatgtcagcgttttcttctccgttgtgaccttggcccggtgtatcggactcgtgcgctagccgcgtaataaacgcacggtagtcgcggatttgggtgccgcgtgactcgcgcgcgccgttggacgcctggggccagaaatcacgccctaaccttgtatatataagcacgcggctcgggtatcgccatgaacgggggaagctcgagaggatctcgtccaaaaacctttctattacaagaggttcgtggaagcgattattatggccttaaagaaatataagattacctacaacaagatgatatttttaagtgggaacatacaattcggactggtcttccaattgacttaaaagggtattttcttcgtacaacgtaccttctcaacaatatagaatttttgtatgataaccattgtatataacataattggccaaacattaatcagctaccttgttctacaagctatggtcatgtgggggaaatggtaggcgaatggaatttgttaggatgagtggagtacgtttgtttaatgttcaaacatacattccagttacataatacaaatttgatttgatgttctattctcttatgtctttgtgtgtagg

SEQ ID NO: 693 - DNA, 12406 bp, Zea mays
  Intron number 17 from transcript GRMZM2G109651_T03 (locus GRMZM2G109651) derived from phytozome v7.0 (chr-ID 8; pos 62991852 to 63004257)
cagctagagggattgttgtggaagagggaaagaaagtaaggaacacttttgggcaaccaaacttcctgtttaccattttaagttgaatcgtatgtagtttattgattggtagatgggatagcagatagatatgtgaccctcccttccttggaggttctgagctgcacttctttgatctattttctgcttgcctcaacctaggactccttagctacctttatagatcaggcgcctaacaaactccctaacaaatcttatctaaacaacgcatcttatcttatctctaaactatcttaatcttatctctaactaactctatcctaactaatcataatagatctgctctaatagggccaccccagctagccccatcaactgcccataacattaccaccccttttcgagcagcgcctcctattccatgattgacgaaggcggcctcacggtgggcgaggagggtatggtgtgcaattcatgctgaagcctacaacgctgccctcaattccttgttcctgctctacggtagcttggggtgctgaggtcatgttgatcgcggaggcatacgatgctaccagacacccagctcgggtctgcccgtgactggatcagggatgacatcaacggagctgacaatcttcagcacaacactgttctcgcgtaaacagtagacgtgtatgaacagtatccgcagttgaacagtttgggccgactggcttgttttggattatggatggtaagagatgggatcctagatctggattggattaggggtagaaaattgggtaggatgatgtagtttattgattgggtagatgggatagcagatagatttgtgactcgccctcccttggaggctctaagctgcacttctttgatctattttttgcttgcctaaatctaggactccttagctgcctttatagatcatgcgcctaacaaactccctaacaaatcttatctaaataacgaatcttatcttatctctaaactctatcttaatcttatctctaactaactctatcctaactaatcctaatagatctgctccaatagggtcaaccgagctagccccatcaattgcccataagactgcgatgagattggggaattggagagggagttgtagttgcaagaagaggacttgcttctaattcttgcttacccttaactgatacaatagtgttcattttatagagacgactgacttatctctttccaactaaccaaatctggtctaatttttatctcttccttaactaatctgatctaattgttatcaaccaaatctggtctaatccttatatcttccctaactaatatgatccaatcaatccctatcttttgcctaacaaaccaactattttgttctgatctaatctcggtactgttcacgcgctatagtaactgcgtgagcacccccatggacaagtagctcgtcctcgagctgcagcataacgggtgtccatagaccgactcaatttggcctaagcctatacctagaagaacaagtcttttacatctcggctcattctctattggtagagtactgcaaattctttgttggaccgccattgaggtgggccccatctagacttattaacagagaggcatgcttggccaccgtagcccacaaggcgtgtcacaagcccatgaccgatgagcaactttgcagtagaggagctaggtagccaggtgttgtggccacccttgctgttggttgtgccgttagatatccgaagaaaatggtggtggccgttgtggatttgtggaggaagaagaggacactaagatacgcgatgatcctgatctaacgaacgcctcaatggccaacgaagatgacgtcgcagtggctgagttcaaacacacgccaggtgttctagctcttactttgtcacacctggttctgggggcaaaaccgaatgcatagcatatgtgtgccaagatccattttccacacatatgttgacgtcacaagtgtaatgtatcaaaagacaatgtaaaaaaggcgtaaagagagtagaataactttattacatcatccagacataaatatcttaaacagtatcatcaaagtataacggaaataacatgggtaatctcccacaggaagatgtccggcgcatcgttagactcagtattcatcgaaatctccatcaaggtcttcatcaccctctgatcaaaatattagcaagggtgaactcacttatggtcggagctcagcaagtgggggaaaattaatgcaagtttaacaagataaggttaaggttaagcggtaagcattttagttggtcaatattttattagcaatacatgtcttactaataagtgtgtatcccaagtatcccaagtaaacaaaggtataagagtatatcaaaaacacttaagtgaaaccacttaagcaaaccatttgcagatcatcatatctcaatttattgtccatctttaagtttaattatcatgtgagcgtccaggttgctcttaaccgtgagcacggctgacatatcagttttacactctgcagaggtggtacaactttacccacaagccatgtatctcatctagcctgagttgtatggacccttaaacactgccaaggtgaatggctagggatccactatgaggttttcacaaaatacacttaatacaaagcaacatgctaaggtttctaagtcggtgtggaggccctctgggcgaggtaccttagccaagaatacgtccccatgttaacatgagctgccaccactgccgctccccctcttgcccatatttcaggtaaggttgctaggtactaagcgcattaagctaattaccaaagccagagccatgatagcactcgtggttgcactgttatcctgggtggtcactccatattccaattaatatgaaataatcttgtttaaccatcgggttaacaccatacaaatttcatttccggaacattaatatcaataatgagtgacatcaaaattatcaagttgagcggtagcacaaatatgcaaagcatagtattttcccagggtaatcaaggaataaagttggtaaatctaggaaatccttaattaggcaaatcccatcaaattatgcaatatatccaaaaagtaaacattattatatgcattaattgagtacaaatagaatacgcagagggagaatccacttgccttgctcgaaagtgtcctgtgggtcatcctcgaacgagtttggttcgtctaccccacagtcaacttctagcatcgatttgcgtattgtacatacaaaaagaataggtacgccaaataaataaacatacaccattacaggagtaatcattcaccattacatacacattcatacatcacaattatcctcataaatgtcttaaagcataaatacttattaatcccttatgaccattactgtgagtcgatattggtgaaaatatgagtaggtggctataacactagttttatctagtataatatgtattaacaatctttatggaaaataaatgctaattattttctttattactaataatagacttttaagttttatcccttttatttctaaatagaaattatgcctatagctaaaaattgtttatttttttaattcttctaacattaatattctaagaattaatgtaaatcgctaattggacttttaataacatatttatggttattatgacataaacaagtattttactaattctaattaatttagtgctacacttatgaacacatgtattctaactagtaaaaaactcgtccggggagggaaagaccgccctcccggtattatatattaagaagagaccgaaacaatggtcccggccgagaaaatccccgaaccctggcccccatcacttaacgggccggcgtcaactgtccactctgcaacggcccaaccggagggtggcgcacaggacatcgtaacccgagagcggatggggcacagcgaggggatttttttaaccaagcctgaaaattcgctcccgaggggaatctaactagtaaaaaatctattttcatctgaccggaaacacgtggtctagtattttcttctacttcttcatatcaataaatttacacttaaaatactactaacaattatcgttccatctgctagaacgaagtttaatttgtaaacgtttctagtgtgaaaatcactgaggtagtgaatagtgacattattcatttttaaagttataaaatcatacacatgtccaaaatattgttgcggggtttgattatggctacacgtatacattggaatctcttttcgataatttctaaactgaaaatctcgaaattaattaaatttacaaaccagggactaaatcgcaaatttgccttcttctaccttggagcaattcgtgcgcacagggagatgaagggacatggtctacgagcagggagcatggcgctggacagggaggggcttggtcgagcaggggcgcggacgggcggcgaggtccggcgggggtgctgcacggacggcgtgctcggacggcggagctccggtgacgaacgacggcgtgggcgcggtgtacggcgagttcgagagcgaggagaacgagagagagagagagggcgagctcggggagggagagagagggaggtgctcgacttttatagagagaggaggggagaggagagggcgccgggggggggggagagaaaaggaccggcaatgaactccattgatggccatcaatggaggtcttcattgagggagagagaaggggaaacgagggaggagaagaagtggtcgacggtttccggctccggggccgaacgggcgcggcagggggcgcgacggcgggcacgcgcagggcgagcggcgcggcgtcctggcggtggctgcgggagaaggaagggaggagggagaagaggagaggggcccggtggggcccacctggcggtgagggggtgggaggtagggctggacaaaatactcgtagctcgtgagctcgctcaactcgtggtcagctcggcttgactcggcttgtttcaattttatcacgagctgagctaacatctcagctcggttcgttaacgagccagctcgacacgagctcgagccaactcgttagctcgaatgagctagcatttatctgtaaaacaaagcctatacttgtattggatgaattaataagtgatgaatatgttagtttagggtttaaatgatgtgatatataaaattatgagtattgttagtcttttctagtgttaaattagtataaaattaactagcaaatgattatattgttgtataaattagggctggaaacgagccgagccgagctcggctcggctcggtgcggctcggtgcctgaacgagctcggctcggctcgttcattccacgagctggcgaaagaggctcggctcgcgagccatattatggtacttatcgttgcattatttggtgaattaacattatataaatttgaaatatagaatcatcattctacatgagtaaattaaattataacttgtaatatattcatcatcaaagactaaaaaataagctattatccataaaattatctaatattcattattattccataaattgatcatttttgcaaggctcgcgagccggctcggctcggctcgctgcaaaaacgagctcgaaaaaggggctcggctcgggctcggctcgttcgaggctcgcaagccggctcgagctcggagcggctcgcgagcctcgagctaattttccagccctagctgtatatatacatgtatactattttttgttgtggctcgcgagttaaacgagccagctcgagctcgcaaacgagtcgagccgagctagttctctggctcggttgcttaacgagtcgagccgagccagctcgtttccttaacgagccagctcgagctcggtcgagccaagctggctcgatatccatccctagcgggaggggggtttgggcggcttggccggctgggcctcaatgggccaaaacggtcggtagggctagggtttcgagttttttcttttctatttcaaaatataaataaatatattttaaaaattctaaaaatcatggtatttataccaaaattatttataaacaaaatattaattttttgaccattatttctatattaatcaattggattttcattaagaaaggaattctactaagcatccaaaaatccaatatgagcaaacaaaaattattctagatgcaactaaaaatcaaacattagaaagaaaatttattaccataattatcattaataacctaattgcattgttttagttgatgatttttatagtgttacatacttgcacatcttccgcactctcccttgtgcaaggacgccacgagcagtagcatgtagacccacagccgccaacgtttggcgccgtgcggccaacgtcaactgtcgctcacgttgcaccgatgccttgatttgcagcaacccccgctcaaccgccaatagtgaggcttgcatctttgtgagatcaacccttatgttggcccacaagtccaccatcgatggagatggtgatgactgagccgtggcttcccctagtggcgtcgtccatggagatggtgatggctgcatcgacgacagtgccatgagcgcaacgacttcccatgtggatgttgacagtgttggggacgacgtcgtgacgatattggtagcagatgtggctatggctttcaacaacaaggctgctgatgcagaggaccaggcagcaaggaagccaatccgtcgttgtcacttgaagatgcgccgttgagtgcgtgggattaaggaccggacgaaatcagcagcagaagacatgcggtttagattgaaacccaaactatccgataccagattgttatggactgcgatgggattgggaaattggagagagagttgtagttgcagaaacgtcggccgggggcttctgttcacggccgggcaagaaggcttgcttctaattcttgcttaaccttaactaatacaatagtgtcccttttatagagacgactgacttatctctgttgtagatacctttgtgggccggcagtatgccaggcgccacaaaggagtcagttagccctcctattttagtggagagattagctctatttgtttagaagataagaagagataaagagggagtcggatagccctcctattttagtggagagattagctctgtttgttagaggtggttgagattaaagtggcacctaagtctataaaaggagctgctgtagtttgtattagggctcatcaaagaaagttttacctggccggtggagcttccttggtcatcctggcgcaccttgcgccagctgacggaatcagctccatctctggccgatccccatatccactaagatcccttccccagtcccaagccttgctgcgatcaccgctgcgcagtcctaggcgcccacgacatatcaatttggtatcagattcctccgacgcatcgaccaacatgtccggcgttgatcacgatcctgcgaagacctcctccgactcagccaagttggatcagatattggcgcagctctccaccatcaactcaagactcgatctgcatggacagcggatcacgcttttggagaagcgcccaatcgacgagcagctgccggaatcttcagaaaccggcccacgtaccgcagcgcctgtcggggtcatgcatagcacaggatctgctcctcgtgaccgcgtcgacgatggtggctatcgaagacccaatgtctcctttccccactacgatggtgagtctgaccccctgtcgtggatcaataaatgtgagacttacttcaggggcatgaggactccacccgatgagaaggtgtggcaggcatcactccatttggacggtgtggcagcagaatggttctacgctctggagcgggacacgggcggcgtcctcacttggtcccgcttcgttgagttcacccatatgcggtttggaccacctctacggaccaacggtatggctgatctcaaggaccttcggcgcaccggcaccgttgaagactatcaacgtcagtttctgtccattctctgtcgctgcgaggatatgacacagctccagcaagctcagatgtttaccgcaggcttgggtgaaccgcttcggactgatgttgaactgctgactccaactacattgcagcgggccatgcacctggcacgcgtctatgaacgtcgtatggatctgtcctcgaccccatcaaggacgccatatgctacatcaaaaccaacggcatctacaactgcacaaaaaccctcgtcatcggctaccagcagaccacgtttgcgcaggctctcaccggaggaggttgccgccaaacgggccagcggtgaatgctaccactgctctgaaaaatatacagtcgatcacaagtgtgctgctcgcggagtttttctgttggaactggatggagaagataccgggacaacggatacactggcagaggagctgggcatatcacttcatgctctcactgggattgacatcgccgacacactgaaactgaaagtctctatcaatggtgtggctctcattgctcttgtggattcaggatccacccatacattcatccgtgatgctattgtgccaagactgggactgcgtgtgactccaacagcaggactgcctgtcaaggttgcaaatggtgagaaggtgttgagtgggggtgtctgttctcaaaccccactcactgtcggtgaagagaattttaccacaacctgctacactcttcccctggatggctttgatgtggtgcttggggtagaatggctgcgttctttgggtcccttcatctgcaactttgaaaagttgacgctgtctttttggcgccacggacacatggtgcgttggacaggcattggcggctctccaccccgctgtaatgctctggacatggcacacaaactgctggataccctgctgctatcctttgaagacctctttgtcgagccccagggacttcctccacctcgccgccatgatcatcgcatccggcttctgccagggacagtaccagtggcggtacgaccataccgctaccctcagttgctcaaagatgagattgaacgacagtgtgaccagatgctatcccaaggtatcatccgagagtgtacctcagcgttctcatcaccagtgctgcttgtgaagaaatcagacaacacatggcgcttctgcattgactaccgtgagctcaacacgaagacggtcaaggacaaatttcctatcccagtagtggatgaactcctggatgagcttcggggagcccggttcttcaccaagcttgacttacgtagcggctaccatcaggtgcgcatgcacccagaggacatcaataagacggccttccgcacgcaccatggtcactacgagttcttagtcatgccttttggcttgactaatgcaccgtcgacatttcaggcgcttatgaatgatgtactcaagccgttcatccgtaagtttgtactggtattctttgatgacatattaatctatagctcatcctgggctgagcatcttcaacacatgcggcaagtattccagctgttacgagagcagaagttggccctcaagcgcaccaagtgttcctttggcgagacacaggtgggttacttaggccacatcatctcggataagggagttgcaatggaccctgccaagattgaagcagtggagtcatggccaccaccgcgctccatccgggcgctcagaggatttttgggactgactgggtattatcggaaattcatcgctggttatggcactgtagcagcccccttgacagcactgttaaaacgagaggcattcagatggacagaagaagcagaggaggcttttaatctgctcaaacaggccttaatgtccgcaccattactgcagatgcccgacttcggccgcagtttcatcattgattgtgatgcgtcagggtctggttttggcgccgtgttacaccagggagatggagctattgctttcttcagcagggcagtcgcacctcaacatcagaagttgccggcatatgaacgggaactgattgggttggtgaaagcagtccggcactggaggccttatatctgggggcgccagtttctagtccgcaccgatcactacagtcttaaatatttattagatcagcgactgaccacaattccccaacatacatgggtgagcaagttattcggatatgattttatggtggagtacaagcctggcaaactcaatggcgcagctgatgctctctcacgtcgtgtcgagtcaagcatggcactcaacaccatctctacaccttcttttgagctgtttgacagtttgcgagccgaggctgcaacggacccacaaatccaggatgtgcgccagcagcttgctgctggtactgtttcaccaggttggacagaattggatgggttgctccttttcaaaggaaaagtctatgtgccagatgcctctactctttggccgatactattatccagtgcccatgacacaggacatgaaggaatccaaaagacaattcacaggtttcggtcgtcattctataatcctcatgcattacagagggttaaggaattcatcaaaggttgttcagtctgccagcgcaataaaactgaacatctccatcccggtggtctcctgcaacctctatcagtaccttcggaagtatggagtgatatttctatggacttcattgaggggtttccaaaggtgggcggcaagtcagtgattctcacagttgttgaccgtttctccaagtttgcacactttattgctctcggacacccttacacagcagcatcggtagcaaaagccttcttcgataacattgtccgtctccatgggttgccatgctccattgtcagtgatagagatacagtatttactagcacattctggtcagaattgttccagctagcaggagttaagctgcacatgagttcagctttccacccacaatctgatggacaatcagaagtggtaaatcgaattatcaccatgtatcttcggtgcctagcaggggatagaccaagagagtggcttaaatggcttccatgggccgaattctgctacaacacttccttccagactgctcttcgatgctctccatttaaggtggtatatggccgagaacctcctgctcttctgccctatcatccaggaacatcacaggtggccgctgttgacaaacaactgcagacacgcgacgaattcttggcggatattcgtgatcgattgattcagtcacaggtgacaatgaaaagctaccaggacaggcatcgacgggaagtggagttccatgagggcgattgggtatggctgcgcttacagcagcgcacagcagttggtgtcacttctgctacacccaacaaacttggcccaaagttctttggaccatatcaagtgctatcaagggtgggcactgtctcctacaagttgcagcttcctcccagggccagaatacatgatgtgttccacgtttctctactcaagaaattcataggggaagctccaacccaagttataccgctgcccgagctcctcaacggcagagtcatccctacaccagaaaaagtcctccgtgcaaggctgaatcgtggggtgtgggaagttctgatcaagtggacaggccgagcagagacggatacttcttgggagcagctggaagacttcaagcttagatatccagccatgacgctcgaggacgagctcttcgtcggcgaggggggaaatgttgtagatacctttgtgggccggcagtatgctaggcgccataaaggagtcagttagccctcctattttagtggagagattagctctatttgtttagaagataagaagagataaagagggagtcggatagccctcctattttagtggagagattagctctgtttgttagaggtggttgagattaaagtggcacctaagtctataaaaggagctgctgtagtttgtattagggctcatcaaagaaagttttacctggccggtggagcttccttggtcatcctggcgcaccttgcgccagctgacggaatcagctccatctctggccgatccccatatccactaagatcccttccccagtcccaagccttgctgcgatcaccgctgcgcagtcctaggcgcccacgacatatcaatctctttccaactaaccaaatttggtctaatccttatctcttacctaactaatgtaatccaatttttatcaaccaaatctgatctaatccttatctcttccctaactaatctgatccaatccttatcttttgcctaacaaatcaactattttgatctgatatactctcggtactagttcacacgctatagtgtagcgcgcgagcagtgcctccctgacagtatgattatccgtgtctgtttgaaaacatagaaacggaaacgtaacgaagacaccaagagctcgac

SEQ ID NO: 694 - DNA, 3206 bp, Zea mays
  Intron number 1 from transcript GRMZM2G052268_T01 (locus G RMZM2G052268) derived from phytozome v7.0 (chr-ID 2; pos 8 6217864 to 86221069)
atttggtaagtcaggatcctaacttattggtgtcatttgtacagctttggtgttgctatcatatcagttatcgtttggtagtacacttttgttgtttaaatggctgtgttcagtcactaataaactattgtttggtaattagtagtatgctctgttagcccttgcatccctacacttctactgaaattgatatttgatgctataactcagttgttatctgtaagtatttcaatgatttttttcttgttctccacctttattcaatgaatattcttatctactgttggcatggaagaatcaattaaacttgaaaaagtttttcttcctttctttttcttttgctgtgtggctcatgataattttcgtatctatctaaccgtaacttacatcgggataaacactggtttgttgttgtttttccatcactatactatgtaagatataatggcatagaaaagacgaagatagaaagagcatcaattctatgaatttgtatactgaagatataatatgaaactgtccaaatagactggagcaatggcttgtacaccaatggtttcaatttacagttgagttctttcttgtaagaaaaggtatttaaattgaactgtttaatgatggaatgtttggtcgtaggctcgtagctagtgtcatgttaggctgtgtgtacaacagctggcctcaacttgttcagttcattagggtcagactaagctctgtataatgaacttttagctcctacttggattgagcagtaataaatctctctagtgcatccctgtatccctgatttgtgtggtagctgaccacagttcctaagcctgtcatgatgatacacccacaaacagatctgcatgtgacaacctagttcatttaccaagctgaactgaaaatgttctttcagcatgttccatatctacatcccgccgcttaaagattaatggatatgagctttaaaagctttacatcattatggacccttgggccttggttaacctgctcttactatcgctttaaatatgagaacttgtttgcttcttcaaagatgaactcatcgataataatctttgagatgttgaaatctaccaagtgaaataagttggtttaagatttagtgcaattgaaagatcaccaattcaccattatgcttctggaggtaccagtgcaagtcatttttgttgcaatatgaatttttttggggcgcaatccatgtaggcacgggctgaaatactctaaaccaaactaaccgaactgcaccaaatctttttggtgctcagtggttcttgcggtaggggaatcactaactatttggtttatggtgtggtgtttgatatggtttttgagtaattgagtctttgaagctgaatcaccgaaatcgtcgaatgtccgagcactagcaggcagcctactggctgtcagcccatcctctcacacaatgtcccagagcccatgttatgacttgtccaagattgtatctcctttctccatctccaatcagcatgactgcaaggcagtggccatgatgagtgcacaagcccccatggacacaataggggccaagatgagtgatgagcagatggccctagctcgctcgctactcttcacatccaggagtgtgcaggaggtcccgaggagtggtgggctgatggccacaatcggcacgctagcctctgcagtcgcacagtcagtttcagggccagtggacatctcccttgtttggaccacctagacaacaggcatgcaggcagccaaaggtaatctatgatgtcccagagcccatgttatcttagatgtcccagagcccatgttatgacttgtccaagattgcatctcctttctccatctccaatcagcatgactgcaaggcagtggccatgatgagtgcacaagcccacgtggacacaataggggccaagatgagtgatgagcagatggctctggctcgctcgctactctccacatccaggggtgtccaggaggtcccgaggagtggtgggctgatgacaacaatcggcacgctagcctctgcagtcgcacagtcaatttcagggccagtggacatctcccttgtttggaccacctagacaacaggcatgcaggcagccaaaggtaagcataccggcctgcatggtgagcttggtacctttcctgttcagctctcgaaggttcttctgatctgagtttggggtctcatacattttcttaccttaatttgcttaccacgtgttctttttgataaaaaattaccaccgcatcgcaataaccaaaagaaaagtgtggtttgtggtttttgtttttcttgcaacaacttcactttacaagttctgaaagctgaaatttttcatcaccgatgaaactgaacagaacaaaccaaacaaaccgaatacccagctctaattccaggcatccttgattcataatagctactcttttgcacttccatttaccatgagttttgacacgacccattagtgtgggggtggggtgtgcagttgtgatgccacccagggcaagggcttgtcactcagtttttttaaaaaaccaatgaaaaatcactgttccacaaagtgcttggcctgcagactgtaatggtactgaccctgggtcagttccgatctagctcttccctgacaccatcaaccaggtttcaaaccctcggtctcacaaaaaagaggcgagctgggtgagttattcttctttccaagtgtctctttgtggtctagtctttggtcccttttcttgacggaggtctttcccatgggtccagttcttttaacatgttagaaatcaccattactaaaaccaaggttttgtagcagttgtaatgtggttgcaaaggtttttgtgacacaacctttttctcattttgtcagtagtcactttacattctgctgtgaagctgagactacgattctgatgatttagtgcctttatatatacaaagtttgcataaatggtatcattcttacaggtcattttgtggatagatcaaaagctttctgtagcaattgacctggtcgttataaaaccatctgttgctctttttaaactgaataaattatcattttatatacattacaatgattaggatatgatcgttcttgctctttctgatttccttgctcttgatgaacaagatcgctgttgatagagttaataatagtgacattttcttgtcttccctgtcagtattagaaggaaaaaga

SEQ ID NO: 695 - DNA, 13248 bp, Zea mays
  Intron number 4 from transcript GRMZM5G814851_T01 (locus G RMZM5G814851) derived from phytozome v7.0 (chr-ID 7; pos 1 47931405 to 147944652 reverse strand)
gatagcacctctgataattgtcgatccctgtacaggtattctttgcttttaaactctagtttctaggtacctttattataatattctgtcttacagcaccttagacatcccaccattttttcaactaaattaaacaaggaccgaacccctgccagctaggtgcaaatttgctccctagccagtgcaaccagctagagtacatgaaaaaaaccaagcccttggtgcaagacctccctgaggcattgatggaaaggtagaagattctcttccccagtgtccagaaaaggcaaagaatcctggctgtccagtacgtcccagtaacagcaaggatgcacctgcagcaggggatctgctgcaaccattactggaccacatatttctggtgaggaatagggaatcaaactctcaacctgtaggttgcacttctgcatccctaccactgcactatgggcacattctcagtgagatttcacaatgactcaatgagtgatctatttgttatgtctaaatgggaaaccctaaccccaattcagggtaggcatgtgtatatatattgaaagagtatgggctgggccaaagccaatttatacagatacaaaaaacagtaatccaacaccccctgcagtcgcaactctagcgtataagatgttgagactggatcgaaactccgagaacaccgtggatgtgagcccctcggtgaagatgttggtgaattgcgaagttgtcaggacgtggaggatgcagacattgccgacaatgacacgctcacggacgaagtggaggtcgatctccacgtgcttcgtgcgctagtgctgcatgggattggtggagtagaccacgttgatgttgtcgtagacgaggatgtcgcgtgcaagaggttatgaagctcctggagcacctgacagagccaagacgcctcggtaacactgttggtcacaacactatactcagcctttgcgttggagtgggagacgacaagctattgcttggaggactaggggacgagattggtgcccaagaacatgacatagacagaggtggtccgacgagtgttggggcagccgatgtcggtgtaggcaaccaactcataagtcagagagggtcaaagaagaagaccgtagtcgatggtggcacagaggtagcgaagaatccactttgcagtggtgaggtgtggttcccgcgaggtgcgcatgcgaaggaacacctactggattgcgtaggcgatgttgggccgagtgaatgtgtgaggtatgtagagcctcggggaggcttcggtaggacatcacgtcgttgatcgaggcgttgtcgttgttagggaccttcgcttgagtgtcaacaggtgtggagcaaggcttgtagtctgacatgtcagcctgctcaagaatgtcaatggtgtactagcgctggtgaaggaagaggacctagagctggtgctccatggtgacccctatgaagtggcggagagggcccaattcctttatctcgaactcgcactgcagggaggcaatggtgcgctgaagacgggcggcactggatgccgtgagcacgatgtcgtcgacgtagagcagaaggtaaatggtgtcgtcaccgcgccgaaggatgaataggggtgtgtctgacttgttctcaatggagccgagggagacaagtaggaggcaaagtgactggactaggcctgcggggcctgcttgaggccatataaagagcggctaagcttacacaccatacccggtcgagtggagtcgatgaaggcgacgagctggctgcagtacactgtcttcatcagagtgccatggaggaagacattcttgacgtccagttggtagaccacctaggcttgggagagggtgagagatgatggaataagtcttgagcatctagaggacaacagtcgttttttgactgtcctctgtagtccctttagcatctagaggacatcagtcgcattttgactgccctctgtagtccctttagcatctagaggacaacagtcccttttgactgtcctctgtagtcgacagcagtcgcttttgactgtcctctgtagtctctttagcatctagaggacaatcctgttgtgtagtatgtgtgagaaagtgtggtagtgcagcctctagggctataaatatgtgtctccaacccttagatgggtatgacattatgtagtgtttgaggaaataaacagaaaattgccccaactcatagtgtcatcctcttgatgagagttagagtccctctacttacaattggtatcagagcaaaactatcctgtagcctaaacatctcttgctcatctccttcccgcgcctctccccacactcagtcggcagcaagagctccaactgttcttttctctcctgctcagacgagcagcctttcgtctgagacaacctcttccacacgcagcgacccctcactagcccaccatgtccctacgctcggtcacttcgagtgcgtggcgccagcaggaggccgaggtcgccgcgacacaagaacgcgagtgagcagcagcagcgactgcagcgacagcggcgagggcagcacggctagcggcggcggaattggcaacagcgagagcggaagtagacgcagcggaggcggcggatgctgcacgtgcgacgacagtagagctcgaggttctgcgcggcagtagagctggcagctctgcttctgtcgacgacaacaccgacgaagagctcaggctggcgagggaagcagcgcgagagcaggcggcacagtgggcagccgcgcatccccatgggggcgcgcgtggcggcagcccagataggcgccgacgcgctgacggcgctctgggcgagggcgcacgcggcggcagcccagacgggcgtagacgcgccggcggtgctcccggcggcggcgaccgagtcgacggagatcgcggcctctacaggcggcgcgactctccctccccggatcggtaccatggtcgccacatggcccaggccattgtcagggacatcggtcctggcggtgggtggcctaccctcaccaagaccaactacgtcgagtgggccgcggtgatgagggtatggctccaggttcgccacatgtgggaagcagttcggtacagcgacgtcgactaccacgaggatcggcgggcgctggatgccctcattgctgcagtcccgctcgagatgcagttttcgctttcccagaagcggactgccaaggaggcttgggacgccatcgctgcgacccgcatcggcagcgaccgtgcccgcaagaccacactgtaggcacttcgcaaggagtgggagaacctggccttcaagctaggtgaggatgttgatgactttgctctccgcctcaacactctgttgcagaagatggtgcagttcggcgacgacacttacgatgaggagagagctgttgagaagctcttccgttgcatcctcgagaagtacaagcagatcgctcgctcgatcgagtctctgctagacctctccacgtgacgatcgaagaggcgataggtcgtctcaaggtggtcgacgacgacgaaccacaggctccctctgggcctatcactatcggtgggaagctacatctcactcgggagtagtgggaggcctgccagggtgacaagaagaagggggagtcctcctcgacacgaggccgcaaacgcgacaagccgcgcaaggcgcgtggaggcgcccaggccggggcctgaggacatgctgagggtggtgcccgtggaggtgcccaaggcggtgccgtcggcaacaagaagccgacacgagacgacggctgtcacaactgcggcaagcttggccattgggcaagggactgtcgacagccacaacgtggctaggccaacgttgcacaggcggaggcggaggaggaggctctgctcctagcacatgcaagcatcgagctatctccagcggcaccagccgcagcgacactcctccaccttgatgagtcgaaagcacgcgctttcctccgcgatggctccatcaatgacatgatcgaaggatggtgcctcgacaccggcgccactcatcacatgaccaggcgacgggagttcttcaccgagcttgactctagcgtccgaggctccgacaagtttggggacgcctccggcgtagagatcaagggcgccggctcagtcgtcttcaccgccgcgtctggtgagcacaggctgctcaccggagtctactacatccccgcgttgaggaactctatcatcagcttgggacagctggatgagaacggttcgcgcgtggaggtcgagcaggatctgggacccctctcgtcgccttcttgccaaggtacgtaggagtccaaatcggctatacatcctcaatgtgaaggtggcacaaccttgctgccttgctgctcgtcgagacgacggggcatggcagtggcacgagcgtttcgggcaccttaacttcgaggccctgaagcggctcagtgccaaggagatggtacgaggcctgccgtgccttgaccatgtggagcaattctgcgatgtctgcgtgttgacaaagcagagacgactcccctttccccagcagtcgagcttccgagccaaggagaggctcgagctcgtgcatggggacttgtgtggcccggtgacaccagccacaccaggaagacgacgctacttcttgctgctcgtcgacgatctctcccgctacatgtgggtgatgatccttggcagcaagggagaggctgcgaacgccatcaggcgtgtgcaggtcgctgcggaggcggagtgcggccgcaagctgcgcgtgctgcgcaccgacaacgacggcgaattcacggcgactgagttcgcgtcgtactgcgcggatgagggcgttcagcgccactactccgcgtcgtacagcccgcagcagaacgacgtcgtcgagcggcgcaaccagacggttgtggtgatggctcgggctctcctcaagcagagaggaatgccagctgtcttatggggagaggcggtggtgacagcggtttacatcctcaaccgctcgcccaccaaggctctcaacgggatgacaccgtacgaggcttggcatgggcgcaagccggcggtctctcacctatgggtcttcggctgcctcacgttcaccaaggagcttggccacttcagcaagctcgacgataggagcaccccgggggtgttcattggctacgcggagggctcgaaggcctaccacatccttgacccaagaacacagcgtgtgcgcacggcgcgcgacgtagtgttcgacgaagggcgaggatgagcgtggaacaaggcggtggacgacggcacgactccgacgtacgacttcaccatcgagtacgtccactttgagggagctgggggagtaggcaactcttctccgagcaggtctaccccagcccccaagtctgcaccgactccaacgccaaactctccagctcctgctacaatgagctcttcaccaccacacactccagccacgactccggctacagcgagctcttcgccaccacgtactccagcaccgacggtaccctctccgggaacgtcctctccgacaccagctcgtgtcgagcacgacccagtggagctcgtgacccctctgtcccgcgacgaggagcgcgtcgacgcgtgctacgacggtgagccgttgcggtatcgaagggtggagggccttctcatcgacccgtggtgccaggccctgcatctcgcattctggcaggagagttgcatcttgcatgcgacaatggtgagcctcggactttcgcggaggccgagaaacatgcggcttggcgtgccgcgatgcagtcggagatggacgcggttgagacgaaccacacctgggagctcgttgatctccctcatggtcatcgcgcgatcacccttaaatgggtgttcaaactgaagagggatgaagccgacgccatcgtcaagcacaaggctcgcttggtggcacgcggtttcctacagcaggaggggatcgacttcaacgatgctttcgcccccgtggcacggatggaatccgtgcgactcctccttgcgctgtcagcccagcagggctggcacgttcatcacatggacgtcaagtcgacgtttcttaacggcgacttaaaggaggaggtctacgtacaccagccgtcaggttttgcgatccctgacaaggagggcaaggtgttgcgcctgcgcaaggctctctatggcctgcgacaggcaccgagggcgtggaatgccaagctggattccacgctcaaaggaatgggtttcacgccaagcccgcacgaggcggccatctatcggcggggcaatggaggaagtgccctgctggtgggtgtctacgtcgacgacttggtgatcaccggcgccaaggatgcagaggtggcagcgttcaaggaagagatgaaggccaccttccaaatgagtgacctggggcatctctccttctacctggggattgaggtgcaccagggagactccgggatcacacttcgccagaccgcctacgccaagcgcattgttgagctggctgggctcatcgactgcaacccagctctcactccgatggaggagaggctgaagctgagtcgcgacagcacgacggaggaggtggatgctacacagtaccggcgtcttgtggggagccttcgctacctcgtccacacacggcctgacttggcatactccgtcggctacgttagtcggttcttgcagcgaccgacgacggagcatgagcaggctgtgaagaggatcatccgctatgttgcggggactctcgaccatggtctctactacccgaggtgccctagggaggcacaccttgtcgggtacagcgacaacgactacgccggtgacatcgacactagcaagagcacaagcaggatcctcttcttcctcggtaagtgcctcattagctggcagtcggtcaagcagcaggtggtggccatgtccagctgcgaggccgagtacatagcggcgtccactgcttcgactcaggcgctctggctagctcgactgctccacgatctcctcgggagagacactggagcggtggaactcagggtggacagccagtccgctctggcattggccaagaaccccgtgttccatgaacggagcaagcacatccggctgagataccacttcatccgagactgattggcagaagggagcatcaaggcgcgctacatcaacaccaaggatcagcttgcagacctgctcactaagtcccttgggaagattaagtttgttgagttttgctccaggtccgggatgacccaactttctcacaagacgacgcccaagacttagggggagaatgatggaataagtcttgagcatctagaggacaacagtcgctttttgactgtcctctgtagtccttttagcatctagaggacatcagtcgctttttgactgtcctctgtagtccctttagcatctagaggacaacagtcccttttgactgtcctctgtagtcgacagcagtcgcttttgactgtcctctgtagtctctttagcatctagaggacaatcctgttgtgtagtgtgtgtgagaaggtgtggtagtgcagcctctagggctataaatatgtgtctccaacccttagatgggtatggcattgtgtagtgtttgaggaaataaacagaaaattgccccaactcatagtgtcatcctcttgatgagagttagagtccctctacttacaagggagaggacgtttcaaacggtggcaggcttcacgacacggttgaaggtctcattggagtccactccaggaagctgagtgaagccttgaaggagccaacatgccttgtaccgatctagggtatcatcagccttgagcttatgatgaaagatccacttgtcggtgaccacattggtgctagggggacatgacagtaagccccaggtgtggttggccagcatggcctcatattcctcctccatagcacgacgctagtggggatcgacgtgcacgctacggactgaggatgggacaggtgagggagtcagagcgggtgaacgcggcgagggtcacggtggatggcgatggggtggtacactggtgacacgataggtgaggggatcgagggggcacacgttgttggtagacatgcgtgggatcgacgaaacaagtcgaagatggttgaggaggcaggacgcgtggcacgagtggaggcgacgaggctgcacatggcacgatcgaaggcgacggtgccgagcttggcgctgtcgaaggtgacggtgccacacatggtgcagagggggtcgtcgggaccggtggtacggagagagggacatcaacattatcgacactgaggagagagtcgaggtccggaggtggggaggagccaacaagggggaagacatcctcatcgaaagcgatatgtcaagagatgatcagtgggtgagaagatcaaggcatcaataccctctgtgatgagaagagtaactgaggaaaaagcgagtggagcagacacaagtttatggggaggcaacggtggaggtgttgggatagcaggcacgaccaaagacgcggaggtgcgtataggaggggacggtgccaaagagggtgaagaaaggagtgagatgactgatcgtcttgaaggggaggcagttgagaatgtaggtggcagtattcagggcctccacctagtaaatggcagaaagaaacacctggaagaggaggcaacacaacatgttggtggtagtgcgaatcatgcgttcgacctgaccattctgaggggaggtgtaggggcacgagaccggtatccgaacaccgtgagaaaggaagaaggtgcgggaggactggtcgtactcgataccattgttgcactggagagcacggacaaggcaaatgaactgggtggagacctaaacaaagatgcgagatagtagtgaaagtgttggatttcaaacacattggggaagtccaaagaaagtgcgaaaaatcatccagcatcaacaagtaatatttatatcctgagaggtagaaaacatgtgatgtccacagatcatagtgtacaagatcaaaaggcagagcagcccaagaggaggaactagagaaacagagacgagcatggtggcctaggttacaagcatgacacagactatcaaaatggtccttgctacaagagatgacaaggctgctagacaacttggacatgacatcggacctaggatggtcgtgagacgatgtcgggtgatggacgaagtggtagcagtcaaggcatggggaggatgtggcagtggatgaagcaagtagccagagtgtgtacaacggccccaagctgtcacaacaggcaagaagggtcctgatagctagatccttcatagataaaccaaacaagtcaaactcaatggaacaagagttgtcagtggtgaaccgacgaacataaagaatattctagatgatgtggggagcaacaagatccttcacagataaaccaaacgggtcaaactcaatggaacaagaattgtcggtggtgaaccgatgaacaaaaagacaattctggattatgtggggagcaacaaggatgtttttgaggtggaacggtcctggaataatcgagtcacctaccgaggtaactgagagggtggaaccgttccccatagtaatagaggatggaagggatgtatgagggggatggtagtgagataacatgtcggcatcaagagtgttgtggtaggaggctctggagtccacccaatatggtggtgggaggtggtgtcaatgccatggtgttgaaggagccggagagagactgatgatcccaaccgttaccccacgaccgaattttttgtattttggtccttcatcagaaaaaaattcacgtttagaccatagaaaattttaatgtcatttttggaccctttactcggcgccgtagcctgtggcgccgaggtaacacagctcggcgccataggctatggcgccgaggtacgtgccgcgttggcacaaacagacgtcgtggcgccgacgtggtaccgagctcggcgccatagatcttggcgccgagctctattctgtacagaaaagttgtctagctcagttggtaaaatacaaggcttttaaacttgtggtcgtgggttcgagccccacggtgggtgttttttaatactttttttgtctttatcacttattttttttgttgtcgatatttttcgtttatgtcgctaatttgtccgtcctgatttatttctcatccagatttatttttgtgactgatttgtttattcgtccagattttttttatccggcgagcacaacagttgtatatgcagtaaattctaaaatatatcatccatgagacaagtatataatggagtatacttttatttagtgcagaagaaaaaaagatgaatatgtgtgcttctttttactgggaatatgttattatgaatttaaaatttatgttcaaaagaactcaatgaaaatataatattttcatttgatcatgatcgaagtaatagtgttctcattagatttttattgtggttagctgagcaaacaaggggagaagttgacggcttgtgagcactgtggcacacaactgctgtgctcgccggataaaaaaatctggacgaataaacaaatcagtcacaaaaataaaactggatgagaaataaatcaggacagacaaatcagcgacataaacgaaaaatatggacaacaaaaaacaaataagtgacaaagacaaaaagtattaaaaaacgcacaccgtggggctcgaacccacgaccacaagtttaaaagccttgtattttaccaactgagctagacaagttttttgtatagaacagagctcggcgccaagatctatggcgccgagctcggtaccacgtcggcgccacgacgtccgtttgtgccaacgcagcacgtacctcggcgccatagcctacggcgccgagctgtgttacctcggcgccacaggctacagcgccgagtaaagggtccaaaaatgacattaaaattttttagggtctaaacgtgaatttttttcctatgaaggaccaagatgcaaaaaattcggtaccccacgaggaccaagtgggtgaggcaggggtttctggcggaggcgacgactggtgcgaaagaggggcgccaaaggtggagtggcaccgtagtgggggtgtagtcagtagagccagctgtggtggacgcgtcgagtaagcacttgtggctgggcctcgccaaagggagatggtcccggtctaggagttgtaggatggacacgcgggaccaccgtgtccagtaggaccaccacagtccacagggagggccaccgcccctacgtctgcccttgtggggccggtgacccccttcagacctaagagcctatcaaggaggtggcagcaggcgcgcaacccccaggcgacatagggcgagggggttagtcggtggaggactcgtcgtagagagtcgtgtcggacatgacggactcaacgtttagggtgagctcctcgagtagcttgttgtagacatcgtggaaggaggggaagggcagggagcgcttgatgaaggccttcaggtggtcgtagcaccgagccactgactgttaccacacagaagtttgaggacgagcgtgtgatcagagacgggctcccgagatcccgaagagagtttgccatgctcttcatctgatgacagtactcggtcatagagagcccccccgggagaagagccgggaggaggcattgaggtggagagcgcgggcctcccgattgtcgaggctaggggtgaaaacgggacaggattacccgccgggtaccggatacggatacctaaaatacccgtttcttcggataccggatacgagtatttcttcgtgcgggtcggatacggataatacccggataggagtttgccggatacgggtaggatatgggatagctaatacccgacaactactcgaaatctacgggtaggatacgggtacccggtatgcggatactcgacaaaatactgagtctattttttctgtcttgtattggtctacgtctaatcgtatacccatattccagatccaatatcgcccaatggaggagatactcatcatccacggatccacctctggtgctccgtgctcggtgatcctcccgatggcgataactccccaacagcactgcctctgacctgcctctcgccaccggcagctgcctctctcttctctcatccccaaatgccaggcttctctccctgctacttctctcccctctgtgtccagcttggcgagttcctgtcagtgagccacgcgatagagtcatagtgtggaggagagatgctatgcatggacagaaagaaggtcgagttgttctgttgctcgtcaatttcagtcgtccaattgttttgatcttccgggcggatccagggataggcccagcagagtgtgcgttgaatgctatgctccttgggacatgggatgttggaatagtagtagtacgtaggattagaatttttagaatttttcagcatttgctatcttctatggaaatgttttctcaagttcagatagagtagctactcacttttcagttcgtactacacaagcaatttctctttcaaactttgagaactgatcgtcagaaaatagtacatagattagcatttactacaaatagatgtgcagaagatagtacacatattaatcattgggcttattactttggctttaatatactggcttctactatttctatagtgttttgtctctatagattgcagctgcagcagtccgaacaaggaacaactggctttaatccgaagcgaactacctgagttggactattgtgttattcgaatttcgtcattacattcagactattgtagtggactattgtgtgattcgaactcttgtcattttattcagactattgtatttgactattgtgtggtttgtttgttgaaccgttggacaactaatattgtcaggacaaactatccgataaatatccgatactacccgagtaatatccgatatccgtttgttacctgtccgaattattacccgatcctatcttgtatccgacccaaatttttaactattcgtatccgatcctgtatccgagagaattatattagggtaggatataggatggcctactatctgcctgtatccgtcccgttttcacccctagtcgaggctctgggcctcaagagcaacccatgccttgtgagttaatggtgtacccggtataagaaaaaaaaattcaattctgtattttcctttgttaagtacttgtttgtctgcagatacaaaagtttattgtttgtcatttcaggccc

SEQ ID NO: 696 - DNA, 2220 bp, Zea mays
  Intron number 2 from transcript GRMZM2G028701_T01 (locus G RMZM2G028701) derived from phytozome v7.0 (chr-ID 3; pos 2 7804457 to 27806676 reverse strand)
gagctacggtcgtcagatctggctccccggtggtggtgtgtggcaacaacaagtgggcagcagtggccccgacggcgactacggggtttgtgcgtcagtgcggcggaggtagcttgcttttgttctggggcctcgcttggcgttgtgctggggttttcttgggcgaaagccttggcgacggcgccgcccctgggcgccgcttcccctgttgagggcgtcgtgcttcccagcactgtcttacatgggcgaaagccccgtccatttcggaccggcgatggtggcgtcctcgacgtcactcccttcctgaaggcgtcgctactgctggcgggagcaggacagaggttcaaagttttggaagtctcgctggcgaagaatcggagctgtctcgagcggggtgtctcgtgcttggcaacgacgacgcgccgcattcttcctcctcttgggccgatgtttgtagtcgtcgtcgtttttcatttagccttgtgctgcctatcttggggagtcggagctgctcgtcacttatgttgagctcggcaacgatgactcatgatgtgtattgtgtgggggttgctgttgtctgggttgtttgtatgccctgtgtaggttttgggttcggtttcccttaaaactggatcaattcctttcttcttaattgagaggtagagctcctgccattacgttcaaaaaaattgttggttatacacaattctctggaattggaatataactagaaactccttcccaatacaaaacatcacgcctttaaattgtgtgtaattagaccttacaattctaaacttcaattcagtgacatccaaacaatagaactgaaattacatattatttcaatactatgactgatttgatattgaacctaatttaattctcgtttgcccccaatatcaacatctaaaaagagcactaggttttctagattagattggctatataattagaagccagaatgatgttgtatatgttcctttattattattttttttgataatggaaacatgagttccggctttagcatggtaatgcgtacagccaacacaagacaattattacatccgagaaacgttgcatagaaaatgaaactaacttaaagaagcaaaatcacgagaatgtaggtaactctagccatcctcaattcttgcattttagcgccatccatgatttgcaaagacttccatcgccaccacttccaacgcttgacagacatcgaggatttgttgatgtgattcctccttctgtagaagtctccagaatctgaaccagtaagtacctctgaaaatgacctgcaaaattgatggtattggtttatgattaaaagcaacttcatttcgactaagccaaatagaccaaaataaagctgagattccagagagtaataattttttgtatcctggactcatattgcttccccaaaacccaataatgtgattaatgctaacgggcctgtctatctttaaggcatagtaaattaatctccatatgttgctggccatatagcagtcaaaaaagagatgatgaatactcttatcttggttgcaaaagctacaagtcaagctgcctttccagcgtcttttggctaggttatctttagtaaggatcgctccccgacataaattccacaaaaaaacttttattttcaaggggagcttaagtttccagagctttttattccgttcgtcgttgggattattcatcaaacaatggtacatagattggactgagaaaattccattcttatgaccatcccaaacaaatttgtcgctagacagattcaaagtaacattagatagcaagtttaacatgttgtgtcattccatcaatttaatcccctaattattcggcgaaaagataaattaagattcgtagctgaaaaaacgtctaccactaatgctgatttattccgcactatattaaatagattcggaaattgctcacaaagaggccgactggttagccatttatccttccaaaatctgatagtttgaccattcctctcttttatgttagaaaaacgggaggtgttaatcagcacggtgtgtgggcggtagacagttggataaaattcaatttttctacctcgatcatctcatagtttaattctaggagatcatattcaaacatgaccttactgatattactccgctaaacgttgcatgcatgtgctgtgcagggaggccgcagccgtattcacctccgtctccaact

SEQ ID NO: 697 - DNA, 751 bp, Zea mays
  Intron number 1 from transcript GRMZM2G127181_T01 (locus G RMZM2G127181) derived from phytozome v7.0 (chr-ID 1; pos 6 4975162 to 64975912)
gccaagggccgcctcaaggaggacaccgcgcgcaggtacttccagtagctcatctccgccgtcggcttctgccacgcccacgacgtcttccactgtgacggtcaagcccgagaatctcctcgtcgacgagcgcggcgacctcaaggtctccgacttcggcctctcggcggcaaacaaatttactgaagctacactgcctgcagatgctgagaaaaagccacaggatgggaaaactctgccaaagttggtttctctttaatcagaaattctaactttaaatgcatagttgtttgtaacctagatataaattctgattaaaagcacattgtttcaagggtgattgcatggtcacacccacactatgcttatacttatgggtgaaatgaaggttgtctctattcatcctgttccagatagttgcctcctttattcttggtcacacccacaccatataagcttttgaatgatatattacttcaacttccgttggattgaaggacatctgagttgaagcagcacttgctgcttcaggaatgcaaactgaaaagtggacctagtttagcaggaatatttgtagataagccaactgatgtctagaaatgccttaaatatgattctcaagatttaaacctttaaactgaccatacagtgtgagagttgatggatgtagcatggatttccattccattttgttttaaaattattgccctcgttaatatttgaattacaacatcaaatttgtttgctaggt

SEQ ID NO: 698 - DNA, 3207 bp, Zea mays
  Intron number 1 from transcript GRMZM2G018619_T03 (locus G RMZM2G018619) derived from phytozome v7.0 (chr-ID 9; pos 7 6756343 to 76759549)
ttgcgttgcgtgctgctgttgattaccatttgtagggtttggtgcattttcatttcaggatccgatactggaacacgcgaatcagcatgcaggcatcctattgttgactagagttgtaggatgacgatgataggatattcttctattgcacaaacgtttttttatactgcctggagcttggtttcgagtacgcagcagtgcagcaggtggcgtggactgaataagactttctgaaggttagtaggtttctttgttttgactcacgttgatcatttagcctgggaggagcagatcggccatttttcctttctcttgtttgcatgcagacttcctgcccagttcagttaatttagtagtcaaaaccgtaaaatgcacacaatgcaatatatagctatattttgtacacttattgttttctaaaatttaatcgtcttggaccctgctataaataggtatttatgtcaaaaacaggtttatcgaacatggtcacctcaaattagaactgatgcttatgaaattgatttttgcactcttacacttagcccataagtttggctattcgtcttgttctactgcactgaatttctgaggagtgaagagtcttcactccatttttcttttcttcattccaccattttgtaaacttcttgttagcttgttctgccagttatttagatggacatgtctatgattgggaccaatcattgtgattgggattttttgtcatttgtttacatacttgcagtgattctttgttttatatgctgatcatgtatccatgtcatctatattactgtctcaattgtttacaaaaaatgatgcttcaagatgtgatgcaccagcaccttgtattatcgataaattttcttcttcaagagtgttaaggaaatgacctgccacaatttgtattaactagtgcttgttagtgacataattatttaagacaaaactccaatagaaaaggctgccaaaataacacctaatctttgaagaatggctgaattgattaaggcaaaacaaagatatactaattgcttaaactaatggactttacaataatgtctgagcacctttctaggtttttgttgtatttatgtgccatggaactagatttttcaagcttgggtgtgatggggattctaaggggcaggtgggttctgtgtaagaagtctagacaactttgtagagcaattttggtggcattttgttaatgcaacaaaaactaattagcacaaatgaggagtccatgcaaagtacatcgaagtgatttgacacttgtgatcatggaagaactagggctagaaatcaagccaacacaagtggaggcttgttttgctgacaaatgctagctcattcgagctaacgagctagctcgttaacaaatcgagctgagatgctagctcaactagtgacaaaattgaaatgagccgagccgaccacgagccgagcgagctgacgagccacgagtattttgtccagccctagacgcctgtggttaacattgtgcactgctgcatgtgacttgttcatattgaagcactagagtcttgggttggttccagcccttctgggttatctatcggcacatcagctatcgaccaatctataccgaccattgttcgcccttatctaccactctatggcaacatcctttaccatcaatctacatccacctcatcgccacatcaacttttcttctatagttttttagttgaaatgaaacattgtgatttactctagttcaaatacatttgtttacataattaagtaaatgaaataacataatttgagacaacaatttaaaattacatggctcaagcataataataatagatacatgaaactacataacttaaacattaaaacaaaaaatcataaatacaatctaattatagattaaatttcaagtttttttcaattcaaatggttaaaaaatagctagctgacttgacgcaggcatatatcaatcagaacacaccatgttactaaaggcggacgttaccgagtaccgaccggttcggtcccaacacaggtaccaacttgttaaggtggatggcagcaccaccgaccagacggtccaaccgacccgcactggaaccgtggtggtcggtagcgtccgtgtgtcaggggttggtagtgccctgggctggaacccgccttagcacgaattgtacaggatctgacaggtgcacatagaaagtctgcagctttgcatgtagcaatgaaaacaagggtctattcaaacaacaatggctaatcgtagtcaagaattgtattactacctccgttctcgaatatttgtcgccggctagttcatttttgaactaaaacgcgacaaataaaaaagaacggagggaatatttaacagtggttggtacttcctgattagtgattttatatgagactagggcttattgactataataacctgcatgtagttgtctgctgtcttaactcttatgctgttccttccaccaatatcccactacaacacaagcaatttgatgcaatgaattccatttaacaacatgatgacctagtggatggtcgatgagctagtaatgctttttgttgagtgctacatctatcactattgttttttttttgtaagaaagttgacttattgttttttttgttagcattctgtataataaagtgacagtgatctaatggtatccttgtgcttaagtggagttcgttattactttttgttttggctgtaccgctgtagcactgttgttgctgttaggagtgaattctatacttcccatctcaagtggagtaattgccattgtctcattggtgcttgattattttaatatatcatttagcaaattatcctaagttcttttcaattatttacacagcttgggttccctgtccaccatgcgtccaaaataaagggaatctgtcgcccagacctttagataaggaaaacaccagcactctctctgaacagacaacctgagtacctgaccaaagtttaggacaagactgttgcagatgagcaaagttttgaataatgcggtagggtgcacatatttgtttgttgacttgcttggtcagttgtcttaatgttcttttatcagcgttaatggaactgaatttccttgcaattcagaattctctccatttggtttacttatctcactgcagttcaatatcactgcagataccgtgcaatcactagtgcgtattaccgaggcg

SEQ ID NO: 699 - DNA, 682 bp, Zea mays
  Intron number 6 from transcript GRMZM2G141208_T02 (locus G RMZM2G141208) derived from phytozome v7.0 (chr-ID 6; pos 1 46501596 to 146502277)
atctcattgattctggttagcttctttgttgtactttcatttcatactagtgctttgatgtattttgcttttgtttcattcaaagtttccttgatgctccagctggtttcttaatgtggcttgtggtgtcctgtcaaattctgccgttgccatctatgtatacaacaatctgcccttggctttgtggaattgcattatgatttgattctcgtcttctgggtcaacagtcaacactctttgctgttaacgtattaattaatgatgtatccgtattcatatctgtcaacagtcaacactagtattcatatctagtgcaccaccatgattctacaattggaatatatattctgtttaatttctgctctgtagtccaaaggaataaaagagataagaagacattataatgaatgaagacattttttgttgaatgctgcatttttagtacattttgccttttgtgttgatgggtattttcaatttaattctaccttgttgtgatgttgttatgtgaatttctggttgttttttgttgtatgctgaaatgtttgaactaaagtgatagttcactcctcagttcactccatggtttcgtacaatcaatttagtagctgattcagtaattgaagaatacaacaaactctggtctgtaggtagagcagatctttcagagttgctggcaaga

SEQ ID NO: 700 - DNA, 4050 bp, Zea mays
  Intron number 11 from transcript GRMZM2G145451_T03 (locus GRMZM2G145451) derived from phytozome v7.0 (chr-ID 9; pos 138321398 to 138325447 reverse strand)
aaccttagaaaacactgcagattacgtgagtaatgaatattttttcccgaatgcgcaggggagctgcacatctttatatattagagagagaagagtcttacaagagatggaatctgctaggcaggatcccaacatccacacacggacatgctaacttgtccaggaagcttctctgcaccatactgatgaaaggaatctccataaaaaactacccggttcctttgcagccataaacaccatgctcctagaatgatagcactgttaaggcccttcctatctttgtgaaccctattgcacacacctctccactactctgcaaatgaggtttcatcagtgccaggagttaggtgacctaaaccaaagggagacaagatgtcgtgccagaactgtcagggcaagaacacaagtagtcaagaggtcatggactgtgtttttttaatcacaaagggggcaaacttctagataagacatgcctctcttctctaacctactacctgtccaacacttatctctcatggccagccataagaaagtcttgcattgggggggggggggcaagttttctacaatcttttccacgactcaaaagtaatggaacctgtgaataaggccttgtagcaggacctagaagaaaagcgaccaaatgcctcagggctccgcacatgttgatcatcctcttgagtcagtaccacctctcctaaagtatctcataggagaaggtactgctggattcctgtctgggagaggggtgacttaggccctgtttgtttcggcttttggtcgtcagaatcagcttctagcaacaaaacgcttcgctactcactccgtttatatgagaatcgcttctgtgtaaatcgctcaaatcaatgtgaatgcagaatctgccgtgtcgtcacgacgggaggaacccgccgcttcctaagaccgtgtccagcagttcacccatatggtcgctcaaaacaccgtttcgcattataaactgcactgttcgcatagtggaggttgaatatgtaagctgctggagaaagcctaaagcctaaaccatgcatactactttatcttcattcgcacgcaagctccgcgatagccaaattattgtggtagttggattatccaggaatccagattctcagaaaagctcttcagagaaagctatcccaaacaggtccttaatctctctaacccacactttgtttcaatagcttgggccactgttttagaagagcctttttgtccaccttagggatcacatcttttttctcgaaaactgttgggacaggaaactgcgggcccaaacacttgaacgcggtgagacaggtggcacgacaaaacagtgagctgggagcgtgtaatgtcttgtcaagtgtgtcctgtgccggggtcggtggacgggggtatttatatgggtagcctgggtcagtggacctaagtacgataatacccccggctaaatgatttatctctcatatctcagctgctagatgctttttggtcatgcctctggactacggactattttcagtaaaagctcgatgactccccttaattgtactgatgctgattcgcttctcctttctgggctcatcgattgcgagatcaagggctttccttgcaaataccttggagtacctctcacaattcagaaatcgacaaaggctgatctgctgccattgatagataaaatagcagctagcctcccaatttggaaggtttctgtgttgagccgagctgggtgtctggttgtggtccgtgctgtcttcactgccattcctatccaccatatgatggctatggatctccctaagtgagtcattagagcaattgttaaacttcgatggggattcttaggggcaggccgccaaaatgctaatggaggtaattgccttgtctcttgggaaaaggttcagacgccgttacagtatggtggtcttgggatactcaaccttgaatcaatgggatgggccttgcgcatccattggttgtggctacaaaaaacggattcttctcgaccttgggaagggctgccttttcaggtaccccgtaatgcccatgctctctttgatgttgccctggagaccaaggttggggatggtgaggccactaaattctggacagattgttgcctgcacggttgccctgtaggtgagctggcccctaatctctttcaggtaattcctaaacgagcaaggagacaacgcactgtttctcaagcgttgggctgcaggtcttggactgctgatatccagggtgccctcactgtgcctcactgtacaggtgcttgtcgaatacttgaagctctgggaagtagttgatgattttaccttgcagccggctgtttcagatcagcacatatggaagctaacaaatccagggctgtacacttttaaatctgcttacaacgccttctttgtgggttcagttaagtttgcaccttggaaaaggatttggaaaacttgggtctctctttgatgcaagttcttcatttggttagcaatcaagaacaggtgttggacagaagataacctgtcaaaacatgggctgctgcaccaccgtctttgcctcctttgtgatcaagatgtggagaatatacaacacaaatggaaaaataaacagaataactgtgtggcactgtttttaatcgagattcggtctagactactttggctggcctgccaattcttttctctcccccgcaagcgcattaggccgaaacttgggctgggctgggccatgaaagcctcctttgcctgggctgaaatggctccaatctccctacgctctcggatcggaatcggacggtcatccctcactggtattcgtcctggctaggtataaaacatgttatttttggtcgagggaaaccctaaaacattttctttttgccctgcgtggcgttctccactctcctctccctctcccgagcacctctccttcctccactttctccccaactccggtgagcgagagtgtggtcacgacacaatcatggcgctgcccgtggggccaatcgtcggtgcgcgagctccccttcggggtgagcatgtcaccgtcgagcgacctcttggcggtgccctagtgtcctgtgcgtggcgttatgtaccggtggctgcgttgtttctacccagtcgtctgcaaacaagtaagctcttaccctttcccctttttcctgtttgtgtgctcgtggtatagggttacggttggggttctgggaaaaaacagtgatggttctctcttcactgtcttcctctcgttttctaatggatgaatgtgaggcttttggaggatttgttcgggttcacccctaaaacgatggtttagacacatcaagggttaaggttcgggcaccaacctcgctttggtaccattgttggatcattataagatcttgtacataaaatctagctactagatacctaagaactcataggtatacattcggggttggatgctgacaccattagggtgatgtagcttctctctgaggcgtcgaggtagggtggtggtctttttcttcactaaccgcgtaggagatagatcgagacttgctagaggtgtacgagagaggaggctatggtgaacctatctgttaatatacgcaggtgtgaaagttggagtccagatcgatctcttgaccaaaccggatgagatcaacctaagggcctgttcgcttctcccggaatgaaccaggattcgttccagctcatcaaaatttatataaattagagaagtaatccggctaggaactattccagagcttcaatccgtgagaaccgaacagggcctaagggcctgttcgtttactccggaacggttccattgcaaccgttccggttggaatgatatgtttatttgtactagtattgattagttggaatagttcctagccacaatccgacccaaccgaacagggcctaatagatagttctagaaaattatagatatggaaaggtgtatgacatgctactaaattttcttttaaacaaatacttctatttatttctcaaggatctaattgatcctcaaatgtcttttgatctaggattagcagga

SEQ ID NO: 701 - DNA, 19145 bp, Zea mays
  Intron number 1 from transcript GRMZM2G040724_T01 (locus G RMZM2G040724) derived from phytozome v7.0 (chr-ID 4; pos 2 31045765 to 231064909)
acgatcaggtataccaacagcaatcctccatccccaaaatgtcgtttccacgtttcgatggtctacatcctaagatctggattgacaagtgtgaggaatactttcgcatatataatgtgagtgatgatctgaaaacttcatctatctctttacatctggagggaaatgctgccaagtggtaccaggttttcaaattacagcatgggtttgtagcctagcctagacttaagagtgcagtacttgatcagtttggtacctatgactatcacacagctttggatgagttacttgagtttcgacaggagggtactgttgaggattatactcaaagttttgcctctttacagtatcaggtggccatgctgaaagggaaatgtgcctttgggccagttctaagtattttggtgattaagtgccaacacaagtgcttaaatgtgaatctatgcccatggatgaacaaagtgcaaatcacaagtaaaggtatgtttctaagccttagtacattggttttgtgtactaatatatttgtctaagtgttagaaacagagagaagaagaaaaggcgaatgttggctgtgtacagccaacaggctgtttcggtctggggcaccggactgtccggtggtgcaccggacagtgtccggtgcgccaggctgcctcgacctgaagacgccgctctcgggaatttgccgacggcgtacggctaaaattcaccggactgtccggtgtgcaccggactgtccggtgagccaacggtcggccgcggaatctgcgcgcgacacgtggtctggccaacggtcgaaaggaggcaccggactgtccggtgtgcaccggactgtccggtgcgccagatctgcaacggtcggcaacggtcggctgtgcctgttaaggaaagaaatcgggcaccggacagtgtccggtgcgcccgacgacagaaggcaaggatggctttccagatttgttctcaacggctcctagctgccttggggctataaaagggacccctaggcgcatggaggaggacaccaagcattcctacaacatctctaagcaccaagacatcgatctcgcacattcgtttcattgtgatagcatatagagctcttgtggagttgtgaactctttgttgtgttgcgagctcttgttgctgcttgtgtgcgtgttgttgctctgattttgagtcttgtgtgcgttgctagttccctccttactccgtatttctttgtgaatctcaagtgtaagggcgagaggctccaagttgtggagattcctcgcaaacgggatattgagaagaaaagcataacactgtggtattcaagttgatcattggatcacttgagaggagttgagtgcaactctcgtccgttgggacgccacaacgtggagtaggcaagttttgtacttggccgaaccacgggataaatcactgtgtcttctctgtgttgaacctcttgtgattatcattttgtgcaagatcttcgctctagccacctggcatcaactgtgctaacgcttaacaaagtttttgtggccataagtttgaattctacaggatcacctattcacccccccctctaggtgctctcaattggtatcagagccgttctcttcaagaaagggactaaccgcccgaagagatggatcctaaggggaagggaatcgtgatcaatgaccaggaaaagggaaacaagagggaaaagaagaagcattacaagaaagcaaagggcgaggcgcatctaggcaaggagtgggactcggattgctcctcttccgactccgacaatgaaggactcgccgccaccgccttcaacaaatcaaccctcttccccaacgagcgtcacacatgccttatggcaagggagaagaaggtatgtactcgcaactctacctatgcttcttcaagtgaggacgaatctagtgatgaggatgaagtagattattcatgtttgttcaagggcttagatagatctaagatagacaaaattaatgaattaattgatgccttgaatgaaaagaatatacttttagaaaagcaagaggatttgttgtatgaagaacatgataagtttgtagaggctcaaaaatcccttgcattagaaattaagaggaatgaaatgcttgcttgtgaagtatcaacatgtcatgattctatttctaacttaaagagcataaacgatgatttaaatgctaaactaatagaagcaaataaatccaactcttgtgttgaatatgttgaaatttgcactaggtgtaaggatattgatattaatgcttgtagcgaacacttagtttctatttcaaaattgaatgatgaattagctagtcttaatgctcaacttaagactagcaagagtaattttgataaactaaaatttgctagggatgcctacacggttggtagacacccctcaattaaggatgggcttggcttcaagagggaagccaagaacttaacaagccataaggctcccatctccgccaaggagaaagggaaggcccctatggcaagtagcactaaaagaaatcatgcttttatatatcatgataggagacaaactagaaatgcttataggagttataatgcatatgatgattttaactctcatgccatgtttgcttctagttcttcctttatgcatgatggaaatatgtccaggaaaaatgctatgcctagaaagaatattactcatgctcttaggaaagtagtgaatgaaccttctacaatttattgtgctttaaatgcttcctttgctatttgtagaaaggataagaaaattgttgctaggaagttaggggcaaaatgcaagggagacaaaacttgcatttgggtccctaagaatatttgtgctaaccttgtaggacccaacatgagttgggtacctaagtcccaagcctaaatttgccttgcaggtttatgcatccgggggttcaagctggattattgatagcggatgcacaaaccatatgacgggggagaagaagatgttcacctcctacgtcaagaataaggattcccaagattcaatcatattcggtgatgggaatcaaggcaaggtaaaagggttaggtaaaattgcaatttctaatgagcactctatctctaatgtgtttttagtagagtctctaggatataatttactatctgttagtcaattatgcaatatgggatataactgtctatttacaaatgtagatgtgtctgtctttagaagaagtgatggttcactagcttttaaaggtgtattagacggcaaactgtatttagttgattttgcaaaagaagaagccggtctagatgcatgcttaatagctaagactagcatgggctggctgtggcatcgccgcttagcacatgtggggatgaagaaccttcacaagcttctaaagggagaacacgtgataggtttgtctaacgtacaattcgaaaaagaaagaccttgtgcagcttgtcaagcaggtaaacaagtgggaggagcacatcacagcaagaatgtgatgaccacttcaagacccctggagctgctgcatatggacctcttcggacccgtcgcctacctgagcataggagggagtaagtatggtctagttattgttgatgacttttcccgcttcacttgggtgttctttttgcaggataagtctgaaacccaagggaccctcaagcgcttcctcaggagagctcaaaatgagtttgagctcaaggtgaagaagataaggagcgacaatgggtccgagttcaagaaccttcaagtggaggagttccttgaagaggaagggatcaagcacgagttctccgctccctacacaccacagcaaaatggtgtggtagagaggaagaacaggacgctcatcgacatggcgaggacgatgctaggagagttcaagacccccgagtacttttggacggaagccgtgaacacggcgtgccacgccatcaacaggatgaagaagatgttccaacggccgcgatacgaaccatggtgattggagacgttcggccacaggaacaagatgaacgagatcaaccttcttcctcaactatggtgcatcccccaactcaagacgatgaacaggtccatcaacaggaggcgtgtgatcaagggggagcacaagatgatcatgtgatggaggaagaagcgcaaccggcacctccaacccaagttcgagcgatgattcaaagggatcatcccgtcgaccaaattctgggtgacattagcaagggagtaactactagatctagattagttaatttttgtgagcattactcctttgtctcttctattgagcctttcagggtagaggaggccttgctagatccggactgggtgttggccatgcaggaggagctcaacaacttcaagaggaatgaagtttggacactggtgcctcgtccgaagcaaaatgttgtgggaaccaagtgggtgttccgcaacaaacaggacgagcacggggtggtgacgagaaacaaggctcgacttgtggcaaaaggttatgcccaagtcgcaggtttggatttcgaggagacttttgctcctgtggctaggctagaatcaattcgtatcttgctagcatatgccgctcatcattctttcaggttgtaccaaatggatgtgaagagcgcttttctcaacgggccaatcaaggaggaggtgtacgtagagcaaccccctggcttcaaggatgaacggtaccccgaccatgtgtgtaagctctctaaggcgctctatggacttaagcaagccccaagagcatggtatgaatgccttagagactttctaattgttaatgctttcaaggttgggaaagccgatccaactctttttacaaagacatgtgatggtgatttgtttgtgtgccaaatttatgtcgatgacataatatttggttccactaaccaaaagtcttgtgaagagtttagcagggtgatgacgcagaaattcgagatgtcgatgatgggcgagttgaactacttccttgggttccaagtgaagcaactcaaggacggcaccttcatctcccaaacgaagtacacgcaagatctgctaaagcggtttgggatgaaggacgccaagcccgcaaagactccgatgggaaccaacggacacaccgacctcaacaaaggaggtaagtccgttgatcaaaaagcataccggtccatgataggttcattactttacttatgtgctagtagaccggatattatgcttagcgtatgcatgtgtgctagatttcaatccgatcctaaggagtgtcacttagtggcggtgaagcgaattttgagatattcagttgctacgccttgcttcgggctctggtatccaaaggggtctacctttgacctggttggatactcagattccgactatgctggatgtaagatcgataggaaaagcacatcggggacgtgccaattcttaggaaggtccctggtgtcatggaattctaagaaacaaacctccgttgccctatccaccgctgaggccgagtatgttgccgcaggacagtgttgcgcgcaactactttggatgaggcaaaccctccgggactttggctacaatctgagcaaagtcccactcctatgtgataatgagagtgctatccgcatggcggaaaatcctgttgaacacagccgcacaaagcacatagacatccggcatcactttttgagagaccaccagcaaaagggggatatcgaagtgtttcatgttagcaccgagaaccagctagccgatatctttaccaagcctctagatgagaagaccttttgcaggctgcgtagtgagctaaatgtcttagattcgcggaacttggattgaattgtggcatacatgtgttatgcttttgatcatgttcattctgtattttgttgcttattgtggtgctcaagttgtacaaacactccctggacctcacaagtccgttgcaaagtgatgcacatgtttagggggagatgtgttacaacttgaccctttgagactaaccatatgcttgagtttgtttgatttagtctcgaaggagaattgaaagggaaaaggtggacttggaccatgaaagacttccactgcactccgatgagagggtaacttattccaagtccatctcatgaactcttattgccatttgctcttatttgaagattttggtgaggcaatagggttaaagggccaagattgatcccgttttggtgcttgatgccaaagggggagaaaataaaggtgttgggggccttcgtcctccgaaggtcctcaaaaacatgatttgacaatgttttccgagtggattatgtgaacaggtattttcggatccagaattatgaatatggagcacggccaggacgaagcctgaaccagacgaaggtcgagtgtagccgaagctgtgcgcagggaagcttcggcgcgatggcagaagggggaaccgacttaaagatgaaaagacttcgggggcctcgacagatttccataagccgttaacaaatgtaatggacatggatgtaattttacgtgggctgcgtcccgcgtctataaatagatgaacagtactcccgtactgttcacgctgacttggcattggcttttgcatcacgcttgtactttttaccttctctcaggaccaaaggtacatttgtaatttaaaatcatttctatttctccatgttaataaaatagaaatgattttatgttgatgtttgtatttcatgctttatatgaatccttcggcattacttattatattcccgaaggtatgtctatgatgaccttcgtcctaaatcattatttcccgaagggacataatgtttcgaaggacgaaggaccttaatgtgtaaaactttttatgttgccttgttcttaattcaaagcatttgagaacaagtcaccaacattggcgcccacctccggtgaactcacttccacttcgagtcttcgtgaacaccttcggaagctatagaccttcgctatggcgccgaagaaagcttcagcggctgggactgcagcactacaaccgctggaccacaaccaggagaccgtctctcttcgggaggccagaagccagaagagaaaagctgttagcccgacgcttgaggaagaagagctagaccaagaaatcagagagatggagatgctacatcaacaagtgcagaggaagaaggagaagatggcccgcctagctgagttgcaaaggcaaattgacgaagcttctgaggaagttcgccatctcactcacgatgagcagaacagaaggcctcatcagaaagacctccatcaggagggcttcgtcaacgaagacgactggtatgataatttccatcagggaaattttgtttttgatgatgcttctcccctgtctgctgagctgcaggctacaccttggcctccatcctataagccaccccagctccccatgtttgacggccactccgacccgaagcaattcttgatgagctacgaagcaacagtgtcttcgtacgggggcaacgctgcaatcatggcgaagtctttcgtcatggccgtcaggaatgttgctcagacctggtattcctcccttcggccaggaacaatcacttcatggcagaagctgaaggatatgttactgaccagctttcaaggatttcaaacgaagccggttacagctcaagccctcttccagtgtattcaggatcacgaagaataccttcaggcgtatgtccgaaggttcttacgattgagggcgcaggcaccaacggtgcccaatgaaatcgttatcgaagccatgatcaaggggctccgtcctggacctgcagctcaatactttgctcggaagcctcctcagaccttggagaaattgctccaaaagatggatgagtacattcgtgctgacaatgactttcgccaaagaagggaggaggccttcagattttctgagatgaccaggggcttcggaggaagatactacccgaggcatgtccgttccattcacaacactcagaatgatgataaggggagtcagcaaaacaggcagcagtgctcctcacaggcttcggggcaacaacaaactttctttcggccaccagctccaagaggcagaggcgccaggggcttcggcggaagattcggagatcagccaaggagactgttttgcctattctgtggagagggcaagggccacaccactaggacgtgccatgttacaatccagaagcaaaaggaactagccgaagctgcacctcaacaagctcagtcgaagcaggttatgcatactgcttcgtttcatccgccttatgtcccacaatacatagacaaccaccctgcggcttctgtagcttcggcaagtcaacctcaagcttcctggcagcagcttccgcctccacctccattgcagcaaggtcaacagccagaagggagtcaatacgctccacatcagagggacttcagagaacagtccgaagctcgcacagtcaacagcactgtgccagagtcgaagcacatttattgacatatcctacctttgatagcagtcttttctattcagttttattttctgtgaagcaaaaaacattgatagttttcatgtaataatttcgttgtttcccacgaggaaaatctatttgctccacaggcctaagttgctgaagcctaaaactttttccgttaccaaggaggaccttcggattaaaaatccttcggagtaacagaaagtcgttctaaggaacgcagagtaagtttatgaagtcacaaaaagccgttccaaagggagcgcagtgtaagttttctgctcagaagtcgttcctaaaggaatgcagagcctacagcgaaaagtcaacgctgataccgcctaagtaaaaggcgaagaagctcctaagggaggcttacagcgaaaagttaacgctgataccgcctaagtaaaaggcgaagaagctcctaagggaggcttacagcgaaaagtcaacgctgataccgtctaagtaaaagacgaagaagctccaaagacgttcccaagggaatgcagagcttacgaatatattttatgtgtatctccggaacaaatgtcacatgcataacataacatcatcacatcattttgcatagcataagcatcatacatcatgttgcatttggcaagagaaggagatactctcaaccttcgaaaggatgctttgagaaagtggcatcgaaattgtacagcttcggaatacagcttcggagaatacttttacgaaacatgggcgagctttatcagatcaatatcgaagttgtgtagcttcggagtttagcttcgaagaatgttttgacgaagcatggatgtgattcatcagaataattttaacggagaatgccttcttcacgaagcatgaaaagaagggaaggtgttttttcgccaaaggctcaaaaatggtatgtatttaatgtttcatgcatcgtaaagaattcaataatgaaaggagatttgtatattacattcaaatgtacaaagtgttacatagattacattttaaatgatttttccaaatagcatctaatcttctctcaatacttcttcggcggcctcatttagaaattggtcaacaaccttgtccaagatagtttcggccatttgtttaatttcttcgtcgacatttgatccagcagtttctgagggaagagaacatttcttcattacttttgcaaaccttgagcaaagtttggaataaaaattacaacacaataagagcgactaattggtacctaattgcctttcgggctctgtactcctttcggcagcttctgccacttttctggcgtcatgaatgcctttttcgctcctttggatgatctcttgcgccattcctcggccgccgtcgttccagatatcagtaaaaaatttgccaccaaccacgcttgcttcggccgaggggtccttgacgtcttcggaagataaggtagcttcggattgagctaaaaattttacatgcccgcaacctttcctctctaagacagaagcaattcctctggcgcccgaaaaagcgcatatgtcgccacgactgttcagaatctcttcgaaggcctccgcttcgtggctaatccactccagcggaccttcgggattgcctcgagagaaattctcttcgctggaaaaggcgcctacgctggcgaagctggatttaattttattcacgcattctacagatttgacatagcatttcctctgagatgtgcgaagctccttaacttttgattccaatttgctgaccataaaatcactaagttctcgtttcgtttcctcaagcgcgcgctcctctttagctctagccagctgtttctgaagatctttaatctcgcgtttttgagcttcggcctgggcctttgaagcagcttcgtcttttttcactttatctaccagtgtaagcagaattttatctttttccaaagcttcgtttctcagtctgataacttcggagcgtaaattattaaacgcaatttcatagctttcatcttcggcgctcttttgggctcttagtgcgttgcttaggatcaggccctatacgaaaaagaattcatataagaaaaaaggaatgagttgcgtaaaaataagggggtttttcaagtgtttaattcctataccttcaggctgttgtacgcaagactgtctgcgagatcttctttcgtcatggcgcttaatccagattcaagcttcgggaaaccaatacttctggccatttctcggcagacagatagctctttgttgtcaggcaggcagtataagaagtcatcttcattcgttccattaaatattactgcccccttcggatattttagttcctttgcataatggatggcttcatgagtttcttcttcagatagcttcttccccgaagcatgtcgtatcatgtaatcacgcatgctggcaggtgcttcggggatggcggtgtcagtttcttcaactaatactggttctggaatttttattgcttcggcttcaaaaggttgctccttgtagggctctgaaggcccagcttcagcttcagcttgttgagccgaagcttcagtagaagcttcagcaacttcaacacttttttttggaatcgtgcttgaagacttaattgtctccaagacgtctagtacatttaccattcttttcctttttggggtcactgatggccccttttggttttttgctgtttcaatatttactgcaggactcaaaacttctaatgttttttccttagtcggctttttcgcttcttccattttttctgtggatggtgcttcggccatctctgcagtttctggcagcaaggttggttgttcagcttcgatggccgaagaagcttctccggtgaactcaggcaccgaagctggttcaatataacgcggccgatgcgtaagaacctttatctttttccttttcggttctggctcgctaggagcagctgcagcttcttcttttgcagagattgtgttttttctcttctgccttcgaatgggatagcagtaatcagggtagacaaacccaatggcatcaaatacccgattcagtctcttcttttttcggcctccgaaggctgctgacattgcattatcttcagccttcgagtaggtcccgagtagctcatcacttaaattgtcaatgcttttcaaccactcatcatctggctcaataaatttatctccaaatttgaaggtgtacttcagtctcacaagcccaccttcgtcggcctcttttatggtttcttgtggcatttcccatttctcagcaagcggccacaccctgaaggcgatatgttcttgtactaagtcccttgttcctataaaagaacagacaacgccgaaggctctttggcactcttcggcggcttcgttcatttcaaccttcggcctccgaaggccgaagctttgccaaataggacgcataattatacctttgatgtcttctcgtgctgataagtcattcttcacataaaaccattctgtcatccaatccccgggccatctcttccgaaaggttggtacgggacagcttgccccggaccgagaaacgaagctgtagcagccaaagttgttatggtactgttctttgccccaaggctttgtttcatataataattcatgaacattacagaagcttcttgcgtcaggcttcagaccttggctcctcgcggcccacacgaagatatttaaccttataattgcctcgggagtaagttgatgaagatagacttcgaagattttcaacacctccacgacgaagctgctcaaggggaatcgcaatccagctttcaaaaagcttcggtacaccacaacttcattttcttcagggtgtggacaagttttttccccttcgtccgccctcacaatggacagatcccggaaataccttcctctcatattaacaagatgattctctttgatagttgatttaccataaactgaatggcttggtcgccaggggcgatcttcggagttttcgccactactgtctatatcataactttcactgtcaccagtatcttcagacaacccctccagaatttccttggtaatcttttctgtgttggacttcgacatcgctataagaaaccctaggttcttctcttcatcaagactcagcttcatctcagcagcagccttcttagcagcttcagacatcttcggaagcgctaaaaaactgtttttaaaagccgaagcttcaaagctaaaagatcagcaaatcttagtgcgcaggagctaaaaattttagtgggccgaagcagagggcaagtgtgcgtaccaaatcagttcgcgatgtgatcttatttatacgcctagggcgttgaaaattgaaaggccccgcttgtcagtagatgttgctattctagcaaagggaaggtgttttttcggaccttcggctcaaggccttcgtccatatcgcaatctgaatttattatttacaaattaatattgcgaggggctactgttgggggccttcgtcctccgaaggtcctcaaaaacatgatttgacaatgttttccgagtggattatgtgaacaggtattttcggatccagaattatgaatatggagcacggccaggacgaagcctgaaccagacgaaggtcgagtgtagccgaagctgtgcgcagggaagcttcggcgcgatggcagaagggggaaccgacttaaagatgaaaagacttcgggggcctcgacagatttccataagccgttaacaaatgtaatggacatggatgtaattttacgtgggctgcgtcccgcgtctataaatagatgaacagtactctcgtactgttcacgctgacttggcattggcttttgcatcacgcttgtactttttaccttctctcaggaccaaaggtacatttgtaatttaaaatcatttctatttctccatgttaataaaatagaaatgattttatgttgatgtttgtatttcatgctttatatgaatccttcggcattacttattatattcccgaaggtatgtctatgatgaccttcgtcctaaatcattatttcccgaagggacataatgtttcgaaggacgaaggaccttaatgtgtaaaactttttatgttgccttgttcttaattcaaagcatttgagaacaagtcaccaacaaaaggccaaagcaataaatggatcagctaccacttgagaaattttgaaaatagtgaaatagagctttttgttttgtcaaaactctcttcttgtctcttttgtcaaaagttggtttcttgtggggagaagtaatgattatgggaaatagggggagtttttgaaatctttgatcaatctcttctggaatgactctctttgcttcaacatgtgtgtttgacttagagatagagatttgagtttgatttgcaaaaacaaaccaagtggtggcaaaggatgatccatatatgccaaaaatgaatcaaaatagatttgagttctatttgaagtgattttgcacttgttctagttgctttatgttgtgttggcataaatcaccaaaaagggggagattgaaagggaaatgtgcctttgggccagttctaagtattttggtgattaagtgccaacacaagtgcttaaatgtgaatctatgcccatggatgaacaaagtgcaaatcacaagtaaaggtatgtttctaagccttagtacattggttttgtgtactaatatatttgtctaagtgttagaaacagagagaagaagaaaaggcgaatgttggctgtgtacagccaacaggctgtttcggtctggggcaccggacagtgtccggtgcgccaggctgcctcgacctgaagacgccgctctcgggaatttgccgacggcgtatggctaaaattcaccggactgtccggtgtgcaccggactgtccggtgagccaacggtcggccgcggaatctgcgcgcgacacgtggtctggccaacggtcgaaaggaggcaccggactgtccggtgtgcaccggactgtccggtgcgccagatctgcaacggtcggcaacggtcggctgtgcctgttaaggaaagaaatcgggcacaggacagtgtccggtgtgcaccggactgtccggtgcgcccgacgacagaaggcaaggatggccttccagatttgttctcaacggctcctagctgctttggggctataaaagggacccctaggcgcatggaggaggacaccaagcattcctacaacatctccaagcaccaagacatcgatctcgcacattcgtttcattgtgatagcatatagagctcttgtggagttgtgaactctttgttgtgttgcgagctcttgttgctgcttgtgtgcgtgttgttgctctgattttgagtcttgtgtgcgttgctagttccctccttactccgtatttctttgtgaatctcaagtgtaagggcgagaggctccaagttgtggagattcctcgcaaacgggatattgagaagaaaagcataacactgtggtattcaagttgatcattggatcacttgagaggagttgagtgcaactctcgtccgttgggacgccacaacgtggagtaggcaagttttgtacttggccgaaccacgggataaatcactgtgtcttctctgtgttgaacctcttgtgattatcattttgtgcaagatcttcgctctagccacctggcatcaactgtgctaacgcttaacaaagtttttgtgaccataagtttgaattctacaggatcacctattcacccccccctctaggtgctctcacatgcataacccacatttggatgatctgttctttacttctcattatgtgaaaggtatcaaagaggatattaaaagggtggttcattcccaagctcccgcaactgttgctcgggctagtttcttggccaaactccagcagcagtctttacagaggtcctcagtgcattcagctagaccttttacacccagatatcattcttccactcctaaatctgacaaatcgtctactgcctcatcctctggcttgtggagggaaagacagttgagggattatcgctgggctaatggactttgttatttctgtggggagaaatatgatgctactcatgcagatcattgtctgaagcggcctaaggctcaggtgcatgcattggcggtgaatgatttggatcagaccctgactgaagaaactctcaatcagttggagatggaagatgtcttagtccaagatctttgccagttgtctttacacgctctagccggtactgaatctgctgattccatgcgtgttcgtgcattggtgggcaatcaagtattccttattctgattgactcgggtagctcccacagttttgtcaattcttcgtttgtgaaccgccttcatttacctattactgctttatctccgctgacagtcaaggttgctaatggagatacactaatttctgatgctgtggtgaaacatatgcagtggtggacagcaggtcacacattcacgcatgatatgagagttttggacctcagtgcttatgatgctattttgggttttgattggttgaaatctcatagtcccatgctttgtgattggaatgctaagtctctaaccttccaggatatggggtagtggttactcttaagggtgtttctaaaccccagcttcatcttcaagagttgcctgctgaacaatttctgaaatggagcaagggcaatgatatttggtcagtggccatacttaatactctgtctagctttccacttacggatgttccacagccagtggctcggttgcttcaagattatcaggacatttttggggaatcacttgagttaccacctcagcgagagtacgatcatgctatttccttgtttctagattctcgacctgtcaactcaagaccttatcggtattcaccgttacataaagacgagattgaacgacaggtcaaggaattgttggcagctggcttaattgtacccagtacaagtccgtttgcctccccggtgctcttagtgcaaaagaaagatggtagttggcgcttttgtgtcgactacaggaaattgaacagcctgacggttaagaacacatttcatatgcccatcattgatgaaattttggatgaacttgctggtactcgttacttttctagtattgatttccgggctgggttccatcagattagtatgttaccagcagatgaacataagacagcattcaagacacatcacggacactatcagttccgtgtaatgcccttcggtctcacgaatgcaccagccacctttcagtgtgtgatgaatcatattctggaaccctttctccgcaaatttgttatggttttcttggacgatattctggtatatagccccgctcttgacttgcatgtgcaccatctgcagcaggtattcgatgtgcttcgacaccacaatttttttgtcaagccctccaagtgtaccttcgctcaacaccagcttcattatttgggtcacatcatttcaaaaaatggggttgctactgacccagctaaaatctcagccatgcaggattggccgccaccttctaatgtgactgagttacgtgggtttttgggtcttactggctactatcgcaaatttgtcaagaattacggattgttggctaaaccattgactaatcttctgagaaaacagcaatttcagtgggatactacggcacaacaggcttttatggctcttaaacaggctatgtcttgtaccccagtgttggcattacctgatttcaatgaggtttttgtgttagaaactgatgcttgtgctgtcggtattggtgctattcttatgcaaaagggccagccagtagcctttatgagcaaggctttgggcgacagacataagtatttgtctatctatgacaaagaattcttggccctcattatggcagtggatcgctggaggcagtatttacaacgccaagagttcatcattcgaacagaccatcagagtttgtgttatctggatgctcaacacttacatttcgagctccaaaagaaagccatgagtaaactgttgggtctccatttcaagattgtgtttaagaagggttctgaaaatattgctgcagatgctctatcccgcgtcaatcaccacatgtcggtgcatgccatttcttctgtacaacccttgtggcttcaagaggttattaactcctatgctacggattccgcatcccaacatttattgcagcagcttgctgtgcacagtccaaatgctgatggttattccttggttgatggtgtgatccggcttggtacactgatttggatcggtcataactctgctttgaagaccaaactcattgctacttgtcacactagtgctcttgggggtcactctggtattgatgcgacttaccactgaatcaaacgtatgtttgtctggaaagggctcaaataggatgttgattcttttgttaagcagtgtcctacttgccaacatgccaaacatgaaaagtctcatccagctggattattgcagccgcttcctattcctgaaggtgtgtggcaagacatctctctcgattttattgaaggtcttcctcgctctgatggcttcaattgcattttggtggtggtggatcgtctcactaagtacgcccattttattcctctacgtcaccctttcactgtcaatcaagttgcttcagccgtgctcactcatgtggttaaactccatggtgtgcctgcttctattgtctcggatcgtgaccggattttcactagtgccttttggaaagggctgttcaaactgttggacacaaagctgttagtcagtacagcatatcacccacagacggatggccaaaccgaacgcgttaatcaatgtctggagatgtatttgcgttgcactatctacaattctccagccaagtggaaggcatggctgcctctggccgagctgtggtacaactcttcgtatcactcatccttgcaatgctccccattcaaggcattgtatggatatgaaccgaaattaccttcttttcctgtgttggctgatgtttccactactgatcttccctcactgatcaaggaaagggatcttcatctggaattattgaaacacaacttgctggctgcacaaactcgtatcaaacttcaagctgataagaagcgtattgatcggcagtttgcagaaggggagatggtacttctgaaactgcaaccttacacccaatcctctgtggtcagtcgaccctttcctaaattggccttcaaatactttggtccttataaaatacttcagaagattggcgtggcagcttataaactggagttaccggctgggagtttggtgcaccctgtttttcatgtttcccaattgaagcactatactgctgactactctccagtatatgctgaccttcccaagatacctgatcttactcaaagggacctgcagcctcaatgtattctccaacgccgattggtcaagaaaggtggcgcggctattgtacaagtgctggtgcaatggcaaggacttccagctgatttcgctacatgggaagactggacggtgatgcaagctcgtttccctgattcaagcgcttggggccaagcttccattccaggagggggtgatgtaacaccggcgccaaccatcaccggagttacggcataagtgtaatacgtgtttcattgtcgtttacgtattttgtaaaaaggttggtccactgtcaggccgtagggctttctgttaagacttgtataaggtg

SEQ ID NO: 702 - DNA, 5271 bp, Zea mays
  Intron number 2 from transcript GRMZM2G012209_T01 (locus G RMZM2G012209) derived from phytozome v7.0 (chr-ID 5; pos 3 9871569 to 39876839)
cacgtgaaggtaagtgttctaaatggttctggttagtcataatgctactagtttatttcacatgagagttcgtttatgctgattttggatgttatttgatattacaattgtgatgttcatttggcaagtacgttttactcgtagctcttttgttttgtctattgtattttatttttgaacattgtagttctagcttttgatttgcacttcttgcatagaaggaagtttcaatatgttgtaatgtctatcttttctttctataaaacataagtttttggtttctataaataaaagggctgactattgtgttaaatgttcacttggtatatggggagccttatagatttgggaggaccattccaattacacgcgagctatttttctttggtccatgtgtaccagtgtattatcatcttttcatgtctttcctctttttgtgatgattcttcgggcctggtgggagtgggactacttcacactaaaattccaccttggagaggtaactgaggtgcttgccttagaagttggctcaaacttcagcaatgggaggttttgctgagaatggtatgccctcccgggttttttcatgtatactatctggttgtaactttgcatttgtaagtgtttcccaaccaaaacatatttttaacttaaaaagaactgtttgctaagtttttttcttggttttttaatctttttctgcttgtggttggtacaagattctttcttattttttcttattaatggtttgtttttgaagtgaactaagtgggcatagaccaagaactattgtttgtttattctttattaactatattcatgtgattctaaagcgcccatcatagctttggtatagctctgctatagctttttacacgagccaatctttttagcttcaatgacacccttttcagaggacaggagctctgaactggcaggttccaagatgcagccaccacctccagaaacccagggaattcaagccaaaaactcttgaagtggaaccatcgcttccccatgcagacctctctgactttgagggttaagggacaatgatatgaagatgtggtagcattactatgaagagaagcatccaaaaataaatcctcccaactgcttgtgcggaatacatggtccaacttaacaagagtgggatcattcctctgattggaccaagtatatctccttcccttcaatggaacttccttcagattcaaggaattaacaagtccacggaagctacccagcatagccctgtttatattgggatcgttcttgtcttcctccctataaatcagattaaaatcaccaccaatgatccacagtccctcacattcatctctgatctctcttaattcttgaaggaaagatggcttaagattgtcctgatgaaccaccagcaatcaccattcccttcctggaattgaactgaaacaaaaaactgcttgataactgaagccactgaagaaaaagccccatcacgccaagatatcaacactcctctggttccaacatctgggctatatacaaaattactaaacccggacccaagaatggaaagaatatcaaagtctgaaatagaacacaatttggtttcctgcaggcaaacgattgaaggcctaatatcgaccaccagatatttaactgagtctcttttcgcatggtcattcagacctcttgcattccatatcagaaaacagctagactccatataaaaacaaatggaagactaccagcatatcaccaaaaacagcacctaaacaggtctgtcttgaggaaacacccagccaaatagagctgccaacgcagcaatgtgattgctagagagcccaatatcaaataacttcacatactttctggcgtcctggagggaaataacttcattaacatcacagaaacctagatgcctgcagacctgggcagccgattcgaattcgagctctggagggaatttgaccaccctcctgcttcgcctgggctgaaaattacttggtagggtctttttccttctcttgatagtctgtggaggtggcagcaagccatcaactggcttagtgaccatactttggaactccttcaaaggtgaggaaatttcacaagatacatccagagctagctacactaggatgtcatcatgatcaggcatagtcagagaccttcttctggaatagactttgaaacatggtggcttcgctctccaactggctgacccaaacaatacaccagtcgtcgaactcttcaccctggaagattccttaacaacatcttgctagacgaccccaatcaacagacaagaagaatctttgtcattgcaactcacagcagcaatctgttcagacataatcgaagtatccaagccaacctcctgaccttccaccggtacaacgaccatttcagcaggggcaccagaatccatatgtgatcccaccggtttagatactaaaggtcagcctccccaacagcaataccagattcgaagcgagactgatacactataaaatgagcatttggtcccactagagcaggggccataacaacatgtagcaccttgacgcccagggtagacaccttcggacaagaattcaaaaagtcaggaacaccaggcgccgccaactcctcaaccgaaacatgtgggagagcaggggcatcaactggtccagtcaatgaaaccgaagagacacgcctaggaaaaacaggtgccgccaatgcacccactgaggttgatgggcagcatgaatcatctgaaggtccatgcatcggcgccgattgaatggcccagccgctagtgcaccgaggcctgagcagatgaggcctgatggcccagcagccgtggccgccgttcacgacgatcttgatcccgaccatcattagagagatccggtggaggtagaggaggttgctcctcccccaggacacccttcggtcgaagcttagtaaccaggttcccggatcgatgggatcgatgaacgggaacgtggtacacggtacgctactaaaactaggatttaacactactggaacgagattgttcccacgttctcggaacggaacgaacgttcccggaacgaggaacgtggccaagttcccggttcccggttactaagggtcgaagaaccttcaccgtcacagggaacaccaacgaacgtggaacccaatccccgtcctcgccaaggaccgctggctccacagcatggaggcccaacacctccggcagccgattaggagagtggcaccatgccttcaacttgataacagacagaatgaaccaagcagagcctccatcgtctcaattccccagaggtgagcaggaacaccctagagctcaatgtcgattagggaaggcatgacactgctaccggaagcaaaagcttgacgagaccacctcttaacatgcatccggagaggagggacgtgaagtggtgctcccccattgaagactcgaatagctaggtcctctgaagggaagaagaggaaggaacctgacgcaacattacgtaggtggagcgcatcagcgtcaaggtcaaacctcaaggcgagcgcatcccggacctcgctggcgcgaccagagcccttctgtccaataacgctgacgatgagagcacaatgaagctcaatatcagcacgatcgatcttcccagaacgcccaatgattctcaaaggtcgagcatcatccaaagcagtaggcgacgaattcttcaatgatagcagcaatggaacgctgccggccacgccatgatcgccaagtccatcaccagccttgatcctacgctttcgctgtccgcgacgagtatgtcgcttcccaccatcagtggtagcggaaccacccaacgctgagccgcccgccatggcatgctccgcactagcgcctgccgggacttccttggagactcgccgccacatcaacttgcgcctaggaacgacctagactgtctgccggtgtgggcacacgtaaacacggtgccccggcagccgacagaggaagcaccgtacacggttccgacacctcgccgctcggtgataaaaaaagaatcaattgaagcatcttacccgcagatcaacaggaacgggcctgggagctggcttggaagggcagcgggctaagcgacgagctcgatgaccttccaccttcacccaactgtcatcaccattcccttcctcgagacgagaaacaagggactgtgaagacaccaacacattcttataggccgcaccgtcttcacaccaacgttgcgccttcgatcgcccaccgcatcgagaaacaagggagggacctgtcgacgctagtgagggggaggggagtggccatcgaacccggaataggcaccgacgtggggctagtggaggtaggggaagaggcgtcggtgggagaggagaggtccaggggtgggagaggaagcgtcgccattcaataaaaattacaactacaaagccttcaaaataaaatccttgaaagaatctaatgcacttattgttgtgtcacagtactgaagtattggggagggaggagatggcggctgaatgtccatggaggtgatggttaagagagcagggaggggcagaagctgaaaaaacagaagagagcttggttagttggctaatgggtgtctagctcaattgggtgtttagggtttagggtttttagctcaattgggtgtcatttacttctaaaatatgtcttaagtttgctaatgggtgtctagctcaattggttagttggcctcaatagcactcaggtcctgggtttgactcctgggagcgaattttaggctggagctataaaaatcccctacctccctgtgtgggagcaccttggcctgtgataacggtgtggcccaacctgggggttgcggcagtggtcgctggcccattttacagtctgctccacgggtgaggctggggttcagcagttttctcgactgagatcttagtgaaataccgtgggacagtcttacccccactgtcagagtttttaaatatgtctcaagtttcaaaccgattgaacttgtctgagccactgtacaatgacatcttgaggaaagactaatctctatctgtacgcaatgtcagtagtatttgtataataaaatgtataattgcaaaactccgacatgcattgctgatatgcatatcctgtgacctgtgaatcaattttgggcctccagtatgatgctcttgtgctaactaatttgcattatgtttctgtattaactgacccccctttcattggattgtgaagatcgagacggaagctatttctgacgaggagtctga

SEQ ID NO: 703 - DNA, 2413 bp, Zea mays
  Intron number 1 from transcript GRMZM2G144742_T03 (locus G RMZM2G144742) derived from phytozome v7.0 (chr-ID 4; pos 1 35910173 to 135912585 reverse strand)
atcaagcgtgtgtcctctgctccgtccttgtccaggtatggtcttgcttctttgttgccccgcctcctggccaattcgttgaagctttcttgaaatcccaaattaagttgctcgatgatgttaaattttgtttttttccttgttagacgagaattttgcattgttgttcctgaagctagccaacacgaaaactgtttggtgttgatttctgttctctgcagtcttatgaacttaccttaaactgctataagtattaaagattattttgttggaactccacattctggtgtatctggtttcctttcttaccatatgtagactagttactaatttcaagttcaaaccctgttcttcagttacaaacccttggaaaaaaaaattcgtttcgactttttgttcaactgcaaagtgtttccacttcctcatttggggttgcaagcagctaggagacccgtacttttgaattaatatcagttgattttacttagttcttgtttgtttgggattataatccactcagattatataatctaacttattttaaacaaaacatcagttcaaaataagttagattatatttttttaacagaaaggggattccccctatttcattaagaaataggaccacagttttaacaacattcaaacgaaaaaactacttattacaccacttagctcatagaactaaaagagcataagcaagccatccaggcctaaggtggatcactacagtttctgacaaaaaagtcataccgcacaaccactgcaaccactaccaaccagtttttggcaaggccgaccacacacaaagccccagcgaccagacaaaagcaacacattgtgaaacaaataccctagaaccaaaagggccttcgagagccaggcaagccacacatctaaaacaaacagacatcacgctcaacgttagttgcacagtcttttatccatcggcgcccagccaaaattcctgttgaagacctccttaaccattcttctgagaagggagcttccttccagcagcatctttcttgaagtttctttctgaagaatcgcccaagcatccaaccaagagcagcacagaaacacaaggttaacagcatttaaagaggaaatgttgttgaaacagaaatcatttctatgcttccacaacgaccagagaactgcactgcaaccaacagtgatcaaatttttttcatgacctttgaatttgcataaccatctcccaaacatatcattagcatttttgggaagagttagagacggacaggacatctgaataattttccaagaaaaagatgcaacctggcaattataaaagatatggctggttgtttcaagacaaccacaccactcacaatttacattcccttgccagtttttctttctcagattttccttggataagattttatcatttatgaccagtcagaggaaaactttaattctctgaggtatttttgccttccagatgaaccaacaaggatccctgttcatatttactttaaagtttctataagatgatttcactgaaaatcctttcttatcaagcaaccaacatggtttatcatttctgtctataagacagaaatctgcacagttattttttaaatcatccaacagattgaccccagctccaaataatcttcttctaaagattaaggagttacagttgtctcttaaggcccaattcacatttatctctttattaagagataactcaaaaagtcttttgtatctcatggataaaggttcatcaccacaccacttatccaaccaaaaactagtagagacaccatttccaatttccatttttctgtttttacaatattcctgcttacagtccatgaggcctcgccaaaattgagagtctccttgtttttttataatcctaaacaaacatgctcttagtttactaataatagctaattctggttttgattagtgacatcaatagtactcgcattacaactttactgacctctgagttatattacttttctctcatagatggacgatccaatacaagcaattgggacatacaatatatcggagaagccacgttctggcctttgctagtgcagatgtatgcatcaggctttttgagcataccatctatttttttagggttggtcggatatgaaattaataatgtttgttgagcataactttatgtgatttttttacaagtttaagctcaatttcatattcctatatcccaaccaggacaccataattgcttagtactcttcactttatgctttataatatcccaggttctggagaaagttattcaactttatttagtgccagttgctgaatccttattctatataatgcatcctctcttggtagctgaactgggttttttttcaaatgaatcaggcaccacaaggcaaaagaagctcaggtgaga

SEQ ID NO: 704 - DNA, 5876 bp, Zea mays
  Intron number 1 from transcript GRMZM2G170600_T01 (locus G RMZM2G170600) derived from phytozome v7.0 (chr-ID 5; pos 1 91676715 to 191682590 reverse strand)
catttgaactttcatcaggtgggcagccctcattagagtcatttccttcagggcctctttgtttgaactacagttttggggctttcagtttctggctgttggctttttattttgacttctgtagtaaaattttagcttcttagcgcaccaaaagacagaaaagcttgtctcagcatgcttttcagtttttagtttattgcctcggaaaccagattttcaaaagccagctcaacaactgagttgtttgttttcaacttctagcttctagaacaaacaggccaccagtcatgtatcgggtgagtaccacacctcaactgccctagttcatgactagtcttaccctacagatgtttgcttgaaagcttaaattcctccttgtatgcaatgcaagatggacatagtaaggaagcaatgttatcttgacactttgtcaagggtaccgaacccctaactagccgaaccccggctacgtagttcgtagccgcgctccgaggttatacccctctaccgcaggcttaattagagagagagagaggattggagataactgatttctcccccccccccccttctgtcaaacgattacaaatatatatagccaatggcttaaccgaatggagaaggatctccttaattctaggaactaccataaccgactggagaagattctccttaattcaaggaattaccaaaacagctctccttaattctaggaattaccaaaacagcttactactctaagtttccttccagccactaggcgatggctcatgcagcgcccgctcggcgcactcagccgtgcgacgtacgtcacgggcgcgtctgcgcctagcgtatgtgcggccgcacatgacacacttaatgtccaattttcgcagccaaataatttacctgcgggtggacttaacagtttacagtgcaaaatgatcaatatccattgatggaaatcctgactgtaacctttttatcccttgcaacatatttttagcagtctccttctcctgcacgtattgaatgcatatcagcatatgaaagcagtggtggcatgtaaccagaatcatgggaactaatgcacgcagagacgattatcagtaaacagtttcattagatgtcttcatttcacttgtaaactttgcagtactaaatgttgatggagttaccttgtgttgctcaaaagtcaaaatagctaggtccatgttggtttgaacaatggaatatactaaaccttaactcattcttagttaatttcggtgtagagatttagttttctatgttcatttctttcactcttttgagaaaataataaaaacataacttactgggccagtgtaatctaagagccttgtacaatagtgctctgcatcctcaaacctgcctatgctcttgtaatgcttagcaagaaacagcagagcttcaacaaaattctggccttgcctttcctcaacctccattctctctaaatccttcttgtagtagaatgcagcttcctcggattgccccagcatgccatgcagttttgctagttggtgaagtgctattccttcagtgtcattgctgtttgcagctctctcatagcactttatggcttcttcaatcatttgaagtggatcactttcgtaacactgagccatggcaatccagagacgagcatcattgggttgcaagtatgacgatttccggaagtaataaagtgcataaaacggcatccccatcatctcatagatttgaccaagaccatacaaagcacggaaatctctaggattaatatcaacagctcttctgtaggcatcaattgcagcaggactatttttcaattcaacatactcatgccccatcagggtccaagctgagaggtactttcgattaagctttagtgccctttgaaagtataaaactgatttctcatgctgacccttcagactgtagtaatttgcaattatgcagcaagattctgggcggtatttatctgtcaaaaatactctgtgcgcaaggaaactcaaagcagtcaagctttcttttgcatatagtagatttgagtaaatatccatagaatccacgcgaaaaggatcagtcctgagcagttcttcgaaaatcatctcagcttcatcaaggtccctcatactgtactgaactgttgcaatttgagcctgaatgtaaccactgcagcggaagacccccatcaaacgctcatatcttttaagagcttcttcatgcatcttaagttccagatatgcactagcaagaaagaaatctttcatccagtgattcttcagatttaagttgtttaaaatgtcactgctggtgcataaagattgtaactctgaccaagcactccagttccaaggataagtattgacagattctactaagattgttctagctagaccttcacatcctttatcacgtagaacaatgccatacaagtagagtccaaatgaatcaatagagccagttcttcggtgtgttgagagctctttctccaaagcaactagttcctgattaacagcattactcttgcccaacgatccttcaagctctatcatctctgcctcttttcgcttctctccagcctaaaattcgagagcaaatagatcattaattaaactatgaacaaagtggaaaacaacttggggcattagcgaactttcatagtcagcggacaagagaagaggggcacattaaattgcacacagaaatcctttggctgattaatagactaaatggaaatttgcagacaatgtcacaactcacaaatactactacccttacaaccccaaacaactgacactaaaaactaaaacaagtacctataatagaggtttatctcataaatgttacaattcttcaaattaaacaaataataccagccagcaaaaagggttttaatactggcagatgattgttttgacatggcaaagttctatttttatagaacaaacacgaataatttccatagcagttacaacttacaagtggcatagccagaatttatggcagagcatagctttcgtgtacaagtatcagcattgagtagaaattgtcaatcatttaagggacttagttttaagccctcaaaggtctggtggtggtgagaattatcccaataagtcaccagatcataggttcgaagcagcttctccgtattttctgggggacgcttcagtttaacccttccccagaccacctctcatatgggagcctctggcactgggtttgttcctttttataattataatttcttgattgaatgtaatatatccatcaaattcaatcatcacagtgaaacttccctgctacttggaaggaatcattggttcacatcttccattatttcttatgctcatagagctaacaacttatcaataaatagcaaaccaatagctatgtggaatacatgaccagaggttttataaatgtcaaaccattcaattcgcttgaagtacatgagcacaaagcactatacagaacccataaattggaccatcacaagttggaacagctcttattactcgttagtcctgcaaagttctgttcggtcttttaggtaaaatggtaaaaccacaataaaccagattttagtaaccactccattctcacatggaagtaactaaacagactcctgagccactaaaacatgtcgatccacataaataaaagacaaaagagtactactatctccattccaaattataaaatgatttgacttttctagattcatagattttgttacgctcggagatataaactggtaaaaaaactatgtatctagaaatgccaaaacatcttactaaccaaatctcacctacaatgcagcagctctactgaggcatctcatcaaacaccactcgccctatcctagatctgaaaacacgcagatgcaccgagaaaataaacgcagcaagtaagaagctgatcctagctcaccatgtagagcgcgtagcatcgcaggaacactgccttacgcccaacctggttctgcagcacgtgcgcggcgcggcggtactcccgacagtcgaaataggtcttggccagcaggtatttgtcgccgcccgaatcgaacgcgtcgtcgtcggggatgggcgtgctgacgtatgacacgccaccgagcggggtcccggcctccgagctactgccgccgccggggcggggtcggtggcggaagctggaacccccgctacggtgaaggtgcaatagccgccccgcggaggctgcggacgaggaggatggggagtccatcgcggccgaagggaccggggccgcatccagctctacgccgacgagcagctcggcggccctgcgaggggggttgttagggttcggggtttagggtttgaggaggggattttgacgtgggggcataccatttagcggcggagtagaggcagcgctcgctgagctggcgggaggaggcgcggagctcggcgcgatagctctccttggcggaagccatggctccggtcggggcttgcttgaagcagatcgacgcgagagcgcaaaaattatttgaattcttgcgatacgtggaaccgtggagtggaaggcggcgatgatgatactgaggtttgaggtttgtgctggtgtaggaatttggaccgagttcggacttcggaggcagaacttcgttaggttgggcctgactacgaagaatggcaaaaccaggcctgctatgtgctatggttggtcagtcgttatcggggaccgcatgcattatgcatacgtatatttctagcctttggttgtttgaggcgttgagctactgctagtattacacgtatgcagagccgcagaggcagcagaacttggttggctagtccttcttgcccttgagacagatttgatccaccctcggtcttgtgcaagccacacctcacgtcctaattcgcaagcctgatctatttttttaccaagtatttgtctttggttttaccatcgcatgatcgtcgctatgtaggcactatctaatccacacattggatgaacttgcaagagtatatgtagatgtcatagatcaagttaaataacaataacggtaaagaaatgatttagttgttgttattgtaaaattggcatccaggtttatatacttcaattttggatttaaaaattatgaaatgaagctatatcaattactattattaagtatactaggtatgtgcccgtgtgatgacacataacataaattgacaagcctccaatagctcaggactctggcgacaggcaacgtgattacaccggttaagataaaattcgtgattatataatctaacaaattaacaacgtgaatgttagttcaaaatttgttagattatataatctggatagattataatcccaaacaaacactcacttaacaaatatgaaaactaatagcatagaacagtctcgcaagtcattctgtcagagccaggaatggaaagtaataagatctaactgtgtttttacatggacagacactaaaagcacatgtctggatcaatttccaaacacaaatttaccaactacacccaggactaactacagctagggatcaaaacaacaaagcttgtactaatcttcctgaagcaagtcaggagcttcaaaccataaaaacataaatggaccctttgttgttggagacatatgttacttctttagagattacaacctgtaaagatggcactcaaattaggcaatgccatataaattgtttactaaactaagtatagttttacaattagaatgaataactgtcgtttttcatttgttgtgtacaatacaagaccacggaatgtgattgctgctagtggtggtgacctgaacttggaagaaattaacattcattttttataacaaacattgcagggaactctacttggcggaataatttaaagcataca

SEQ ID NO: 705 - DNA, 6004 bp, Zea mays
  Intron number 12 from transcript GRMZM2G312712_T01 (locus GRMZM2G312712) derived from phytozome v7.0 (chr-ID 3; pos 207073532 to 207079535)
tagcaggagccaaatcaactgcactggacttctactcaaaactgtgttcacatgctgataaaatattggagacaatcgaaaaacacttcagcaatgaagaaaccaaggttagtactcagtagtcaggtagcttggctgttggaacatttaccttattactcagtgcctcatgtttagttgaacttacctaggtgcttcctcaagctaggatgtttttctctcctgaaaagcaaagggaactttcgtacaaaagtctgtgtgttatgccattgaaattattggaacgtgttttaccatggttggtgtcaaagctgagtgatgagcaggcaacttcatttcttcagaatatacgattggcaggttatcctcttacttggattgtgctatactgtcatatctattcatttcattagcttaaatgatttcttcaaaattccatatttgctaaaaaagctgcatatggaacagcatcaccatctgaaactgcactggtcactcttatctctggttgggcatgcaaaggccgggacaaatccaaatctggagaatatttatgcttaacatcaggtacagcaagatgcctgtcagatgatgtagatgatcagggaaaatgccgatcattctgcccatgtgcttcacacaacagctcagatctttctctgcagctacaaactgaaaatggttctaggccaggcaagcgaggaaaagatgcagtatcttttcctggtactaatggaagctactgctctcaaactgctgacattgatgcaagtccatgtagcaaaaagccttgttgtattcctgggttgagagtaaagagtagcaaccttggtattggttccctggcttctgtgaagtcctttcgctctttaccatacaattctactgctccttcaatatattcgagcctcttctcatgggagacagatgcatcattgtcttgttcggatggcatttcaaggccaattgatacaatattcaaatttcataaggcaattcgcaaggatttagagtacttagatgttgaatctggaaggctcattgatggtgatgagtcttgccttcgccaattcattggaaggttccgtttgttatggggtctttacagggctcacagcaatgctgaggatgaaattgtgttcccagcattggaatccagagaaacattgcacaatgtgagccattcatatactcttgaccacaagcaggaagaacaattattcgaagatatctctgatgttctctttcagctttcacaactacatgatagccagggccatgcccagactaaagttaatgaagtaaagcaaagctgtttccattcatctaatgacgttgattttactaggaagtataatgagcttgccacaaaacttcaggccatgtgcaagtctatccgggtcgccttgactaatcatgtccatagagaagaacttgaattgtggccgttgtttgacaaacatttttctgtggaggagcaagataaacttgtaggtcgtataattggttcaacaggtgctgaggttctccaatctatggtaccctgggttacatcagctctcactcaagaggagcagaacaaaatgcttgatacctggaagcaagcaacaaaaaatacaatgtttggggaatggctaaacgagtggtggaagggagctggaacatctgattcttcagcagaggcaccctctgctccagaaggtctgtgcagctgttttcttttttgtcttgtcctccaaccttttctatttgcattccctattcaatataatgtttgttagaataaccaggtgaatgtataaatttcatatacatttagttcctcggatgacaaataagtctatcttggtttgtcataactcataagtcgatctttctaactttctttagcaatttctataaaaatatcttaaatgaaaagaattacatattatgaaagtgatgtccatctatatgaatttttagatattgatgatcaaagttaaaaaagtttgacttaggacaaaccaagatgaacttgtatttacaatcgaaggaagtgttatacattgtctagacatttaatttactggataaaagctctgtatgccttataagttataggaataatgtttggcttgatcagccataagctattgagtaaaagcatttactttatggcaaatagaagcaatgatatggctccagtttacctagaatgaattaaatgaaatgttttatcaagtttgttcataggatttcatatagcatggaaagactattcgtgcttagagtaggggaaatgtgttgaacaatgctaaagcaacaaattcatgaaatgtgctttatgcttatttagtttgaaagtagttctatgcttggttcttctcttctccactgataaacattttttattatgactgagctttcatttgccctttgtagatagtcatttacaagataagcttgaacaaaatgaccagatgtttaagcctggctggaaggacatatttcgaatgaaccagagtgaacttgaggctgaggtgcgaaaggtttcacgagatcctacacttgacccaaggcggaaggcctatctaattcaaaatctcatgacaaggtttgacatttgaatgtttctatgaattgcttgttacaaataagtattcaaatttcataatcttgtgcgtttcagccgctggatagctgctcagcaaaagttaccggaaccaaattctgaagaatgtagtgatgatgctagtatacctggatgtgcgccttcatatcgagaccaggagaaagaaatttatggttgtgaacattacaaacggaactgcaaacttgttgctgcatgctgcaacaagctgttcacatgcagattttgccatgataaagttagtgaccatacaatggaaaggtaaattccatagcctgtaaatcaatcattttatcttgttcatgccataggtactgtgctttggaattcttttgttttaaatctcgattcaaactccaaaccaatctactatgataaaaacaatgaaagacgtctaggaaatatagagctttctgttaaaaaattaaaatgtccccctggtttgccactcttcattatattcgggcgcaacttcctgatcatgcttggttgtagtgtgggcatgcaattcagtccaaccttgaatgtatcatctttatttctctagtaaacctttcaacactgttcaaaacagaatttgttactgtccttgtgtctgcattttctctactatacctctgcaacacatttcaaaaagtataatgagccaactcctctacttgtaatgtcaaggaaagcaacacaggaaatgatgtgcatggtgtgcctaaagattcaacccgttggtccgttctgccaaaccccatcttgtaacagactatcgatggcaaagtactactgcaacatctgcaaatttttcgatgacgaaaggtaatatacctcaacatgactgaaacttcaaacttagtctgatagtgtattttaggcctgttgaggtattgaactacattgttctacttatttattaacaaaagttgcatcagtatttttcttattattttacatgtaatagtctaatagatatgtatttgttgaagtagtttatcgacataacatgatttcccttaccatagatttgcattcaaatctggaaaaatgacaagattggttgttgccggagcccaaatctatcatgtttgttattgcaattttattttggtgattggagatctggaaacttattttattgtttatttatgctgcatggtaatgtagtattttaacttggtaacaagtgaacagcatccgtattgtaattggagctctggaaacttattttattgtttatctatgctgcgtggtagcgtatagtatttcatgttagtaatagtaacaagtgaacagcaaatccttaatgtaaatggcatctgataaagtatcaaagtcacttttaatatcgacataagtggcaatatagcatatactacaattatacatgcatatagtcatatacattcaagaacaatttaatctgagttaaacttttgtataattttaatggaaaggccaaatttagtaaaaaccacttcagttcatctatggaagtaacataacaaaggtccctagtgaggggatactctacctacatttcaaaattttcaggttgaattgttagtgtatgagaaaaaagagcgaggaaatgaggcatggatttctagctactcttgtcattgccattttctctgttataagtattgagaaaaaaatctctgttggcctagtagtctcaagcctatctttgtgttcttgagaattttttgtttcggcttgtctgatacccaaaccaggtgtgttgcagtcttgcagattgcacctaactactggcttgcatatagttctctggttgaataatttttgtttagatttgttaggttcataccctgttggcttataaaatatttagatgttactccctcagttccaaaataactaaacttatagttataggattagatgttactccctctatcccaaaataactgacctttggtcccaaaatacttgaccttcttacttttcaattcatatttctcttcttttagtacacctttttattttaccaatacatctatatatctatctactctatctctctcctaaatcccacacctattcactcctaaattcatgtgtccaaacctaaaaagtcaaatattttgggactgaggtagtattttcttgttctactttctccaattcaggtttatagttgatagtccaatactccaatgccatcaagtgatcaaatgagttgaaacctgtcaactttcccagtagtctcatcttccattgctaccactccatgttttgaaataaacatttggatttggaaataagcaatgtgtctcttctgacattggggtgttcttcaggactgtgtaccactgcccgttttgtaatttgtgtcgtcttgggaaaggtcttggtgttgatttctttcattgcatgaaatgcaactgctgtcttggaatgaaattaactgagcacaaatgtcgggaaaaagggctagagacaaattgtccaatatgctgtgacttcctgtttacatcaagtgccgcagtcagagccctcccttgcggccacttcatgcattcagcttgctttcaggtatgttccttttgttgcaccatcaccatgatcggattttgtggtttattctctggatgtcaacgatgattgttaacaagttaattaatcgtcaatccaggcatacacttgtagccactacacttgtcctatctgctgcaaatctctgggagatatggcggtaagcataactttacgatatcgttgctattctgtgtttccccttggtgaagtatattgccttttgtgttccatgtagtgcagttcttttttgactcgtgagcggaaaacctgccaatcatcttgcttcaatgcctcagaatagcaatgtagcatcagtttatcggaagtgaaacacaatcttttcttaacttgaattcgctgtgagtctgactacatgcggcggtaggaataaatcatggacgtcttgttgcatgatttccaaaatcttctcgagcagtgtcttcatatatcttaaaatatgaagacaataaatatcactaactgagctgattgtctcttttcttttgccattttgatgaagatccacaattcgtttttttggtttgcaggtgtattttggcatgcttgatgccttgttggctgctgaagagcttccggaggaataccgtgataggtgtcaggtagcccagttcttctgttcgcgatttttattgtttcgaccgctggagtatatttaccaatttttattgcatcgctcgtccaggatatactgtgcaatgactgtgagaggaaaggcagatgtcgatttcactggctataccacaaatgcggctcctgtgggtcgtacaatacccgagttatcaagactgacactgcagattg

SEQ ID NO: 706 - DNA, 1171 bp, Zea mays
  Intron number 1 from transcript GRMZM2G403813_T01 (locus G RMZM2G403813) derived from phytozome v7.0 (chr-ID 6; pos 1 3890613 to 13891783 reverse strand)
tcgtcagcaaaaagcacccaacacagcacaggcgggtctggctggctatcggccccaccggtcggagacagggtgcggctgggaagctgaaaagcggccccgcagatcagggcgcgcgcggtgtggcgggatgggccgcgcggtgaggttaagtgggctggtgggaaggcttacggcccaagtgcaggtccgaacttcttatttttttttcctgttttgttttcttatcctttccaagtttcaaattcaaactatgttttgaaatttgaattcaaattaagtgcacattcgaagaatcagcatgatgcaaattaaatatatatttactatcttatttatgagaatgcttttaaatatgaaatgcttacatataaatgatatatcttaataaaatatcattttgtgtgtgtagtttatttgaaagtgaattaatattcattacttatttacttctaggaaagttcaatatttaatcaagggtaactttaattcaggtatttctagttatatagttcatgagaagaataatccattttagaaaatagattgaagagctttctatttttatgtttttctcttctggatttcaaactaaattccaatttcaaaagttttaggttctatatttgactaacaacatttttgtattgccaacgatttattttaggaggaaataactttaaaagtgagaaacctatattaagggtcatttttattcttcttcttttggggaaactttataaatccgattttgggtgttacagtacctcatcaacaatgagcatatcattcagttttctttataaattctgctgatgaatttgttcccagtttattcatgtcatttcttagtatccatgcaaactgaaactctgcacttggacactgaaactgaccctctgaacatcgatgtttgctaataatgatctgttcagctcgcgctccgaacacgccggtggagtgggcgacgcggatgactatcgccaagggcacggcgcgtggcctagcgtacctccacgacgacatgagcatcgtgcacggcaatctgagcatgtgtctctccccttatgccaatgcaagatatagagcaaccataggcacatacaaagattcttgtttcatcatccgctcctcagagagagaaacgaaagcgagggcaaagaagcaggaa

SEQ ID NO: 707 - DNA, 1085 bp, Zea mays
  Intron number 5 from transcript GRMZM2G131070_T03 (locus G RMZM2G131070) derived from phytozome v7.0 (chr-ID 6; pos 9 7105547 to 97106631)
tgctttttttgagcttgaagctgctgcacgttcatgtatgtgctactttaattatagttttctctatgtatattattcactgtatttatcatgcatgttaaatatgttagcagagaatttaattatactgttataataaatttagatttccaagaacggaatgggcgtccttctgaagtaggttcttctacaaaaagcagtactgcctcttctccacatcctgatggacctgcttctggttctcttgctgagtccaatcaaataaatcaaactcttactcgtggcagcagtctgacaggagcaactggtaatggtgtgcttggagaagctatcttagatcagtccgatgagcttgttagtaatgccttgaatcacaggaaagggaaccttgtattggaacatgatggtaggaatggttcagcagcgtcttataggggagttgtttcagatgaggaccgtgtatctaatcccggccatgctaggaaggactctgctgaaagtattgggagtgatttgagttctttaagaggaattgaattatctattccaggggttagtagttccctttgggatggtgctgtggtggatggacatattagtcaaacagaacatcttactggtttagatatgcatcttttgtatgatatggatgcacaagtcatccttccaaatgatcaaaaacagaagttgactagacttttgatcacaatgcaacaaagaataggggcagcaaaaactgatatggaggatctcatagcacgactaaatcaggaagcagctgttaaagaatatcttactacaaaggtatagctttgcttttcatgctaatggctatggcatctagctctaattaataattataggttcatgcttaattaaaacgaaatgcactttcaatttccatgttgagtttaaaattgtatggttctccaagttacattgttttcttgttttgtgaattcttagttgtatactcagtggatttatgtgtatcattaccattctgcagattctaggttatctgtttggtaattatgatttgtaatgtaggttaaggatttggaggttgaattggaagccgcaaa

SEQ ID NO: 708 - DNA, 3599 bp, Zea mays
  Intron number 3 from transcript GRMZM2G119133_T01 (locus G RMZM2G119133) derived from phytozome v7.0 (chr-ID 5; pos 1 71709483 to 171713081 reverse strand)
aggaagctttatctgaggcctctgcattggccaaggtatcacttcatgtctggaaaccatactgtaggatggtcattccgattttagaacgtatgataccaaatcctgtttagtgctcctttttttcattgaattgacgatgctctaaaatatccaggatgagcgagaggcacctgcttgtgtagcattgcctgccatttttcaataccttattttaccacgatcaagtatccggaagtgtttagaacacatacacttattcgtaagtgtaaaggccgggacactgtttctttatctaaaaaaagtatactgatgtgctgcgctattgtgattgacttgctcaaactaatcttttactgcaaccttatccagaatggttgtagatgttagaccactgtttagggttaggttagggtttccctgtatttccctgattacccctattgtcatgggctttggcccacctaactcctatatataatatactcccaacccaggattagggttagggtttcacatattccaacaatagaagcctcactttattccaagttccaacagacttgatgcaatgttttgaaattcaaatagcaagaaaaaaaatcatagggccagtttggcagggctcctagagcagcttccaggctgaatccagcttccaaacagtttttatactgaagtgattctttgctgattttgtgaagtgattctttgaaatgaactaggaggctgggagctggagaaagagcttctccatgattcactccatgtccagaatcacagtatgcatagagtttattctagagaatcatatagaatcaatttcagtcagagaatcacttttcacagagaatctggagcaggaggagctctaccaaactggcttttaagtttagaggcagctttgtggtagttgtagagaactggtatctgttgggtaagggtgggatgcaccagtcgctgatggcctgatgcccagtaggtgcccgtgatgcctggcagcaagagtcattgcagttttacagcccatgagacgcagtaccaagcggagggacacatcaggctcaggtaggcatgcactggactattggagagagaaccagtgctgggagcctgggagcatcaatagtgttggaggagctacccataggtggcggtaggaggttggggtgtctggtagcttgcgatgttgggatttgggtgaggagcggggtcggatgccagaggggaaatgctggtgtgaatgatgatgcttgctacacatgtgggtgggtgtgtgcttgtcaattgtcatgggctgaaaaggcctgtaatcaggtgtcgcggaatgctgattgggctagcaaggaatcaaggatagtgctattattttttctctaatacacaggagagctgcgtataattgtattaagaagaggaaaagtccgatacaaaaccagtcctctatcccggacaaaataggagatcctcaaccaaaattacaagactacagaaacgagagcgagacctgaccaacaacaaaggaggaaaaaccctatcctatacccctctcctaaccaagagctagctggtcagaggcacttgcatagccccaaagatgcctttcttcttcaaaggatcttaatctaaggaccgattgaacacagggcctagctccatcgaacacaatggcgttcctgtgtttccacagaacccaagcactgagaatgatcaaggtgttgaaacctttactggttgacttggagagggacgaaacagctcgcttccaccattcaataaagttattttcagactgctccggcaccctagaggccatccgaaggcgtgataacactctgaaccaggaatccctcgagaagacgcaggtagcgaggatgtggtgcacagtctcttgcccctggtcgcagaaaacacaaagcacaggatgggggagacctctgtttgataaccggtctgcagtccaacatcttttcctagcagccaaccaaagaaacattttgcatttcggaggagcccaagatttccaaatacgtcgccaatgtttgaaaccgattgagccctcaaaggacaggagataggccgatctagcagagtatttaccgttttcagaaaatctccaactgcgttgatcttcttgatctgtgagcaccacatcttgtagtgcgcccggatagtgcattagtgctattacatctacctattaggttattacaggcaagatggcctggcctaacatttcagcctgtatagcagttgatctggtccatgacttggataagtcaatagttattctggcatggatttagtattttagatagattatggttgatagcttgatacacaatgttgactcttcaaaagtttgattgatgccttgttagcaactggaggataaagcttcactttgccatagatatcagatggcaatgaaatatagttgaatttttgtacaaataaaaagaaaacttgcaagtttttgtttggtgaaaagtgagttcttatgattgcttgccgaaatttatttctccttttcagtatttaggaatatgaacttccattttatttaattttaaatttacaagatgggtcttgtagaatgtctcaacaaagcctcttacaaaaaaggttatgtaacatgaaggtgttggatgctgccactgccctcagatgatgatatgcctgaacaccattccaatgttcattggtcgatttgagcaactttggtggcgcaaaattatggtttaaaaaaaaggggttctgcctaaaggttctaaaaaagtggcagatccagtgccgtaggctcccacatgagtatggtcgaggcaagccttgcaccgcaaatgccaaggttattaaaacgataaaacgttggaacgctcatggttgaaattttgacttttaaacgtttaaactttgtttaaacgtagttttaaacaacataggaaaaataccaatacattataatttcagacaataatataaagttaaatatcaaaatagagaggctagtggcttaccaaaacttcacccatgagctggattgaacctcagacttggtgacttagtgagacatctctcaccactgcaccagggattgcctttctcacctctggaggttctagaactctaaaaatactacagttttaggcttttagcaatacccatgttttttttgaactacattacttattttatccaaacacctcttacctttccaaaaccaatgtaatttgcaaaaccttagtatcttccctgaattccaaaaaaactttgtatccaaacagggctttagcgagggactcatagcgcttgcttatgtcaactctgtaattggtagtatctacgcataatgacatgaaatgtccattgtatttggtttattgaaaataaatgttatccttgtatgacaatttgctggaaagaatcatgagtttgatactcgttagtagttctatatgtggttttataatgtgttatcatgatacatgtcttgttttgttatgttgtatgcattcctaatttgttgataccttaggtactcttaacatataatacattttgtaggcgctaatatccagatcttcacgtgagcaagcctc

SEQ ID NO: 709 - DNA, 12264 bp, Zea mays
  Intron number 6 from transcript GRMZM2G077863_T02 (locus G RMZM2G077863) derived from phytozome v7.0 (chr-ID 2; pos 9 5450344 to 95462607)
gcagaaactttacctaaggtaatactcaatgttgagacgttatttgttttttgtacatatgttatttattgcatttatttcttgactgtgtatgcaagtgtaataaatataatttacagaagtttctatccttatagccatttttcttaatcgtatacatcattaaattccaaaggatagatgttttgtttatgttaaaattcaatcttgaaagaaaactgagtccatcaaatgttgtgtttgtgttgtttcccactaatcttaagggcgtacccagtgccgtaggcttcccgcactgtgcggggtctgggcaagggtatctttaagcgccaagccttacccgcataatatgcagaggctggggctcgaacccgggaccttccggttacaagacggtaggctctaccgctgcaccaggcccgcccttcttcccactaatcttaagattgtgctaattttctttcaatgaaatctacctttgttttttttcatctgtagtttatagatcttcaatttgtttgtttcgttggtttcccatggcggcttgcaaaatgttggctttatagtatggctgataggaggtttaatggggttaagatgaattttgtgcatgaatgccatccatatatttgtgaagactcaaccatgaatgtatcgataaatttgggaggtgaactgtcatgacctgtcagggcccaagggggcggcgacaaggagcagcagtaaggagcgcatgtcgaaggatatgaagattagttgagattatctagaagattagttaagattatctaggaaggttatcagttagtagtttgttgagagtttttaggagagttttaaggagataaggatctctagatatataggggcggctagccggccagccgacctatttatgtaatcaatggatgagaaataaagtaagcaagaattagaagggagaaacgctcctcttgctcgaccatgggcagatgcctcggccggcctccctagtgccccctaacctagtcgtcgctctctaatccacggagacacaccctgtgaacaataaccgtgactgtagcaccgcagcgtcattggcagggcagtacaacgccgcctccaccaccagctcccaaccatcgatccccctctccaatcactcaccgatctgcaaccataacatttggtatcggatagcttgggtttcgatccaatcccatggcttctgctgccaatttcgcggcgtcgtcttgacaattggcgtccccatctccatgggctgcgccgcatgccaccttcgtcacgttgtcctggcaaccagcatccccatctccatgggctttgtcgcatgcaacctttgtcacatcgtcttggcaatcggcgaccccatctccatgggcatcaccacctgccaattttgtcaccacatcctggacgccgacgtacccatctccaggggcagcgccaaattttgtcacatcatcttcgctgacggcttctccccatgggcaacgccactaggggaagccatgactcagccatcaccatcttcattgatggtggacttgtggctctcactcttagtggttgagcaggggctgctgcaaatcaaagcagcaatgcaacatgagcggcagctggcgtcgtccgcaaggctctagacgtcggcaactgtggtcctacaggctgttgcttgtggcttgcttgcacgacggagagtgtgggagatgcgctggcagacgctcgaggcagccttagtggtgattaacctcgacacacggggacacgacctcgccctgtcgggcggccatcagcagccgcgctggcccgctgtctccaagtgcaagcttggtgcgtgtcctgcgggcggtgaacttcaactttatggcagcgacagtaaggaaggcgctcccctcgtcgtcggcaagggtgcactgcttagcgccaccacattccgctagcggttggtcattgttgcgacctactctaggtggccatccatgtgctccccttttgtctagaactccagatggcgtccatgggatctaggtggttgcacatgtgcaagtccaatgcgtggagggtgtccgccttatcttatggggtcaaaaaaattcaggttcggaataataaaataagccgagatgaaaaaagcttgtcttctaggtttttggttttgggtcaagtagagccggtctttgggcacccgttatgctgcagctcgaggacgagctacttgtccaggagaggtgtagtgtcaggacctgtcagggcccaagggggcagtgacaaggagcagcagcaaggagcgcaggtcaaaggataagaagattagttgagattatctaggaagattattagttactccatccgtcccaaaatataaggcgtaaccattttttgtttttgtcccacaatataaggtgtactctatgcacatgtacatcgatgcagtggtatagagagaattaaatgcatttcttggtttttgaaccagaggtggttacgccttatatactgggatggagggagtagtagtttgctaaaaatttcattgctagtttatttgttggtgatcagttggctcttacccatgaccagaaacatgagcttctcttcgatttctatgataatcttcttggatgagctgggcaaaggcagttttctcttgatttgggagccttccatagtaatgcaattgatctcaactcccttgagcccccgtttctgaaatggaagttcaacaaactattgcttgtctgccggcagataaggctctggggcctgacgggttcacatgctgtttttataagtcgtgttggcgcatattaaatctgatcctatgttagctcttctcttcagcaaggaaatccccagaagttgtggccgctcaattcttcttatttgactcttatccccaagaatttggatgcttcttcccctggtgattacaggcccataaggccataagcttgatccatagttttgctaagttagtcaccaaggttttggccaaaagacttgctcctcacctggccaagcttatctgggccaatcaatgtgctttgataaagggacggtcgattcatgacaactatatgttggtgtacaattctatcaaagccctccaaaaaagaagatggccaacattttcctcaagttagatatctctaaagcttttgattcaatctcctgggcctttttgattgaggtttttgttcatttgggtttcggtcttggatgatgcaatttgatctcaaatcttctagcaacctcctccacttaggtgctccttaatggttccctgggcgatttcattacacaccgtaaggggctgcgtcagggcgactccctcttgcctttgctttacatcttggttattgatgttctaagcagtctctttggtaaggctgaaagtatgggtcttctacattctctgggcagcagcaatgttaagaatagaatctctatttatgccgatgacgtggtgctgtttattaaacctgaggtggaagatttgagttgtaccaagaccattttagattgttttggtgaagcttcgggattgagagtcaatatgcaaaagaattctgctattcctataagttgtagtgctgatgtgaagcaagtcatctctaattccctttagtgaacaattgggtcattcccttgcaaatatcttgggctccccatctccaaccagaagctgagaaggtctcacctcttggattgggtggaaaagattgctgataggcttcccaactggaaggctaatctccttaaccttgctggaagaacaaccctggtgaaatctgttttatctaccattccggtttacctgttaattgctctgaatgttccaaattgggtgattaaagccattgataaagtccggagggctttcctttggaaagggatgaaggaggttaatggaggtagtagctgtttggtggcttggataaggtgactagacctcttagccttggaggcctttgtgtcccgaatcttcgctatatgggatgggctttacaacttagatggctttggtttaaaaaagcagacccctctagaccctggaacagattgaagtttcctgtcccgaagcaagttcgtgatttcttttcaatctcagtggtgaccttggttggtaatgggcagaacacgattttctggaaagatcgatggctcaatgggggcactattgctgatatggctccagaggtggttgttgccgttgctcctaaggtggcatgctctaaaacatttgctcaatgcctccctaacagaggctgggttagtgacatcaagccggtgctctccatatctggtatctaacaatatctcctttgggatttattggagaatgtgtacctcactaatgaagaagatcaacatctttggaggcacaattcaaatgggaccttttcttccaattattgttatcgtgcctttttcagggggtctatcacttttgaacccttgaaaagactttggaagtcttgggccccacagaaatacaagtttttcctttggttagcattgagaaacaaatgctggacaactgataatctagggaaaagaggactgccgcacccggatagttgccccttgtgcgactaggagagtgaaacggtgcagcacaacctcactagctgtgtcttcgcccgacaattctagtttcacctcttttcttctctagggatgggtcacctctcccataggactgaagatgattcgttagaggaatggtgcaggaggaccaactcactagcatcagtgtaaggaaagaacaacaaaatgggatcaatagtgccatcattttcggtgcctgtcatggccgggcgttacggccggacatacaataggcgtcgccgagatatgcgacgcgcagcggaacgcgcggcgcgcacagcaggcgcgcgagatgaggaaagtccggaagaggaaggtccggcagggggctaagataagggaatagccttccatgaataaatccttcctattatggagatagctttctataaataaaaccttcctagtattagtagttctttcctgttatgagatcctaaattagtgggctgatggccttatatatgatgtaaccgcacttgaaataagcaagcaagaaataccccttcctattctcctctcttctctcaagcctgcggttggggagttctcaccccaccggagaagacggacgactacgagctgcgtagccgaggtccagccagtcaggggttcaacgcccttgacaacttggtatcgggatcccggtgttcctcgcctacttgttccacgacgtcatcaccaagctccgccaccttctgcgctgcgcctgccatggaggatgacctcaagaccaccgtgaagcaactcgccagggccgtccaactcctccaagccaccgccgaggccaacgccaaggcaatccacgcgctgtcctccgatccatcgttgtccgcaggccaccgccacccaaccggcgagcaccacaacgatcggccgccccggttccaaaagatggacttcccgcgtttcaatggcaagtctgatccgctcatcttcatcaaccgttgtgagtcctatttccatcaacaacgtaccatggcagaggagaaggtttggatggcctcctacaacctcgaagatgtggcccagctgtggtacatccagctgcaggaggacgagggcacaccacgctggggccgtttcaaggacctcctcaacttgcggtttgggctgcccctccgctcggcgctgttgtttgaactcgccgagtgctggcgttcggggaccgtgaaggaatattcgaatcgtttccaggccctccttcctcgcgtgggccggcttgacgaggcctagcgcgtccagctgtacactggcggtctgcttccgccgttgagccacgcagtccgcatccacaacccggagacgcttgtgatggcaatgagcttggcgcgccaggtcgagttgatggagaccgacaggtaggcgctggctccaactcgccctggccagcgcggtcttctcccgaacctggcgccgcgcccagcgctggccgcgcctcttccaccgctcgcgctcccggtgccaccggtgggcgtctccacgggccgtggcgcgggcaaccagcggcggctgaccccggaggagcaggctgagcattgtcgcctggggctctgttttaattgtgatgaaaaatattcccgtggccacaacagattctgcaggcgcatcttcttcgttgacggggtggagatcgacaacaccgacgacgctacggccggggctgacaacgaggcaccttgcttctccttgcaagtggccggggtggccatggcggacaccatgcagatcacggtggtgcttggggccacatcactcgtcgcactcctcgattccggcagcacgcacaacttcatctccgaagaggcggcacgacgctctggcttgccgctacgccagcggccctgtctcacggccatggtcgccaatggcgagcggatcacctgcgagggcatcatccgcgacgcgcccctcctcatcgatggtgccctgtttccggcagacctctttgttatgccgctagctgggtacgacgtcgtccttggcaccaagtggctcggcgcgcggggacccatcgtctgggacctcgctcgccggcgcatgtcgttccagcacgagggccacacaatctgctggcaaggcatgccgtcgtcaactgctccgcggatccaggcaaccgtgaccgtggccgcggacgccctcctagacgagctattgggtgccttcgacgacatcttcgctgagccaaccgatctacctctagcccggggttgcgaccaccgcatcatcctcaagcccgatgctgccccggtggcggtgcggccgtacaggtacccggtcgcccacaagaatgaactcgagcggcagtgtgccgccatgattgagtagggcatcgtccgccgcagcgactcaccgttctcctcgtcggtcctcctcgtcaagaaatcggacgggtcgtggggcttttgcgtggattaccgcgccctgaatgcgctcaccgtcaaggacgctgtcagagaggaaattctccggccgggtggcggaacgcacccgccctaaatcctaagatgaggaggggcctaagcgttttgcctgtctactaagcgatgaatgagcacaagaacaaacaagggtttagagtggttcgggccgccggagcgtaataccctactccactgtgtgatgtattgagcttgagagcttgtatgaacttgtgagcctgagctgggtctaagtgtgtctgagtccgtcttgtaacaccgtgtgccctcccttttatagctcaaggggggcacgtacaagggtactgagccccgacatgcgggcccagggacataacgaatgtaatacttggagcaactgatcctggtcgccagtgcaatctccttgtgccctgatatccgcggtctgcgtagcattggcgtgcagcggaaacttccctggtcacgtacgagtgatgatgagcacattgtatgccgcggcacggttgtactacctgccaccggaatggacaggcacgccgcctgcaggatggcctggttgctgcccgccagcggagtggatagggctcatttaatgctgaggcggcacatcacctgccagcggagtggacagggctcattcaatgctgaggcggcacatcgcctgccagtggagtggacaggcggcgcgccttgtccgcattaaatgcaaaggccgcgcggcccagaggccttacgtctggcttcgcccgcttgcttacgtcacgggcagtaggccacgtggcagcatcggggagtgggagcgcacgcggtatggttcggacacgtgtcagcaccggacccccgcctggtcttgattaaggcgtgggtattctttgccttggaatcccgggaccctactgtgagtggcccggacccctcctccctgaggggtccgggacccgtcccaggggtctggtttgtacctgtggaggtcctgaacctcgcccggaggtccgggctgtgcatccaggggtccgacactttcccgtgagggtccggacctactgttgccaccttggagtatatcgtctcctctggctacgtggcggccccggagccgcccacgtggaggggtcgggtgctgttcaccgcgcgactagagataaccgcgcgggcaccgtgtcttcatactgtagcaggggtacccctgattcagggtaccgacagacgcctttcccattccggtggtcgacgagctactcgacgagctccacgacgcgcgcttctttaccaagcttgacttacggtcgggttaccatcaagtgcggatgcgggctgaggatgtgcacaagaccgcgttccgtactcatgatggcctgtacgagttcctggtgatggcgttcggcctctgcaacgccccggccacatcccaggcgctcatgaacgatgttctccggccgttcctccgtcggttcatcctcgtgttctttgatgacattctaatttacagcaagacgttggccgaccacctgtgccacctccgtgctgtcttttccgagctttggcaccaccaactcttcgtcaaacgcaccaagtgcgctttcggcgccacctcagtcgcgtacctcggccatgtcatctccaagccaggtgtcgccatggatccggccaaggtgcaggccatccatgagtggccagttccacgtttggctcgggcggtccgcggcttcctcggcttggcaggatactatcgcaaattcgtccacaatttcgggaccatcgccaagcccctaactacccttgttaagagggacgatttcgagtggtccgaagcggcagcaacggctttcgacgccctcaaggcggcgatctcctccgcctcgatcctcgccgtgctggacttcgcaaagccattcatcgtcgattgtgacgcctcgtcacacggcttcggcgcggtcctcgtctaggagggccacccggtggcgttcttcagcaggccggtagcgccacgacaccgcgccctcgccgcctacgaacgcgagctcatcggcctggtccaagccgttcgcaattggcggccgtacctctaggggcgtcgcttcctcgtcaaaaccgatcactacaacttgaagttcctgctcgatcagcgcctcgcgacgatccctcagcatcattgggtgggcaaacttctgggcttcgacttcaccgtcgaatacaagcccagggaggcgaacgtggtggccgacgcgctctcccgccgcgacacaccggaggaaaagaccgtcttggtcctgtcgggaccacgtttcgacttcatcacgcgtcttcggcaagcacaactcaccgacccggccctcgtcggcatccgcgatgaagtgcgcgcgggctctcgtggggccccatgggcggtggtcgacgacatggtgcagtatgtcggccgcctctacatcacgcctgcgtctcctctcctacacgagatcccgagggctgtgcacgaagagggccatgaaggggtacaacgcactctccaccgactccggcgtgatttccattctcctaacatgaagcaggtggtacaagactttgttcgcgaatgtgtcacgtgccagcgctacaagtcggagcacctgcagctggccgaccttctccctctgccagtaccacagggtgtgtggtcggacatcgccatcgacttcatcgaggcacttccgcgcgtgaggggcaagtcggtcatcctcatcgtggtcgatcggttcagcaaatgtgcccacttcatcccgctcgcccacccgtactccgtcgagtccgtcgcccaagctttctacgccgacatcgtccgtcttcatggagtgccgcagtccattgtgtcagatcgcgacccgatcttcacgtcgacattttggcgcgagctcatgcgcttggtgggcaccaagttacacatgacgacgaccttccacccgtagtcagatgggcagtccgaggcggccaacagagtcatcatgtaccttcgctgcctcacgggcgattgtccgcgtcactggctgcagtggctcccatgggcggagatcgtcttcaatacggcgtaccaaagttcgcttcgggataccccgttccaggtcgtctacaggcgcgacccaccaaccatccggtcctatgagccgggcgacacacgggtggcgactgttgccaagaacatggaggaacgccaggaatttctcgcccatatccgcgctcgtctcgagcaagcttaggcggtttagaaacaacactacgacaaggctcatcgtgaggtttcctacaaggttgatgattgggtgttgctccgacttcgccagcgaccggttgcgtcgctgccccacgccaccaccggcaagctcaagcagcgctacttcgggccctaccgcatcaccgtgctaatcaacgaggtggctgtccgcctcgctcttccacctcaggctcgcatgcacgacgtgtttcatgtaggtctcctgaagaagttccatggcgctccaccagaggctccatcgccccttccactagtccaccacagcgccattatttcagagccggaacgcgctgtccatcagcgcgccgctcgtggcgtccagcagatcctggtacagtggacgggacaatcccctgcatcggccacctgggaagatatcgagccattccgcgccaagtatcccgcacttcagctcgaggacgagatgcctctcgaggaggggagagatgtcatggccgggcgttacagccgcacatacactaggcgtcaccgagatatgcgacgcgcagcggaacgcgcggcacgcacagcaggcgcgcgagatgaggaaggtccggaagaggaaggtccgacaggggtctaagataagggaatagccttccatgaataaatccttcctattatggagatagctttctataaataaaaccttcctagtattagtagttctttcctgttatgagatcctaaattagtggcctcatggccttatatatgctgtaaccgcacttggaataagcaagcaagaaataccccttcctattctcctcacttctctcaagcctgcggttggggagttctcaccccaccggagaagacggacgactacgagctgcgtagtcgaggttcggccagtcagggtttcaacgcccttgacagtgcctggtgcctatggctgcagaggaatagaactgtttttgatggggatcttccctccatccagaaggtacaacaacagttcaatgatgaacttgcttgctggatcatggctagcgcgaaaggtttgggtcagcttgggctagattgcttcatgagaagtgtcggatcgagcccttttgctctcatgtaatccttttcctttcttctcttttgtttgtttgtttttcttctctcttttttcttttattttgtttgggttgtgaccccgttgtatggttttttctctctctctctatctaatacaaagatgcacaactctcctgcgcgttcgagaaaaagagtttttaggagagttttaagaagataaggatctctagttagataggggcggcgagctggccagcctacctatttatgtaatcaatggattggaaataaagtaagcaagaattagaaatgagaaaccctcctcttgctcggtcgtgggcagaggccctggtcggcctccctagcgcctcctaaccctagccgttgctctctaacccgcgcagacccaccctgcgaacagtaaccctaaaccatgaactgtagccgcgaccgtagcgcatcggcgtcattgacgggtactgttcacgcgtgaacagcgcgccgcctctaccagcaggtcctaaccatcgaccccctttccaatccctcaccgatctgcaaccataacacgaacaatttcacttttttggtttgcgaaattagttattttgctggcaatgcagagtagcttgattatttggtcttgcgcgaagagaacattgtttttgtgaaccctatacatttcattgtttcaaggtaatgcaagtttctgcaattacgattgcccagatcttgttcttgtttaaacgtaattctatttattgtacttcaaatctagaaactgttgctaaacctccaacatagctgtaatctcggacaccatttactttccatgctttaccagcagacacctagccagaacctggtaccatggtgaaatgattctgttctgatcctgcagtgacgttttgatcctgcagtgacggtctgcatctg

SEQ ID NO: 710 - DNA, 2888 bp, Zea mays
  Intron number 1 from transcript GRMZM2G123804_T01 (locus G RMZM2G123804) derived from phytozome v7.0 (chr-ID 3; pos 6 1225119 to 61228006 reverse strand)
tcctcagggctaacaggttgtgagtgaggctgcctccttagcattacacaactatggttcgcctctatttacatcaatccagtttgttccggcttgtttgtttacccttcttgatttcctcagccagtaagaaagattcatctgttacagtattgtcaacaaaaaaaatcagtcagaagtgaagaatcacatggagctcttatttgtttaccaaggaggacaaggaggcaagtagacgacgcatgtggccaacgttggcggtatggacgtggagatggcactggccctcacgctcagcagcagcgacaagctccagaatgaaactaactgaatatcagaaagcaaagtacatcttaaaagtattactaaaatttatagtttttccaaaacttcaaagatcatgtttttgttagtaaaacaccctcttgtacttgaacagtctcttacggcagaagaatcagctacaaaactgaaatgtctattccgttggccacttggataccctatcgtctatcatgcgaatgatgtagttgccaatgtaagagaagagataaacaagctgaggcatacaaatgaggacctcacaaagcaagtggaagacctacaaatgaacatgttcagtgaagtagaggagttagtacacctaggggtaataatgtgctctagattttacattacaaactttaaggatcgaatcaaattagaatcggggcctatcactacaacagcatacctctgtacaggcggtctggttcgccactacataggcggttccaggaaccgcttgtggtgcaccgcctgtgatgtaaaacaacatcacaggcggtcaatcaaaaaccgcctgtgaaaaacacagattacaggcggttcagttcaaaggaaccgactgcatacactataaatcacagacggttttcattatacagattcatatatacagaattttcaaacacagaatatacacagatttcatacacagattatacacagattcacacagattgcataatacacagattatacacagattcatccacatacacagatttacacatattacaagttccataacaggtataatacacagattacaagttccataacaggtataatacacagattcatccacatatcaagttccatcgtcatacacagaattatacacatatcaagttccatatacaagtaaatatctcaaagttccatagacaactaaacatctaaagttcctaactaaagacctaaacactgtgtgatattgtgtacaaacttagttctgggaatttttgcaaatttttatttatattgtagaatagcccttgttgatgaagaacttcacggcgcataaagtaaagcaagtctcttacaaccttagcaacaccgacggaaaccatatctctttctaatcattcagcattgatcttggatttaggaacctgcaatgaaagcaaaaagcaagcggtgctaagagtaatctgatgagcaacaatataacataaaaattgcaatatagacaatgatagcgaacttacatcctcacgattgaccatgtaatggaaggtgacacgacaccattcgcatacataataaccgcacaggacagtacccggaggttgtttgtcaccatatggaaataatgatattgacaaattaggcttgtcctctggatgttcgccgccaagatctttccaataaaaacggtatgcactgcatataagaatagcattgtgagattaagaatacatttgttaagttgtaataagtacaagtgtgcaataataatcatacttctctaaaatcttcaagaagtcattatacgtagccttttccattctcagtgagtcgaagaccacgactttaccatcctttggccagatcatgatacaaatgtagtggtcactatatagacatagacgaaaacacatgttaagatcacgattgccataatttatagttcaaaattaaaccatgtcgataacttacttaaagtggtgcggagctattattaagttgtaacacccactttgtaaattgctagaaataataccaatagagaaaaaatttctctttatgtgagtttgatctttatgcatcatcacatgtgaacaccatgtccaaaaacaattaataaaaagatatgctactaaatcaatgcatcatgctgaatattttaattgtgtgtacatttttgtgacaatattataataatgtgaaaagaaatatattaaatatccagatggggatttaaatcctaataatcctagaattaagaaaagagagaaggaagagattatacaaaatagaggaaataaatatatgaaagaatacattttgtccctactaatattttaatttaggtatttaactcagttatgaggctcacaaacaagtttgaattcaaaatagagatttaaaaatgaaatgaaacagaaaataaaaaaaaaagagaagaaacctaattgggccgtgaatacccatttcggcccgcttccactttcctcagcgcgcccagcccactcggctcctcttccttttcttttcctgttgggacacttccaggtgggaccaactcgtcagatgccttcacttcatctgcgtcgcgcgctcacaggcactgggtcgctgaccgtgggccctctctatcgggtctatcctccccacggagatctcgctcgcccgcttcatgctcgcttcggttgaccgtccaacggccgccgtgcatggcgcactcgcccctgttgaccatacccctggtcctatatactgggcgcccccatctctactccaaatggcttgctccgcaagaagccgagttctcttctctccacgccgcgcgcgttattcggctgacaggtggggcgtagacccactgttcctcttccccgttt

SEQ ID NO: 711 - DNA, 3364 bp, Zea mays
  Intron number 1 from transcript GRMZM2G034065_T03 (locus G RMZM2G034065) derived from phytozome v7.0 (chr-ID 7; pos 1 28117252 to 128120615)
tgctgatttcggactcgctgcacgggtcactagtatttgttttactaccttgctgtattactacctttcagtctgaagctcaagacgaataagatcaatttgttaatagtagtatagtacattgcgaagtctaacatattagtgcgaaaagtgaactgaaaaagcagtagaagtctagaagatcaacagtcagtccagcattggttctgccatctttaaaataataatgtgatgttagagactaatctatggccgtatttagggcctgttcgaatgcactagaactaataatgagctggctaaaaaattgctagtgaaattagctggctaactatagctgattttagttgggttgaacaagctaatgaactaatgggtagttgagggtgcagttaatagttagctgactattagctggggtgtttgtctccagctaaaagcagctaatagttgaactattagctgggttgtttggatgtctctagttaattttagcagctaattattagttttagtgcattcaaacagggccttagctgcagaacgtctaatggttcagctatttttcatgttgcgggtgtcatggtcttagaattcctcttcatacaaactcatctatgttttagcatgactacttagtatctttgctagttgcccatatgtggccttgacttcagtttcagctagtgtgatgtaaatgagttggggagtcaaactaatttattcgtctatggtctaggggcctaagtgagccgtgtagctctggtattcctgccttggttgtgtaacaagcaaatgaggctaagtggctaactcaagtactcaacctttcttcagggcatgagctgcctcatctctggagtcctctttaagttggcaacagcctgtgtctgtctcagtgattttttgtgtgtcccttctgtgtttgaactgacaattgacatgaacttttgtgtggtataattacttggcaagaagaaatgttgccatcaatacttgctcacagaaatgagtgcaagctgttttttggagtcgtgagttcatagcaagtgtccattcacatttcaactcatcttgctaggtatgataaaatatttgagacctggtgcttggaagttctttatattgggtttttgttttcttcctttgaatttcaaagttaaggatttacgttgatgcacaagacaatgatttgtgttatccccaatacaaagagctaggtgaactttgctaccattggtctcatggtcatgtactccctccacccacaaaagaatgcaattctagcatagtaccaactaccaagctaaaaatttaaaaatattgttatttataatactccttccatctcataagataagacataattttttggcactttctttagagtggaactttgaccattaatttcttttaaaatatgccatcaacaagtacaaattgactatcatgttaaagtatttttgaatacaaattcaagtatataacatgcatacactaaaaatctatgtttttcgctgaagtattagtcaacattttgaaatgttgacttctctaaaaacatgcactccttattttatgggatggagagagtgttgaataagtaccattagatctgtcatgagatatactttcatactatacttatttggtgacatattataatcatcaatacttttacctatatatttggtcaaacattagacacgttaaccaagaatgcacctataattgcattcttttatggacagaggtagtactaagtactccctccatcccaaaatataattcattttacactaatcacatattcgttaagtaacatatgaatgtagtttccatgtatgtctatattcattatcatttgaatgaatgtggatggaaaaaaagtgagttagaaagaactaaaatttgagacgagggagtactaactaattagagtaactcagttttactaaaagatcttaggtcgaacatttctttagtgctttcttagtttgctaggcagtgatgtttaggttgcttgctatcctgtttaagttcaagcactgcttcatactgatattttgtgctgtgtttttggagtcatgaactggtagcaggcaggtatcattgtgtcacccatcttgccccagtgccaagaggcaagaaatttaaagtttgctgcgagtttatacctctttaatggtttttttttgttttggtgtgctagaactacttctagttgttagtgcagaaaattggatttgatgttcttagcttgcaccagttgacaagattatcctcaagtaatgttaacgtgttatggtctttttggcatgacataagctgtcatgttacatgttctggatgctgctgagtcattttatgcattagaaattgttgtgacctttgagtagaactatataatctactctctcccaaacccactcatgtgggagccaccaacactgggtctttttatataatatactcatctgtttcagataaaaagttgttttggcttttctggatacatggtttttactatgtatctggacatagtatatatttaggtgcataacaaaattcatatacctagaaaagccaaaacgacttacaattttaaacgtagggagtacaattttggagttctatggaaatggggcagtagtttttaaagtagttgcttatatttcgtactgtaccactactaacgaattttagcaaatctgctgtctttagctttagcttcaaaatgccttgtgtacacacttatagccagttgtggttcatatacctgaattatgaatagccaaacctacatctattgtaatgtaaaagaatttctagtgggattctctggattaaattatagggtgtttggtttgaggaatgagctagtccatcatcttcccactcctcacttttttttgtttggtttgtggcatggaatgagttgatccatcaccacctcattcttcatagttagtttgttagtacatactaatatgagaaatgacgtcatcccactaaatttgaggaatgaactcatgatgcaccatctcattttggatggagtgattcctcaaaccaaatacccacttaaagattgtttttgtctgtcaacgagggacaaatttgttattttgaacactctgctggcactaacctatcttaagagaaacatttgagcattttcctgttatacagtagcatcactatttttcatgctttatcttgtgattggcatagatgacatctatggactgttttatatgcttggctgtagaatctgtaacttctatttgctgcactacaaataactctgtgtatatgttttgtacacgctaatatgtggtgtatgcattgatcaggtcagaaa

SEQ ID NO: 712 - DNA, 23550 bp, Zea mays
  Intron number 7 from transcript GRMZM2G355906_T03 (locus G RMZM2G355906) derived from phytozome v7.0 (chr-ID 2; pos 4 4723797 to 44747346 reverse strand)
gtgacaaacaaccttcgggtactgtcctgtgcggttattatgtatgctgaaagggaattaggcttacacctagttcctaaataattttggtggttgaattgcccaacacaaattatttggactaactagtttgcccgagtgtataaattatacaggtgtaaaaggttcacactcagccaataaaaagaccaagttttggattcaacaaaggagcataggggcaaccgaaggcacccctggtctggcgcaccggactgtccggtgtgccaccggacatgtccggtgcaccaggggaactcagactcaaactctccaccttcgggaattcccagaggcgactcggctataattcaccggactgtccggtgtacaccggacagtgtccggtgcgccaagggaggtcggcctcaggaactcgccagcttcgggaaactccaacggctagtccactataattcaccggactgtccggtgtgcaccggactgtccggtgcgactccggagcaacggctatctccgcgtcaacggctctctgcggagcaataaatgcgcgcgcagcgcgcgcaggagtcagaatcgcccatgctggcacaccggacagcaaacagtacatgtccggtgtgcaccggacacccaggcgggcccgcaagtcagaagctccaacggtcagaatccaacggcagtgatgacgtggcagggtgcaccggactgtccggtgcgccatcgaacagacagccttccaacggccacttttggtggttggggctataaataccccaaccaccccaccattcattgcatccaagttttccacttcacaaccacttataagagctaggcattcaattctagacacatacaaagagatcaaatcctctccaattcatcacaaagccctagtgactagtgagagtgatttgccgtgttcatttgagctcttgcgcttggattgcttcttttctttctcacttgttcttgagatcaaaactccattgtaatcaaggcaagaggcaccaattgtgcggtggcccttgcggggaagatttgttcccggctttgatttgagaagagaagctcactcggtccgagggaccgtttgagagagggaagggttgaaagagacccggcctttgtggcctcctcaacggggagtaggtttgcaagaaccgaacctcggtaaaacaaatccgtgtgtctcacttcattattcgcttgcgatttgttttgcgccctctctcgcggactcgtttatatttctaacgctaacccggcttgtagttgtgtttatatttgtaaatttcagtttcgccctattcaccccccctctaggcgactatcaattggtatcaaaacccggtgcttcattagagtctaaccgctcgaagtgatgtcgggagatcacgccaagaaggagatggagaccggcgaaaagcccactacaagccacgggagcacttcatcggaagagtcccgcaccaagaggaaggagaagaagaaggactcctccaaacgaaaggagaaaaagtcttcctcttctcaccacaaagagaagaaggaaaaatcttcttcccacaaaccgcatcggaaaggcgacaagcacaagaggatgaggaaggtggtctactacgagaccgacacttcatcaacatcgacctccgactccgatgctccctccgtcacttctaagcgccaagagcgcaagaagtatagtaagatccctctacgctaccctcgcatttccaaacatacacctttactttctgtcccattaggcaaaccaccaacttttgatggtgaagattacgctaggtggagcgatttaatgcgatttcatctaacctcgctccacaaaagcatatgggatgttgttgagtttggtgcgcaggtaccatccgtaggggatgagaactatgatgaggatgaggtggcccaaatcgagcacttcaactctcaagcaacaacaatactcctagcctctttgagtaaagaggagtataacaaagttcaagggttgaagagcgcaaaggagatttgggatttactcaagaccgcgcatgaaggtgatgagctcaccaagatcaccaagcgggaaacgattgagggggagctcggtcggttccggcttcgcaaaggggaggagccacaacacatgtacaatcgactcaagaccttggtgaaccaagtgcgcaacctcgggagcgtaaagtgggatgaccacgaggtggttaaggttattctaagatctcttattttccttaaccctactcaagttcaattaattcgtggtaatcctagatatactaaaatggcccccgaggaagttatcgggaattttgtaagttttgagtgcatgatcgaaggctcaaggaagatcaacgagcttgatgatcccaccacatccgaagctcaacccgttgcattcaaggcaacggaggagaagaaggaggaggctacaccaagtcgacaaccaatagacgcctccaagctcgacaatgaggaaatggcacttgtcatcaagagcttccgccaaatcctcaagcaaaggagggggaaggattacaagtcccgctccaagaaggtttgctacaagtgtggtaagcccggtcattttattgctaaatgtcctatatctagtgacagtgaccgaggcgacgacaagaaggggagaagaaaggagaagaagaggtattacaagaagaagggcggcgatgcccatgtttgtcgcgagtgggactccgacgagagctcaagcgactcctccgacaacgaggacgccgccaacatcgccgtcaccaagggactcctcttccccaacgtcggccataagtgcctcatggcaaaggacggcaaaaagaaggttaaatctaaatcctccactaaatatgaatcctctagtgatgacaatgctagtgatgaggaagataatttgcgttccctttttgccaatcttaacatggagcaaaaagaaaaattaaatgaattgattagtgctattcatgaaaaggatgaccttttggactcccaagaggattgtctaattaaagaaaacaagaaacatgttaaggttaaaaatgcttatgctctagaagtagaaaaatgtcaaaaactatctagtgagctaagcacttgccgtgagatgattgacaaccttaaaaatgaaaatgcaagattaaatgctaaggttgattcacatgtttgtaatatttcaattcccaatcctagagataataatgatgatttgcttgctaggattgaagaattaaacatttctcttgctagccttagaaatgaaaatgaaaaattgcttgctaaggctaaagattttgatgtttgcaatactactatttccgatcttagagataagaatgatattctacatgctaagattgttgaacttaattcttgcaaaccctctacatctaccattgagcatgtcactatttgtgctagatgtagagatattgatgttgatgctattcatgatcacatgatcttaattaagcaacaaaatgatcatatagctaaacttgatgctaaaattgccgagcacaacttagaaaatgagaaatttaaatttgctcgtagcatgctttataatgggagacgccctggcattaaggatggcattggcttccaaaggggagacaatgtcaaaactagtgcccctcctaaaagattgccaaattttgttaagggcaaggctcccatgcctcaggataacgagggttacattttataccctgccggttatcccgaggacaaaattaggaaaattcattctaggaagtctcactctagccctaatcatgcttttatgtataagggtgagacatctagctctaggcaaccaacccgtgccaagttgcctagaaagaaaactcctaatgcatcaaatgatcatgccatttcatttaaaacttttgatgcttcttatgtgcttactaacaaatccggcaaagtagttgccaagtttgttgggggcaaacacaagggttccaaaacttgtgtttgggtacccaaagttcttgtgtctaatgccaaaggacccaaaaccgtttgggtacttaaagtcaagaactaaaattgttttgtaggtttatgcatccgggggctcaagttggatactcgacagcgggtgcacaaaccacatgaccggggagaaaaggatgttctcctcatatgagaaaaaccaagatccccaacgagctatcacattcggggatggaaatcaaggtttggtcaaaggacttggtaaaattgctatatctcctgaccattctatttccaatgtttttcttgttgattctttagattacaacttgctttctgtttcccaattatgtcaaatgggctacaactgtctttttactgatgtaggtgtcactgtctttagaagaagtgatgattcaatagcatttaagggtgtgttagagggtcagctatacttagtagattttgatagagctgaactcgacacatgcttaattgctaagactaacatgggttggctctggcaccgccgactagcccatgttgggatgaagaatcttcataagcttctaaagggagaacacattttaggattaacaaatgttcattttgagaaagacaggatttgtagcgcatgtcaggcggggaagcaagttggagtccatcatccacacaagaacatcatgacgaccgacaggccgcttgaacttctccacatggatctattcggcccgattgcttacataagcatcggcggaagtaagtattgtcttgtaatagtggatgattattctcgcttcacttgggtattctttttacaggaaaaatctcaaacccaagagaccttaaagggattcttgagacgggctcaaaatgagttcggcttaaggatcaagaaaataagaagcgacaacgggacggagttcaagaactctcaaatcgaaggcttccttgaggaggagggcatcaagcatgagttctcctctccctacacgccacaacaaaatggtgtagtggagaggaagaatcgaactctattggacatggcaagaaccatgcttgatgagtacaagacaccggaccggttttgggccgaagcggtcaacaccgcctgctacgccatcaaccggttatatcttcaccgaatcctcaagaagacatcatatgaactcctaaccggtaaaaagcccaacatttcatactttagagtttttggtagcaaatgctttattcttgttaaaagaggtagaaaatctaaatttgctcctaagactatagaaggctttttacttggttatgactcaaacacaaaggcatatagggtctttaacaagtccactggactagttgaagtctcatgtgacgttgtgtttgatgaaactaacggctctcaaatagagcaagttgatcttgatgagataggtaatgaagaggctccatgcatagcgctaaggaacatgtccattggggatgtgtgtcctaaggaatccgaagagcctccaagtgcacaagatcaaccatcctccaccacgcaagcatctccaccaactcaaaatgaggatgaggctcaagttgatgaagggcaaaatcaagaagatgagccacctcaagatgatggcaatgataaagggggagatgcaaatgatcaagaaaaggaggatgaggaagaaccaagaccgccacacccaagagtccaccaagcaatccaacgagatcaccccgtcgacaccatcctcggcgacattcataagggggtaaccactcgatctcgagttgcacatttctgtgaacattactcttttgtttcctctattgagccacacagggtagaggaagcactacaagattcggattgggtggtggcgatgcaagaggagctcaacaatttcacaaggaacgaggtatggcacttagttccacgtcctaaccaaaatgttgtaggaaccaaatgggtcttacgcaacaagcaagatgagcatggtgtggtgacaaggaacaaagctcgactcgtagccaaagggtattcacaagtcgaaggtttggatttcggtgaaacctatgcacccgtagctaggcttgagtccatcgcatattattgcctatgctacttaccaggcttcaagctttatcaaaggacgtgaagagtgccttcctcaatgaccaatcaaggagggaggtctatgttgagcaacctcccggctttgaagatagtgagtaccctaaccatgtctataggctctctaaaggcgctttatgggctcaaagcaagccccaagagcatggtatgaatgccttagagatttccttattgcaaaatggcttcaaagtcggcaaggccgatcctactttattcactaaaactcttgacaatgatttgtttgtatgccaaatttgtgttgatgatattatatttgggtctactaacgaatctacttgtgaagaatttagtaggatcatgacacaaaaattcgagatgtctatgatgggggagttgaagtatttcttaggatttcaagtcaagcaactcgaagagggcaccttccttagccaaacgaagtacactcaagacattctaaccaagtttggaatgaaggatgccaagcccatcaagacacccatgggaaccaatgggcatctcgacctcgacacgggaggtaaatccgtcgatcaaaaggtatacctgtcggcgtttcgagaccggggggtccctcgggccgacgagtgagtgtcgccgcgtgccccagcccagatgggtcgagcgcgagggcgagcgcgaagagggagaagcgaggcggccggagaccggcgtgagagaggtgggaatcccgcggccttcgtgttcgtcccgcgcccaggtcgggtgcgcttgcagtagggggttacaagcgtccacgcgggagagggaagcgagcggccccaagagagcgcctgtctcgtcctcgtccccgcgcggccaaccctctctaagagggccctggtccttccttttataggcgtaaggagaggatacaggcgtacaatgggagtgtagcagagtgctacgtgtctagcgggggagagctagcgccctaagtacatgccgtcgtggcagccggagagattttggcacccagctggtgtgatgtcgtggccgtcggaggagcgatggagcctggcggagggacagctgtcggagcggttgggtccttgctgacgtcctcttgcttccgtaagggggctgagagccgccgtcatcacagagcatgcgggacgccatcattgcctatccggcggagctagccagatgggacgccggtcttgttccctgcggcctgagtcagctcggggtagggtgatgatggcgcctcccattgacgtggctggtctgcgccctaggctgggcgaggtggaagctcctctgaagctgaggtcgggtctgacttccgtggcagaggccgagtccgagcccctggtcgggtgaggcggaggtcgtcgtctgaggccagggcggagtccgagccctggggtcgggcggagcggagttcgccgtcttccgggacttagcccgagtccgagccctgggtcgggcggagcggagttcgccgtcttccgggacttagcccgaatccgagccctgggtcgggcggagcggagttcgccgtcttccaggacttagcccgtgtccgagctctgggtcgggcggagcggagttcgccgtcttccgggacttagcacgagtccgagccctgggtcgggcggagcggagtttcctgtggtgccttctgcaggacctgactgcctgtcagcctcactctgtcaagtggcactgcagtcggcgcggcgcaggcagcgctgtccttctgtcaggccggtcagtggagcggcgaagtgacggcggtcacttcggctctgccggggggcgcatgccaggataagggtgtcaggccacctttgcattaaatgctcctgcgacttggtcggtcggtgcggtgatttagtcagggttgcttcttagcgaaggcagggcctcaggcgagccggagatatgttcgccgtcggagggggggcctcgggcgagacggaaatcctccggggtcggctgcccttgtccgaggctaggctcaggcgaggcgtgatcgagtcgctcgaatggactgatccctggcttaatcgcacccatcaggccttagcagctttatgctgatgggggttaccagctgagaattaggagtcttgagggtacccctaattatggtccccgacagtagcctccgagcctcgaagggagtgttagcactcgcttggaggctttcgtcgcacttttttgcaaggggaccagcctttctcggttgcattttgttccggtgggtgcgcgcgagcgcacctgccgagtgtagcctccgaggcctcggaggagtggtttcactccttcgaggtcttaatgccttgcgtaatgcttcggctggtctggttgttccctcatgcgagctggccgtagcccgggtgtacggtcgggtcccaaggtatcgggctggtatgtcgacgctgtcaacggttcggccggagccgggtttgcgagagcagcccccgagcctctgcacagggtgagagggcgatcagggacagactcggctttttgcatacgcccctgcgtcgccttttcgcaaggaggaggggggaaagcgccatgttgccctcgatgggcgccgaacatggtgtctccggtgagctgcaagcgggtaattcgagtcgacgcccgtgccccgttcgttaggggtcggctaggggcccagaggcacgcccaaaagtacctgcgggtgatctgccgaacccggtcccctggcgacggggtccgagggctcgatgcctccctccgatgggattccgttacaagatcgctcccgctggtcttgtaaatgtcctagggtacctcgggagcgcagcccgagccttggttatgtattgaacgtacccctggtcatccctcgctcggcgtctgaggcggctgtgaacccttcgggggccagccttcgaacccctgatcagtaatgggcgcggagcccgagtagcctgaggcggccgtggaacccttcggggggccggccttcgaacctctgaccagtagtgggtgtagggcccacgcgatctgaggcggctgtcgaacccttcggggggccagccttcgaatctctgatcagtagggaggcttggagcccggttccttcacggggaaggatccttttcggggtatccccctttcccggtccctgttgcaagagagagagagaaagaggaaaaaaaggaaaaggatacgaaatcgaacgacgcggcgtaccttttttggcgcggttattacggcgaaggcgaagcgtcgcccgcttctcctgccagaggcgccgcctgtcccgccgcggagttaatgcgacggggcgagtggttggcggggcggccgttgcgcgtgcgcgagccgttcgaggaacggatcacgggcgcgttgtcttcacgccgtgagagggggttctcttgctgcccccggatgggacgtgagcttggctgacgacgtgaccgcagctcccgcccgcctgccaccgtcattactgccggcccactttcggccgcattgaccgccgtgccaggctagcgctgtcgggtcgtgcgctaggtcgcctcgagtcgcggtattggttccgcaatcgaagaggcgtggcggtggcgcaagtggcggtgcagtttcttgcatgaagcatccggcgcgccggttgcgtgacgcgtgggcctgggcctccatgctgggcgtgtcgggagtcagagaagcgtgcccacgtagcacggttgcatgccgcccgcatggctgcccgctcctttcgcccgttggtctaggcaaaagtggagggtcacttgtaaccgctgggcggtcgtatgtaccgcgcgcggcggtttggcttcttctgctctgagccggcttgcatgacatgtgggacccggcccccgcgccgcaggggagggccttggagcgtgttggagaagactcagcccgtgacggctgaggacgcgagtagggatagtcgtctttaaaaggagggtgacccccctggaaggcgaccatgtcttcgcgctcccttatgcatcgtgtctttccaccttccaagcccccggatgggggatacccgccgtcttttcgcctcatcgttggaggaacgcaactccgtgggagttggtacctttcagccatcattcggcttcaaggattttcatcttgcagcccggctgcacccctccgccggcggtcacccaagatggtgacctccagcttgatggtgggggaaagcgagccgggctgcggcctctgcccctccctcaggctcaaggattttcatcaccagggctggggaggggagtgtgccgagttggggtcggcccccgtgtgggcggcggcccgctccttcactcagtgatcggagggaagggcggtcgtcgtccgtggcgccggcagctgcaccgtgcccggctctcggacgcgagtggcttcggagccgctcgcggcgccggcgtctgccacggcagctggaagaggttcctctgccgacgaggtagccagggccggccacggaccgacctccaactctacggccttctgcccgtccttgcctcacgagtttgggcatgggcgagggcctcctggcagcagcatccgccctgaggtcagtgctgccgttgttcggccccccccggagcagaagtcgtcgtcgtcgctgctgctggagcgggtgacgacgattcgttcgtcggtcttctgttgctccgcaagcccttccccatggagtggggttgttcgtacctgcggagggggaaccggagttccgtttgtaatggcacttcgaatgccagtgtttttgttcatcgtggttgtcgaggcccgaacatgtatgtaattttggcacggagccgtgttttttcctcattttcgagcactaagactcgcctgttgattatctgaaccgcttcaccaagcatgagtcgccccgtgtcaaggtgacgagtgaggtatccgtatcccggaggcgtaggagtccctcggctcggtcggccttgttgtctaaggctcctctagcttagttaaagggaccccttggccgctcttcgacgagccgaggccaggggtagcgatatcagtatgaacagaggcggagttggctcgaaaatgaaacctggttggccggagcctagtcgggttgtccgttagcgggaccgacaccggagttgaccagccgaggcctcgggtcgggctggcgcccttggaagatggttggctgaggccccaggggtaaccggccgagccgcctgctcgggccggattcccggagaagtccctgacagcgattgcccgggcgtggcgatgacgtcgtccttcagagtggagatcctcgaaccgcgtcgccgtccgaggctaggtcggaccttgctgaaggtgttgtcgatgccgagggtgctactgcccccttctagcatcaagacccgagcctgcaggatcagagtgtcatgtagcgtgtgccttctgtggccgccgaggccagaacacacaccctcgctgtgttgtaaagctccgtctcttttcctcttgtttcgagtatctggacttttttgttggtaacagggatgtttgtgcgagcgagagttgcttctcgcggaaggtgatgagtgaggtatccgtatcccggaggcgtgggagtccctcggctcggtcggccttgccgcttacgcgcaccttcacccgtccatgaggccctgtcaccgactcagtcgagaaggctcgaaggatcgctttggcagaagagcttccgaacgtgaagacttgttcggtccgcgaaatcactttatccgaacgtgagttacttatcgcagaaggtgatgagtgaggtatccgtatcccggaggcgtaggagtccctcagctcggtcagccttggctgcttacgtgtactccatcgtttccaggatccacttttcgaagtagtcagaaagcacgaaagatattctggcagaagagatctttttttcgaggaaaatttcaacgcagagggggttcccccttttagcccccgagggagggtcgggctttgccgagacgaggccgacccttccttgatgactaaactttgcgtgggtgcgaggtatatgaacgacttgaaaatattttaagggtagaagcgacgtagctgttggatgttccaagcgttgtcgtagacctcgccttggctattggccagcttgtacgttccgggcttcagaaccttggcgatgatgaacggtccctcccaggggggcgtgagcttgtgcctccctcgggggtcttgtcgcagccgaagcaccaggtcgcctacctggaggtctcgggaccagacccctcgggcgtggtagcgtcgcagggactgctggtaccacgccgagtgtagtaaggccttgtcccgagcctcttccagctggtccagcgagtcttctcggctggcttggttgccttgatcgctgtaggccctcgtcctcggggagccgtattctaggtctgtgggcaagacggcctcagccccgtagactaggaagaacggcgtgaaacccgtggctcggctcggcgttgtccttaggctccagaccaccgaggggagttccttcatccatcgcttgccgaacttgttgaggtcgttgtaaatccgaggcttgagcccttgtagaatcatgccgttggcacgctctactttcccatttgacatgggatgagccacggcggcccagtccacccggatgtggtgatcctcgcagaagtccaagaaatttctgccggtgaactgggtaccgttgtcggtgatgatggagttcgggaccccgaagcgatggatgatgttggtgaagaacgccaccgcctgctcggacctgatgctgttcagaggtcggacctcgatccatttggagaatttgtcgatggcgaccagcaggtgcgtgtagcccccgggcgccttctgcaaggggccgacgaggtccagaccccacacagcaaagggccaggtgatgggtatcgtctgcagagcctgagcgggcaggtgggtctgcttcgcatagaattgacacccttcgcaggtgcggacgattctagtggcgtcggccaccgccgtcggccagtagaatccttgtcagaaagcattcccgacaagggctcgaggtgctgcgtgatggtcgcaagcccccgagtgtatctcccgcaggagttcctgaccttcggcgacggagatgcatcgctggaggatgcctgaggggctgcggtggtagagctcctcctcatcgcccagcaagacgaacgacttggcgcgtcgcgctacccgccgagcctcggctcggtcgaggggtagctctccttggcggagatattgcaggtacggggtctgccaatttcgatcaggtgtggccctgctctgctcctcttcgacgcgcagtgcctcaccctcggaggccgagggtgcctcgggctgaaccgagggcgcctcgggctgtgccgagggtacctcgggctggaccgagggtacctcggactgggccgagggcgcctcaggctcgggcgtgtcgtcgatcttgacggagggttgatgcagatcccgggagaagacgtccgggggaaccgttgttcgccccgaggctatttttgccagctcgtccgcagtctcgttgtagtgccgagcgatgtgattgagctcgagcccgtagaacttgtcttccaggcgccgaacctcatcgcagtaggcctccatcttcgggtcgcggcagtgggagttcttcatgacttggtcgatgacgagctgcgagtcaccgcgggcgtcgaggcgccggacccctagctcgatcgcgatccgcaacccattgaccagagcctcatactcagccacattgttggacgccgggaaatggaggcgtagcacatagcgtaggtgtttctcgaggggcgagatgaagagtaggcccgcgctggctcccgtcttcatcagcgacccgtcgaaaaacatggtccagagctccggttggatcagagccgtcggtagctgggtgtcgacccattcggctacgaagtccgccaagacctgggacttgatggccctccgaggggcgaacgagattgtctcgcccatgatttccaccgcccactttgtgatcctgcccgaggcctctcggcactggatgatctcccccagggggaaggatgacaccacagttaccggatgagactcgaagtagtgtcgcaactttcgccgtgtcagaatcaccgcatatagcagcttctgaacttgtgggtagcggatcttggtttcggacagtacttcgctgacaaagtaaactggcctctgaacgggcaatgcatgcccctcttcttgcctctcgaccacaatcgcggcgctaaccacctgagtggtcgcggcgacgtagaccaagagggcttctccggcagctggaggcaccaagataggcgtctttgtgaggagcgccttcaggttcccgagagcttcctcggcctcaggggtccaagtgaagcactcggccttccttaagaggcggtacagaggcagacctctttcgccgaggcgtgagatgaagcggcttagagccgcaagacatcccatgaccctctgtacaccttttaagtccttgatgggccccatactggtgatggctgcgatcttctccgggttggcttcgatgccccgctcggagacgatgaaccccaagagcatgccccggggcaccccgaagacacacttctcgggattgagcttgacgcctttcgccttgagacatcggaatgtcacttcaaggtcggaaaggaggtcggaagctttcctcgtcttgactacgatgtcatcgacgtaggcctcgaccgtgcgaccgatgtgttcgccgaacacatggttcatgcaccgctggtacgtcgcgcccacattcctcaaaccgaacggcatggtgacatagcagtacatgccgaagggcgtgatgaaagaagtcgcgagctggtcggactctttcatcctgatttggtgataccctgagtaggcatcgaggaaagacagggtttcgcacccagcagtggaatccacgatttgatcgatgcgaggcagagggtagggaaccttcggacatgctttgttgagaccagtgtagtctacacacatccgccatttcccccctttctttctcacaagcacagggttggcaagccattcgggatggaatacctctttgatgaaccctgctgccattagcttgtggatctcctcgcctattactctgcgcttctcctcgtcgaatcggcgcagaggctgcttgacgggtcgagctccggcccgaatatccagcaagtgctcggcgacatccctcggtatgccgggcatgtccgagggactccacgcgaagacgttggtgtttgcgcggagaaagtcgacgagcactgcttcctatttagggtcgagcccggagctgatccggatctgcttggaggcgtcgccgctggggtcgagggggacggccttgaccgtctccactggctcgaaattgccggcatgacgcttcacgtctggcacctctttggagaggctttccaggtcggcgatgagggcctcgggctcggcgagggcctcggcgtactccacgcactccacgtcgcattcgaatgcgtgcttgtacgtggggccgacggtgatgaccccgttggggcccggcatcttgagcttcaggtaggtgtagttggggacggccataaacttcgcgtagcatggcctccccagtaccgcgtggtaggttcctcggaacccgaccacctcgaacgtcagggtctcccttcggaagttggagggcgttccgaagcagatgggaaggtcgagtcgtccgaggggctggacgcgcttcccgggaatgatcccgtggaagggcgcagcgcctgctcggacggaggacagatcgacgcgcaagagcccgagggtctcggcgtagatgatgttgaggctgctgcccccgtccataaggaccttggtgagcctgacgtcgccgatgacggggtcgatgacgagtgggtatttccccgggctcggcacgtggtcggggtggtcagcttggtcgaaggtgatgggcttgtcggaccagtctaggtagactggcgccgccaccttcaccgagcagacctccccggcgctcttgcttgcgatgccgagccgaggcattcgccgcatgcccaccgtagatcatgaagcaatcgcggacctcggggaactctcctgcttggtgatcttccttcttgtcgtcgtcgcgggccctgccaccctccgcgggtggcccagccctatggaagtggcgccgaagcatgacgcactcctcaagggtgtgcttgacgggcccctgatgataggggcacgactccttgagcatcttgtcgaagaggttggcacctccggggggcttccgagggttcttgtactcggcggcagcgacaaggtccgtgtcggcagcgtcgcgtttcgcttgcgacttcttcctgcctttcttcttggcgctgcgctgagtagacgcctcgggagcatcttccgatgggcggccctggggatgcttgtcctttcggaagatggcctcgaccgcctcctggccagaggcgaacttggtggcgatgtccatcagctcgctcgccctggtgggggtcttgcgacccaacttgctcaccaggtcgtggcaggtggtgccggcgaggaacgtgccgatgacatccgagtcggtgatgttgggcagctcggtgcgctgcttcgagaatcgccggatgtagtcccggagggactctcccggctgctgccggcagcttcggaggtcccaggaattcccggggcgcacgtacgtgccctggaaattgccggcgaaagcttggactgggtcgtcccagttggagatctgccccggaggcaggtgctccaaccaggcgcgagcggtgtcggagaggaacaggggaggttgcggatgatgaggttgtcgtcgtccgttccacccagttggcaggccaggcggtagtccgcgagccacagttccagtctcgtctcccccgagtactttgtgatagtagtcgggagtcggaaccgggtcgggaatggtgcccgtcggatggcccggctgaaggcctgcggaccgggtggctcgggcgagggactccgatcctccccgctgtcgtagcgtcccccacgcctggggtggtagccttggcgcaccctctcgtcgaggtgggcacgacggtcgcgatgatggtgctcattgctgaggcggcccgaggccgcaggcgcggtgttgcgcgtgcgcccggtgtagaccgaggcttcccgcatgaatcgggaagtcgtggcatggggttccgaggggtatccctgccttcgggaggcagagctctcggcccgtcggaccgcggcgccttctaggagattgttgagctccccctggattcgccgaccctcggtggtggatggctccggcatcgcgcggaggagcatcgctgctgcagccaggttctggccgaccccactagacgcgggtggtggcctgactctgacgtcgtcggcgacgcggtgctggagaccctggggcagatgacgtatttctccggccgggggttggttcgcccatgcctgcccgacgtcccggcggatcggctcaagcgctcctgctccctcgtcgagcctggcctgcaccccgcggatttgctcgagctgtgggccgtgaccccccgccggaacggggaccacagctagctctcgtgggatgtcaacgcggggcaccggcctagggggatcaccgtcctccggcatgccgagaagattgcctttggagggaccccctagatcgacgtggaaacattcgcggcttgggccgcagtcctcgtcgtcgaggctgcggctaccgtcggaacggtcggagaggcagtagtcacatgcggtcataaagtcccgcatggcactggggttgccaagtccagagaaatcccaacagatgctgggctcgtcgtcttcctcggacccagagggcccataggtcgagacgtccgtcagccggtcccaaggagaccgcatgcgaaaccccagagggtttggactcgcccctacgagagcgtccgccaaagcgagatcgctaggcgggttgaggctgaatccaaatgacgtaggatgggaatcggtcggtaccttttggtcgacgagcggcgatgaagtcacgtcggggactgactgcgccgtcgtctcaggtacgagggtgacgtccagcaagctctccgcgagcgcgctggcgtcgtccgcttgctcgggattggcgtgtcgcggggagacggtgctcgtcttcgtctcaaacgcgaggtcgatgtccggtgcgcccctcgttggggtgccggcgctgtcgactcgctcgacagccgacgaggcgctacctccttcttggccttggttgccccgcctcctcctccgtcgacgggggagaggacggggtgagctcgaatgttgttctcccaccacgcggggaagacgtcgtcgattccgccgccggcgggcgggctgtcggccgccattgtcgttgtcgcacggcggtggaaggagtatcatgtcgtagctgccgtcgaaggacatgaactccagactcccgaaacggagcaccgtcccgggctggagaggttgctggagactgcccatctggagcttgacgggaagctgttcatcaacacgcagcaggcccctacctggcgcgccaactgtcggcgtttcgagaccggagggtccctcgggccgacgagtgagtgtcgccgcgtgccccagcccagatgggtcgagcgcgagggcgagcgcgaaggggggagaagcgaggcggccggagaccggcgtgagagaggtgggaatcccgcggccttcgtgttcgtcccgcgcccaggtcgggtgcgcttgcagtagggggttacaagcgtccacgtgggagagggaagcgagcggccccaagagagcgcctgtctcgtcctcgtcctcgtccccgcgcggccaaccctctctaagagggccctggtccttccttttataggcgtaaggagaggatccaggcgtacaatgggagtgtagcagagtgctacgtgtctagcgggggagagctagcgccctaagtacatgccgtcgtggcagccggagagattttggcacccagctggtgtgatgtcgtggccgtcggaggagcgatggagcctggtggagggactgctgtcggagcggttgggtccttgctggcgtcctcttgcttccgtaagggggctgagagccgccgtcgtcacagagcatgcgggacgccatcattgcctatccggcggagctagccagatgggacgccggtcttgttccctgcggcccgagtcagctcggggtagggtgatgatggcgcctcccgttgacgtggttggtctgcgccctaggctgggcgaggtggaagctcctccgaagctgaggtcgagtctgtcttccgtggccgaggccgagtccgagcccctggtcgggcgaggcgaaggtcgtcgtctgaggctagggcggagtccgagccctggggtcgggcggagcggagttcgccgtcttccgggacttagcccgagtccgagccctgggtcgggcggagcggagttcgccgtcttccgggacttagcccgaatccaagccctgggtcgggtggagcggagttcgccgtcttccgggacttagcccgagtccgagccctgggtcgggtggagcggagttcgccgtcttccgggacttagcccgagtccgagccctgggtcgggcggagcggagtttcctgtggtgccttctgcaggacctgactgcctgtcagcctcactctgtcaagtggcactgcagtcggcacggcgcaggcggcgctgtccttctgtcgggccggtcagtggagcggtgaagtgacggcggtcacttcggctcttccggggggcgcatgccaggataagggtgtcaggccacctttgcattaaatgctcctgcgacttggtcgatcggtgcggcgatttagtcagggttgcttcttagcgaaggcaaggcctcgggcgagccggagatatgttcgccgtcggaggggggcctcgggcgagacggaaatcctccggggtcggctgcccttgtccgaggctaggctcgggcgaggcgtgatcgagtcgctcgaatggactgatccctggcttaatcgcacccatcaggccttagcagctttatgctgatgggggttaccagctgagaattaggagtcttgagggtacccctaattatggtccccgacaataccggtcgatgattggttcattgctttatttatgtgcatctcgaccggacattatgctttccgtttgcatgtgtgcaagattccaagccgaccctaaggaatcacaccttacggccgtaaaacgaatcttgagatatttggcttatactcctaagtttgggctttggtacccttggggatccacatttgatttgattggttattcggatgccgattgggtggggtgcaagattaatagaaagagcacatcggggacttgccagttcttgggaagatccttggtgtcttgggcttcaaagaagcaaaattcggtcgctctttccaccgccgaagccgagtacattgccgcaggccactgttgcgcgcaattgctttggatgaggcaaaccctaagggactatggttacaaattaaccaaagttccccttctatgtgataatgagagtgcaatccgcatagcggagaatcccgttgagcatagccacactaaacacatagccattcagtatcattttcttagggatcaccaacaaaagggggatatcgagattgcttacattaacaccaaagatcaattagccgatatctttaccaagcctcttgatgaacaaacttttaccaaacttaggcatgagctcaatattcttgattctaggaatttcttttgctaaacttgcacacatagctcttgagtatacctttgatcgtgtctctttgatatatgctatgactaatgtgttttcaagtgtatttcaaaccaagtcataggtatattgaaaggaaattggagtcttcggcgaagacaaaggcttccactccactctactactcatccttcgccgtcgctccgcctcactctccatctttgatataatcttcactcatatgttttatttgccaaaggggagaaaatagttagggaagggcttatatctcactcaaagtattcgtttttggcgattcatgccaaagggggagaaagtatgagcccaaagcaaaaggaccgcaccaccaccctaattttaaaattgatgatcttcaattggtaaatttcaattggtaaatttcaaattggtatctctttgtgttctaaagggggagcaagtagtattttcaaaattgatgtcttaaaaccctcttgaacgctaagaggagaatttatttgagggggagttttgtttagtcaaaggaaaagcatttcaaacaaaaggagaaaatttcaaatcttgaaaatgcttcccaaaatcctattcatttacctttgactatcttgcaaaaggactttgaaaagaatttacaaaagaatttgcaaaaacaaaacatgtggtgcaaatgtggtccaatatgttaaaaataaagaaacaatccatgcatatcttgtaagtatttatattggctcaattccaagcaacctttgcacttacattatgcaaactagttcatttatgcacttttacatttgctttggtttgtgttggcatcaatcaccaaaaagggggagattgaaagggaattaggcttacacctagttcctaaataattttggtggttgaattgcccaacacaaataattggactaactagtttgctctagtgtataagttatacaggtgccaaaggttcacacttagccaataaaaagaccaagtattgggttcgacaaaagagcaaagggacaaccgaaggcacctctggtctggtgcaccggactgtccggtgtgccaccggacatgtccggtgcaccagaggactccgacttcaaactcgtcaccttcgggaaattccagaggcaactccgctataattcaccggactgtccggtgtacaccggacatgtccggtgctccaaggaagagcggcctccggaactcgccagcctcgagaattcacttcagctgcttcgctaaaattcaccggactgtccggtgtacaccggactgtccggtgcaacagcgaggcaacggctatttcggcgccaacggctacctgcgacgcattaaatgcgcgcgctgcgcgcgcagaggtcaggcacgcccatgctggcgcaccggacaatctaaagtaaatgtccggtgcgccaccggacatccaggcgggccagaagtcagtgctccaacggtcgaatcccaacggctttggtgacgtggctgtcgcaccggactgtccggtgtgcaccggactgtccggtgcgccatcgaacagacaactccaccaaacggctagtttggtggttggggctataaatacccccaaccacccaccattcattacatccaagttttccacttcccaactacttacaagagctctagcattcaattctagacacaccaaagagatcaaatcctctcccaaattccacacaaagctttagtgactagtgagagagatttgcttgtgttcttttgagctcttgcgcttggattgctttcttctttcttgattctttcttgcgatcaaactcacttgtaattgaggcaagagacaccaatcttgtggtggtccttgtgggaactttgtgttccaagtgattgagaagagaaagctcactcggtccgagggaccgtttgagagagggtaagggttgaaagagacccggcctttgtggcctcctcaacggggagtaggtttgcgagaaccgaacctcggtaaaacaaatctgcgtgtcacactctctattcgcttgcgatttgttttgcgccctctctcggactcgattatatttctaacgctaacccagcttgtagttgtgattatttttgagaatttcagtttcgccctattcaccccccctctaggcgactttcaagaactaatgtgaaggccattttttgaggtactagaacctaatttgtgttgtcattttttgtgcatggctttatggaggtatcgactcaatgttgagcaggtagaatagatcatatatgtgatagatgttggtcagcagcagcactttgacatgttttcaatgtaagcatggagtggcaccaaggtgttttccatttagtatggttcagatcgcaagcggttccaaacccgcagtaccgaggttgttcgattggtagagctacttgatgaggctaaatctcgaagcaaatcagaactacaacgactcacagaaactggaaaactggattattttggaaccttattgttaatcttcaggtaaatatgatcacattattttgttcaggcaaaattgttgttgactggacgg

SEQ ID NO: 713 - DNA, 12968 bp, Zea mays
  Intron number 6 from transcript GRMZM2G102664_T01 (locus G RMZM2G102664) derived from phytozome v7.0 (chr-ID 3; pos 1 3846820 to 13859787 reverse strand)
tcacagccgctagtggtgttaatattagggtatgtacatctctggttgatgttttgccaattttcatgcagaattaacacactttctgatggacatttgcctcttgtgtaaattcatggctgcactgttcacatctgctatataacttcgatgcagctgctgtgacatcagatatagttgctaaaatttgatctcaaaattctataccgagctcacgagctgataaacaatacaacatctttagtgtttatgattgggatgtattgaatttttgaattttaatttttgcatgatggtagatatagttgctaaaattcgatctcaaaatgctatgccaagcttataaacaatacaacatctctagtgtctacgatagggatggattgaattttaaattttgcacgagggtactacattttatagcaccagtgcacatgttttgctgaatttggtattgcttatgtcggtgggaccacaaggatgttccaaaagaatgtttaaaatactggcatacattgttttttcttaatatttcacaattcctacaccatctcccgcactagagttttttgctattatagtactagtttggttaggcttctcttttctagcactcacaattttaacttctccctaatagcatttaaaagtaaacctattctttaaaatagtactttggcctctttttaattgttttttatattcttttcttatttcttcaccatttaaattcgcttgtgatgaatacaacgtaatctagttgatcatacctcaacactaatttagacaatcaagttgttggtcacttgttctcaaatgttgtgaatcaagaacaagacaacacaattgttaaagattaagacatttgttcttcgaatcattatctcgcttcggatataatgatcttcagacgaaggtgatgaagggcacaccttcatcattcatgaaaataagagtttatagagacaatatatgttatccattcatatatttatttcatgataaacatcatggtttaaaaggcgtcgcctaggcgtccaggcgacggtcggagctaggcgtcgacgccgcccaggtaaaaatgcgtatggcgtccgccttggcgaggtaggcgtccgccttggcgtagtaggcgtctgggcgacgccttagcctctctgggcgacgccttagcatctagggtttgttttgggctagggtttgtactgggcctcgcgttttgggcttcctgtgcccgcgcggcaatcctctccctgggtgccgcaaatttgtctgctccctcttccctgcgcgcggcaaatctgtctggtccctctccctgcgcgctctctctcacgcgctctctccctacgcgcggctactccctgctccctacgcgtggacgcagctgctgctcactgctctgggcgcgcgactgctcctcccttggcgcgcgcgcggctgctgctctgttctgggcgcgactgactgctctctgctctaggcgcggctggctgctctctgctctgggcgcggctggctgttgctctctaggcgcgctgctgctctgctctggggtctgggcgcgattggctgctgctctttgctctggggtttggttgcttggtattttgtaacagctgtttgtaacagctactaaggcgtcgcctaggcgccagcctaagtcgcctaggcggtcaggcggtggctcggcgcctagttccgcctagccgccttttaaaccatgataaacatatggacattaacagaatttatattacattgataccttcgacttgtttgaaggtgttgacgcaaaagcaattacaattcagcgtgaacagtacgaaggtactgttcatctatttatgggcaaccgtaaggctttgtgtgttattacattcatgccctcaacaattacatatagagtttacaaaatgtcacaagggcaacatcgccatttgtattttataacttgagcaacactttctccttgcatcatctcattgtttcgttgtgacgaaacctacttgatgaagcgtgcttcgttgtacttccttttcgttatgctgaagccacgttgtctacccctttcaccgtgatgaagcctgatggacgaagcttgcttcgctcctcttgtgtgataccgaagctttaatggtaacgaagcttcagtaatattcaatagtatgctgaaagcaaatggttagccgtgtttttgaaaaccttcggaagagaaagccccccaacagtagcccctcgcagtattagtttgtttctttgtaacaaattcagactgcgaaaagaacgaagacctttagccgaaggtccgaaaaaacaccttccctttgctagaatagcaaaacattctgcattgcggaccccaccactcagtggtgctttgcatatatatgcaagggcttgcgctaaaaaatatttttcatgctatcaagctttgtgctgtgtttgtcgttttagctttctacctctgtgaccgcaattgttttttaagcttcggctttttgttgtattcttcgctgaaatggccgaagagaagaaaagcatggaccccgcgcttgctggtttctacgaagctatggagaggattaatgttgagaaaatcactgttgaaatgttagctgggctgtctggggactcaagcgacaacgagagttttgatgttgagagtgagaacgaagatgccgaagatcggccatggagaccaagtcatgttgtctttgggaaatccactgttaagcaaggacagattgaagtgatgaaggacaaatattttcatgatatatccatagtgagagatggaggagagagtactattcctttttctgaagcaaacgaagtggtagtattcaaaacttttatgaaggctgggcttcgctttcccttgcataagatactggtcgaagtactgaagacatttgaaatataccttcattagcttactcccgaagctttgattaaagttggagttttcatttgggctatgaggagtcaagggctagagccagacaccaactgcttctacaatattcatgaattgtcctaccagacgaaggcgattgggaaagagcaatatcataacaacttcggatgatatagctttgagtaccggtctgatgtgaggtgtcttgtgccaacgtttcggaaaaaaatggccgggctcatggatgaagcaattgttttatgtcaaaaatgatctgagtgagagggaggatgtgaagggcataatccagcgtcccatacgatcacgcttcagcatcaggagaccttcgatcgcaggtggaaacaaaactcaagcatgtttgatgtccttcaacacagtgtgcacttacattggcaccaacgatttggttcaggagcacattgcttataaggtatggcctcttgttaatggttgggagatgccgaaggagaccactgctggttccagtgaaggtggcctggttttcctgaagtacatttatcgctacaaaagtcaatttggcgagccgaatgacggatggcttgaagccattgaggtggccagtgatgagctgctggggacttatacgaaggcaaaggacgaagccatgaacactgccttcggcgctcgaggcaaaaggagactgaacaaagtttttgatgtgattgaatttatttatcctgactactgctttcccgctcagaaacaaagagcgaagcggaaaatcggaactacaacctcttccgccgtgccgaagccaaaaagagctaaagttttgactcgtcggccgaagctgcactctttagagaaggctagtgcattgcctgctacagagaagatggaaattgttgaatatgctgaagctaccccctcgacttcgaagataatacctgctataactgccgaaagctattgtcgctcaggtagaagaaacagaaccaaagagctcaaagacagagcagcaaccgaaattgcagagtccccaaccatgacagggttgttgaagttagcaactgctacaacagcaactcctaggaaagggaggagaatggtcagtgttttggacgctgttctgaaatcttcgaaagtgccaactcctgcttctactaaggcttccgaggacaatattgaaaaattagtagtagttgctgcaatctcttctacttgcgctgaagctggaccttcgggatctatgctagtggagcaagcaagagaaagtcttccgcaaaagctaacattgcctatacccaaagcgtcttctcgagacgattttggatacattgttcgccatgcttcagggaaagaattatcgatagagcatattgccgaagtgcaatactatgcaaaggacctgaaataaccctgaggatccttagtatatggaggaaatgacgaagatgatttcctttattgtctgcctgatatgtcacacccgggtttcggaggcaccaagactcgggcgcgagataatcaccaagtgtgctaggaccaagtcatacacatatgatgcctcatggtacagaaacaatgtcacatctttactatataataggggttctgtacaaaataaataaataattacatcatatggagacaacgatccagcaacccaaagttgactgagagacgacgacttagacctctcacgaactcatcacaacatcctccatgcgtctcatcctgcggtatctgttcttgacctgtgggggagtgtgagacaacaaggttgagctcacatacgttcatcgctcaacaagttgtggggaataatgtgcatgaactcgccaaaggtgggagctcatgtgaattgtagggcttaccaaagaggatgactaaagctgaaccttgcttttaaagttggtcaaaattttattagcggttactaagtataagtagatatcgacccagttaaataagagatcaagattaataacaacacccgcgatgcgatgcatataacaaattgagtttaattccataagttaatcatgtgagggtctgggccgctcatgaccgtgagcacgactgatataccagttttacactctgcaaatattgcacatctttacccacaagtcatgttaaccatcagctaaggggtcatgaatcccatacacctctaccaaagaagcgagacaaggtaacattacgaggcctttacgtagttccactagcttcagaaaaccagctacagtttctaggaagccccaatgcagggatcccttgcctgaccgccatcgcagcaaaatcaatccgagaacctctctacaccgaccactcctctactgccctgcccttgcccctttcgggtaaggtagtcatccactagctttcctaattagtcagccaagggcatcccataccacccttgtggtagcactgtttcccgggtggttctctatgttccaattaacaatatgatcttatcatgaacaataattaaacaacaacataattggagcatgatcataatgaaacattagtttcccaaaaccaagtagagcaatagctaatctacccactaattaatctatttgcaaggtggggaataaacaatgcgagggaaacctattaggtcccatcaaattaacctgagcatgtcacaatgattaatagtgaacattattaggtaaaaaggagtgatcaagggcacaacttgcctgagactcgagattccaggtaccaggatgatcttccaatcctcgtgatctcactgctattcgtagcaatacaaacaaacatggtatagacaaaattaacatcacatcaaacataaactgcataatagtaatctacgcgtcgtaacgagattgtgggttcgagaactaccaaaatcggagttatgatgtgattaaatgattaaaactaggtcttatgtttattttataaatcaggagaaaagatgacctaaagtagtaattaattcaactttaatctaaattataacttgaccatagatcatattttagtggattataatgataggcaaattaacatgattaatcaacataagttaaataaatatctaattataaataatgaaatatggtacaataaatgttgtcattgtgtagacaagaattttatgaagctaacacaacaagaacagagtaaaacagagttaaaatggccaaaatatgattttcgaagttcataggattaaatttgtactaaaattcgattctcgggtttattttattaattcccgaaggaccagggacgacgaccacgattatactaaaggccaggcttgtatttgcaaaattctggggacctatttgtaactgttttaaaccacgcgtggacgacaggtttatttccaggttttcgggggtctctttactaaaattacacgatgaagggggcacgcaagacctctagccattggatcaccatcggacggtcgagattagatcataccccttcgcgaaccggtagcatgctatggccgtaggattagaaaacgagggcccggattgcaaggccgagggggtataggatccatcagatctagtccgttcatcgtagcgtgcacgaccacaatccaagcggtatcctaacctaatcctatctgatcgctgctagatctacgacttagattgagtcgagtcgaacgacaagtcccacccgatcagggccctcaatcgagagatcgacggtcagggaccgtccccttcctcaagaccctggacccggcgacaacagtgcatgcacggcggcgaacacgccgacgagggtaatatcggcgccctagtcaccgaatcgcgacacggggagctgctacacgaagcagaggatcacacaagcatcatggacaggttcttacccaagtgggtagctcggacgcttgcgaccacgatgagtagtggcaccgaggcaccgcacgacaacgaggaatttcccagccactggtcaatctcgcacccgccaacttactctatctgcttccgcaaatgccgaggaagtcgccctagtagacaatcgaggctccggcgcaggcttgtcgcaaattgatgatgacggccgcggcgggtcccccgattctcccgagcgctcctaggattcacgttgcgctttggatggcctcaacaccagggatccgggatgcggggcggcgcgaccgttttatagagagcgagtccacgacggggagaggaagccacgaccggtagccctcgccgacggacgcggggtctgttgcggccatctcggagaagaggttgaaagtgcactgtcggtctgggcccacacgtaagggatacgagcctgagtcatccctgtgcgactggtttcctaggcccatgagtcgacgaaacaaggcgcgatgccacgggatgaggggctggccgcagcagccgctgacccgtggggctggtgtgtcggcaccaagtggagtttgggctggccggtagaagcgctagctgggccgagaagtgagaaaaccagcccatacgtgggatttctcttttcttttctattctctcttctatttccaatttcagatatccaaatcaaattcaaatccctgtttgaattttcagatttcatctctcaaatataattctactgtaaaggtaaatttttttttcattatgatttatttttttcctattatggaaataataattgactttattaagatttcctttctccttttccgttttatatttcatttataagttgaggtcaaattaagttatgatttctttattcaaataaaatgcatcacaaaaataacatcagcatgggatgcacatttctttattcatttattggtcacttgactaatttaataccctttcttgattataaataggaagggccctaatgaagttacaagggttccaacaattctcctaacaccatcataaatatatttatttatttattttattttttcctaccaattttgggctttacaggataacaaagagatagatatttgccgggaaatgctggataaaatgggttatccgaagcttgaacttggtctatctgcaatgccgaaggaccaacttgcagacaaccttgcttataacagcttgaaggtttacatatttttatttttgtatttattgatttttgttaggcaggttttgcggtaatcgatttgtggtaatacttattattattatttgtatgttttttgtttgtcagggtcttatccttagcaaggctttgatggctcagaaagatgccgaagatgaaagcactcggatagccttcgaaaacctacgctcggaagttatatcacttcggaatgaggcccttgagaaggacaaaatcttgctttctttagttgagaggttaaagtctagcgacgctagattggctagtctttctgaagtggaacaaaaaatggagaaatttgaaaagaagaaagaagcagatgcgaagcgtattgctgatttagaatatgctctatctattcaagcgagattgcaaagattcgaagtagaaggactggagaagaagcttgatgaaatcactgaaaacttcaatgtcgaacagacagaacgtgagatatctgataccaaacgattgagagttcaaaagaatgtttaaaagcttcgtcaggcgaaggaggaatgctacaaggttgccatgcaatgttgcaacaaactgaagagtacttttgctaaggttggcgcattctctactaaacgagactttatccgtggttatcctgacggagttatcagattgattgaaggcgaggccgaagcttttgatgaaatccttagtgataggggggatttttgtgcctgcatcgacgcccgaggagctatctctctgctcgaaaaagctggctatgagcatgtgaaggctgtaattcagccagaattctcagtttcagcgagtgatgtcaaggatccttcagccgaaggcatcgcctttagtggaaaattttattctgaagtatgggtgaatggtggccgaaaaatggcagatgaggctattagacaaaatgaagaagaatctcgtactgctttataagaagtaaggaaagctgaagaagccgcagaacgtgaaagacttataggtatgtttgttgtgatttagcttcgtaaattcttttagctttgtaattaacaaaaacttatactttggtgcagccgagctttctccttctccggagccgtacgaccctgaggccgatccagccctgaagggcgctcttgatgtgattaggataacaaatgaggctgttgacgaagctgtgaatagactcttgaacgaagctgctgaaaaaattctgaaggaggatgaacatactttatatatgaaaacacttgtagaatttttgtgtactgctctgttatgtacttgtaataaatttctttgtggagcgtgaaatcttcgtacgtaccgtttttgtgccacatgcgaaaaaatactttcccttttttcacgcttcataaagaaaaatatcccttttcagccgaagtgacattagtagactcgaaggccttgccgtagatcttgcataagaaatacctgttcccgaaaccgtagatctttgcctaagaatatcgttgccgaaggcatggatcttgcatttttgaaacatcctttcataattctttgtcaaaaataaacttaacctcaagagttagccaacatgtttgaaggggcaatttccttttttccaatgttgcggatgatgcgagatgatgaatgatgcgatgctatgcaacatgatgcaatgatatgatgcaacaaatgttaacgcataaatgctttcgtaaaagtaagactctgcatccccttaggaacgactttagagtctcttcaccttttatttaggtgatattttagctctgcatccccgtaggaacaattttgaagttaagctctgcatccctttaggaacgtctttgtagcttcttcatcttttacttaggtggcattttagttccgcatcctcgtagaaacgactttggagctaagctctgcatccccttaagaacgactttgaagattattcaccttttactcaggtggttttttagctctgcatccccgtaggaacgactttggagctaagctctgtattcccttagtaacgactttaaaacttcttcacattttacttatgtggcattttagctttgcatccccgtaagaacgactttggagcttcttcactttttttgttacactcgatggtgtaactcaatatttattacaacaggctgaaggttgtaccttctcaaattgtcttttaggtagagaaataaaaccaagagaaataaaaattacattgaatgtgtatgaaagttttttgattgagcccctctgtcgcttcagtaaatatgtcttgattctggtatagtgttgttgactgtccgagcttcagactcttcacgtgcgtcgcattgttgctggatttgacggtgcccttctggttgttgattgcgagacgaagttggagccatgattggtggtggtggtggtggtagggcccatgcagctgggtagtggcttgctgaagctactgatactgtgggttgttgattgcccacatactcagaaatgtacggggaatagcacgaagtagtatgcaggacctgcttcggctgattctgccgtgcttcggcctcggctatttcgttttgcttctgtatcgtgacttggcatgtcctagttgtatgccccttctccacagaacaagcaaaaaccttcttggttgcgagctgaatcttcctccgaagcttctacctcctctgcctcttggggctggtgaccggaaggagctttgttgtgttcctgatgattgggagctgtgctgatgcccttgagtatgatttctcctgtcttcgcttgagctgggattatggatcgtcctgacatgtctcgggtggagtcttcctccgaagcccctaatcatctcagagcatctgtaggcttcttcctttctttgccggaagtcattgtcagctcttatgtactcgtccatcttctgtagaagcttcttcagagtttgtgggggcttcctggcgaaacattgcgctgttggtcctggtcaaagtcccttgatcatggcttcaataacaatctcgtttggcactgttggcgcttgaactctgagacgcagaaaccttcggacatacgcctgcaagtattccttgtagttctgtgtgcattggaataaagcttgagcagtcactggtttcgtttggaaaccctgtaagctggttactagaatatccttcagcttctgccacgacgtgattgttaccggccgaagagaagaatactatttttgagccacactcctgactgccatgacaaaagactttgccatgacagcggtgttgccaccatatgatgatatggttgcttcgtaactcatgaggaactgctttgggtcagaatgcctgtcatacatggggagctgtgacggtttgtacgaaggcgaccatgggtagcttgcaattctactgctaggtgagacgcattatcaaaaacaaagttaccatgattggaatcaccataccatacatcatcataacttggactttcctgatgaagctctctctgctgtggccttcgtccttgctcgttgtcttgtgtgatatgtcgcatctcttcagcagctttatcaattttcttctggagtttagagtgccgaagcatttttcccttctctccacttgttggtggatggcctctagatctctgatctcttgatctagctcctcttcttgtggtgttgggcttatggccttccttttctggtttcgggcctctctcagagggagcacctcttggttgatgttcagcggtgcaagggctgcccctggcgctattgccttctttggcggcatgacgaaggtggttgttcgagttcttggtgtcgaaggtgttcgtttgagttcatcgttagtgggcgccaatgttggtcacttgttctcaattgctgtgaacattgataccttcgacttgtttgaatgtgttgacgcaaaagcaattacaattcagcgtgaacagtacggggatactgttcatctatttataggcaaccgtaaggctttctgcgttattacattcataccctcaacaattacatatagagtttacaaaatgtcacaagggcaacatcgccatttgtattttataacttgagcaacaccttctccttgcgtcgtcttattgttttgtcgtaacgaagcctacttgatgaagcgtgcttcgttctacttccttttcgttatgctgaagccatgttgtctacacctttcaccatgatgaagcctgatggacgaagcttgcttcgttcctcttgtgttatatcgaagcttttctggtaacgaagcttctgtaatatttaatagtatgctgaaagcaaatggttagccgtgtttttgaggacgttcggaagagtaatgccccaacacaagtgaaattcaggaaacatcgctctgttattatgattaatcaacaacttgagtacactggaagctcccgttcaacggtgggctgtctgacagtttaagtatcatcaaggaaatattctgacaaaatctgttgttgataacgaccaaggactagaaaatttttgctttctcgttctgatgggtgcagaaaatcgttttgccgcattgcaagcgcaaagtactagttaagctacgatgtgagcaatctgcaaataatttcacgacagctaaattcgtttattggaaagagggttgtcgaaagaaataagaaaaaaaataaaaaaaattaaaagaggccagagtactattttaaagaatgaatttacttctgagtgctattagagagaagtagaaattgtgagtactagaagagagaagcctaataaaacaaatactataatagcaaaaaaaaactctgtgcactatgtgagcttctggcctgtcagcccagtgtatcacgtgtctgtaggaatcagacttgtgtgcttttttgatccgctgtttgcattttgctgatacgttcttacttgacaggaagaggaagaacagttactgtctgcccctaagga

SEQ ID NO: 714 - DNA, 590 bp, Zea mays
  Intron number 16 from transcript GRMZM2G389015_T01 (locus GRMZM2G389015) derived from phytozome v7.0 (chr-ID 8; pos 126601466 to 126602055 reverse strand)
taggcggaacgtggttgcaatagatcctattcaaggttatccctcatttagtaaaaacaaatactaccaggttttaattcttatagattgcttttgtagagccaactttagactgacccttgacccttgttatggcagtagaaagtatttgtatcaaatttacagatggttatggatttggcatgatgtgcatgtttaggattctgtacatttgaaaattcaacaccactattttttttcatggtatttttgttgtgaatgtgagcaatgaagtccaaatctatctttttatgctcttctagctcactggtgttgaaaaagttatatcacttatactagaagtaatattctttttggtcatggattcattcaatcaactaatgaaatccatccatttgttgtcgccacctgcatgttttgtttttctttgatgataatcctgatgggtttcatcagtgttaaattgtattatttgtcatccaaagtgtttatgggttcattggatttcttgtgtttgtagagttaacatgatggtgtttgtctatgttaactaacaaattttcatatctgtaatcaaactccagtgtact

SEQ ID NO: 715 - DNA, 1786 bp, Zea mays
  Intron number 4 from transcript GRMZM2G112686_T01 (locus G RMZM2G112686) derived from phytozome v7.0 (chr-ID 8; pos 2 5011199 to 25012984)
tccttcgccaagaaccccaagcagttcggtgagtgcgatcgcccaactgccccttccctcatgatccaggtcccgagccttccccccacccctccgattcggcatcagatcaaacgcgtccgtcgcttaactgatctcggctaggctgaaggtgacacggaacggccactgctctcggctacactaagggggtgtttgttagagggactaaagattagtctctagtttttagtctcatttagtcccttttttgccaaacactaggactaaaatgtggactaaaataatttagtctttagtccttcacataggtgctaaaagagactaaaagctcataattatcatgttgcccttacctttttgtatggataactaattatgagtatattctaagggtatttgagtctttggacaatgtatttaatgactttagaatatgtttagtctctaaaaccaaacatgtagggactaaagtttagttttaggactaaagtttagttctaggactaattgaaaccaaacatgacctaaacatggttgaccatggccccgccacgatctgccgtccaattggagctcagattgcatggctctttcagaaaatgaaagggtcggggatctagtctagctacaaaaccaggtcacctgttcggccatctcctttccagaaaagggcgctacgtctttgcttattgcttgcttttgtgtgctacatcgaaagccatgtgctgctccttttggccagtcctctactcatcttcagactgcagtggctaacgccgcatggatgtgagactgaaaaattggatcttgacccttgagccgcggttactgtaattggtaaccctgcccttttctgttcttaacgaaaggtcagagcacctgccgagcttgcaagaagaagaagaacaagaagaagatctttccactggagtgctaaaatccatttcttgtagactatattgacctagacattcaggtaaaatctggagtattctggacactggattctccgtctctgcctctatatagtactccttactaacattcaaatgggtgttagtgttagagcacatccagaaatgctgttgttgaggttgcacaagtgtactggcatcttgagctggttcatcttgttcttatgagcatttatttggcacacacacaccagtaaatcgatttgaggttcccttgcctagctccagtagatggcactgtcagtgaatcaaatatgttccttttttttcttgacacaagataatcttctactcgctgtctccctccatccaaaaaaaagaatgcaactactgtccagattgaaccaaatttacagtgaatagtattcatatttatgtccccaaatcggattattacagaagtatactccataggaaatctaacaatatgttaatctatattattataaatgccagtatttttttgtactataaattcggtcagatttgaaagcattgggttggttttggtcaaatcgtgatctgttctgtcttacatatagccagagccatacaggggaaatgaaaacgatgtcttttcttgctccgaaagaccaacgagaacgatgttgtttttttgccaactgctggcctctaatttccgccacaagacagatccaggatccggtggtcttgtacatgtgcggatatagcaacctgatcggccacgcactgagatggaacgaggacggttctaaacgaagctactctgtgtgtctggatgatggattgcagggttcacgcaggggccgctgcggacgtgctgcggc

SEQ ID NO: 716 - DNA, 5842 bp, Zea mays
  Intron number 4 from transcript GRMZM2G016296_T01 (locus G RMZM2G016296) derived from phytozome v7.0 (chr-ID 4; pos 1 97063917 to 197069758 reverse strand)
ctgagccaatgtgagtaggcaccgcctcttctactctcatgttatgttacttgtggtgtttatgcggttaacataacaacatatgtaacatgttgcttgtctcatttattctaaaccactcttgatttgatgcagcaataattatttgctaacaatagggaatggttagtttgatatgtcttggtaattttttttgtctgtgctcttgttgatgtttgatgactggttatctgctttatgttgcccaaatactgtttgaggttaatcttctcacatgagcataccaatttactagttaatccttaattcatttagtatctgataattgttgttattaagtcctgtttcctaagcactctcctagttacttgtgctagttaattatagtcattaaagaccttgagcagctcaacaggtgtgtgcggctgccaaggctcctatctgattagctaagctctaatgagctgttatgtaatcaatgtgactcatctcatctttctatataatcaagcaatgatggctgaggttagcacctgcggcaaaactactctgtttacctctaacatttggtatcagagcttaggttagacacctgagagactcaaggccgactcctctcttccctacacatgtcgacctctgctgagcgcgctgccaggctcaaggccaagggaaccagcgaaggagagctgggcgacttccccagccgggctgcacgcctgaaggctgcagaggaagcagcggcgctggcagtccaggcagcgaagcaggcagcggctgcagcagaggcagcggcaaggacggcgcaggagctgcgggccgaaatcgccgccgagaagggagaagatgaggaggactgggaggaggaagaggaaacagagaagaacagacggatgaggactccaccgcgagataggaggcgctcgcagtcaccactgcgggaccgaaggcgctgccgtggcggcgctcgctacgagtcgccgcaaggaagggtggtgtaccgcgactccggcagcggcacgtcgtggccaatgctggacaagacgaactactacgagtggagccagaccatgaagctgaggatgcaggcgcgcgatctctgggacgccattgaaggcggtcctgtccagtttcgcgatgacagacgcgcactggaggtgatcgtcggggctgtacccaaggagatgggtctcccactgctcgacaaggctacggcgaaggaggcgtgggacgccatcgctgcgacccgcatcggcgtggacagggtccgtcgagcaacactgcagcgcctacgccgtgattgggagaacatcagcgtcaatcctggtgagcaagtggatgactttgctgtgcggttgtcaactctgcaccagcagcttgtcatccatggcgatagggacatcaccgaggagcgcgtggtggagaaattcctgcgcacggtgccggccaagtactcgcagatcgtcgtcgccattgagcagttccttgattttgaggcactgactcttgaggaggtgactggaaggcttaaggcagtggacaatcgcgaagaacaaatactgaccgagccggtggccatcaatggcaagctgttgtacactgaggagcagtggaaagcgcgatgcagaaaggaaaagaagggagacgatgcatgtggctctggtttcaggaaccagcgtggtggcggtggacgcaaccgcggtggtggacgaggacgaggcagagtaggtggacgtggtggcggacgaggagacggcaatgttgctggccatgtcggccccaacacctgcctcaactgcaaccaggaaggccactgggcacgtgagtgtccgcagccgcgccgtgaggatgcagagcgcggcggtggcggtggaaaccgtgctggccgcggcggtggcaaccgtggtggaggtcgcggcggtggaaatcaggctggacagcgtggcgggaaccaaggaaggcatgaggcgcgcgtccagtacgccgaatgtgaagaagatggtgctctgtttctggcacagggctttatcagcctagagcagagcacgccggcgcacagctacacggcgcagcacgtcgagctctctgagccacgtgcctgtgcctaccttggcgtggatgaagaagatatggacagcggttggtacctagactctggcacaacacatcacatgaccgggcgtcaagagttctttgctgatctgaacactggcgttcgaggaacggtccgtttcggggacgcgtcgaaggtagagatcaagggcgttgggtctatcatcttccaagccaagaccggtgaacagagggttcttcatggcgtctactacattccggcgctgaagaactctatcctaagtctgggacagcttgatgaaggagggtccaaggttgtgattgaccatggcgtgcttcgcatttgggacaagaaccggcgtctgctcgccaaggtacatagagggaagaacagattatatattctgcatcttgaggctgcacaacctatctgtcttgcggcgcgcaaggatgttgaggcgtggcgatggcatgagcgttttggccatctgcacttcgacgcaatccgacgactcagcaaggaagagatggcgcgcgggatgccggtggtcgaccatgtttgagcaggtgtgtgacacctgcgttaccacaaagcagaggcggcgctctttttccggccgcagcagcatatcgtgcccagaatcaactcgaattggtgcacggtgatctgtgcggcccagtcacgccagcaacaccgatgggcaaccgctacatcctgctgctcgtcgatgatgccacccgttttatgtgggttgtgttgctgccatccaaggacgcagcggcagaagcaatcaagaagatcaaggcggcagcagaggtggaaagtgggcgcaagttgaaggtcctgcgcaccgacaatggcggggaattcaccgcagcggagttcgccacatactgcgccaatgaaggtattaaaaggcatttcagtgccccttattcaccgcaacagaatggtgtggttgagcgcaggaatcaaactgtggtggccatggcacgagctctgctcaagcaacgccagatgccttctcggttttggggggaggctgtgatgacggctgtgcatattctgaatcgatctccaacaaaggcactgaagaatgtaactccgtatgaggcatggcatggccgcgcaccaacagttggccatttcaaggtatttggttgcgtggcttatacccggcagcttactcagctccagaaacttgatgatcgcggtaaggctggagtattcattggctatgcagaaggggccaaggcatatcgtgtatttgatccagtgtcccagcgcgtgcgagtcagccgtgatgtggtatttgatgaaggacgtggctgggactgggcatcagcggcagcaggtacttcagaggcagcatgcagcgattttgttgttgagtttccatgggcagaagagtttcctgaagcagaaagttcagtgttaccctctcttcagccacatcctacatcacctagtctccctttggtgagtgcaggagagtctgcagcagaaacagaggaatccgcagtggagacagaggtgcctgtgtcacctagaacacctacaccagctccaacaagcccgcagatagagcatgtgactcctctggagaatgatagtgaaagggtggatgcttgtcatgatggtgaagagcttcgttataggaaggtccatgatattattggtaatcagccaacccctttgccggcacagaggttgtttgcagaactaaacctcactcatgccggtgagcccacaagctatgaagaggcaaaagatgatccagattggcaggcagcaatgaaggaagagctgagctcagttgagcggaatgggacttgggaacttgttactcctagtccaggtcatcgcccaatttcattgaagtgggtgtttaaactgaagaaggatgaacatggtgctgtgatcaggcacaaggcaagacttgtggcccgtggctttgttcagaaggaagggattgactatgaagatgcctttgcaccagttgcaagaatggaatcagtacgtgttttacttgctctagcagcacaagaaggttggacagtacatcacatggatgtgaagtctgcatttctgaatggagaactcaaggaagaggtttatgttactcagccaccaggttttgaagtatcaggagaagagaagaaagtgtacaggttacacaaggcattgtatggcctaagacaggctcctcgggcgtggaatgccaaacttgatttgactctcaaacagatgggttttgagcagaatgtatatgaggctgccatgtacaggaaaggttcaggtgattctttgctgataattggagtctatgttgatgatttgatcatcactggagtcaatcagcagaagattgaaactttcaaggcaaaaatgaagcagacattcgaaatgagtgatttgggtctgttgtctttctatcttggggttgaggtaagacaatcagagggaagcattactctgaaacagactcattatgctaagaagatacttgagctcggtggtatggcagactgtaatccagctaccacccccatggaagaaaggttgaaactgagcaaggaaagtacagaaaaggaggtaaatccaactcagtatagaagactagttggtagtctgagatatctagtgcacacaaggccagatttggcttttgctgtagggtatgttagcagatttctggagaagccaacagctgaacatcttcaggctgtaaaaaggatcttgagatatgtgactggtactctagatcatgggctatgctatactagaatgacaggcaaggcaagatttgtgggttatagtgactcagacttggctggagatattgatacaagtagaagcactactggatgtttgtttttccttggaaacagtctggtcagctggcaatctatcaagcagagagttgttgcattgtcaagctgtgaggctgaatatgtggcaatgacaacagctgcaacccaagccttgtggttgtcaaggttgtttgcagaattactgggaagagaagttgaggtggtggaacttagagtagacaataaatctgctctagctttggcaaagaatcctgttttccatgacaggagcaaacatattagaatcaagcatcacttcatcagggactgtgtggaagaaggtagcatcaaaacagaatttattcccactgcagatcagcttgctgatatactgaccaaagctttgggcaagaccaagttggaagatatgagaagcagaattgggatcaaggagatcaagatcagttgaaacaggccttagggggagatctgataatgtgaatgaacattttggagtttctttgttcctagttcctaaaatgagactctagagtctagaaacaaaatcaacaaagctcttgtcattctctgtatattttttggatactgatacaggaaataggttgagagtctaataatatgtatgaacagctgagctttgtatttttctagctttaagatatataccttatttttcttatggtaaagttccagtacccatacaatactcattgtgtacaactagtctgccgtatgcattgaggaggtagcttctgtaaaacagtttgttgagttaaacgtatacaactcagaagacaacatttttactcaaactcatgtactaggctctgttacagaatgtgttttttttctccttgtatttatttatctcctgctttgctgttgtttcctttctgtagccgcaaaggaagggttaaagagggggttgagaaat

SEQ ID NO: 717 - DNA, 4847 bp, Zea mays
  Intron number 1 from transcript GRMZM2G059671_T02 (locus G RMZM2G059671) derived from phytozome v7.0 (chr-ID 5; pos 1 68259172 to 168264018 reverse strand)
gctctgcatcttcgccgtctcctacttcctcacgcgtgagcacgtccccctctgtccctctgcttccgtgcctcatttgcgaccgaattggttttgcgggtcgtgtgggccgcgagaaggacgggtcggggcagagatctgggtcgaggagaactggttgcgcgtgggctgagcaggggatgtggcgtgggcggtgtgccccggggatcggcgtggcggcgctggccctgctcgccgtcgcggctgccgcaggagccgccgcggggatcccgatcccgacgacctcgagcgcccgtaagtgtctccgctctgtgacgccgacggaagcaagggaggccctggatgcctggacttcgacttctcgtctcgctactcgtaaccctcggtcgctgcgatgtcgtctgcgcgtgagcacagatctgccacccaaagttctgaccctccctgcccacgtcgcagcgggggagccagttgcagctttcgcgggggagatggggcttgcgcaaaccgggaggcgggggcatagaaaatggtctacactgttgtcttaatagttagtagagattatatgatgtgaatacaaaatattgttgcgaagatccacctcggagacggagacgaaatgctcaccgagtcactgtccatgggagcagacagcagaggcgggttctcatcggaacgatcgaacacgacgagccactagcgagagcgatgcatgcacctgacggtcctttgatggtgggcactcccacttgcccataccgacggtcgagtcctcgtcgtgccgtgtctacctgccgcatcggacccgagtgcggagtgcagtactgcagtgtcagagacagagtgctgccccccttctctttcctctcgacttgctccgaggatcccaagcacgccgcccgcggcggccgcgtgccgtgtgccgtgcgcgctgcacccggcactggcagacacccgctcttcgacgcgactccccagtccccactgggccaccagtcctccgtccatcactccatccacgagtcagcgtccgcgtccgcgtcggcgtgtccctctccttcagatgcgaggcctccaagggcgaactagtagttgcttggagacttgcagtgaaaagggcacgcagaaaagcgagcgtctggccgcccgcacgccaggagcgatcgacagatcggctgatgcggagttagcacttagcagtcgcccgccgcgacctcaacctgcaccggcgccgcacgccaagggcggagacgccagatgatgaaggatgcgaagtggcctcacgcggtgtcgagcgccggtggaaggcgaggcccccctgcctcatcatccaacgcgggggcgtcgtacaccctcctcgcgtcctccccgcccagcagcgtcagaaacgacggctgctcgccgcactaccctcccgcccctgcgtccgacgacgacgggctctcctcgttcgacgcgtccgtcgctgccgcgaagctgccgttccagcagctgcacaggaacaggccccaactcggcgtcgcggactggctgccgctgcagcgccaatctagcggtagcagcgtcgggggcgacgacggcgaggtatcctccaccgtttccttcaccatcgccaacgccgcggaatataggtacaagggcgacgcggaccgcgcaccgagcagcagcagcaagagctgggcgcagcaggcggaggaggcctacaacctccagctcgccctcgcgctccgcctctgctccgaggcctccgccgctgcggaccccaacttcctcgactcctccatcgctgccgccgaccacctccagcccattgcatcgcctcaatccctctcccaccgcttctgggtctgcacattctccctctcttacagttaccgtcggccatcgctgcctgaaatgtggcgaatatatgtcttgagttctccgagtgaccactgcgtcgttcgcaggtcaatggctgcttgtcctactccgacaaggtctcggatggtttctacttcatccaggggatggatcccttcatatggacgctctgcaacgatttgcacgacggaggccgcgtccccactattgagtccctcaaggctgtcaatcccaccgattctgccatcgaggtggtcatcgtagataaagtggcggactatgacctgaggcagctgataagcatggccattgacgtttctctgaaccgtaccgactccaaggagatcgccactcgactcgctgccgttgtgtccacgaagatggggtgagtaatgcaactgcatttctcatttgtgtgctcgctatcttacgtgaacgtttccgtcgaaggggatcggtagcagctaccgaggaacacgagttgggtccccggtggagagactctgttgggttcctgaagattagctcagggtctgttgtacttcccatcggaaagttatcagttggcttttgttgccaccgagcattactgttcaaggtgatcttgcttcttgatcgtacattgtgtactgagcagatactgacatgtcactccagcacaatattttatggcacaatattacttgtcttcctttctatgatgtagttgcaattatctctttgctaagactctaagctggtcttgtgtggccttctcgttctctccgctcccaaacgctcatatcatgaatatttttctagtatcaattcgatcatattgatattttataaggagaaaagctgcttcaccttgaagcatcatatatgattcgctattttatttatcgtcaccctattcttgtcaattccattttcttgcattgatcctgcctgctttggttgcgagcaaaacaaaaagaccctggcggattccatcaatctgccctgtcgcattgtgaagggatgcaagtactgcaaagctggtgctgccacttcttgcttggtgcgctttggtcatgacaggttgtatcctttcaaatgagctttactcttagtactattgcggactataacaaatatgagaataacggcaacgactgttatgcaagcagtccttctgtgcaagcgtgcaagcaaatcatctgattcattagattacgatccaaccgcagatacaaccatggtttgttaggggttcttttataaagattattgagctggtggtggaagggtttaagtgttaaatgtgacctacggttggatcacgatctaatggatcagatgatttgcttgcacgcttgcacagaaggactgcttgcatagcagttgttgccgagaataacagaatagttaagtgaatgttatggtattcttatttagtgcacttggtgaaagttttccagtataaatcttcaaaatgaaagatctaattgatatgcataatgcatctctcagatctagttgattttgcagtgatacataagcatgaagctggtcctgctgatatcacactcttctctcaactgtttaaaacttttcaggataagatgaatacaaaaaatatagcagtcattctagtaaagaaatttagatgtgcattctaattttggcatattttaaccagattttattttgtttatgttgcagctgtcaattttggtagatgtagacggtccgttattgacttttttccctggtgcagggaatgtctaattgatttaattgggaacccgggattcttatctgaacctgactccctcttgaatggactatcatccatctctgtttcttcaccattgcgcccaccaaaacatgactcagctgataattctgataatttcaagttgtttgccaagaaatatttccttgattgtcagtcgttaaatctcatgttcagtgatccagcagctggtatctctctgcatgctgaacaatataagattcaagatctcttggaaatgacatttgatatatacgttgaataattttaggaacggttatcgacttagatgaggttatgggatcaaatctaggtctaaactcatcacatgcaacaaacagtgattgtcaagctacctttactcatcttaaggctggtactcgacgcagtagtcaagatgggagttttataatgcagaggaggtactcagataagattctatctaaaaattaaggttgatctttcaatatccgaagttgattttattaaaaacattcccagttcccaagaggatactcaatctggactaagtgatccctttagcgatatgtcccttgagatagaagacttgattatcccatggagtgagcttgttctgaaagagaaaattggtgcaggtgtgtttcctccaaaattctgtacttacaagctgcatttaggttgtttattctctttttttatagtataacaacatgcacttttctatcgcattatgtttacttaaaaaaaactcgatctgggagggaaagaccggcctcccggtactatattaagaaaagaccgaaacatggtctcggccgaaaaaatccccgaaccctggccccccatcactaacgggtcgtcaccgcccactctgcaacgacccggtcggagggtggcgcgcaggacgtaacccgggagcgggtggggcacacgaggagattttttaaaccaagcccaaaatttgccccccgaggggaaacgaacccgggacctggaggtgctactcaaaagccttaaccattacgctagaggccctttcgctattatgtttactcttttagccaaagtttaatagtttagccgaaccgaggttttcaggtcctgtagacctgctagggcatgccttgaaaacaagacaattataaagccatattttggaaatttaaatgttttgtctacattatactaatgaggaaaaattccaggttcttttggtactgtgcaccgtgcggattggaat

SEQ ID NO: 718 - DNA, 8004 bp, Zea mays
  Intron number 2 from transcript GRMZM2G439578_T02 (locus G RMZM2G439578) derived from phytozome v7.0 (chr-ID 3; pos 1 08858717 to 108866720)
atattgcccagaagctaaatactggaatccatgtacttacacaaaatttattggtgtattcaagtttatataatttaagataatgtgctatttcatttggttcatgcttacatgataatctgtttcatgcattcatgcaaaatcttagtaatagcttgcactgttttctagtagggaatatttatgatttgacttatgaacgtcctgaagtgcttgtgctagatgcctagatctgtacatttagggtttgtttggttgggttgtggctgcgaaaaaagttattcggcgctgtgagttgtgaaaaaagctgctgtgaattgttaaaaaaactaaaaacgtttttggtggaaaccactaaaagtcgttaaaagttcttccatatatattttcacagttccatcgaaagccagtaaaagcaggtccagatgtgctttcagttttgcactgtgaaaaagtcgacttttagaaaaaagctgcttcctagatccagccctttggtttggcttttggcttttaggggacaaaagtcaaagccaaagcaaacatacccttagtcaagggagacaccagccagggttcaagtcctggtgacaacaacaaaacccccttgctagcaacccaaaaaaatagttcatatgttggaattttcaggcgttgcgccgcaaagggccaactgaagaaagcaagtggacctgcccctttgtggatgacaacaccgaatcctattcctgaggcgtcacattcgacgatgcacaacatgtcgaagtttgtagttggaggacaggcacggttgacagagtgcgtttgagtgcattgaacgcctctgttgcttcgagcgaccaggtgaatccatccttgcgtagtagccatgtaagcggggctacgagaaggccaaaatccttgatgaatttgcagtaatagcccgctaggccaaggaagccttgtaagccccaggtcgagcgtgacgtaggccatgttgtcatggcctccaccttgttatccatgattgccccatccacggagatgatgtgccccaagtactctatcgacgatgcgccgaacttgcacttggagtgcttgatgtagaggtggttgtcgaggactgtggtcagcactgccttgatgtgctacagatgaagcaaacaaggggagatatagatcaatatatcatcaaagaactcgatgaaaaacttgcggaggaatggccgcaacacggtgttgatgaggctttggaaggttgcaggcgcgttcgtcaagctgaatgacatggcgaggaactcgaagtggccatggtgtgtgcggaaggttgtcttctcgacgttgccggggtgcatgtgcacttggtggtaccttaagcggaggtcgagcttggtgaagaattgggcaccctgaagctcatccaacagctcgtcaaccaccgggatcaagaatttgtttttgaccgtgtgatcgtcgtttcttcctttggctcgctgcccataggaaatgctagactgctgacagattggccaaaagaggtttggaccatcctcccaaatgcctcttctgtgaccaagaagctgagagcctggatcatatcctggtggcctgtgtgtttacaagggatttctggttttcaccttttgcggcaatttggtttccagaatttggcaccacagcctggacgcatatcctttatgagttggtgggaggagatttctgaagctgtgaacgaccttgctttgaagggcctcaactcactgatttccctaggagtttggaccctttggaatcatagaaatcgttgtgtttttttgacagctggactcctaatttatctctagttcttagttcagcaggggaggaaagattgagatgggtgatggctggggccaaaggcatttcctttttggctgcctgtcaccctgcagtctagtttctctctccctatttttcttgttgtgaggatgttgttgtcagggcctaaggaggcccacggaggggctgcggcagcagcagctatggaccttccaagggggattagataaggatagttagagataagattacaagattagttgagattatctaggagattagttgagattatataggaaggttatcagtagtagttgttgagagtttttaggagagttttaaggagataaggatctctagctagataggggcgaccagctggcctatttatgtaataaatggatgagaaataaagcatgaaagaattagaaggaataaactctcctcttgctgtgccgtgggcagaggcctccgaccgacgttcctacccatcgatacccctctccaatccctcaccgatctagcgaccataacacctggtattcagagccaattttttcccatcgccctttcaccgcgtctattcctgcgctgttcgcccgcaacacgctgccgccaccacatctccgttgtgtgtccgccacatctacgtcgtcgctcaccaccacacctcaaccagcacgcgtacaaccgacccgccagcgccgacgcgcgatccctcgcgcgcagcccgacgacccactcagcgccccccgccaggccacttccacgccgaaggcctcgccgctcaaggtccgccaccgccacctccacctccacaccggcaggttatgtcaccctccgcgacgttgggacgcctccgccccgcgccgccgggacgccacctccgcaccacgttgtgggcgccactctgggttgcctagacccaaccggacccgatgttgagcggtagtggctcgtccgggcgcgcagccccgttgtacgcgccggaagacccgtcggtgcccaagccgtggcgcggcctcgttgatggcatcaccggctacctctactactggaacccctacaccaacgtcacatagtatgagcggcccacgaccgcgcctctgcctctcgtgggtccttgggttcccgaccaggcatacttcgacgatctgtttgcgaagctcaatgcaatcaacatggtgctctccagcagcacgccagcaccagcggcctggccgtcgtcgcccgctccgacacctatatctttgtgggcggcgatgcctaccagttgcgttgcgcccttagggccgtcttcatcaccagttgcatggctgacgacgccaggggcaaccataccaggaccggtgtaccagcccctggcgccgactctcactgctactaccatgtcgatgactgcagcaccccctccttccccatctacgacggcagcggtgaccctctggggtggttcaactgttgcgagtagttcttctggtgccagcgcactctggagtccgacaaggcttggctggcatcgtataacctcaccgaccacgcacatatgtggtcggtggttctagcggctggaacgcgatgagcgtgaggtcacgtggccacagttcaagatcatgtgccagcagcgctttggttccctcgtagtagtggcgacttctgctgccacgtttgtcgtgccctcatcgccgacaccgcccccgtcatcaggagcagccatcaccgctacccttgaccccaagagcaatgtccaggagagggtgcttgctccgcgatagacgaaggcggccgtccacctgtaggctgcatcacgcggtttcctagggcgtcggcgggtgaagcagatgatgggggtgctccattgcgggggagtcgtagctgcaccagcgcgcccgagcaacgtggtggttgttcacctccgcgtacaagaggctgcaagacatggcgcccctctgcaacgctccgtccggcgctggccctcatctgcggcgaccgtgcaactaccacgactactctccttcgtacaagggggtctgctggcctcgccaccatcttctctagccacaccaccctttgcgcactggtggccgcaggaccatgaggggctgcactacatgggattcacttgctgcaagcaacaccaacgttggcctccacgggcccgcctccaaaggctgctgtgtctttacctccatggttttagctcgcactctcctcttcactgtgcaacgtttccttgggacacatgatgatgcttgcagttgcattatatctagaataattaaaagatgagtcgagatgtaaaagattcatttttcggtgatgggttaggtcattacaggtcgtttgttgaatgctgcagctcgagggcgagctgcttgtccagggagggtgtagtgtcagggcctaaggaggcccacagaggggctgcggcagcagcaaccataggccctccaagggggattagataaggatagttagagataagattagaagattagttgagattatctaggagattagttgagattatctaggaaggttatcagttagtagttgttaagagtttttaggagagttttaaggagataagggtctctagatagataggggcggccagctggcctatttatgtaatcaatggatgagaaataaaacagacaagaattggaaggaagaaaccctcctcttgcttggccgtgggcagaggcccccggccgacgttcctgcccatcgatacccctctccaatccctcactgatctagcgaccataacagttgtccataagtccttatgagtccttttatgtttttatgttttcgtcctccgtaaggaggctcttgtatctaggctgttttctggccccataaccttctttcttcataatgagacgcagtcctcccgcgttttcgagaaaaaaaatcgtgtggtcgttgggtaccctgtagttgatgcggaatctctaggaatgtctggtttcttgacgagcagaattggtgccgagaatgccgacgtgctgttctaatgacactatggacgagcatgtcggcacactgccttttgagctcatctttctgtaattgccgatagtggtatgggtgcacgacaatgggggcggttctaggcatgaggtgaatcttgtggtcgcagctatgtggtgggggtagccctgatggagtggcgaataccacgtcgaatgcctagaggaggttgtccagcatgggttgttctgtcgtggccacgagtgcggttggcataatgttgttgcctagtggtgcatagatgtcacgccatccgttgtgcctgccagaacgaaagggacaagctggcaaggtcccataggattggcccaaggatctgaaggattgccactccatggacgacatcgtagccttccagcggaatggcatagcagttggcagtgaaggtctctgtgccgatgaggagagagagtcccgggtgaatccctgacatcccaccgcgtctctgttggccactctgatgttgattgctgggatggtggcgaggtgcaagataagtcgagcggcaaggatctggtggatgaaattatgtgtggaactcatgtccagtagtgcgatgagctgatggtgattgatgtcatcatttgcatggtgtcttatgtgcggatgcctgctagcgcgtgcagagatacgacaagagggttagatgtgtcctcccgcgcggcctcctcgtcctcgtgctccggttaatcctccacctccatgtagaagagacattggcaatgatggccatgtacatactgttcatcatagttgtagcatatgccctacatgcgacgctcggttaattcggttggagtgaggtgccgtgtcatggggcggcagcctagatcatggaggccatagagataggctcagggttaggattagtggataaagattagataagattgagttagttacttgggattagattagataagattgatttagttacttgggggccaagtcttcgtatctatataaggatgggctgtacctccttaagggaatcaatgaagaagaattagtcccatatctctctaatagtctagtcccccccaagccgactctgctcggctatctttccggcgctgtttatccccctatgaactaggattcataacatctggtatcatgagtcagggatcctttcccatgacttctgctacggacgatgtacgcacttggtgtgaggagctcgctcatgccagggtggatctggagcatgcccggtctgctatcctctagctccgtgatatactcgcggcaaaggtggagtctgaccgccgatcagtggcgccaacacaactgcaagcggctgcacgtggcttcgtagcgcggcgtccaatgcggtaagttgcggcagcggcgtggctgtaggcagtggcgtgccgtcttcaggttgtggcacgcgacttcttggcacggcgtcaagcacgacagcggcgatacggctgcaggcagcgacacatggcttcttagcgtggcgtcaagcacaacaagcggcagcgcgttggcaggctgtggttcgcccgttccttggtacatcgacttgcatcgatattgcgtgttgaacaacacgcgacacatggggcaaggccttcagcagggttggccgatcctccactccagttcaccgtcctgatccatagccatgtggacagtaagaacccgtctggttgggtgaccctgtctccactagaactcgcaacagctcaggccgtagaactggtgagctgccacgtcttggcctttgcagcctggacgagattgttcccatgggatctaggggaacaaccttggcatatgttaggttctttattttatttgcaaataaattaaagccgagatgtaaaaggcttctagttagggtttcactttcacgtgcatatcaagttagacagcaaggctgttgccatgcaccccattacagctcgaggacgagctgtcttcgaagggtggggaaatgtcatggggcggcagcccagagcatggaggccatagagataggctcagggttaggattagtggataaagattagataagattgagttagtttcttgggattagattagataagattgaattagttacttgggattaaattagataacattgagttagttacttaggggtcaagtcttcctatctacataaggatgggttgtacctccttaagagaatcaatgaagaagaattagtcccatatctctctaatagtctagtccccccctcctagccgactttgccctactatcttcccagcgctgtttacccccctatgaactaggattcataacatgccgaaatggccgagacattggtgttgtgctgtcggacgcaggcgcttgcgttggttgcattgatcctgctggcgctggtgcaggggtggccacttgaaggcgtggtggtgcacactggtgtcgtggtaacgtcgctgcaggtaggccctcaggggcatgtgcgcggcgctcatacgtgcgcgccatgctcatggccacatggatgttggaggggttaacgaactcgacgtggattgttgcttatctgttcttctatattacccatctttgttgtcgatacccttcttcccttgcctttttcccatgttaagtgctcctttggaacggaggatttttcccgtttcctacgtttttactgtgaaaatgaactgattcctatgaaatcctatatgattcctctgaaattcttgcattccaaaggagccctaagataagggagaaggttttatcgatttaattatgttgtcctcttatgattcgtcgcaggagtcttgataggtgggccaacacattttttctagatctgtttctatattttcttatatgcatgcatggtatatactttatgtataaaaaatattagcaaacataatgggtattcaactgaatacccttgaataaagctgggcccacccttgcttggcccaggttacagtgtggccctgtagtgtgaagctagggccagtctgtgttgttgaggcttcttaatcataatgccttgtggaggctattccctagaaatagaattgttgcacctagcctaccctaactttcatgggactaaaggctttgctgttgattgaattgctaagcctggtaaccttcgtagattttcttacaacattgtcttgcacctcattcagcatattgcagaaataccat

SEQ ID NO: 719 - DNA, 1397 bp, Zea mays
  Intron number 3 from transcript GRMZM2G169548_T01 (locus G RMZM2G169548) derived from phytozome v7.0 (chr-ID 8; pos 1 55591879 to 155593275)
cattgttcaaacgtgagatagcatctttctctctcttttgtcgcctgaatttgtgccccttttgtgaataatatatgctcacaatgcctacattgggaatccatattcggacatataattgaagcaaagaaagatacattgaatgttttttgtgaaataaaactacaaccaaattaaacatggatcactgttacgaacacaaagtttgatgccatcacaacagcacatgagatggagctctagcccttcaggtccattattttgttttaggtgtgtttcacataagcagttgaaaatagttcttgtcttgttgcttctctgtcattagtggagtatcactccctcaggccttggtcccttttgactcgagcacttgacaagtacatctgtgaaaacttttttgatgaaaaataacaaaggagattgaaaattcaccatatagagttacttggctcaatttattttgtttcttaacaactgaaccataggaaatgacactctatgcatgaatttgcaaaatcaaggataacgcatcatatcgcaaacccctaatataccttacagtgtgatgtgtgtaggagactctagagtccaaaggttttagacgcagtagaactaaaataaaatacatgagatgtgacttcaacactactacacatgagaaaggaaatgctagtttggaaggttaagtagtggctaggaaggatacctttcggtatttaggtgcaatgctacagagagatgaagatattgatgaaaatgttaaccatagaatcaaagcaaggtcgaggaagtgtcaacaagcatctcactttctatgtgacaagagggtaccatagaagctaaaatgcaagttttataggatgacgattagacctactatgttatatagtgcagaatgttggtctaaaaaagatgttatgtttagtagataggtgttgtagaatgagtatgttgcgttgaatttatggacatataagaagggatcaagtctgaaaccccgaaacgatgatgtacatgataggctaggggtagaaccaattgaagaaaagcttttcaataccgattaagatggtttgaaggtgtccaacgaagacctccagaggcactagtacgtagtgggaatgtgggatcttaaggcgcgatactaacgggaggagaggcaggggaagaccgaagttgacatgggatagacagtaaaagaggaccggaaaaatgaaatatttcttaagacttagccttgaatatgagcgaatagaaaacaactatttacatgcctgaaccttgatttatggattttgttgggttttaactctagcctatcgtaacttacttgggactaaaaaggcttggttgttgcagtggtgctattgttggtgcagatatccctggacgga

SEQ ID NO: 720 - DNA, 1416 bp, Zea mays
  Intron number 4 from transcript GRMZM5G846522_T01 (locus G RMZM5G846522) derived from phytozome v7.0 (chr-ID 10; pos 51781695 to 51783110 reverse strand)
ttaaacaaggcggtaagtattataatcataatattatttagcaatgttcttttcctttttggtactgcatatattttgttgctgagcttcggttgccccttgccaaaactgaaactttggaattgcatcttgtttatataacgtaatataacaaagtttaaggacatgaagtatcaaaccagttactattgaagtagtattgcaatataaggaccgggaaggaaaaagacaattaaggcattcaggtgtgtgctatagttctgattttgatgtactcatgagaaaacttgaaatagtagaagaggatacatccaattgagatcgattttctggatcagatatgcatttgaaagttaattttgaagagctgatatacgttgaatgccagctgggaggaatttgctcccactgctctgggttaattttgtatcaaacattatcagcaaatatgctgtctgtttaaattttactccatccaggatttagaggcacactgggtctggaaatgcttccgagattcacaggtgcccaagttgttgcatgccctggtgctgacgctcatgttcagtcttcccgtgtgggagttgcttcgacatgtgggcttttgagtcacgggagagcacaggcctgggtgttatggggagcgtatgcatgtcgccttgcagggagttggaacgtgcggcctgcagggcctgcactgcagagtgggaaacgaagggtttatcagcattcagagctgagaattaatgctacttaatttctccttagtcttgatgaaaatcgcttgtgcgcctgtaaatccccgcggagggagtattagctaacattcgtacttaacaaaaatattgcgccctgcccccatttaccctcacatgtggactcgctaggctttgactatatatacatttctcagcagtggtgaagctatagatcaaattacaggggtgtgtgcctgccttatagacacgtagacttgaaccgtaaccatattgaaaaatcgatctactcaattgtattctatttttcgtgggtgcatctgcacccacaagcttgtataaagcttcaccgctgtttctcagacatgtgttaattttattaattatcttatccctatttgattctgctgttactttgtcataaacttacaaccattctgtatgtaaaaaaatgatccttctgtttgtgtttttttcaagtaacattgatcaatgatatgacggttaatttctctagacgttgttatttcattatgttatttgcatttttgaactcttcaagcattagaggattctagttagtttaatatttggtacgacttgcatttaactcggacacaatcttctcatcttgatgttctatatttgttctccttgtttttgtagcattggctgtattgatattttcttgttgcaggag

SEQ ID NO: 721 - DNA, 23886 bp, Zea mays
  Intron number 1 from transcript GRMZM2G171650_T05 (locus G RMZM2G171650) derived from phytozome v7.0 (chr-ID 3; pos 1 58982973 to 159006858 reverse strand)
agtactcctcctccaggttccgtacccctaccccatcgtcgtagaatcgcttgcccctgttgatcgaagtgagattgaagcaggggaatagccccacccaacaatctagcggtggagcagctgaggtgatcctcgattcgctccggcaccatttggacccccctcactcccgttgctccatggcctctcgcacgcgcggtggaccaccagccgccttgatcgtgcacgccttgtgctcgagacaatcccccgtatcaggacttcaggaggcttcgtctgtgccaccttgcatgagtactatgaccctgtttagtttgggatctctatccgccctgccgcttatagatggccaaacgggcggcacggcccgacccggcacgagcccgacttgggcacggcacgacaggcccgagcacgacaggcccgtttacataatcgggccgtgccgtgccgcccgacgtgcccagcctcaggcccaagcacggcacgggagattgttaaccgtgccgtgccggcccgacagcccgaagcacgttagggctcgtgccggcccaagagcccgtaaaactcagtacagaaacgcaggaacatctaatacatatatttctcatcagatcagagttaataacatattaatacaacaaaatctaacacaatcacaacacataacacattatttagtttgagctggtgcaatggctgcctcgttaaaaacctatctaggtaaaactcacacctcgtgagaaaccctagataggaaaagagtacagcccagctcaatattttcattatttcatcacatagttcatctcagaattaagttacatgtccagaacccacattacatgtccagaataccagaacagactaatcaatgaataaatctctgaaggactcttcaaggatcttatcttctgttgtgtgctgcattcttgcatctgctgcctcccaatcctttagcaaggaaagcatctccaccattccagagccaagtcgacgacgccgctcctcaatgagcctacctgcaagactaaatgctgattctgaactcacagtagagacaggaactgaaatgatatctttagctaggattgaaagtactgggtaagtaagtttgtgatcatgccaccaatctaggagattgaattcatcatcaaacttctgaacagtgtcactatctagataagcagctagttcagaaccagaaataccaggagtgcttgctgcatgaagcaaagcactagcagatgtccttcttgacagttcaggaaccatcccagaactgctactggcaccaaaggcacccagaccagcacccagtgccattgaagaactgctaccaatgccatctgcaccaaacaccaaatcccaagcatatttgctcttaccttcaccaggggtagcatttgaagtcctctgcaacctaacagaaccaaatttgtcatcatatttattaaataaatcagataaatcagccctcacagaagttagatatccagagtaatcagaatgagtcaactgagacatgagtgcaagcacattgttgaaacctctcattttagctctagggtccagtataaatgcaaatgcatatagcaaaggaattgtaccccaatattttaagaatttgtctttcattgggacaactatatgtctaagcaaattatcattctcatacatgttcatgtgcttattaatatgaagaatgtggtgcaacattaaaggtgatgtaggatagtacacaccagacatcacaacagtagaatcataaaacctttcaaggaactctaatattttttcagcaacataccaatgtgcttcacttaaaagtgtagtaccctcttctctagggtgatagtgggtctgtataaacacagagaatgtgctcttgtaaggtataagatgtttgagcataaggtaggtagagttccatctcacttccatatctaaaccaaacttacgaggtcttactcccatagcaacacaaaaacttttgtatgcagcaatcctttggtttgatgagttcaaaaaagagatggcagttctaaaatcttcaagataaggtttcagttccacaaatgtggcatgcacagcaaggttaatgatatggcatgcacatcgttgatgcaataataaaggaccaacataagcagatagcaaaggtgtaagatggtccattgccctagtgttagcagatgcattatccaaggtaatggaaaaaaccttttcagccaattcatattcattaacaacagcatgaatcctctctgcaatgttcttgccagagtgggaacaatcaatgagacgcatagcaagaatccttttttctaactgccaatcagagttaacataatgtgcaacaacagacaaataatcttctttagcattgccactccaaatatcagaagttaaagcaacagaagaaacatacttcaatttttcagcaactatagcatgtcgttctttaaagtacttttccatatctctagttgtagtttgtctagaaacattgcaatgcctaggattatgggcagttttaatgtattcatcaaatgcatcacaatcagcaaagcataatggaaggtccaacctagcaatcaaacgacataactgaacacgtgcaacttcagcactatattcccaacgaaagacagtaccatcagcattatatcttagcatagattggttcccagttcggccatggagtcgtttacatttgtccctatgccgagacaaatgaccagtgccaatggtagaacgggcagcaagttatttcttgcaaaaatgacaccttgctcctactctaacctcaacaccattttcagtggcgaaaatcttatccatgtcctcccagacatcggacgtgcatttcctctttctaccagtgcttgccgtagtggaggcagtagcatctgggagagcctcgccctcggcagcgacattgtcgtcgccaaggtttatggtagggttaggggtagggttaggggtaggggcagtggaaccaaagagatcctccaaaccatcgtgcacgtcatccacatcgtctggggtttgacccatcaacaccaaatcatgattaatggaggtaggatcatacctatgctccatcgccggcacctggtccctcacggccacgacctcgacctgcaaagaagcaaagacatagggggattaggggggttagggttaaagaagcaaaaacagagggggattagggtttagcgagttcataccttagccgattaggccggagcaccagttccgtcggcgatagagaagatccagcgacagcagatccagagacacagagatagagccagatagaagaacagagagactatgagcacaagcgcacgatatagatggccaaacagggagaggaggtgtgtgtgaagctttaccttaccagatccgcagaccatcggtgatggataagacagaggagaggcagatccacagatctagtacaccggagtccatagcagaggggggaagcgctagggaatggggatacaagattctgttaccgaagacgtgccgaggacggggcatccaggattccaggaagcacggcgcgcgacggccgacgcctcgacgtcgacggaactggccactgggtgcgaggcggcggtcgacggggaaccgagggaaccgggtgcgagcaccgcgagggaaccgatggccggcgagccgagcaccacgagggaaccgacgaccggcgagtcgagcacccacgagggaaccgacgggcggcgaggcgagcacccacgagggaaccgacggggcgaaaaggcgactgggcgagggcggagcggacagcggagacggagagaacgagacgagtgcacgactggggttagggttagggttacggacttcgggtcgtagaaagtaggaataggtagtcgggcctggcgtgctttccgttttaaacgggccgtgccgggccggcacggcgtgccttggtcgcggcccaagcccggcacgggcgtagtgccgggccggcactagcccgaatccgatcgtgccgtgccgggctcaggcacgccaaatcgtgccgggcctcgggccggcccgactaacccggcccatctggccatctctactgccgctgccgcccgcagcgccacctgttctttattattattattattgacgatccgtcacctgctccatgagcttgttctggaccttggctgctccaatgcgtggagatagtgtgcgtgtgttctttctctctttttcacacgtggctcacagataggaactcgggagcgtgcttcaatgccactgtgcgcgagtatctctcgtgcgggcaatgacaaatagggtgcacaccctccaatttgcacccggttacgttgactcgacttttcccgcacttctctcgtctaatctggagtcaagtgagacctgttcctgtgttctgatttttttccgtctattgataaccttggatcggcatccatcttggactttttagaggagcctccagctctactctagaccaataatgttaaatgaatgtggccaagtccttctatttagaaattttccaaaaaaattatagattcttctcaagacgaaagccatttttatctcgtttgctaggactttttggtaacctagaagtcctaccaaggacccttactctgtaacatccacgtggttgatatgcgtgataggttaattatagcaccgattaaaggaagtgaacatatacagtggagatctttagacacactagtgtgtaatatagtgtgtaataggatcttaaagcgggatagcaacgaaacgaaagatagaaaacggctaaagttgacatagaaagatgcattaaaaagtgatttgaaaagacagaagagagttatcgagcatcgtctgagagacataacaagagaaataacttagatatctatgaaccaatttggtttcatacttgaaaggtcaactatgaaagccatttccttaataagttatggagtagtatagcgagcaagcgaaagacccacacatagatttcatcgactcgaagaaggcttataacaaaatgttaaaaaatattatatggtggtatggagaaacataacaaaatacgttagattcattaaggacatgtacaacaatgttatgaatagtgttgaacaagttataaggatgtatataactttttgattaaaataggactatatcaagggtcaactttgagcctttacctttctgccctagtgatagatgatgtcacaagggaatacatgagatgaacatgaatatatgagatatgtggctatacaagaatggatcgagttcaaaatgatgatataggcaatagattataagtagcactagcaccaattaaagaaaaacatattcaacatcgattgagatagtttggacatgtccaacggagatcccaaacacactagtgtgtagtggaatcctaaggcgtgaagcgtgatagtaatgataaaagatgcgagagaatgccgaagctgacataaaaagatgcagtaaaagagacttgtgatgtagcggtataagggagaagaacctacacatggtttttgacttagagaagacttatgacaaaacataaaaaatgttataggggggtttagacaaataaaagtttcaatgaagtttgttaaggacatgtacaacaagtgtttcaacaagtgatggagacatggctttctaattagaataggactgcatcaaggttcaactttgaggccttaccttcttgcctttataatggatgaggatggatgaggtcacaaaggacatttaaagaggtatttcttagtgtatgttttttgcgaacaatgtagtgctagttgataaaagccggataagagcaaatagaaaactaaagttgtggtaggagactatagagcccaaaggtttgacttggtagaactaaaaccgaatacatgagatgtgagtatgtgactttgacactactacacgtgagggagatattagtttggaaggtcaagtagtgaccaggaagaatagattttgatatttaggatcaattctatagagaaatgggatatagatatttaggatcaatactatagagaaatggaatattgttagccatataatcaaaagaagggcaaagaaagtggcgctaaacatctaccttatgcgtgataagagggtactacataagctaaaagacaaattagacatgttttattatatgatgcataatattggtctacaaaaagataagttcaacagataagcattgcaaaaatatatatgttatatactagaattgtggccacacgagggatcaaatcgatgctatatatatgtgataggttagatatcagaatgaattcataaaaaatgataactagggcgtagcatatcataaaagagaatgaattagcctacttaaatcaagctttcataggccatgctactctttactcgactgttcaaggaaatcaaatcaagtagtgctagcagtcatgcaaataaatcgttcatccttctctctcatggttcatatgtcagggcccaagagggcccgctacagtgacactatagcgacgtggtactgtagcacgcccttaggttggttagataaagataagactagtttgggataagagattagatctagtgcttacaggtcaagtaaccctctttatataaggacagagattgtatcaattgaaggtaaccaagagattagaaggaaatctcttctctcttgccgaccgtgggaaaatagtgcgggtactgtttatccatgtgaatagtaccgtgcctccccagccaactgcccgacgacgtccaagcgtcggtgtcttggtcctagaccccaaacctaccactcgtactacttcgtaaccctagatccataacaatctagtatcagagacgacgtcgaccctcaccctggaagtcgtagcccaagcggttgtcgatctcgaccgttccgtggcgatcatcaccgccttcctctccaccaatttttcaccgctagggcacacgtcccacaccaaccttttgccgccgctgcatgcattgccaggctcgatccgtcaacctagcaccccggcggcaccatgcctgcccattcatttgttgcccatgccgccgtcgccttcccctattccatcatacgccatggctatgggggaccccagtacaccatgcccttgccgcaaacacagattgcgacatcaggtgcaatcatcccttagggaggcttgcccctttacctcatctccatgccaccatcatcatcgccaattccatcgtacaccctctcatcatcaatggcaccataattcacgatggcaacgtctccttcatcgaccccgttgttcaccgccccattcctgtgccgccacagcagcagtgcgatgacgtcttctacggggcgtggatggcatccgagcatcgatgacacaactataggcggcggcatgctgcctcctagtgcgtcggcaaggacatcgccccatcttcaagcggcggcgctcagtcgtcccatcaactagaggaaggcgattgcgtgggcgagtgcctgtaaggtgtcagcggtggtgcggctgcagtctgcctcctaatgcgctggcgactgcaggaggtgcgtcgacagatgcataacatcataacaccccgtttacctagccaacatttagatccgactctaaccaaacttttttggttcaccccaacactacccacttgtttgattgttgctaagcacttttaggataccaaacatacctcccaaatggtacttaaagtggtcaatttaccattgagtcaatgatatacatgataaattagaggtggcaccaattggaaaaaaagattgtccgacaataattgagatggtttgaacatatgtccaacggagaccaatagatgcatcagtgcatagttgaactggttagatgtataagtggattgtcaccattcagtgcatagttgaacggagtcaatgtataagtggattgtctactctcctaaaggcttaagctttttggttgaactggttagaacgtccactttaacatgataccgaagccagacgtctcgagttcgaatcctgacagaggttgcccctgcccctttatttggttagaacgtccactttaacatgataccgaagccagacgtctcgagtttgaatctgtcaataccgaagccagacgtctcgagtttgaatcctgacagaggttgcccctgcccctttattttccacgtttgtgtctttcctctcccgctacacatgagtgagaatattaaagtgtataagtggattgactaccttctcttaaaggcttaagcttttaggttaaactagttagagcgtccactctaacaacttaacctaatacaaaatagttctattaaaattaacgacattacataagatgaactaaatctatcatattgattcacatggtacaaagagagtaaggtttaatgtcataatgtcacaacatacaattttccatgagttctcgtgactacatcggtgtagggtaccttcaacctcctctgcctgtgccatataggtaaaaagaatttgattagaggtaaaaaggataccgactaatcatgtgatggatgaagaaaatattccatatctactgtacctcgttaacaggtacctatctctagttatggttagtgcataccgtttgatataactgtgtttattaacaccatactcaatgaaataatgtgttctcttttgctagacgaagattttttttcaaaggtcacaatttacggtgcagacacatgcatgatttagtgtggggcaaaaaggcatgatgtagtgatgaactcaaaaggatggtttaaattctttttacatttggaatttgagtataggaaccgttgtaccgtaaagaaaatacaatacacaagtttaagtgtgtaaccaagtgctcaactccactccacaaaaacttacgtggccctgcagcacgttctgcggtactatcacaacttagcgatcattggaaagctgagggtatttatacccactcttctcaacggccatctcgtgtttttcattctcaccatccttaagataactcttctcactccattgaagactcataagctctacattgacttccttttagattcctttgagattagagtctctaaactttgttagagagttattcaaactgagatcaaactcttaaaaccatggttattaaagaggtaaaacgttaaaacgttatgaaccaacttttcaacatttaaacgtttaaacgaacgttgaaacatctttttaaacttgacatagaatttcaaatatagaataagttcatacataagttgagttcacaaaccaaataacattagcataaaaagaaatagatcaagttcaacaacacaagttcaacaaacacaagttacaacttttatgcatgattattaaccatcatcaaacttatcaatattaagaccatgagcatcccatgataaattgaaatcaactccaagagcattgctaacatgagaagaattagctaatggatcaacccattcattgtcccaatcaaagtcttctaaaatcaaaggatcaaagttttttccttccttacgtattttttaaaatctatcaaccatctttctgttgtatgaaagatagaccaaatcattcaaccttttgtgctctaacctattcctcttttggtatgcatctacaagtacaaataaaagtaaccaaagaagaactgaggataaaaaagtagtggcgaatagaaattgaataatttgactagctcatttacaaatttaaatgtactccaattccgctcacaaccggatgatgaagcacaaagactaacaatccgtcttgcaaacttatataattcaatagtacgaccaccatatgcaagccaccaatcaactaaaatggcgcgaacaagaagattatatgttacatactgaaaatggaggaaggctatcaattttagaatacttacgtggattccttgtttgtgcttcttcctctcatctgtctttgacaaccctagcaagtaaaggctcacgtagctcatgtaaagtaggaggcttgaacccagatccatattgagcaatagcctccacaactacctcaaattaccttgagttcgcagcattgaatggtataccacactcatagaaaaacttggctatctccaaacaaatagaatttctttcttccttaggcttcatggtagcacttatggtagtttgagcaggtccctttgcatgtctctatgctacaacctcttgaggtgttcgtcgaatcatagatgcaatggacttctttggagctgcaattgggtggggcttcaattggaaaattgctttgtttcttttggcagctgctccagaacttggcacaatacatgaggaagcctgatgatgctgacacgacctgcttcccataacttggacatcatcatcttgtactgcttcatcttccattacatcgtcatctaggtacaccgtcctagcccgcttcccattattcaaagcttcattcatctctttatcaatctctctagcagtgttaggacacttgacaatgtctccatagccaccaggtagatgtttcaccctcttgatacctccttttatttgtttggggcacaaagcacattgaatcagctctcgctttcccgcctcaacatagtatgcatatttctatcctggatcatttgactttggccttagtcactgatctttgagtgggtcataggagtcattactttgaccgacagacaatgcctcgctatttgttgccattgaaattcactgtgagcaaatagagattgattcactgtgagcaaaatcaacaaattcactttgaggctggctgctggtctggcggagtggctgctcagctgctggtcttgctcagcagaggtgaggcagagcagcgcaagtgacaggtgaggcttgcgcactggtgagagcacctagagggggggggggggtgaataggtgatcctgtaaaaacttaaacttatagccacaaaacttgattaggtgttagcacagtttatgccaagtggctagagaggagtcaaaacacaataaccacaagaatccaatcacagagatgacacagtggttatcccgtggttcggccaagtacaaaacttgcctactccacgttgtggcgtcccaacggacgagagttgcactcaactcctctcaagtgatccaatgatcaacttgaataccacggtgttcttgcttttctttttctcaatcccgtttgcgaggaatctccacaacttggagcctctcgccccttacaaaagatgttcacagagaatcacagagcaaaggagggattagcaactcacacacgacacaaagatcacagcgaatacgcacacacaagacccagacttgagctcaaaagactagcacactagaacggagctcaaatcactagaatgtcgaacaagtgcgcgagattgatgtgtgagtgatcaagagtgctcaaggaatgcttggtgttctcctccatgcgccaaggggtcccttttatagccccaaggcagctaggagccgttgggaacaaatctggaaggccatctttgccttctgtctcgtggcgcaccggacagtccggtgcacaccggacactgtccggtgcccgatttgtttccatagaaagcgaagccgaccgttgccgaccgttgcagatctggcgcaccggacagtccggtgcacaccggacagtccggtgcacaccggacagtccggtgctcccttccgaccgttggctcggccacgtgtcgcgcgccgatcgcgcggccgaccgttggcccggccgaccgttggctcaccggacagtccggtgcacaccggacagtccggtgaattttagccgaagtcgccggagaaaaaacccgagaagcggctggtttgcgctgcgctgatctggcgcaccagacactgtccggtgcacaccggacagtccggtgccccagcccgaagcagcctttggctgtacacagccactctccacttcttttcttttcttctttctcctgtttctaacacttagacaagatgttagtacacaaaactaatgtactaaggcttagaaacatacctttacttgtgatttacactttgttcatccatgagcatattttcacatttaggcccttgtgtttgcactcaatcaccaaaatacttagaaatggcccaagggcacatttccctttcaatctccccctttttggtgatttatgccaacacaatataaagcaactagaacaagtgcaaaatcactttaaaaactcaaattggttttattcaattttggcatatatggatcatcctttgccaccacttggtttgtttttgcaaatcaaactcaaatctctatctctaagtcaaacacacatgttgaagtataaagagagtcattccaaaagagattgatcaaagatttcaaaaactccccctttttcccataatcaacacttctccccacaagaagccaacttttgaaaatagagacaataagagacaataaaagcttttgacaaaacaaaaactctattctactattttcaaaatctctcaagtggtagctgatccatttatcactttggcctttattttctccccctttggcatcaagcaccaaaacgggatcaatcttggcccgttaaccccattgcctcaccaaagtcttcaattaagagcaaatggcaataagatttcatgagatgaacttggaattagttaccctctcatcggagtgcagtggaagtctttcatggtccaagtccaccttttccctttcaatcctccttcgagactaaattatcaaactcaagcacatggttagtctcaaagggtcaagttgtaacacatctccccctacacatgtgcatcactttgcaacggacttgtgaggtccagggagtgtttgtacaacttgagcaccataataagcaacataatgcaaaaaggaacatgatcaaaagcataactacatgtatgctacaattcaatccaggttccgcgaatctaagacatttagctcactacgcaacctgcaaaaggtcttctcatctagaggcttagtgaagatatcggctagctggttctcggtgctaacatgaaacacttcgatatctcccttttgctggtggtctctcaaaaaagtgatgccggatgtctatgtgctttgtgcggctgtgttcaacaggattttccgccatgcggatagcactctcattatcacataggagtgggactttgctcagattgtagccaaagtccctgagggtttgcctcatccaaagtagttgcgcgcaacactgtcctgcggcaacatactcggcctcagcggtggatagggcaacggaagtttgtttcttagagttccatgacaccagggaccttcctaagaattggcacgtccccgatgtactcttcctatcgaccttacatccagcatagtcggagtctgagtatccaactaagtcaaaggtagacccctttggataccagagcccgaagcaaggcgtagcaaccaaatatctaagaattcgcttcaccgccactaagtgacactccttaggatcggattgaaatctagcacacatgcatacgctaagcataatatccggtctactagcacataagtaaagcaaagaacctatcattgaccggtatgctttttgatcaacggacttacttcctttgttgaggtcggtgtgtccgtcggtccccatcggagtctttgcgggcttggcgtccttcatcccaaaccgctttagcagatcttgcgtgtacttcgtttgggagatgaaggtgccgtccttgagttgcttcacttggaacccaaggaagtagttcaactcgcccatcatcgacatctcgaatttctgcgtcatcaccctgctaaactcttcacaagacttttggttagtagaaccaaatattatgtcatcgacataaatttggcacacaaacaaatcaccattacaagtcttagtaaaaagagttggatcggctttcccaaccttgaaagcattagcaattaagaaatctctaaggcattcataccatgctcttggggcttgcttaagtccatagagcgccttagagagcttacacacatggtcggagtaccgttcatcctcgaagccagggggttgctccacgtacacctcctccttgattggcccgttgaggaaggcgctcttcacatccatttgaaacaacctgaaagaatggtgagcggcatatgctagcaagatacgaattgattctagcctagccacaggagcaaaagtctcctcgaaatccaaacctgcgacttgggcataaccttttgccacaagtcgagccttgttcctcgtcaccaccccgtgctcgtcctgtttgttgcggaacacccacttggttcccacaacattttgcttcggacgaggcaccagtgtccaaacttcattgcgcttgaagttgtttaactcctcttgcatggccaacacccagtccggatctagcaaggcctcttctaccctgaaaggctcaatagaagagacaaaggagtaatgctcacaaaaattaactaatcgagatcgagtagttactcccttgctaatgtcacccagaatttggtcgacgggatgatccctttgaatcatcgctcgaacttgagttggaggtgccggttgcgcttcttcctgtatcacttgatcatcttgtgctcccccttgatcaagcgcctccacttgaggtacctgttcgtcatctttggttgggggttgcaccatagttgaggaagaagtttgatctcgttcatcttgttcctgtggccgtacttctccaatcgccatggtccgtatagcggccgtcggaacatcttcttcatctacatcatcacaatcaacaacttgctctcttggagagccattagtctcatcaaatacaacgtcgctagagacttcaaccaaacccgatgatttgttgaagactctatacgcctttgtatttgagtcataacctaataaaaacccttctacagctttgggagcaaacttagaatttctacccttctttactagaatgtagcatttactcccaaatacacgaaagtacgatacattgggtttgttaccggttagtagctcatacgacgtcttcttgaggaggcgatgaaggtagaccctgttgatggcgtggcacgccgtgttcacggcttccgtccaaaagcactcgggggtcttgaactctcctagcatcgtcctcgccatgtcgatgagcgtcctgttcttcctctctaccacaccattttgctgtggtgtgtagggagcggagaactcgtgcttgatcccttcctcttcaaggaactcctccacttgaaggttcttgaactcggacccgttgtcgcttcttatctttttcactttgagctcaaactcattttgagctctcctgaggaagcgtttgagggtcccttgggtttcagacttatcctgcaaaaagaacacccaagtgaagcgggaaaaatcatcaacaataactaaaccatacttacttccccctatgcttagataggcgacgggtccgaagaggtccatatgcagcagctccaggggtcttgaagtggtcatcacattcttgctgtgatgcgctcctcccacctgtttccctgcttgacaagctgcacaaggtctatctttttcgaattgaacattggttagacctatcacgtgttctccctttagaagcttgtgaaggttcttcatccccacatgtgctaagcggcgatgccacagccagcccatgcaagtcttagccattaagcatgcatctagaccggcctcttcttttgcaaaatcaactaaataaagtttgccgtctaatacacccttaaaagctagtgaaccatcacttcttctaaagacagacacatctatatttgtaaacagacagttatatcccatattgcacaattgactaacagatagtaaattatatcctagtgactctactaaaaacacattagagatagagtgctcattagaaattgcaattttacctaacccttttaccttgccttgattcccatcaccgaatatgattgaatcttgggaatccttattcttgacgtaggaggtgaacatcttcttctcccccgtcatatggtttgtgcatccgctatcaataatccagcttgaacccccggatgcataaacctgcaaggcaaatttaggcttgggtcttaggtacccaactcatgttgggtcctacaaggttagtgcaaatatccttagggacccaaatgcaagttttgtctcccttgcattttgcccctaacttcctagcaacaattttcttatcctttctacaaatagcaaaggaagcatttaaagcataataaattgtggaaggttcatttgctattttcctaggagcatgaataacattccttctaggcacatgatgaatagcatttcttttaggaacaacatttctcctagtaacatttctatcatacacataagaggaactaggagcaaacatggtatgagaatcataaacatatgaatcataagcatcatgacttacatttctagtttgtcttctatcatgatacaaaaatgcatggttccttttagcactagtagccataggggccttccctttctccttggcgggaatgggagccttatggcttgttaagttcttagcttctctcttgaagccaagtccatccttaattgaggggtgtctaccaattgtgtaggcatcccttgcaaattttagcttatcgaaatcattcttgctagtcttaagttgagcattaagactagccagttcatcattaagcttggaaattgaaactaggtgttcactacaagcattaatgtcaaagtctttacacctagtacaaatttcaacatgttctacacaagaattggatttgtttgctacttctaatttagcatttaaatcattgttgacacctttcaaagtagaaatggtttcatgacaagtagatagttcaaaagaaagcatttcatttctcttaacttctaaagcataggatttttgtgcctcaacaaatttatcatgctcttcatacaacaaatcctcttgcttttctaaaagtatattcttttcattcaaggcatcaattaattcattaattttgtctatcttagatctatctaagcccttgaacaaacatgaataatctacttcatcctcatcactagattcgtcctcacttgaagaagcataggtagagttgcgagtacataccttcttctctcttgccataaggcatgtgtgacgctcgttggggaagagggttgatttgttgaaggcggtggcggcgagtccttcattgtcggagtcggacgaggagcaatccgagtcccactccttgcctagatgcgcctcgccctttgccttcttgtaatgcttcttcttttccctcttgttccccttttcctggtcactatcattatcaggacagttagcaataaaatgaccaagcttaccgcatttgaagcatgatcgcttccccttggtcttagtcttgctcggctgtccattgcgaccctttagcaccgtcttgaatctcttgataatgagggccatttcttcttcattaagaccggccgcctcaatttgcgccaccttgctgggtagcgcctccttgttccctgtggctttgagagcaaaaggttgcggctcgttgatcggtccattcaaggcgtcgtccacataccttgcctccttgatcatcattcgcccgctgacgaattttcctagtacttcttcgggcgacattttggtgtacctgggattctcacgaatattattcaccaaatgaggatcaagaacggtaaaggacctgagcattagtcggacgacgtcgtggtccgtccatcgcgtgcttccgtagctccttattttgttgacaagggtcttgagccggttgtatgtttgagttggctcctcgccccttatcatcgcgaaccgtccaagctcgccctccaccaactccattttggtgagcaaggtagcgtcatttccctcatgagagatcttgagggtatcccagatttgcttggcgttatccaagccactcactttattatattcatccctgcacaatgaggctagaagaacagtagtagcttgtgcattcttatggatttgctcattaatgaatataggactatccgaactattaaagtgcattccactatctacaatctcccatatgctaggatggagagagaataggtgactacgcattttgtggctccaaaatccgtagtcctccccatcaaagtgtgggggcttgccgagtggaatggaaagcaaatgtgaatttgaactatgcggaatacgagagtagtcaaaagaaaagttagaattaaccggtttcctttgtttgtcgtagtcgtcgtccttttgggaagaagaggactcatcgctgtcgtagtagacgatctccttgatgcgtcttgtcttcttcttcttcccatctcttcgcttgtggcccgagcccgagtcattggacttgtcatcccttggctcgttgacgaaggactccttctccttgtcgttgatcacaattcccttccccttaggatccatctcttcgggcggttagtccctttcttgaagagaacggctccgataccaattgagagcacctagaggggggggggggtgaataggtgatcctgtaaaaacttaaacttatagccacaaaacttgattaggtgttagcacagtttatgccaagtggctagagaggagtcaaaacacaataaccacaagaatccaatcacagagatgacacagtggttatcccgtggttcggccaagtacaaaacttgcctactccacgttgtggcgtcccaacggacgagagttgcactcaactcctctcaagtgatccaatgatcaacttgaataccacggtgttcttgcttttcttttctcaatcccgtttgcgaggaatctccacaacttggagcctctcgcccttacaaaagatgttcacagagaatcacagagcaaaggagggattagcaactcacacacgacacaaagatcacagcgaatacgcacacacaagacccagacttgagctcaaaagactagcacactagaacggagctcaaatcactagaatgtcgaacaagtgcgcgagattgatgtgtgagtgatcaagagtgctcaaggaatgcttggtatgctcctccatgcgccaaggggtcccttttatagccccaaggcagctaggagccgttgggaacaaatctggaaggccatctttgccttctgtctcgtggcgcaccggacagtccggtgcacaccggacactgtccggtgcccgatttgtttccatagaaagcgaagccgaccgttgccgaccgttgcagatctggcgcaccggacagtccggtgcacaccggacagtccggtgctcccttccgaccgttggctcggccacgtgtcgcgcgccgatcgcgcggccgaccgttggcccggccgaccgttggctcaccggacagtccggtgcacaccggacagtccggtgaattttagccgaagtcgccggagaaaaacccgagagcggctggtttgcgctgcgctgatctggcgcaccggacactgtccggtgcacaccggacagtccggtgccccagcccgaagcagcctttggctgtacacagccactctccacttcttttcttttcttctttctcctgtttctaacacttagacaagatgttagtacacaaaactaatgtactaaggcttagaaacatacctttacttgtgatttacactttgttcatccatgagcatattttcacatttaggcccttgtgtttgcactcaatcaccaaaatacttagaaatggcccaagggcacatttccctttcaactggcggcttgcgcagagcagcgcaacgaggcagaacaacgcagaggtgaggtagagcactggcggcggcggcacactggactttggagcggcgccgcactgcactgtgggcggagggaggagggagtagaggggccgacggcgtgcctggactcctggaggcggctgagggcggctgaggacaatcgacggcggtagcaggctgaggacggctggcggctgaggacggctaaggatttagggtttgagggcgactgaggacggctaaaggcctaggaaggcccactaacaactagaatgttcatagaacgcttaaaacaccataaaacacgttttagacggttacacgacgcttaaacgtccaaaacggacgttcaacaccattttcttagaacatgcggacgttttagttcctactcacgttttatcgcttaaaagacgcttaaacgtcgtttaagcgacgttttaataacaatgcttaaaacacttagttctcactcaaaccggtggattgcgacctagatcaaacttctagaacacttagttgtcactcaaatcggtagattgcattcgttgctcttgaaaaagggctcctagccggctagacatcttctattcactcaagcccttgtgggtactccaaaaagtttgtaatctctatcaacatctagtaagaactctcaatcaagagacttgcactcttaactttagttctcactcaagacggtagattgtattcgttgctcttgaaaaaaaggctcatagtcggctaggcatctcctattcactcaagcccttttgggtactccaaaaaaaattgtaatctctaccaacatctaggaagagctctcaatcaagagacttgtgctcttaacttgagaagtgtacatagttcttgaaaccaagtctggatggcttcctcaacatggaggtgacaatccttagtggcatgctaaaccatagaataaatcatttgtcccttgtgttttttatgatcgtattatgttctacttatgttgtggttggtttagggtttgcgcccgatctacttgtacttaagcttttgacatcgttgtgaattagactcaaagctaccacaagaaccttagtaaatcactcgatctaagttctcttagatagtttttgaattttatacatgaggtacctcgggtgcggtagtaccacatcaatacccaaaactgtcgtggcacggtgatcctcacgcaagcacgagagtatcgcgtctgattctaactgttatattaagtttgttttatatgtctattgaaccatggttcttaaggcggtaagacgaggcaaggcgttggaccaccgcctggacgcctaggcaacacctagccgcttactaaggagagcaaggggacaccttaccaattagagaaatagaagaacaacatagatgaggaagaaaaagcaccttaccaattagagaaatagaagaacaacatagatgaggaagaaaaaggaaaaggaagggctaggagatgtataagagatggcctatcccatcagctagcccatataaccttccctgctagtgattagggttaccccagtctcacgatgctgctcgccggcatctcagcgtcacctctcctgctcccccgagctctacgccgctgctcccccagctttgtgccgttgttgcccctgagctgtacgccaccgctcgccctgagctctgcattgtcggtcgccgctctctcgagctctgtgccgccactgtcccaagctctataccgtcgcctaggcttcttccccttcccctcttacctcgcttgctgattcttagctaggcggggacgcctagaacttttgggcgcctggacttaggtgtcacctaggcgacacctttgaaaccatgtattcaaaaccctatagacttgcatgatcctttttcactaccagaacccaagatttggcaaagtcgccacatccacttgctgctgtgcatgttgcatatcactaaaaaataagtgtggtaaatgctaaaataaatctagaaagaaaaaagtagaaaaatacgagtacttattgatacaacttatgaatattcacatattcgatatcgtttctaccgcgatgtgtcgatcttctgtaactatggtaatatgagaagtttgtgaatttaaataaatgaaataaaatgatacttaacacatgtttttatctttctacaatcaaatcttggacttccacaatgctcgtgaagaaccctctatcccttggaattattcctcgtttgtgccggattggtgggtcggaacgattcctaaccggattgcttctctaatttatataaactttaattagctgaaacgattccggatgcaatccgatagaaacgaacaaggcctaaagtgattgtgatgccttgttgctagcctagcggtcaaccattattgtcgcattgtaattatcagatgacaatgggtatgaatccattttgtattgtccatctatacctacaattgatgggataaatgggtatgaatccattttgcattgtccatctatacctacaattgatgggataaatcgtacccatcaaactttacctgatctaggtacaaactcagatacatacccatgctctgatgctcataagaggttgaattgctacgacagcttgtccaaaggcagcaacaagtaccacaacctcatgatgtgtacaaccaccaccagcctctggttgtgagctaccaggatttcgatttcttgagtacacaactgttcaacaagactgaagaatccactctgatgcttggatatgcatggagatgctttcagtagtttgtttggatgaaagcaaggccagatttggtgctcaacaactgcgatgattggctcgtctatgtggaacaactatcacgtcatactctcagcagatcacattttctcataggaagaatttaagataactttctggaaggactaacggagagggtttctaggactgacccaagacaactgcaccatactctagtatggtcaagctttcgaaatctatgccagtatgtaggatatcatggagacacggatgccaaaaaagagatcgttttcgtcggcctcaataccatgctcaaacaacgcctaaacccggtgaaagtagacatgtacaataaaattatgaacttggctatcacgcaagaagactgcatcatgcctcggagaagtgaaaggccccaattgcaccatcaaatgcccagaatcagaaattcaagctcgtctccaatgcactggccagagtttctcaagcatcacaacccgaatgttaggtaatacaaccaccgcagcaacagggtaacacccgttttaccgttccaccacccaagacacaaggcccaattttcagcagcagaatcgtcctggccaacataggaataggtgctttacttgaagtaaaggacactttcacttcagaattttgtttctttctttggtccaagttcgtttcaaggaattactctaaaacgtcaagatctcatatctattaaacaccatgatctcacatcagacgtcatgactcatctgtttttccttactttataggtagtttgatgtgaagttcaaagcattgctctttaattgaatcaaagaatctcttgaaacaaagagtaaggaaatttcaaattttattctaaaaatttgaatttattgcactttgttttcatatgattttataacctagacacgaactcacttgtaaccttatctacatagaagtagacatttaaattgtgtccaatgaatcttctatcgtagaaactaaatccaaggtatgttgtgacaagctaaaccgaggtatattagcttaggatctaatcccacccattgttcccaaaaggtggaggcaaatagtgctgatgccctgctaccatgtttttccttttcagcatagaagatacat

SEQ ID NO: 722 - DNA, 3294 bp, Zea mays
  Intron number 3 from transcript GRMZM2G156088_T01 (locus G RMZM2G156088) derived from phytozome v7.0 (chr-ID 10; pos 119470043 to 119473336)
tttggggctctccacggttttgataaagacgccaggtctggtcataatttcgactccaatgtctttaatttctttgttaaagtctaccctttcaacttgatatatttccatctgtccaatatatttgcttgctacatgccttttttttttcttgaacacatgttacggtgcctcaagctgtcaacgttatttggttgttgtacggtggtagcctgacccgtaactgaggggttaggatccttatgcatatagactagatctatacatatacttttgtttggctgtattattatattcagaacaaacataacttgtgtttggttatctacaccaaaacatgtattagagaagaataaataaagaaatttttaaatattatataacatgtgtggtctaattttattaaaaatccaagaatacgaatataaaatcggttcgatgattaatttttatttgaaagatataataaaaaacaaatgaaaatgcttctcgttttgagtgcaactacatgcaaccgcatgccactgtacctcacgcgggcgtacacgcggtaggagcatctcgcgttggcgtggctctccgtccatttttgcatgttcagcctgtacgttgaggagagaactaaacaatacttgcttttagtagggctggtaaatcgtaatccaaatgtttctttattaattgttagaggcttaagtaatttttagttaaaaaataaatagaaacagggtccgattttaatctggtcctattcttacattttatagtgtaaaatttagagttcattattacctctagctttgagactcggcgggtgcggctgcaggcccccgcacgtaaacatgtcctgacggtctgggcttgtcgggcggcctgaaacctgacacgggtttgggccggccagaatccggcataacacgtagtgtaccagctcatgccggcccggcccgatcaccgggccgtgtttaggccgaaggcgtggcatcccggcacgacccggttttattttttctattttttcatataaatacatatattatagttgaatatagagtataaaacacaagaaacatgtgtttttgttggttatgttggtgtaaataaatgtttagagctaacaaatatggtttcaaccctcatatatgcatacttttaggatatttttatcatttaaacgccatatgttattatgggcccgttagacccgtcgtgccatgaaccggcccgacacggttgttaacctagcgggtcgtgcctgggcctcgctcggagcccgtgggtcggcacgacccgctagctaattcgagtcgggccagcacggcccgcccatttggacatctatacaggcacatcaaccaaacaagtggaaaaatttttctataacttgtatgttggttccggttggattagatctgagtataaggaattaccaataattggaaaggctatatggtggatcaacatgcttgcattaaccctaaactagaaaattgtcgaggcgccgaccaatttattgtgcacaactatttattgaaataaatctacataactctctaacctttagaggatagtttgcttcacctcctcaccatcaaaactggttgtttaacccataaaaccagacgataatcccgtgagcttagtggttttgatgacgtaacactgatttaagtggtataagttttgtcttttttagttttgtcatcttatttatataattttacataaaaatatgtaactagatattatatttgtcctaatttttctaaaattttaaaaataacatattaattactaaatattgaaaactgcaaaaaaagagtttaatatttttgtttctcattaatttcttatattctaaggctacaaattttagtggagctacataatactattactaaactattagttttttgttaattttattaaacaagttaagtgatccttctaattactgactaaatcaattgtacatttgtttttaataaaaagttaccaaactataataaaatgatctccaatttttatatgaaccttttactagctaaactagcatacacaaatattttcataattttttgagaactttgaatctatacccataatttacataaatattttgcataattttatatgagtctagatttaaatttatcagaaaattataaaagtattcgtatatgttagtttagctaagaaaaaagatctgtgtaaaaattagagatcattttgttactatttgctaggtatttataaaaacatatgtaaaattaatctagttagtaattagaagaaaaggctacttaactttattaataaaattgacaaaaagtagtagtttattaatagtattatttagctctagtaaagaattagtctcagaagataaaaaatgaatcatggacaaaaatattaacctctttctatgtagttttgattttttaataattaattggttgccaatgttattaaaacgatgaaacattgaaacgctcataggtgaaactttgactttaaatgtctaaacaaagtttaaatgtagttttaaacaacaaagaaaaaaataacaatatagcattatttcagacaataacatgaatttaaataccaaaacagagaggttagtggcttaccaaaacttcaccaaaagcgagattggaccccaaaagtaactaacagactcagcccaaaaatagctattcgtataaaatgcatggaacactctattttacagtttaaaacgccaaaacactaaaacacggtttcaaccactaattagagctttgaggtttaaacataattttaataacacggtctgttgctccaaaaatttcagagaaattagggtgaatataatatctaattagcaatttttgtttaaaataatataaattttggacactagtagaacaaggaattgaaaaaaaacataagtggtgtcacttaaactatatcacaccatcaaaactggcaactaaaattgtctatggggttatttgtctcactttgtaaatttgaggtgttaaacaaccggttttgaaggcaagagagtgaagtagaccattcctaaggtcggaggatatgtagacttattccaatatttatttctgaatgtggaatttgcctatgatatttgtagaagggtgcacaagcatggcgcgtacacatatgatcccattcccatccacggaaatgattgttattgttttgtttgcttctggctattgggtaggtaattaatgtgacaatggtctttgtcgttgaattttgaatcgcaggagacaactccacata

SEQ ID NO: 723 - DNA, 12669 bp, Zea mays
  Intron number 1 from transcript GRMZM2G074489_T01 (locus G RMZM2G074489) derived from phytozome v7.0 (chr-ID 10; pos 65475896 to 65488564 reverse strand)
ctcgtaactaaaagaagcttgtctctgttattccttttgcgtctccggcgccggcaagcccggcttggcttgctgctccagtccagccgttgtgaggcgacgacctttaacgtgcctgctgttactgtgcgttcttgctgttaattttggaaagtagcttttttccctaaaacgatttaggatagcagctttcaaaatcgtggtggggcaatttatcagcgggttccgagcgaccggtgcgtccagtaaacggtgcaactttggatttggacggggatcaatggtaacctggtgtccggcgatcgatgagtcccgtggaagaggaagatgaagagggttagatagttgatgcaagtgggatttttgcccagatgggcaagatgcatgtctagaatttcctgcatatgatgtttgaaggatatttagtgtcgatcacccaggccaaggagtgctgaagttagttttgtattagttccagtcctaactttctgctacccagcagcggttctgaaatggaagctggaatatagcccttttagtgctatgcatagatatatgacacctcactgagtatcataatggtaagggcctttgcggatttcattaatttatgataggacaattggattgtgacgagtgccactgttggggacttgttctcaaatgctaagaattaagaacaaggcaacacaaaaaatgttaagtgttaaggtccttcgtcctccataacgatatatcccttcgggatataaagcatctcggacgaaggttacgaaggacataccttcgtaagcataacaacgaagaatgaagcattcacataaatcatagaatatgaaatagacatttaaatattgtcatagaattaactctacttgtactaatgaatataaatgactttgaattacaaatgtaccttcggtcctgcggaaggcaaaagtacaagcgtgatgcggaagcaaatgacaagttcacgtgaacagtacagaggtactgttcatctatttataggcacaggtcgcagcctgtgacaaattacaattatgccccttgcgaaagtttacagcattgactcagacctatatgtataaaaaggtcattctatctctatgtcggtttaaaacgccgaagctccatgaaaagggaccttcggccatctcttggagatgacttcagccgaagctgcttcttcgtgtgagaccttcggcgcaccgaagcacgaccccaacagtagcccctttcgcggtgctagatcgttcttcgtaacgagcttgacccgtgaaaaaagcctcttcagcttcgggaagccgaaggtccaaaaaacaccttccctgagctcgttgcggagaaacgatccgacttccgagcgtgtgtcggtcccaccttgcagagttactgtttgatccttgcggtccactgcgcagcgggtatgaattactgcgcgcctggtgtaacagttccaccgcttcgccttcctacctgcagcactatataaacagacaggtagttgtgaagttaccacagcattcattgctatttgcactgttttgctgccgaaattttctatcatagccgaagcttaagtcccaaaatcgaacgaaggtgcttctcaacgtccgcttcgtcagaaagaagagcttcggagaaaagaaaaaaaaggaaaaagtttttgacttcccaaacttagaatcaaatggcgagaatacgatctactgccaaagttgtacgtgagggagacgaagccgaaggttcagacactgtgcccatctccgaagcaatgcagcgttccggtctactgactacagaagaaatgcctactgctgaagcaggcccaacaactgccgaaggagaagaaaacattgaagggactgactccgaagatgactatcaccttgctacgcccagcaagcccagtcacctggattttgggaaatcaactgtttcaaaagctgacctttcgaagatggtgaaagcaggttatttcaatgaggaccagaagaagctactccgcttcggggaagaagaaaccaccccgaagccaaggaaggatgagattgttattttcaagagttttttaaaggctgggcttagattccctctccacggtattgttgcggagatactaaggaggtttggtatctactttcatcaattgactcctaacgccatcgttaggctcaatgtttatatctgggccctccgaagccaagctgtggaaccatttgctgacagcttctgccgagctcacgaattacattaccaaacaaaggccagaaaagatgggctacatgataatttcggttgctataattttgcttaccggaagacaacaaagtgtcctgtcatcagctaccgaagcaaatggccagcaggttggaaatctgagtggttctatgtaaaagtcgatgaagacaaagaaaaattggttcaaagccctctggagttaaccttcggagagacaaggccacaatgccacattggcgacctaaaaggtcccacctgggctgctctgggtgaatttgaaattatctcagaacatattggcaccagggatctagttcaagagttcttggcattcagagttttccctactctaaaagagtgggagatgccgaagctggagggagagaagaagaagggggagcttgtccggcttccctattacttcaagttcaagaagttcttcaaaaaaccctgcaaagaatggttagagactgttgaagtgatgtgcaacgaaatcctggggaactactccaaaaaagaggatcaactaatgacagcagccttcggtgcccgaccgaaacgaaggttgaaccgagtgcttgacgccctaggcttcgaatacccagactatgaacaattgaacaagggtgccgagggccttaaaagaaaaagaatagccgaaactccgatcacggatgaagaaagaccagcaaaggagaagaaaattctcaaaaaaggaaaaatatctgctccgaagcgcaaatcacccgaagaagaggggacccccacaccgccttctaccagcgacgtggaggaaattttaaaggtaatgactgaacccatgcctacgaagctaagtccattagggctccaactgacgaagctttttgaaaaggtggacgagccggatcaatcgaagataaacaaacccaaacggcaaagaattattgcggtaactgaggttatcgacaagacgccgccaagggcatcaatccaaaaaacggcagctgccgaaggtacagcaatcgtcgaaggcgtagcttcggaggtcgcggctaccgaagccgctacagccgaagatacaaacttagaaaccacgattaagaatatcaacaagattttggaagacatagctgcggaagaagctggtgctactactgaaaaaaccatggccacagtgcctgagaaaggaaaagaaatagccgaagacccttcggacgacgaagcctactctttccagaacttagttgggcaaaaactgacgaaggacgaaatagaagaacttaaagactacgccaagtcttgcggctacaagtcaggtgccctcctatttgggggtgtagatgatgaaaaactaggctgtattcgagaccagactggagctaaggtaatcggtactctatcaaagagtatcggttttccgaagctagagacagacatcagccgctaccgacgacaacatatcgtcggcagcttgttttattctaacttcaaggtaaacaacctttttctctggtttttattgccgttaacaatgaaaatattacttagcataagttgtttctgttcagagcatgctactgagcaaagctctgaagatgcaacaagacttggaggacaaaaagcacgaagctataattgaaaacttggaaagcaaaataaaagagcaatctgccatcattgaaaagaaaaacttcgagctccaatcgaccgaaggcttgctggctgaaactgaggctaaaatattagagttaaattcgaagcttatcaatcaatcaaaacaatttgatcaggagaagctagaactgaattcgaagcttaaagccgaagtccagaccagctcagaattgaagaaagcattaacaagccttcaagacaaatgcttgaactttggcaataattgtattggacgattaaagaagatattttactctgttggagccagcagtgggaaatttaacccttcggcggaaaatttaccccaggccttcgatcatattgaagctgaaatcgaagagcttgacgaagttatagccggacacggcgacttctgtgcctgggtagcttcccagggtaccgctgctgcatttctgaaagccggctgcgaacatggaaaggttgtcaacaggcccaatttcaccttatcttcatcaatcctggatgatatgcccgacctcgcccgaagtatctccaatagatttataaaaatggtatggacaaagggcggtcgagagaaagctggagacgaagcccgaagtcatcttaaaccagtaagaaataatacttcgtacttacctttttctttgcacttgatttttactcacgattccttgattcatgtaggatgacgaaggtgaaaatgatgcctaagttatgtcgccgaaactgtcgccgaagctgaagcttaatgaagatcagtagaaatgtactataggaaaaaactcaggatacttttgtaacaagttttgtaaatacaattgaactgttctcaaggaactttgtacataccttgtaatatattctttcccttcgattgagtcgctttgatgtggacgaaatcagtattttgagccgaaggcgaaaaaacaccttcccttcttttcgtacacaacgaagcctaaacggccgcttcctctttttgccaaagcttttcttcatatagcaaaacataaaaaactacttcttctttctgccgaagcttttacatagcaaaacataaaagactacttcctctttctgccgaagcttttacatagcaaaacataaaagactacttcctctttctgccgaagcttttacttttacacaacgattcataaaaaaccaattctcttttttgccgaagcaaccactttggtacataaatgctatgaatgaatgcttatgtatgcaaatgccatgatgtaatgtaatgtgcaaatgaatgtccgaagcgtatatccgaagccacactcatccatcattttcttaggagcaaaacacacgtcagctctgcattcccttaggaacgactttggagcatctttgccttttacttaggcagtatcagcgttgacttttcgctgtaagctctgcatccccctagggacgtctttggagcttcttcgtcttttacttagacggtataagctctgcattcccttaggaacgactttggagcttcttcgccttttactttcggcggaatcagcgttgacttttcgctgtgagctctgcatccccttagggacgtctttggagcttcttctcttttttagtttcggcactcgatggtgcgctctcagcttttacatttacattctttgggggattttgctcttataaaactaaaaaggaaattacataagatggccccattaaaaacctttctccccctttagaaaggaaaagggtgccatgaaaaagaaaagaaaagtcaaaattacatcgagttatacataaaaccgccgaagctcatccgcattccaagatcttggaatttcattgccatccatgtccttcagtctgtacgaaccaggccttgacgaagatgctactaagaaaggcccttcccatttcagttgcaatttgcccactgtatccggattggccactctccgaagcaccaagtgtcctggctcaatattttttagccggacctttctatctcgccatttaactgtttcagcctggtacttattgatattctccacggcctgaagcctgatcccttctaaagcatctttttccacgagacaagtatcttcgggacctgattctgccgaagctaccactcttattgatccagctttggcttcttccggggttattgcttcgtcaccaaataacaacttaaatggggtaaagcctgtagatcttgatgttgttgtgttatggctccataccactttggtaagctgatctggccactttccccttggttgattaaagattagcttcattattcctgtcattatgatgccgttggccctttcaacaagcccattcgactccgggtgcctgactgacgcaaagtggatcttcgtgccaattcgatcacaaaaatttctgaattcttcggagtcaaattgtgttccattatctacagttatggccttcggcactccgaagcgacagacaatattctgccagaaaaatttttggacagcggccgaagttattgtagctaatggcttcgcctcaatccacttggaaaaatattccacagcaactacaacatatttcagattgccttgagccggtggtaatgggcccagcaaatcgaggccccacctttgcaatggccagatgggttgtattagctgtgtcaaagacgaaggttgtttttgatctcttgcacatttctgacaaccttcgcacttttgaactaactcagctgcatccgaagctgccttcggccaataaaatccttgacggaacacttttccaagtaacggcctggatccgatgtgggatccacaaaggcctgcatgtatctccttcatcaactctataccttcggctctagacaagcacttgagcagcggggcacaaactccatgcttgtataactccccttctataatgatatacggacgagctcttgcctctattcttttattataagcttcgtcatctgataggaagttgccctgaaggtaagaaattatttcagttctccaatcttcactgtacacaggagaaatagtaagaactgctctttcaagtaactccactgaaggtgcctttattgtttcgaagaatacatccgaaggtagcggcagcccctgtgctgcagacctggctaacaaatcagcatgttcattttgccctcgagggatattcttaacagaaaatccttcgaaggaagcttcgatccttcggactgtgtctagatatttttcaagcttcgggtctttagccttgcaacttttgtcaatatgacccgaaacaatctgagaatcagttttaaggatcgccctcctgatccccatcgcctttagtttccgaagacccaggagcaaggcttcgtactcagcaatattatttgtgcagctgaagtccagtcttgctgcatagcaagttttaaccttggacggtgaaaccaaaacagcagctgctcctgctccgaaggttccccaggagccatcacaaaacactgtccatgcttcggcatctttattcgcttcttcgccctgagcccctggcgtccagtcggcaataaaatctgccaatgcttgagactggatcgaggatctgtgcacataatcaatgtaaaattcattaagctccgcagcccattttccaattcggccagtagcttctttatttctcatgatatctttcaacggctgcgaagaaggaacaataatattatatgcctgaaaataatgccgaagcttcctggatgccattaggacggcatacaacaccttctccagttctgtataatttttctttgagacactaaggacctcagatacaaaatatactgggacctgcttcttgatttgtccatcaaacttctcctgcacaagtgccgcacttactgctgagtgcgaagctgccacatacaacaacagaggagcccctggcattggtggagttaatgttgttagatctatcaggtattgcttgagttcttcgaaagctttttgctgagctgggccccattgaaagacttcagctgattttagcacctcgaagaagggtagatttctttccgctgatctggatataaatctgttaagagatgccagtcttcctgtcaatctttgggccccctttcttgtggttggtggctccattcgaagtatagcttcgattttatttggattagcttcaattccctttgttgaaaccaagcatccaaggaacttacccttctttactccgaagacacatttttctggattcagcttcagaccagcttttctgaaactggcgaaggtctcctgcagatcagcaatatggtcttcttgcttcgtgctttttacaataatgtcgtcaacataggtcaacacatttctgcctatctgagattggagaaccttcgcggtcatcctgctgaaactccctccagcattcttaagcccctcaggcatccgaagatagcaatatgtaccacttggggttatgaaactagtcttcggctcatcctcctttttcatccagatttgatgatagcctgagtaacaatccaggagactcatgagttccgaagaagctgctgcatcaactaaagagtctatccttggcagcgggaactcatccttcggacaagccttgttgagatctgtgaaatcaatacacattctccactttccattggccttcttcaccataacagtgttagctagccattctggatacttcacttctctgataactcctgcacttaggagtctttttacttcgttgcgagccccttcggccttgtcatcagacattttccgaagcctctgcttgcggggtctgaaggatgggtcaatattgagcgaatgttcaataacatcccgattcactccacaaagatcattggctgaccatgcaaaaacatctttattgttgaataaaaaccttatcaaggttttctcttgatcttcagataattgcgagcccaatagcaccttctgctctgctatatcctcacacagcagcatgggcttcggctgatcagccgaagctgctttttccctcctgaacttgtactgttcacaagcttcagctccatctatattatggattgccttggaatcagtccagcttccttcggcccttctggcagcttcctgactcccatgaatagcaataggcccttggtccgaaggtatcttcatgcagagataagctgggtgaagaattgcttcaaaagcatttagggtaccacgaccaatgatggcgttgtaggggtattccatgtcaacaatatcaaacacaatttgctcagtccttgtgttattaacaaatccgaaggttaccggcatggtaatcttcccgagtgccacaatctgccgccctccgaagccacaaagagggtgcgtagcatcatgaatcttgtcttcaggctcttgcatctgtctgaaggctttggcaaatataatgtcagctgcactgcctgtgtcaactaggacattgtgaaccagaaaccctttgatcacacaagaaatgaccatagcatcattgtggggatagtccttgagctgaagatcttcctgagagaaggtaattggaatgtgagaccattttgacttaatgaagggtccctgcactccaacatgctgcacccttctctgagcctccttcttctgctttttgttagctggctctgagcaagaaccgcctgttatcgggagcaccagcttcgaagccgaagcagctccagcttgagtgttgaacgaagccatcagctcagaaaggtggaagtgggttgaccggaggtgggcgccaatgttggggacttgttctcaaatgctaagaattaagaacaaggcaacacaaaaaatgttaagtgttaaggtccttcgtcctccataacgatatatcccttcgggatataaagcatctcggacgaaggttacgaaggacataccttcgtaagcataacaacgaagaatgaagcattcacataaatcatagaatatgaaatagacatttaaatattgtcatagaattaactctacttgtactaatgaatataaatgactttgaattacaaatgtaccttcggtcctgcggaaggcaaaagtacaagcgtgatgcggaagcaaatgacaagttcacgtgaacagtacagaggtactgttcatctatttataggcacaggtcgcagcctgtgacaaattacaattatgccccttgcgaaagtttacagcattgactcagacctatatgtataaaaaggtcattctatctctatgtcggtttaaaacgccgaagctccatgaaaagggaccttcggccatctcttggagatgacttcagccgaagctgcttcttcgtgtgagaccttcggcgcaccgaagcacgaccccaacagtcacgaaatgttagttaaggttatgatgaatgactaagtatgtagagattagggcatctatgtagtgatctccttgttaagtgttgcctacatatggaactagggaaatttccacaaggccatctgttttttgaccatgccagtccttttttctccagttatagattattgaatggaacttgtactccagtagtgtgctctctttttggcatattcctttggttatatcatggacctttaatggggtggattgcattagaagttcttactattctgaaacttgcagctcccattttccattttgtccaactattaccagacctaccttggacgatatcttcaatgatttgcctttcctgccaactccatctagctccttctccaaaactagtgatgcatgaccttattagtggctgaactactgcttggaggtcggagtagggggactggttggataggactgctaggtggaggtttaccactggtagatggtgatgaagatataatgatgaagattgcaattttgcagcatgaaagaagtgaagacttgttttgggtggtgggggtataacggtgaaaaaaaatcactttacaatgaggatggtagcagagtgagcccttgacagtgatatgtgatacaaagtggctagctagaggaacgatggcaaagaggtgaggctactttgccctcgaaggaggctctgaatggccgattcagttgcagcctagtgtcttttaggggaccttgccccttcttgttcgtatgactcttttcatcttaattgaaaggcagagctaccgccgtataaaaaggacggaccaagtgatggcggcttccactgagtgtggtctcgggaagaaataactgaggcaggctttacccctgcattttttggcagagaggtagagctcctggcattttaggccttttttggcagggcttctccccaacagcttcttgtgcggcttcgctattttttcataagccgtaccaaacgatgtttttacatatggttttaggtggaaagcacttttttgttttctattggataggtgaagccaaaaaagtggtttacccaactttggctcctgtagtttttgcaaaagacccttccaccaatcccatctcttctccacacatcaccgctgctgctcatgaggcaccaccgcgcgcgccgccttcttcccgactgccttggtaaggtccccgacgaccatggttccctccggcatgtcctgcatgacatcatgccctaatgctgttctagatgatgtggagtggctattcgcgtacaccggcgcgcgcgatagggctccgcgacaacgtgtgccacctagtacgacagcgacgacgcgcgccacttggtatggcagcgacgacgacgtgtgtgggtacgagacacttgtagacattgttggaatataatataagtgcattgcccacctcctctcatcagcttaagcttttgggttggattggttggtgcatccaacttaatatggtatcagaaccagaggtctcgagttcgaatactggttagggcaattaaaataaaataattgtagctcgctcctattccacgtctgagacacaagagagtcttgacgtgagggggagtgttggaatataatataagtgaattgcccacctcatctcatcaacttaagcttttggattggattggttggtgcatgcaatttaatagacatggtgccaacgatggcgcgcgtgggccttgtgagccttgtgctattcaagttcggcgaggcctatggtgactgctacaaggtccggtgccttcacaaaattgccaaataattttttgtaatggttttggcttctctagaaaagctgcttagactgagaagtcaatgtcaaagctatttttgaaaaaaccaaagtctagccaacgaggggcttacgttaaaaaaaatgctgattaagtggagattagggataactctttgcatgccttcactaaacatgcaatgctctttataatgagctggactcctaagtcctaacaaattgtgctaacctggaaacagaaaattaatcctccaactgaatagctaacaagccaaatgactaacaaaataaggaaggaaataaataatcagcctggttttggccatgccttgtgtttgtgatcttgtttcttcttcttgcgtgtgtattcccccacaaaagcatccacaacgtaggtggtgcaacattagcatttcaaatacgaataagaaagtcagtttcatcaagccgttttgcattgtaaacttcattgtatcgtaaatagtagcctcatgatgattttgattgaatatccttttcttttgttatgccaatgctttaacaagtgctagtgtttttaaatagatctaatgttgcaacttttttcttccatttctatatgtactgtaaagagtgcagc

SEQ ID NO: 724 - DNA, 9966 bp, Zea mays
  Intron number 4 from transcript GRMZM2G418004_T01 (locus G RMZM2G418004) derived from phytozome v7.0 (chr-ID 3; pos 2 02283843 to 202293808 reverse strand)
tccaggcactgcacaacagtgtcaatcccaatctggtagctatggtgacaattgcaagcacacattcttccaccttgattgatgctcaagtggtgttcgatgaaatgcagccaaggatgaacgtgaacacatgtgttgctcgtttgaatcctcaaggctcgtttcaatatggatctatcaatctgagccaggtttacaagctggggaatgaaccacatgttatcatcaatgggaagaaatggactacactgagtggtatctcttatttccgaccagctactcctcatagttcggcagctctgtacaacaagaagaatgtcttcacactcgacttccctactgttggggacttgttctcaaatgctatggattaagaacaaggcaacataaaatgttaaatattaatgcccttcgtccgccgaagcattatttccacaaggatttaatgaacctcggacgaaggtcacgggcataatgttacgaaggttttcaccttcgtaagtgaacttataaaaataatacaaagtaaagtaaagcatgaaatattaaagttaaatacattgaaaataaacgacatcattcacatatcttattaaacgaattttgaatatctgaacacaatgtttaggtacatttatacctttgccttgacaaacaataattcccgaatgatgcgttaacaattaccggagtgcgtgaacagtaaaggaatattgttcactatttataggcacaggacacagcctgtgaggaattacaatcatgcccctcataaaaatttaccacaatgactcagacttctatgggctaaaaggtcattctatctttaagtcggttcgacccttcatcttcggatatgttatagtaccgaagcttcatgaatgatgccttcggcgtcacgtacgagcagcttcagccgaagctgtttctttttgcaggaccttcggcgacgaagcatggtcccaacagtagccccttcgcggtgctagatcgttttttgtaacgagcttgatccgtcaaaaaagtctcttaggcttcaggaagtcgaaggtccaaaaaacaccttccctgagctcattgtcgagaaacgatacagctttcgagcgcgtagcggtcccaccatgcaggttcactactctggtttttgcggcccaccgttcagcgggtgcgagcaactgtttgcctggtgtaaaaattctgacgattcaccttcttacctgcaacactatataaacagacgggtaggtgtgaagttaccacagcattcattgctattgcactgttttgctgccaaaatttttaaccatagccgaagcttgactttcgcattcaaacgaagctccagtttggtgtttgcttcgtcagaagaagagcttcggaagaaaaggttattaatttccaagaaatttttcaagaaattcaaaattaaatggccagagtgcgctctactgctagagttgagcgcgagggagacgaagccgaaggtgcggaaaatattcctatctctgaagcaatgaagcgatctggattgataacatcggaagacacacctgctgctgaagcagaacaagcagatattgaggaggctgattctgacggtgattacaatatcgcagtaccgagcaagcctagtcatctggacttcggaaagtcgaccatttcgaaggctgatttcccaaagatggtgaagtcgggctactttagcgaagatgagaaaaagctgattcgctttggtggagaagagattaccccgaagcctcaaaaagatgaaatagtgattttcaagagtttcctcaaagctggtttgagatttcctttgaataggatgattgccgatgtgctaaagaagtttgggatctttttccatcaactaactcctaacgctattgttaggcttagtgtttatatttgggctctccgaagccagggggtggagccatttgccgaaggtttctgccgagtacacgagctacactaccaaactaaggccaggaaggatgggctacatgaaaattttggttgttacaattttgcatatcggaaaactacaaaatttcctgtgatcaactatcgaagcaagtggccggcaggctggaaatcggaatgattctacgtcaaagttgatgacgacaaggagaagcttgtacagagtccgcttgaactaatcttcggagaaacccgaccctagtgtaatatgacaccagaaggtccaacccaaacggcgttggctgaattcagaattattgcagagcacattggcgctagggatttggtgcaggaattgctggctttcaaaatatttccaactatgaaggaatgggctatgccgaagcttaaaggagagaagaaagaggggggcttgtccgactaccctatcattataaattcaagaaatattttaaggcaccctgccaagaatggctcgaaataatcgaaataatgagtactgaaattcttgggaattactctaaaaaagaggaccgattgatgacagcagccttcggcacccagccgaaacgaaggctaaacagagtgcttgatgctataggctttgaatatcctgattatgggcgattgggcggagatgctggaggcccgaagagaaaaagaattgccagcgccgttgacgaagaaagcaccaaagtggccaaaaagaaaaaggaaatttctgaaaagctgagccctgagccgaaggtggctactgcaagaaaaaggaaaactgcatctccagaaccgaaaacattggttcgagaagaagaaactcatgcgacaccttctgctgccgaagtagaagagattctgaaggtaatgactgaacccttgcctatcaagctaagtccgctggcgccggaactgacgaagttttttcagaaggacaaagaagcttcggcagcagaaagccctgcactgccgaaaaaaagaagaattattcaaatagcagatgtgattcatcagacgccgccaccggcgacagtgtcaaaaattgtttttgccgagactgctgaagccgaaggtgccacagccgaagctaccagagtggaaaccaccgaagttgaaaccggcgaagccgaagctaccggggccgaagccgagactacggaaggttcaaatctggaaaccactcttgaagtcattgacaacaaactcctgaaaatggctgaagaagaagctgctgtggccgcggtaaacacggcaactgaaaaaggaaaagaacagatcgacgacattttagaagaagaaaattttaacttttaagatttgcttggacaagagctaacaagcgccgaaaaagaagagttgaaaaaatatgccatatcttgcgggtataagccaggggctacgctgtttggtggggtcaacgaagggaagctaagatgccttcggaaccgcaccgaggccaaagttgttagaaccctctccaaaagtgttggcctgccgaaactagaagcggacctctgcaggtaccagcgacaccatatcgccagaagcctgctatatgctaattttaaggtaacaaattttattatatttatttattttttttgtttttaggtcgttttctgacgaagattgttttggcagagtatactattaagtaaggttctaaaaatgcaacaagatctcgaagaggagaagatcaaaactatcatcaaagatttggaagaaaaagttgaaaattacgaaactgtcttgaaaaagaaggacttcaccatccaggactttgagatcatgtccaaagaacacgaaggtgcattagaaaagaaagactttgttattcagtctatggaaggctctttggctgaggtccaagccgagaatgacagtttaaagaatgaattgctcaaacaatcagaaaaatctgagcaggaaaagaaacaccttgaaacaagtcttaaaactgagatggagaagaattcaaatttgcaaaaatccttgaaggaacttcaagagaaatgcctaagcttcggtagccgatgcgtgcagcggctgaaggatgtgtttcattctatcggagccagctctgaaatatttacaccttcagctgaaaacctgcccagcacattagaatatattgaaggtgaggttgatgctcttgacgaagttattggtggccatgccgacttctgcgccctggtagcttctcggggcacagctaccgcttttctgaaggctggctgcacgcatggaaaaattgtgaatagaccaaacttcagcttatcatcatcagatctgatggatattccaagcctagcccgaagcatcggaaatagatttatgacccagatttgggtaaatggcgggcggaaaatagcgggtgacgaagctcgaagtcatcttgagccggtaagaaacttatatttattacttttacattctccttgaaatttgcacctttcttattatgttctttaatatacgtaggatgacgaagctgaagtatgacaaagctgaagtagacaaagctgaagtatgacgacctgaagcttgatagttgctacaatattctttcctgcaaaaattctggagagacttttgtaatatcattatggaaaaactcatgtaaatttgtgcataccttgtaatatattttgtttccgctatctgtgtacaatctgctttgctgtggacgaaacttcttttttgagccgaaggcgaaaaacaccttcccttcttttcgtacacgacgaagcataaatttttttccttcttcgaagtctttcctccttgctgaagcacctatcttttttgtgtggtatgatgatgattctatatatgtctaaatgaatgtttatgaatgcaaatgacatgatgaaatgtattgtgcagatgaatattgggacacatgttcaaaaaccataatcatagcccttcatccccatgggaatgattcaaatctttttacttttcagctttatttttgtgtatcagcgttgacttttcgctgtaagcctcccttaggagcttcttcgccttttactttcagcggaatcagcgttgacttttcgttgtaagctctgcattcccttaggaacgacttttgagcttctccctgttttcttttcttttcccttggcatttacatttacatttttttgggggatatcacttttatataattgaaataaggaaaagaaaaattacatgttgtggccccattaaaaacctttctccccctttggaaaggaaaagagtgccacaaaaaagaatagaaaaaattacatcaaactaaacataatatcgccgaagctcatccgcattccatgatctaggaatgtcgttgtcgtccatatcctttaatctataggaaccaggtcttgacgaagatactaccaaaaaaggtccttcccacttcagctgtaatttgcctactgtctcagggttgactactcttcaaagcaccagatgtcccggttcaatgttcttcagcttaaccttcctgtcacgccactttatcgttttggcttgatatttattgatgttttccacggcttggagtctgatcccttctatagcatctttttccacagagcaatcagcttcgtcttcaccttctgctgaagctaccgttcttattgatcctgctttggcctcttctggggttattgcttcatccccaaacaatagtctgaatggcgtaaagcctgttggtcttgacatggttgtgttatggctccacaccactttgattaactcgtctggccactttcccctgggctaattgaagattgacttcattattcctgtcattatgatcccgttagctctttcgacaagtccgtttgactccggatgtcgaactgatgcaaaatggatcttcgtgccaatttgatcacaaaattctctgaaagcttcagaatcaaaccgtgtcccattatccacagtaatggccttcggcactccaaagcgacaaacaatattttgctagtaaaacttttgaatagtaaccgaagttattgtggttagaggctttgcctcaatccacttagaaaaatattccactgccactacaacatatcttaagtttccctgtgctggtggtaatggacctaacaaatcaaggccccacctttgcaacggccaagtgggttgtattaattgagttaaagatgaaggttgtttttgatctcttgcacatttctgacaaccttcgcacttttggactaaattcgctgcatccgaagctgcattcggctaataaaatccttgacgaaaaactttctcgagcaaaggcctagatccaatatgagatccacacaggcctgcgtgtatttccttcatcaattctataccttcggatctggataaacacttgagcaacggggaacagaccccacgcttgtatagctccccttctattatgacatatggtctagctcttgcttctatcctcctgttataagcttcgtcgtctgaaagaaaattaccctgaaggaaagagataattttagttctccaatcttcactatagacagggggatatgttgaggaccgctcttttaagaagctcaaccgaaggtgcttttattgtttcgaaaaatacttccgaaggtaaaggcagcccctgtgctgctgacttggcaaatagatcagcatattcattttctccacgaggaatatttttaacagagaatccttcaaaggaagcctcaatccttcggactctatctagatatttttcaagcttcggatctcttgctttatagctcttgtcaatatgaccagaaataacttgggaatcagttttaagaatggcccttctgatccccattgcctttaacttccgaagacccaaaagcagagcttcgtattcagcaatattgtttgtacaactaaaatcaagtcttgccgcataacaagttttaactttagaaggtgaaaccaacacagcaactgctcctgctccgaaggttccccaagacccatcgcaaaacactgtccatgcttcggcatctttattcgtttcttcctcctgagcccctggcgtccagtcagcaatgaagtccgccaacgcttgggactgaatcgaagatctatggacataatcaatacagaattcattgagctctgcagcccattttccaatccttccagtagcttctcgatttctcataatatcattcaacggttgtgaagaaggaacaattatattgtaagcttgaaaataataccgaagcttcctggaggccatcaaaacagcatacagtactttctccaattctgtataatttttctttgataaactaagaacttcggatacaaaatatattgggccctgcttcttgacttggccttcaagcttctcctggacaagtgttgcacttaccgctgagtgcgaagctgccatatataataacaaaggagcccctggcattggtggagttagtgttgttagatctatcaaatattgcttcagttcttcgaaggctctttgctggactggtccccattgaaaaacttctgctgacttcagcacttcgaaaaatggtaaatttctctctgctgatctagatatgaatctgttgagagatgccagccttcctgtcaatctttgagcccccttctttgtacttggtggttccattcgaagtatagcttcgattttgcttggattagcctcaattccctttgttgaaactaggcaaccaagaaatttccccttcttcactccgaagacacttttttccggattcagctttaacccagcctgtctaaaattagcgaaggtctcctgtagatcagcaatgtgattatcttgcttcgtgctttttacaatgatatcatcaacataagttagcacattcctgcctatctgagaatggagaaccttcgctgtcattctgctgaagcttcctccagcattcttaagcccctcaggcatccgaaggtaacaatatgttccactaggggttatgaagctggttttcggttcatcctccttcttcatccagatttggtgatagcctgaatagcaatccagcagactcataagctctgatgaagctgctgcatcaactaaggaatctatccttggcaatggaaactcgtccttcggacaggccttattgagatcagtaaaatcgatacacattctccatttaccattggccttcttcaccataatagtgttagccaaccattctgggtattttacctctctgataactccggcactgaggagtcttttcacttcattccgagcaccttcggccttgtcatcagacatcttccgaagcctctgctttctgggtctgaaggatggatcaacattgagcgagtgctcaataacatccctgttaactcgcaaagatcgttagctgaccaagcaaaaacatctttattgttgaacaaaaaccttatcaaggttttctcctgttcttcagatagttgagatcccaataacaccttctgctctactatgtcctcacataagagcatgggcttcggctgatcagccgaagcagctttttcccttctgaacttgtattgctcacaagcttcagctccatctatattatggattgcttttgagtctgtccaatttccttcggcccttctggcagcttcctgacttccatgaatagcaatgggcccttggtccgaaggtatcttcatgcagagataagctggatgaagaattgcttcgaaggcattgagagtgccacgaccaatgattgcattgtaagggtattccatgtcaacaatatcaaacacaacttgttcagtccttgtgttgttgataaatctgaaggtcactggcattgtgattttgccgagtgctacaatctgccttcctccgaagccacaaaggggatgtgtggcgtcatgaattttgtcttcgggctcttgcatatgtctgaaggccttagcaaatatgatatcagctgcgctgcctgtatcaaccaaaacattatggaccaggaatcctttgatcacacaagagataaccatagcatcgttgtgtgggtaatccttgagttgaagatcctcttgggagaaggtaattggaatgtgagaccatcttgacttgatgaaggggtcactgcaccccgacatgttgtacccttctctatgcctccttcttctgcttcttgttggctggctctgagcatgaaccgcctgttatcgggaataccagcttcggagccgaagcagctccaagcttgaatgttgagcgaagccatcagctcaaaaaagtggaagtgagttcaccggaggtgggcgccaatgttggggacttgttctcaaatgctatggattaagaacaaggcaacataaaatgttaaatattaatgcccttcgtccgccgaagcattatttccacaaggatttaatgaaccttggacgaaggtcacgggcataatgttacgaaggttttcaccttcgtaagtgaacttataaaaataatacaaagtaaagtaaagcatgaaatattaaagttaaatacattgaaaataaacgacatcattcacatatcttattaaacgaattttgaatatctgaacacaatgtttaggtacatttatacctttgccttgacaaacaataattctcgaatgatgcgttaacaattaccggagtgcgtgaacagtaaaggaatactgttcactatttataaacacaggacacaacctgtgagaaattacaatcatgcccctcataaaaatttaccacaatgactcagacttctatgggctaaaaggtcattctatctttaagtcggttcgacccttcatcttcggatatgttatagtaccgaagcttcatgaatgatgccttcggcgtcacgtacgagcagcttcagccgaagctgtttctttttgcaggaccttcggcgacgaagcatggtcccaacacctacaatgccaattgatgggccagtgatcagagcatctgtcattaactccacatacaagaactctctagaaattgtatttcagaacaatgacacatctgtccagacctacc

SEQ ID NO: 725 - DNA, 2230 bp, Zea mays
  Intron number 1 from transcript GRMZM2G104999_T03 (locus G RMZM2G104999) derived from phytozome v7.0 (chr-ID 2; pos 1 65380211 to 165382440)
aagatcatcattgacacggatcccggcatcggtgcgcacccctctcctctctcttttctcgctactacgcaacactccttcagattcagattgtgctaggtcgacggctcgacgcttggttccttcgcgcttccttatttgattttttttactttgatgatgacccttggacacttggaccagttctggtttgtgtggattctcacctctgctgccactcggaaattgctaacggagcattcgagatgggttgcaaaagttcttcaccgctcctttcccactgaattacttagggcatgttcgtttaatgtggaacggtttaattagaactgtttcagctagccttcagctagaatagttataagcttatttgtactaatattgattagctggaatcgttcttggcctcaatccggacctcaattatctgcataggatcatatttgtaaagttgtctaccaggttgaaaatgacgcacgcgcccagcgtgcgcaccaaacttgccttctcgcatcgcataccgccataccggaacgcgaagccaggcaggtccactggcagtaccgtgaggtccacgtgggatgaaggcagagacgggcaaaactgatactcctatttcattgttcctctctttgcttcaaagctagaaatgaatattttatttggcgtggcgtggtgtctaccctaccagcgaatttgataagaaataaaatgtccttgaataaatcatctcactgttttccgcgttcaccagcaaatccaaaccattttcagtgtccggtagccatctttgtcacttttttatgtccgcattgcacatacacgcagcactttccgcggggccaaaagagtcttcttctttttccttttcgaatacatagtaatggagcatccccactgtagtctttgcaggaccaaaagctcctcctcttttttctctctctctcttctttgaatacataataatagagggacaaaagatgtcactctttcttaaaagaggtctccaagcgcatttgaaactttggcgatatcgccatggagaatttgtggagctggacactgacatgcgaccacccttacatatttcactcaccttatattatcctgcagtcatcatgaagaacttgcgtgccacggtgcctggacactgaacagtgaccagcatcaggggattcagcgatggggtggaaaggactcagccacctctatcgctcccgatccgagtctcactagagtcttctataaaattgtaaatgtacacaatataatgtagaaagtgcttatatactgcaacagtttagttcagttccctaaactttttttggctcgaccagcgtcgcatattttcacctcagattcctgaccagcgtcgcatattcacctcagattaacccgcaaacgctcaaacttttgtgatgccatcatggagaaatttgctgttaacatattcatgcttcgattccagatgacagcgtggccatcctgatggcattccagatgccgggcgtccaggtcctagggctcaccaccatcttcggaaactgcaccacagagcatgccacacgcaacgccttgatcctggttagatattcatggcaaatgctacctccatttccacttcgtttctttatcattcacttacactagcgattctacttcatctgcaatgctaacagtgcgagaaggcaagccatctagaggtcccagtagctgagggcagccatgagcctctcaaggtatttatttgctcatactaccaactttccagattgctgctacgtgtttagaaacggttgttggagcagagaaaattttgccctagcttcaggtggtgcttttgtagttctactctgttttttttattactcccaacaactagttcaaatgcatattcaaagaatcaatgaaactagaaaaatctacattattaaaatgtgttcagttgagtttacatttgaaccataattttttcatcaaaaaaagtgatagttcaaccaggaagtcaggaaccaggtggaagtctaaatatcgtatcacacaagatggcattggctgctgtctgtatcatttgacgccaagtccatatgtatatatatccatttaaagtggcatttgatgcatcatctgctgagttgggtaatccattcacttcagctatgtggcatcgaatgtttcacatctttatgttgtgagcagggaggaaagccgcacgttgctgacttcgttc

SEQ ID NO: 726 - DNA, 24450 bp, Zea mays
  Intron number 10 from transcript GRMZM2G382415_T01 (locus GRMZM2G382415) derived from phytozome v7.0 (chr-ID 1; pos 17035616 to 17060065 reverse strand)
ttttgtttcaggatattaactctagaggaggtaaagcatcccagtcagttatcaaaactactcttatgtcttgttataaaatttaaaatccttattagaagcatcattcgttgcaaatcttatatatatatatataattttatttgtttcggtttagttatgtattgattgttgccaaacactttgtgagatattgaggttgatgatatgtgttgttcgttttgatataataattttgcattaatattatattgaataaaatttgtgtgcgggtaatctgaattcattgtgtttgggctttcttttagatattttatttattgcatttctggaactaaattgtgtacgacaaactgtatatattaataaaaggacaaaaaatgtaaactgtaggaatcatcattttaactgtgtcagtgttttgggtccgaccgcacacctggggttacccctcaaggtgtttttaggagtaggacggtgtcaacgactgtagcaaaatggttcgtgccgattgcacgagggacagtggacaagatttgcaggttcgggccgcttagagatgcgtaacaccctacgtcctgatgagtatttgagtgtggttacaagagggctctctggatcggaggcacagagagtttacgtgggtggctaagtaaagtagggtcgatcgttctgaaggggtgccccctaggccttatatactcgaccgtggggcagcacacgtggatatgataacaacaagtagctgaaagatagtaaacctcttgagtttatccctacgtaacccttgccgacttatcctcgcatggctctgttgcatgggggcttcagcgcgggaaagtcgggtctctgttgcgatttactcgcccgacgttgtgggccgtccgggtttgctccaatccagtcttacgtcttctctgcttcgttgattgtctctccccaggcccacgaaagaacgaccttacgatttattgggcccttgggcctttcgtgaggtcttttatctctttagtggacccgggggatatctatcccccacaagcccccgatctttgggttgatttagaggtaatcaactcaaagatccaaggtccaagaaatggcttcctgctgtcttctcttgctccgatcactcgttcgaccgaagtttagttttgtgcttgtgccttagaggtcggcattttgaattgtagaattctggacttcattgggtgcaccggaggtgcacccaatgggtgtagcccccgacctttgagtagattttagaagataatctactcgaaggtcttccccagaaattatctctatgcgcgctcctgtaccttggttgaggattggtcttttcaatcttgtcccatgccttagaagtcggcactatatcggtttagagtgataatccatggggtgcaccggaggtgcacccaatgggtgtagcccccgaccttcaaatagattttttaaggataatccattcgaaggtctttcttttgcttgtaaaaattgtcatgaagctattcgcattatgctttggaggtcagcattatgtcatcaaaattttgctgcagaggtcagcatatattttgtctttagcagccgagtttgcaatccgtccatatcttgctaggtaatgcaatttatttgcttctgcgacttgattggacgtttgatggacgttctctgtctagtcctcacatcacttctgtcggtcatatcttgtactttgctggctatatttggctttcctctgatccttactgatatctcatttttgtcttgaggtatttactgcgtgctctgcacggatgtgaccgttttgaaaaatatactgataattcctgggcgtccaccccaatgggtgtgggcaagggacggcttggtacgctgagtgttttagccggctgcttctgagtagtaatgtgatgggacggccagtgtaatcatatcctttgcgctgttgactggagtcccaatgggtgtagtgttgcatgaaacggcgtctgccgtctgacgtgtcttcagatgggtgggagtgcttattgaatgctttgcgactgttcagtgaccgcggttggaagtgagcggttgcctttcctttctataaataacgcccttgctcctctggttttttcacatcctttgctgttctctgtttcttccctttcttctatcccgtctgcttccaccatgggcaagaacaacaagcgcaagcgtgagccgactcctccatcggaggagtttggtgactcggaatactcagaggaggagttctcctctgagtccgaggggtctccggctcccatccccctgcgtgagtcgtctgatgactcagacgactcccaggggcttgcgacggaggtctggacgtacatccgggccgtcgagcgctccgggctcgagggctcggatgagtctgagttctcctcggacgaggaggactcggacggcggcgaggacgaagatgacgacgacgacgacggcgacgacgacgacggtggcgacggcgacagtgacggcagcaacggcggcggaggcagcggcggcaagggcgacaccaggggcggcagcagcacgggcagcaccagaggcggcagcagcaagggcagcaccaagggcggcggcggcaagggcagcggcagcaaggccagtggctaaatgccactggtctttagatattagtatagtgtagtttagaataatgtagtagtaatgtagagtagtatagtgtagtttagtagtagtagtaatgtagagtagtatagtgtagtttagtagtagtagtaatgtagagtagaagtagggaagcacaaactcgcgaagagttggcttgtaaacttattaacttccccttaatgaagaactgtcgttggccccttatcgatgactcgctttctctgtttgttgaactgattcttttgattagtagatgaataacttgcgcatcgcattgacgcttccagaagtaaccgccgagtaatattatagtcggtatcggcgttttagaagcaacgccgagcgattgaaggttgacatcagtgtttttagaagcaacaccgagcaatcagacacgaaaccaacgttctagaggcaatgccgagtcagtgaagatcgacatcggcattttagaagtaatgccgagcgatagaacacaagatcagcgtcttggaggcaacgccgagtggttgaaggtcgacgccggcattttagaagtaatgtcaagcgatttgaacacgaggtcggcgttttagaggcaacgccgagtgattgaaggtcggcgtcggcattttagaggtaatgccgagcagtagaatacaagttcgtcgttttggaggcaacgccgagtgacttgaaggtcgtcgttggcattttagaagtaatgccaagcgatttgaacacgaggtcggcgttttagaggcaacgccgagtgattgaaggtcggcgtcggcattttagaggtaatgccgagcaatagaatacaagttcgtcgttttggaggcaacgccgagtgacttgaaggtcgacgtcggcattttagaagtaatgccaagcgatttgaacacgaggtcggcgttttagaggcaacgccgagtgattgaaggtcggcgtcggcattttagaggtaatgccgagcaatagaatacaagttcgtcgttttggaggcaacgccgagtgatttgaaggtcggcgtcggcattttagaagtaatgccgagcgattgaacgcgagttcagcgttttagaggcaacgccgagtgattgaaggccggcgtcggcattttagaagtaatgccgagcgattgaacgcgaggtcagcgttttagagacaacgccgagtgatagccagccgcacgagttattttgaggataataaccgagtgatgaagtggcacgtcggcttttttttggaaataactgtcggatgtccacgtggcatgctgggatttcggaaataaccgccgggtgatgactgggcactttttgaaagggtatctggctcaagaatatcccataagagttgcgcttttagccgcctttgctttccgtgccctagttcttgcattctcgcatctgaatcctctctgccactcgcctcctactctgttcgccagtgagaagcaagatggcgcccaagaggaaaactgcgaactcgtctgctgcggtgatccccgcaatcgaccccaacagtcagttacccttcgcaggtaaccacatgtctgttatttccgaagctgagcttctccgcctcgtctccatcggggttcttcctccgcgggaactctgttcttggcggatttgccacgggactactgtcccaaccgaagatacccacgagtcagtagtttatgctccctttcttctccgcggcttcggccttcccatctctccttttttccgtggccttcttgacttctatcatatcaacttgacccatttgaaccctaattccattctccaaatctccattttcgttcatctatgcgaagcctacctcggtgtgctgccgcatttcggtttatggaagtatctgtatcattgtcgccctgggatggccggggggcaacaccagctggtcggaggtgccagtttggagatgcgccgtgggcggaagaccgagtatcttgagattcccctcaaagatagcattaaagggtggcgtctcgagtggtttatagttgataattatggaaattctctcccctcccggtcaggaagacagccagacgttcgcactccgagttggactgagtctcccacagatcaggaggtggccgaggcaggcgtgctgcttactgaagtcggattactgaaagaaagaggtctgactgccgaagctgtagtcactgattttgttttcaagaacattcagccactgaaagacagggcctatccggcatatctgtatcgagggttggccgactcaactcgggttaccaataggagaattccttctgttgacttggtaagccgacttgaaatgatcctcaggggtaaagtttcaaatgttggtgctccagtggcatactcggcttggaacctacctcctcccaaagctttcaccctttttgtgtcgaatccacctgtgactgacagcaatttgggccttagagtgcgaccctctgctgaagaagtcagtactttggtcgcttcgctcgggacaatccctgatgatgaacggcaggtttattttgaagtgcctctgaaccctagtgatgccgacataaatgatatgcttgatctgttagctgaggattcatccgatgctgctcctgatggtacgttggcagtggtgccccttccagaggttgatacaactttggatgtcccgaaacctatcagcactcgcccgaggcgccctagccgaaccagtcagcccgagccttctgctgatgagcaaaagaaaaagagaagacgcctccggcgagtatccagttttgatgaggacgccggtaccttagctcctgctgctgaagaagtgcctgcaactggtcttactgacactgatcccaatgggtgtgcccaaactgttgctgatcccaatgggtgtgctgcttgcgttgccgctgtggaggatgaagaggaagaagatgaagctcccttaactcggaaaaacagtcggcagttcatcgccagcggtggaagtagtggagttccttctcctgctttgtctggccttattggtctgcaagaactgtccatggccaactttgatcaaactctagaggatatggtcccagaggatttgctatcagagcctgtggatgttgatgcaacagagacttgtgctgccgtgcccgatgctgggttgaggtcatcccgtgcctcgtcgaccttagagcatgatctcgagggtcgggatgctgacttggattgtcctggtcccatggaagtagctgaaggcccgtcaaccttagaggtggttacggcagagagcttggaccccttgaatagtgctgacacgcgcccagcccccgaggatgtcgccggggaagacttagctcgggtgaagagtataagccactgcccagcccccgagggtgttgccggggatgatccggctcaagtgggcagtgccaactgtgacccagcccccgagggtgtccgagcaaggtctccttcctgcacttccatggatgttcatgcgggttcacctccacactctggcggtataatggtggcccaaactctggatcagggggtcgctttagagggcagcatccccactggtctggcgttaggctctgttgaatgtaccgagctcgttcctgctggtccgctgcaagctgcttcgggtggtggtctggcacctggttatcagctgatttctcctgacttagggatcccttcgttcttttccaacctccaggtactgtgctttactttagcttgttctttacgttgcatgaatttttgtcattatgctcatccgctcttctcatcaggctttggtggatgggatggccagccagctgaaatcgcagggtgcttccatcccagaagttgcttcatctcttgagcgttggaatccggcgtcgcttcatcgtcgtgtatccgagttggaggcgactaatgcgggttggtgcccttcctcttcttccttgcctttattcgtggattgttttaccttctgacctcatttcgtttgattacctcttgataggaatgactcggcagattgcagttcttgaggaaaaacattcccgagatcaagctgaaatggctcaacggtgtgctgacttcgaggagaagtattctcagagccagactgaactgaatcaggtctccgctgctttggatgacgccaacgctctgagttcttctcttcatgctcggcttgactctgaaaaggtaacttacaaaaccgtgctttgccttattacatgcttggattctgaatgagttgatttttgtttgtaggaagaaaaacgtatccttgctgcctctcgcgacaatctggacagattgtatcgagactctagcaactcgctaaccatcttggagaggagccaccgttttacgatggaagaactggacaatcagcgttgcaggctgcaagagtctacagatgaagtgacccgcctcacgcaattgatatcagcaaaggatgccaccatcaagggactccgagcttctaagaaatccattgctcaggagttagaaactgctcagctggccgctaaagttgccgaggaaactgctgttactctcaaagctcagcgtgataaagccctggacaaggctattcgggcaggacgaatcttgatgagaagacccggcgtggttgtccctgaagacataagagccgatgtgaatgctgctcccgattcttcgaatcgcccttcttcgtcagtcgtccctgagaaagacattggaaaatagagaacattttgcgtgctatgagcgcgcggttagcatgatcaagtactcgttaggggttatcagcttattattcgaatgatatgatcacttctcttattgtatcagaatttatttattaattcgcaagtttgtggtaacgctacatgatgattatgaagtttgttttcgggatatggaagtcatcccctgaattgcataagcgtgagtatgttgcactggcttaagtcgttgccaacttaagtcgattgctccgttggtagggcatagtggtcaccccaaattaagtaagcgtgagcatgttgcatcgccttaagtcgttgccgacttaagtcgattgctccgttggtagggcatagtggtcaccccaaattaagtaagcgtgagcatgttgcaccgccttaagtcgttgccgacttaagtcgattgctccgtttgtagggcatagtggtcaccccaaattaagtaagcgtgagcatgttgcaccgccttaagtcgttgccgacttaagtcgattgctccgttggtagggcatagtggtcaccccaaattaagtaagcgtgagcatgttgcaccgccttaagtcgttgccgacttaagtcgattgctccgtttgtagggcatagtggtcaccccaaattaagtaagcgtgagcatgttgcaccggcttaagtcgttgccgacttaagtcgattgctccgttggtagggcatagtggtcaccccaaattaaggaagcgtgagcatgttgcaccgccttaagtcgttgccgacttaagtcgattgctccgtttgtagggcatagtggtcaccccaaattaagtaagcgtgagcatgttgcaccgccttaagtcgttgccgacttaagtcgattgctccgtttgtagggcatagtggtcaccccgagttaagtaagaatgcaagtcaatcgtaaacgagccgagtatctttggaatctttctttattgatgacgtatttccattttacagaatacatggtcgccccagctgttttgaaatacagctaagggtaaaattttctgaggtgctctatgttccaggagttcccaacttctgtgccatccatctgggtgaggcgatacgatccgggccgagtgacctctcctactatgaaaggcccttcccataagggtgataacttgtgctgtccctcccccgttagaattcggcggaggacgaggtctcctatcgaaaagaaacgttgccgcacagctttgtcgtgatagcgccttagagtctgctggtaccgtgctgattggattactgcattcagtcgttcttcctcaagtacgtcaatatcctccagcctggtggcctcagcttctgctatgctttcgaagatcaatcttggcgccccaaacttgaggtcagcaggtagcactgcctccgacccatagaccatgaagaaaggagtgtttccatgcagggctcggctaggttgggttctcaggctccaaacgacataaggcagttctcttatccattttcctgcgaatttttcattcttatcgaagaccctttttctgagtgcctccaatatcattccgttggctcgctcaacctgcccgttggctcttggatgtgctacagatgcgtatttgatctgaatgctcttttgctcacagaagtcaaagaattctgaactggtgaagttggatcccaagtcagtgatgatactgtttggtatcccgaatctgaacattatgctttgtatgaattccacggctttagcagaggttaaagaagcaatgggctggaactctatccatttagtgaatttgtcgatcgccaccaatacatgggtatatcctccttgagctttcttgaaaggtccaatcatatccagtccccagcatgcgaaaggccaagttactggtatggtctgtagctgctgtgctggcatgtgctgttgctttgacaggtattggcaagcttcgcatctctgaactaactcagctgcatcgttcttcgccgtcggccaatagaatcctgacctgaaaaccttcccgactagtgttctggatgctgcatgtactccacattgccctgcatggacttcctccagaagttgcttcccggtggacgggagaacgcacttcataaggacgcctgacgcgcccctcctgtataatacctccccaatgagtgtatagtgagccgattgtctggcaatacgctctgccgagttcttgtcatctggttcttcttcattctttatatatttaataatcggctgtctccagtcatcagagtctgactcgggttgatctatgatgttgcactcttctgtttgatccattgagatactcggctgcagaatttcttgtacgaagactccgggtgggacctgagttcgaccggatccgagcttggacagtacatcggctgccgtgttccgatctctttctatatgatgaaactccagaccctcgaatttatcttccagctttcggacggcagcgcagtattttcccattgaatcacttgaacaatcccattctttgtttatttggctgatgactaccagagaatctccatataccatcaatcttttgacgcccagtgatatggcgatgtttaatccgtgtatcaaggcttcatattcggctgcattgttagaggccgggaatagcaactggagagcgtacttgaggtgctcgcctccaggtgcggtgaagaaaatccctgctcctgctccctgcagcttcagcgagccatcgaaatacattcgccatacttctgcggtttctggattgtctggtacttgttgttctgtccattccgatacgaaatcaaccagtgcttgagttttgatggcggtgcgaggtcggaactcgatatcgtgggatcccaactcgcaagccccacttggctattcggccaatggcttccttgttgtgaagaatatcccctattggaaaaccagtaactactatgactttgtggtcgtcaaagtagtgacgcagcttgcgggcagttagaagtactgcatataatagcttctgaacctgagggtactttttcttcgaggggcctagaacttcactgatgaagtaaacaggatgttgtactggataggcatgtccttcttctactcgctcgactaccaacgcagtgcttaccacgtgagtcgtgcaagaaatatacagcaacaaatcttcagccggttgagtcggcgtagctcgccggggcggtttcaatactggtggtgttgtcaagaattttttcagtgcgtctagagcttcttgtgcttctgaagtccactgaaacttgtccaccttcttgagtagcttgtaaaatggcaaacctttctctcccagcctagatataaatctgctcagagctgccatacatccagtgagtcgctgaaccttcttttgtgaccgaggagcttccatcttcatgatagcttcgatcttatctggattagcctcaattccccggtggctgacgataaatccgagcaactttcctgctggtaccccgaaaacacatttttcaggattgagcttccatctatatcttctcaggctgttgaaaaccagctgtaaatcttcgatgaagttttccgaattctctgttttgatcaccacgtcatctacgtaagcctccacacgcttgccccagtgatcggctaagcatgtttgaatggctctctgataagtcgctccagcgtttttgaggccgaacgacatggaggtataacagaaagcaccaaacggagtgatgaacgccgttttttcctcgtcttcttttgccaaactaatctgatgatacccggaatagcaatctaagaaagacagcacagaacatccagcggtggaatccaccacctgatctatcctcgggagcccgaagggatccttcggacagtgtttgttgagatcagtatagtcgacgcacatgcgccaatccactttattctttttgagtacaagaacagggttggccaaccactcggggtgtaacacttctctaataaatccagccgcgaccaagcgagccaactcggcacgaatggcctctctcttgtcgggcgtgaaacgacgtggcttttgccggatcggcctcgcctggggatagaccttcaatttgtgctcggccagttctcttgggactcccggcatatccgcaggttgccacgcgaatacgtctcagttatcttgcaagaactggacgagcacgctttcctatttgtcattcaaactggagctgatgatggccgttttgcgctcatcagcgaatcccaggttgattcgcttggtttcttcagtcggccgcatagaggttacggcctgagcttcgtttgccggtacggcgaggtcttcctcaggcttagagttcgccggcgtagaaggaaccgttgacggcttggtggtgagggctgcttggatggccactcggaaacattccgcggcgccttggaagtcggcgcgcacagttatgattccttgcggtcctggcatcttcagtatcatgtatgtatagtgcggaatggccatgaatttagccagccccggcctcccgatgatggcgttgtacccgcagtcgaagttcgccacctcgaacctcaggaactcggttcggtagttctccggagttccgaaggtgaccggcatgtagatgtggcccagcgggtattccccttccgtcggcacgatgccgaagaaaggggtgtccgactcgcggagctctttgaggtgaactcccaagccttggagtgtccgggggaaagtgacgttgatgctgctccctccgtccactagcaccttctttacccggctttctcggatcaccggatcgacgagaagcgggtatttgcctggatggtcgaagttgagccattgatcctcccgagtgaaagtaatcgggtgctccgaccaccggtatggggcgggaggaccggtggtcgccaccagtatctggcggtcgttgagcttttgttgtcttttgttctcctgcgacccatgtccgccgaagatgacgttgacctccctgtcaacgcgcgggaaagctcctccccccctcctccggctgatggggctgtcgtggttcatctggtcctcccctcggtggaggaggcggtagaggttggaagggtcggccgtgcccgacggagtgcttgaagtcccggaagttacgaagagtgtggcgcatgtccttgtggtacgggcactgggcgtcgaggatgtcgtctagcgtgcgctcgcctccacgaggtcctcctcgtgcgcgagaggcaggtggtccggcggcgtgtacttcttcacgaggcctcttctcccagcgtttgtcgggtggttggttcgcgtcacgtcgcggtgctgccggtgcaggctttgctcctccaatgagatcctgggcccgctcgtcggcggtgatgtagaggttggcttcccggaacagctcctcggaggtagtcggtgccttttgtagtatggctcggacgaaagccgagtcattggatcctctgtagaagtcctcgatcacggccgcctccgtgacctcggggatacggtttctcatggtctggaaccttttgaggtacgaccggagagtctcgtccccccggcgcttgatggatttgaggtcccatggttgcgctggtttgtcggagagggactggaagttggcggtgaaacgtcgactgaagtctccccagtcgtcgatgcagtgtcggggtagatgtcgtagccactgcagcgcgtcttgcccaaggacaatgggcagatacgcggtcatgacgtcttcagatgccccggcagcccgagcagcggtggtgtagacggctagccaaccccctggatcctgcttaggttcatatttgtcgacattggataccttgaagttgggaggccattggatggccctaaggcgcggagtaagagcggatactccgcacgtgtcctcctgccgtcggggacgatgtctgttccggggaggggagtggtggtggtggttcctcgaccgtccccgggtgataccgccagttgaggctgttgccgactcagtcctggtggcctggctttgagtcgggaagccgtgatctcggtcatactcctcccgacggtgaatttcgttttcatgccgccgttcgcgcgaagcattgatagagcttcgcgcgtctcgacgactgttgatggcgtgtcgcaaatcgttcggcgggtgagcgagcggtagaagatggttggccgcctgagtgaacaggcgtcggtatccctcggcgtcgggagtccgaggaagtccgtcagctatccgagctagaacgcctccgacttcgctcggcgtgttcatagctcgggcgaagtcggggttcaggttgcgcccgaagagcggattctcccggcgttgcctcgcatcctgctcggcttgctcctgagtccgtcggcgatcacgtcgtcgggagttccttcgttccctgaagacgcgttcttccggggtttctcctatctccgagacctcgtctcgcgagacaggctgctccggatcccgttctccggccgcgtgatgtcgtcgaacgttcctgcgtcggttcctccgtcggcgggattctcgttgaggtggttcttctccaggcgcggtcggttcgtcgtcagagacgacgggtgactccactctcccgatgaagaggacgtcggggtagaatggtgctgctgtcgtggcgactttctttccgttctcctttgaggccggaggaacggaaagaacgacttgcctttccctggtctccttcttcctcgcgatccgtgtccattccttcatcggggaagtagacagcggagtcttctgggtcagcgagcttccagctccagccttcccggagataatctttttccgaagagccggaggtagcgtctttccagcattttcggagtttgttggaggagacttcttttccggcagatctgcgaggcggtgtagaattccctcttcatccgctacagatgagattgtcccgtagcagaatacagatccgggacgcacggtgatcttgctgtggaaggtgacggccattgagctagcttggatcgtcgacacaccccctacctggcgcgccagctgtcggtgttttgggtctgaccgcacacctggggttacccctcaaggtgtttttaggagtaggacggtgtcaacgactgtagcaaaatggttcgtgccgattgcacgagggacagtggacaagatttgcaggttcgggccgcttagagatgcgtaacaccctacgtcctgatgagtatttgagtgtggttacaagagggctctctggatcggaggcacagagagtttacgtgggtggctaagtaaagtagggtcgatcgttctgaaggggtgccccctaggccttatatactcgactgtggggcagtacacgtggatatgataacaacaagtagctgaaagatagtaaacctcttgagtttatccctacgtaacccttgccgacttatcctcgcatggctctgttgcatgggggcttcagcgcgggaaagtcggttctctgttgcgatttactcgcccgacgttgtgggccgtccgggtttgctccaatccagtcttacgtcttctctgcttcattgattgtctctccccaggcccacgaaagaacgaccttacgatttattgggcccttgggcctttcgtgaggtcttttatctctttagtggacccgggggatatctatcccccacaaactgcttctcttatttcatttaagcattgtccttacctcggtaccacacatgaaaatgaatgtaggacggtaggagtatatttcctatgtataccaaatggataaaaccatccaatattttcataaactgaaaatgcagagaaagcaacaaagttgtattaatacagtcgtacacgtatttagtagcacatgaacaaaagtgcccttttaccagttttttttatcacggtgcaattctggaagctcattgtttctgtaaagaattcaagctcactgcagtttactttgtgtaacaggaaaggtgcatcgatgacaacccggtttattgtaacaagattagtgtggtcctggttgcttgatgcttgtttggtttaattgtatagcaaaatcaggtgttgactgccgatacctggagatgtgacaccgccagatgtgtcgctcaggccagtcacactgctctgctgtttttcaaagaacaacctcttgctacgtcatcaaggggtagaccagtctctgatgattcgtgccagaatccttgggagaaagcaagtggtcctggaaatgttaccaggacatctctgaccccacaagggctgcaagcacaagcatgtatttatgtgtttcacttactactaccaccgtctcttccaaattgcaagttgttaaatatataagattgtacatgtgtttcacttactactaccacgtcgagcgacccatcagtcaaggttctcactatctacaaaagtaatgctgataacaaaaagttttgtgatttaataaaagcgacagacaggtagctgataacaaaatgataatacaagagatagcacaattacacaactaatgccaattagttcaataacagaactataaggaccttggggcaaggataatacttgtaactttcaagccgataatgataggttttagaataatgtgtagtggcaccatgttattgtatgctattaaatataccaaaattagttgtgtgatcctgtgtgtgccatttttctgacatgaatcgtaattgtggctgcaattgtaactgatagtacaacagagcagtgcttcgatagaaactgtagcagtgtttaaaatacttttttattttttttgcattatggtctgctgggcgagaaaaaactgaacagagaacacccactaccacctgtcccttgcatccctgtctattttccaaagcccaagtcaaacctgaaacctaaaattaatgatagtgggtttagtttgcaaagcggtggtggtgctcggagggcgtgcagggcaccacaagacctactgcgtcatggtggcggcagggagcgaggcgatgatctctggctgaaggcaagctagagtctgcctccgtgtccgtgcatcgactgacgggctttgggagccagagctagcaggaggtgggattcaccattcatcttcctttcctttttgttccatgttcttctcgattcagccagccatcatcgacaagacatgtaaaattgttgttgtgcagtgaagaaatgaccttattcttgtgttaaaactaatcatgagagggttcgtgggtgaaagctctcttgtaggttttggtgtttggatgacaacccaattaaaggactaaaaagtgtgctaagtgttgaacaagtgcataatgcaaagctaacaaggttcaacacaagtgaacaataacgtgatggtctaaagaccagataatggacattgcttaagcgagacttgatgtgcgtaactcagagacaactgatcaagccaaggatgaaggcaagaagagcttcaaggtaccgagtgcacgggagaaggtcatggagaccaggaaaccaaaaccaggggtgaagaagaagtcttgcaaagtcaaggttgatcgagttaagaaaagttatggtgcatcaaggatcacgacataaggatatgacttacaaccaatgaggtaacatctacaataatgtggtgtaagtcataaagctcaagatcaagctctagatgtgaacaaggtatgtttctggactcagtaaattgttttgttcactaacatggttatctgagtgctagaaatagtgccaagaaaagaagaaaagagttggagaagatatgactttgtatagccaaaaccagcaccagtctggcacaccggactgtccggtggtgcaccggacagtgtccagtgccccaggctggctcggcgtcaacttggcgctctcggaaaaaaagaaaggtgacgtggctaaaattcaccggattgtccggtggtgcaccggattgtccggtgagccaacggcgcccgcgccaacggtcggcagcgcaatcagcgggcgacgcgtggcctgagccaacggttagttggcgcaccggactgtccggtgtacaccagacagtgtccggtgagccaagaggaccgttgctccaacggtcagttgagcccaatatggaaggagatcgcgcaccggacaagctacaggacctgtccggtggtgcaccggactgtccggtgcgccacccgacagaaggcaaggattgccttccaaaaggaattccaatggctcctaggccccttgggactataaatgggatccctaggcgcctcaaacaagatacaagtgcagccaacaattgtatacatcatttggatcaattctctctctccctctcgtgtatatctctctagtttgtgtagaggcaaagctataagcctttagagagtggagaagtgctgctgagagctagagcatagtcttgagcgcattgttactcttccggagtgctgtcaagaagactgtaagcagccacggcgttgttgtaaccaatatcaacatagtggaaggctctatctgtcatactgacagatctgagcaaacgaagggaaggagttgaaatagactccaagcccaggtgtggcaaactccaacgaggactaggcaagcatttcaggcttggccgaacctcgggataaatccctgcgtctgtgtgctctgctctgtgctgtgtgctgattctgtctttcttactctttatatctgcacttcaatatctatttgtggtacaagttatatttgaagtgcagggcattttaagacaggatcttctattccactgcaacctactcgaagggtttttcatttcactgcgatccagtcttcgagtagagtaagaatttaagttttaaagtgataattattattcgcctattcaccccccctctaggcgacacccagatcctgttcccgggcatagggaactttcaattggtatcagagctaggcctctctagtgtgggcttagccgtccgaagatgatgatgtcgtcacaagaggtaactctagaacttcttctaggcgatggttctaattataaatcttggtctgtctctatttataatgctttcatgcatattgatcctgaattgagacagatcattagtagaagtatttttccctctgatattagtaaaaatcttctaatgctaaactaagatgtctatctctcaatcaccatgcttgcaacatcttagttgactctctttctagaagtgcttattttgccatcatgagtagttatagtgatctattggttgatgctcatgatctatggactagaattaaaataaaatattttgagtccaattttactacttctactccctatgttgcttgtggtactaacctttcaaagggagaagaaaaacgatggcaaccaaacgatgaatccacttcactgacaggtgtgtctcccactagttataaatgtcttattgctaacaatgatagtggagacaaaagcgataatgaggaggaatctaaggatgatagcgaggacgagtcttcatcaccacaaggtacattttcctatattgcttccactgataataatgacagggaaaatgagaccgacgatgtggaagaagagaagatacgcaagttctacacccatctcaacaaagaagacaaagtgctcttggttaagctattgaggaggaacaaggaacaaggcgagacgcttctcaagctagaggaaactctcatcaaaaccaacgatagcctggagaagatgaccaaagaacatgaggagctaaagtgctctcatgataatttggtccaacggtatgaatctgttttatttgagcaaagaaataatcatgatgtattatctgatgttgctcaacttaaaactgagaattctatgcttagaagtcaagtagaaatgatgaacttagaaaagcttactctaggtgaaaagtatgatatgttgtcatactcttatagtaaattagttgatgaccatatcatgctcgatattgctcatgaggtagtaattactagtttaaactcatgtgaacctcattcttgcacaagtgatcaattagttaaagtattatcatgtgctgacctccactaccccaagaaaggccagtctttgattgagaaacaagctgtagggtcaaaaagaaaattgcttgggaacaagaaacaaagacaattgaggagaagatgccatgctcgacttcctcaagatatttacaaacatgtggtgaataagcttgagaaaggaggaaccgcaacaagggtcaaactctgcgagaaagaagctcctaaggcaataagtgaagcaatcaacatgaacaaagaaaaaggtaaagattcaattagtcatgttgtttgcactgatcatatctctatgttatccaagagcaaaaagagaagaggaaaaaggaggtgcttcaagtgcaatgagtcaggtcacctcattgcgtcttgtccatacaaagacaaggatgaagggataaggagatgttttggatgcaatgacaaggaccatatgatcacttcatgtccgctcatgaagaatcaaagacgtgaaccttccaagatgaccctcactaagaaaaaagacacacagcaagcgtcatgtcaggttgagcgacgcttccgctacatgtgggggtgagcatgatcatctgcctaaggtatgtaagaagagtaaggttcctaagcaagtaaatttatctcaatattattcgcttaggagacccaaatcatacacttgtgctagatcagtaacgagatcacctaaaactagcacaactactatttgggtaccaaagggtcttctagatgaacgttatggacccatcctgagatgggtaccaaactgtgccaactagaccatgcaggtgcctcgagatggactggagaccttgggagagcttaagatggttaattcaaactctatgcttaagctgtcaattttattgtctatttattgacccaaggttgaattattgtgcaatactaatctcatgttcatctcgagttaaataaagtgtagatgtcctcaatcattattggtgaatcaagcaaaggaccttgattaaaatctgcaactcgctctccaaaggacggtacccgtgtatcttaagtgcattatttataatcagtgttgcttttaagttggattgtcgtgctatgcctatccttggagtagttatgcttttgagattgcttgtgttgaatatccttcaattaatgatacatgatttccaaagatcataatcatgcttgctcaatcgtgactgtgtgctttatatgttatatatcttgaatcattcaatggatagcttttcaattgatatatccaccatgattaactctcttagtgtatgtggataaaccggtatctttctgtaagtcatgctatgtggtttttaatgattaacctatgtgcaagcatgatagttttgtttagtccatgttcacatcattactttatcttggtactttgtgtataccaaaacaagaaatccatgttatgtctctaatgcaccctctcgagctatgaggtgcatgagcaaaaggagccctaaattggtgacaacaagtgctctcactccacactacctaaaagaatgaatctcatagtattcaggtaaaaggcaaaggtatggagaatggaactatgcaatttcattgaatatcttgaagttccgttgattgtgatcaaggttatgttcttgcctttaaattggtagtatcttggcttaggtgccttgtgctttaaaatgttgtttcctttggtgtacctaagaaaatacttcttaatcatggtgtgcttagacattgtgctttatatgcatgatcttgtcgtttttcaattggtatatgtgttgcaatgatcatcatgtgtgaagtgtgcctacgttgcttttaaaatgttatatatcttgaggcatgcattgtttccactagtcatgagttgaattatgtcatctattcaattggtatctttttgtaatgtaattgatatattatgcctagaccaaggtatgttgtgatcccctctagttctgaggacactagaatgtgcaaggtgcgaatcattcaaatacttgatgcacaactttagggggagcaaacataacttgtgtcttttgagactaactatttcttgagtgatcctatatagtctcaaggtggaaaagggaagatgagcaagaaatggagcaatcaggacttgggtacctccacaagtcaagtaattggtatctaaagttcaacaagaaaaggtcaggataaaggatcaggcacaagtgtgaaggagctccgtagagataaaactttcaagatggaaatcttaaattgatggaaaaaggaactccgcctacttagatggaaagtacaccataacatggtaaaggtacaaaaggaggtattgacctcttgcgtatttgtatcgtaattttcctccaatgattgtgttgcatatgtttaaagtgtaagggggagtaatgttagtgtgttgcattttacctacttaataccctgttgtcccttgatgtcatcctatgttcctgcttgaatatggttttgatgtttgatgtcaaagggggagaatttgtgcattaaagcttacctcgacctaaaaggaaagcttatcttaagtgtgaagagggtgaagattaatggtttccttgagttccttttatctcaaggaagaatgtgttagttttgttgataatacttatcatatgcttcttgttgtattatatggtgataatgcataattagtgcttccgttgatatgaatcaattggtatctattgtgtttgtcctataatagatattcatgtgcttctggtgcttggtatatattgtgtttgtcctataatagatattcatgtgcttctggtgctttaaattggtatcttaatggtgaatagtggtaggttgatattcctatggtatatccatttaaatagtgtttaactctgattctgtgcatttgtgtgttatacatatcacggtttaattattgacacaatgcatcccactgatgataaggtatagttatgcttcgaattagcctaagtatgtgcaatttggcatataaggccaaagttgagattttaatgtaagcacatatttagggggagcattctataaacttagaattcaaagcttgtgctttaaatcttattcttgtgtaagctttaattgtgttgccatcaatcaccaaaaagggggagattgaaagctctcttgtaggttttggtgtttggatgacaacccaattaaaggactaaaaagtgtgataagtgttgaacaggtgcttaatgcaaagctaacagggttcaacacaagtgaacaataatgtgatggtccaaagaccagataatggacatttcttaagtgagactcgatgtgcgtaactcagagacaaccgatcaagccaaggatgaaggcaagaagagcttcgaggtaccgagtgcacgggagaaggtcaaggagaccaggaaaccaaagccaggggtgaagaagaagtcttgcaaagtcaaggttgatcgagttaagaaaagttatggtgcatcaaggatcatgacataaggacatgacctacaaccaatgaggtaacatctacaataatgtggtgtaagtcataaagctcaagatcaagctctagatgtgaacaaggtatgtttctggactcagtaaattgttttgttcactaacatggttatctgagtgctagaaatagtgccaagaaaagaagaaaagagttggagaagatatggctttgtatagccaaaaccagcaccagcctggcacaccggactgtccggtggtgcaccggacagtgtccggtgccccaggctggctcgacgtcaactaggcactctcggaaaaaaagaaaggcgacgtggctaaaattcaccggactgtctggtggtgcacgggattgtctggtgagccaacgacgcctgcaccaacggtcgacagtgcaatcagcgggcgatgcgtggcctgagccaacggttagttggcgcaccggactgtccggtgtacaccggacagtgtccggtgagccaagaggaccgttgctccaacggtcagctgagcccaatatggaaggagatcgcgcaccggacaagctacaggacctgtccggtgcgccacccgacagaaggcaaggattgccttccaaaaggaattccaatggctcctaggccccttgggactataaaagggacccctaggcgcctcaaacaagatacaagtgcagccaacaattgtatacatcatttggatcaattctttctctccctctagtgtatatctctctagtttgtgtagaggcaaagctataagcctttagagagtggagaagtgctgctgagagctagagcaaagtcttgagcacattgttactctgccggagtgctctcgagaagactgtaagcagccacggcgttgttgtaaccaatatcaacatagtggaaggctctatctgtcatactgacagatctgagaaaacggaggaaggagttgaaatagactccaagcccaggtgtggctaactccaacgaggactaggcaagcatttcaggcttggccaaacctcaggataaatccctgcgtctgtgtgctctgctctgtgttgtgtgctgattctctgtctttcttactctttatatctgcacttcaatatctatttgtggtacaagttatatttgaagtgcagggcattttaagacaggatcttctattccgctgcaacctactcgaagggtttttcattccactgcgatccagccttcgagtagagtaagaattcaagttttaaagtgataattattattcgcctattcacccccctctaggcgacacccagatcctgttcctgggcatagggaactttcattgggagaatcttagtataatttgattgttaatgcaatgctctcttcttcggtatcactgatcaagatatttaggaaaggagactattttcagtttagcgaggggggctctctggcactggaggcgtctttcttgcgctgtctttaataattctacagagattaaaa

SEQ ID NO: 727 - DNA, 5974 bp, Zea mays
  Intron number 1 from transcript GRMZM2G036186_T01 (locus G RMZM2G036186) derived from phytozome v7.0 (chr-ID 10; pos 121508776 to 121514749 reverse strand)
tcggcaacacctgctactgcaacagtgtccttcaggtatggatacgtgccagctagtagatttgacgattggttatgctaagcttgatactagtaaggccatgtttggtttctttagtctagggactaaagtttagttaggagactaaagtttagtccttaacatgtttggttctaggggctaaaaatagtaagaatatactaaatgactcataagaagactaaaatgacctttaacattctcttgctattagtacaattgaactaaatgaggggtaaatgtggaattaatatggtttattcccttttagcacatatgtgaaggactaaagactaaatcattttagtccatattttagtcctagtgtttggcaaaaaaaggactaaatgagactaaaaactagagactaatctttagtccctctaaccaaacaccccctaagtgctgcagtgtggtgaaaaatgtcctggttgggtgcctttatttatttgtttaggactttaggtgtgaggtgtgtatacgctagatagtatgctattccagctcttgcttgccagattcgagatatgctgttgcagtgtgatgtatgtgctgatatgattagaatcctttgacaaaatcgatcgaaattgtttgtgtagtagttgctcaatgcattcgatcgatgatagaagagtgacttgaagacctaggttggaaccaacccacttggaccaggttgtcatgctagaagagtgacttgaagacctaggttggaaccaacccactttgaccaggttgtcatgctagaagagtgacttgaatacctaggttggaatatgccatctactcaattcatttaatcaaaactttgttttgaaaacctgtctacatgttcttataacatattaggtagccagcaattcgcagggtcttcttttcttactggacaaattgcctatatgccagtcacagaactgttttgcaaacatatcacttcccgtatctggattactactttagcattggacaaggttttaaagtcgtctgactaatcgtgattagtcgcgattagtcggccttatcgctagagggagatcgattagggtctccgactcgactagagcgactaggaagcgattagtcgtcctagtcgccgactaggtatagtggtcgactagttttgcctgttttgggccactaatccggtctctgttacatgggccgacccaccatctgtacatcacaaacaatgttttgccctacttgtaccgatacggtacacgcattacgcagcgcacagtcgcgctcgcgcgtgcacccttctccagcgctgccgcaccttctccatcgccgccacaccttctccatcgccgccgccctactctcctgccgccttgctgtgctccggcggccctctgctcgagcgtcagctgcgccccctccatcacgcggcgactgtagtctgtagaggcccccctccagcgctgttttgcaaaaaataaataacatatagtatatgtatgtatgcaacactatctctactctttaaaacttcctccacgatcttatcagacccattagtttctgccttccacggctatcctcccgatccactaggccactacggcaatgtccctaggacatctcttgatctcacatacctagtcaagaaatcttgggttcgccactgaatcagtgtgctgctgaaatctgtgtactgttttcctgctacagctagtgtactgttgtattgcagtcctgctacaactttatatattgatatatatattgatatatacatatggtcttgttataggtggacgactataggacgactaggagtcgactagactcgactaatcgagcaaatcgacgactaatcacgattagtcaccttatcggtgctcaggcaactagagttgactagtcgactttaaaactttatttggaccatctccctgttcaccatctaccaccatctcattggcgagagaagcaacagcaggaaggctaggggagcctggctctggcaaacttgcttctcttgtttgtgtccttccattggcaccacatgcgctccattccgtggaatccatccttctcgcatcgtcttccttctctctattcttgccctcctgaacccttctctgcgggcttcgacaccatggggaaccatgtccttccactgctcccaatcatgttcggaggggcacaccttttgccactcctcaccactgccgcaccacagaaactcatcaattcaagtgtttccaaggaatcaagagtacagaacatactgaaggccatgctgcagctgctggttcaagcttctacccttccgctgtatgtggcagtagcttcgtgggggattgccagatctggcagtggcagctgcaggaggtgtggataaatgctgcatgcaggagaagtgttgggaaagaaggggactttgggagagatgaaagtagtgttgattggattttagacctaacctgttctgttgattttcaatcctatatatatatatatagtatatgtatttagagccctaggctctatttaactataggaagccccgaccacgtaccgaccaggtgcgcgaccgcaccggaccctttttggcttattgtacctaactgcttacgccaaaatataatacgagttatgctgatgtgtgtatcagtttatgcaaatatagtctgcgcatattacgtgcatcgggcccacgatccggcccacgccaccactataaaaacacccccacgccgccaggaattaggttttagcggcggcggcggttctctagggcgtgcgagcggcggtgatcctgggggccagcagcggtgtcacctcgaggcaggcgaccgacggtggcgctccaccaggaacgagcgacaacgacgctccgaggcaggcgagcaagcggtgacggcgctcttgaagcggacggacgacggcagctcaccctaggcccggtgacaacggtggttgtcccgtccgtctctgcgatggccaccgccaccgccgctccagcatctgtggcgcgacgacggatctggggacacgctcgcgacagcggatccctgaggcgcgacggcggatctggtgacacgctcgcgatggcggattcctgtggcgcgacggctaatctagggacacgctgcggcatcggatcccgagggcacgcacgcggcggcggccccatgaggtgcgcacgacggcgatgtgccagcggtcgcgacggcggatttccctaggcgctagcgacgacgacatcctcgcctaggcacgaagtggtggcgcatcccagatgcgaggcgctggttccgcaggacggcgatcctatttttatgctattttgtatacatatttatgccaaatgtcaataggattttatgacctatatttacgttgttttgggttcacgatttacacttaaatccgctcgagccagaacccgcgcacgatttttacgccgtaatttgtccccatttgccgttacgaaatcaatcgatgatttacgctaaaattcatactcatttacgctgttttggttcacgttttatgccgaaatccgcccgagacagcgcctgtggcgattttcatgccgtaattcgagacccatttgtcgttacgaaacaaatcgatgatttacgataaaatttgtactcatttacgctgttttggttcacgttttacgctaaaatccacccgatccagaacccgcgcacgatcgggtgcacacgatttttacgccgtaattttaggctccgtttgctgttacaaaacagattttggaattacgctaaatttcgtactcatttacgctgttttagctcacgttttacgctggaatccgcccgagccagaacccgcgcacgatcggctgcatgcgatttttacgccgtaattttaggcctcgtttgctgttacaaaacagatataagatttacgctaaatttcgtactcatttacgctgttttaggtcacgttttacgctgcaatccgctcgagccagaaccagaaccagaaccagatcgagcgcgcgtagatatacctgactggggcttcccatactaatggaagcccagggcttcaattaccatcaccctatatatatatatatatatatatatgaatgtagtatgacagagaaaaaagtggtaaaataggatccagtaggaaggagtgttgtgttatatgagagcattttttctttcttaatacaagtattaggtggcaaggtaggcagttctgcagttcagtgtctttgtccactttagaatatttgtattatttgattcagctcctgaacatacacctatttgtcttttttatgttgctgatttgcatgtagcctaccccaacttgcctgttaatagaaggctttattgctgcaatgctgctgttgataatttgcatgtaaggagtatgagatgtaatgtgctagtgggtttcctgtttgtcttttaattggataaattgtagcaaattgctagccttctggagctagcagtgaaatcaatgaaccaattaggtttacagttttgttcgtccgtggttcaacagtacattgcaacaactagctaggcttgtaataactaacatattattgctgtgaagttatcaccatcggataagatgttttgcttccgagttaccagcattgatatttgttcattatatgatgaaagacaatagcaaccaatcctgttcagtgttcttaaggcgcctaggcgagcaagtggaccagaaaactgctttagcgcctaggcgacgcctaggcgggtatggcaagcgagggggccagttttgcccgggcgcctggacgcctaggcgtcgccttaagaacactgatcctgttctttttcaatttgctgtatcttctttctcaaactctgttgctgtaccagcgacattttgttttgtgtttagcgtaaaaaccagtgtttcacaaggttggttccgtggccacccagacgtgcctatgcactaggcgacggggtatgtggagccggggggggggggggggtaattggtacctagccgtctgccatggcggcaggacatggcgtccctggtgttcctacgtgcagacccccgaagctaaggagctgggggggtgaggtgggaacaagtgggcggaaatggcagaggtgcggcgttggggacgtcagccatgtccacgaggtgtcagagacggcagccgggaggtgcggccgtgcatcgttggagatggcagccgcggccgcccaacgttgaagacgacagctgggaggacgctagtggcagcagagatggaagagaggaggcgagtggagactgaaggagtctgggtctccgcgagtctgagaaggacaagatagatgtgcagctgggaaggataaggtgggctgggcttttttgggcctttatgttcaactttaagtctacagtatcttgtttatacttttatttacgataatatatgtatacatatagaatgcctagagaacacctacacacgcctatgcacgcttaggcagtaggtcgctgcctagcaccttttctaaaagggcagacccagtgctagaggtttccacataagtgaggtatagggaaggataaaccgaagcaagcctcccgccctcccccgcaaatgcggagaggctattttgaacctgtgacctggtgactcagtgagacagctctcaccactacaccaggcccgccctttgcctagcatcttctctaactttggtaaaaactaagagacgatgtttaatgtgtattgcaattgccgtctttagatgatccaagaccaggtggatcagtgtaacataacattgtctaatggtcattattttctacttctcatgctagttcagtgcaaaatattgtatttaacatggaataatttcttacatatgcattgtttacataaatctgatgttgatagcctgatactcttatttcaggcactttatttttgcattccattcagggagcagtt

SEQ ID NO: 728 - DNA, 1735 bp, Zea mays
  Intron number 1 from transcript GRMZM2G079746_T02 (locus G RMZM2G079746) derived from phytozome v7.0 (chr-ID 8; pos 6 2827973 to 62829707 reverse strand)
gttccggttgacgttgactccgtcgtagggttctggtagggcttacatttcttttcacttgctactattcgttatatccagtattctatctcagaagttttcagtagctctgccccaatggccattgacacatgattcattaatattatactaactgacaggctatacatttacttgttcactacaaagattcagctgttacatttcccacccaagatagttaaactgcaatgctaactagtactccctccattccacattgtaaatcgatatagatttgtgtaactttgaccaagtttatagcaaaatatattaaaaagtgcaccatcaaaatatatttcatggtatatctaatgaattagttcgatgatgtaaatatctgtgcatttttctatagtcgtagtcgaagctagagtggtttgacttaggacaaaactaaaatcgcttacaatttggaatggacggagtaggagtactcttaagtacctaaagaaaagttgagaagctagctgtaattgaactattgaagacaaaataggttaatgctagaccggttttcagctcaatttgactagtttttgttgcctctcttcacttttaaatctctatttctgttttacctgaaaatgttctatgtgaaatccgctgtattttgttggtgcagatgtgtgccataataggtattattttctccatccaaaatctggttatgctaagttcctaatcttcctccaaaattgcattaaaaagcgaacacttgctttgcttgtagaggtagaccgcattaggttatgtgttatgaatttgaatggcatttgaaaagacttgattgccaacaaggaggtttctaccgtctaccaataataaatagactcatgaaaaccaatatagcctgtagaaattgcccaatgcacacacaaaaagtgttagcccacatcatttatgaactctgctttgtggattcattcatttggatagtacaagtaatagctctgtccactttatgtggtgttgtaggctagaaatgtttgtgtgcatttgttgaatttaacctatttataccattgtatattagtaacgtcaatagtttgcctcagtttatccttcacaatcccttgctatctagtttgactaagtaacggcgttgtcctaccctaaacacgctggtgacaactcacgagccagagtgatctcaggttgacagttttgtgtgggaactggataattttttgctggcagctactgttgttcaaatttatggagcatcataagcactaggcattcaattcttctcacagtttctacctataaagggtcaattcaaaagtgatgagattgaatgtacattgtgtgaagcccatttaaaaaaacaagcatcgaacaacttaagtagtggtcttgctatggttatgattcatgacccaaaatgttcttgtgcaatttgacactttgcagcgattagcaggggacaaacggataggaagtggtgctgtgtgcgtcataatttcagaaagaaacaagatcaattttattgattctgtgaagtgtgaacacacattttaacaaacttgtttcctaagttttactgacttgcctgcctgaacctttgcaattatctactgggaaatgttaacacctgctattgatttgattttccttctgccaaatgatttcaactaaccttatatgtgtaatttcaggtctctttcttccagcagttgtccggccaatcctg

SEQ ID NO: 729 - DNA, 270 bp, Zea mays
  Intron number 3 from transcript GRMZM2G085423_T01 (locus G RMZM2G085423) derived from phytozome v7.0 (chr-ID 2; pos 1 73695110 to 173695379 reverse strand)
aggtatgcttatttatgtcaaacccatattctaactccagaattatcaagggagtattgttgcattacacaagataaaatgggttcctctttagtgtttgtagctggagatcaggagaataactttaaactacacctttctactttcaagaatctatctgttttgcattgtttggattcatttatttgcacatcacttggttatgcatttgtttcataattcattgatgacattgcaattttttcctacagatttactccaaatcagcaa

SEQ ID NO: 730 - DNA, 2138 bp, Zea mays
  Intron number 1 from transcript GRMZM5G808737_T01 (locus G RMZM5G808737) derived from phytozome v7.0 (chr-ID 7; pos 4 6794862 to 46796999 reverse strand)
ccacgggcgttacattctcctgccgtatttttgcggtaattgcgccgctcttcccttccctttgctctgtattaggattcttgatttatgtgtgggtttccaccgcgctaccgcagtcgatgccgtacctcagatgcagacgaggtagagcatcacattaatgaggtgctaggattatcataagctctattctagggttcttgatttgggcgtgggttctgatttcaccccggggaaatactttgcaaagatgacggacacgtgtggaattagtattgcgtagccatcgatacaacgatttccttgcaactgaaattgatgaatactagtactaaaagtgattgaggcagctcctaaaataccgaacttgtacgccttagaaagttactgaaattgcagctttggttgctcatccgaaaagggcctgaaccatatgcatatcaggtatgggaagtttagccttaacacaagtctaattctcccacaaaagatggtgatgcaactacgtaagacatatatgatcaaattgatcatgccatcaagctcatctccttcgtcaatcatgagcatccagcaaaggtagtgtgccctccatgcattgtatactcctatagtcttagtttcttgcatgttatcgttagtaatgtagtgatttgtattaatcaatttttgttgaggacgggcttctgaagtccatgctgcctttttatgaatgtttgtatcaataggaacatcagagttatgaagacttctcgtatgatgccttagggaccagtttagaattgaatccgtgtatcagataataacatgcccaatttattttgtcatacgtagcaatgatatcaagggtagcttttttgtgcatttgtttactctagtatgctagttttgtattaattccttagtcgaaaacaagctagcatattaggtgcccttccattcaaaatgaaatatgtactaatctacttactggttgtatttattatttcatagattgtgaccaccagttctcgttggagaagattgaaaacattacatatttggtatttgaacttttaagaatggcaccattagtcactttcattaaaactgtcattggtcttcgattagaaaatgtcaaagcctgaaggtttcatcttctgcagcaactccagcttgttccatttctccttcgccagcgtctgccaatggtttagaagaccaatagttttgcaagcaactcgtttaggagatttcagtttttttttgttgaaaaaatagattgtttctcgtgttccacagagcccaacccgctccatctattacgaaccatatgaacatgttcttgttccctccttcgctgttctagcagttctcctgaaatttttaatggatgttgggatcttcgacaagcccaaactatttctcacccaacaccgcccaagtcataacagctgtaggacatctaaacaaaagattgcccacagtttcttcttttccacagaatctgcaccctttggacccatcccaatttctcctcagttgttccactattgtacattatcatcttttgcaatgcaaagattttcatctcttgcatttttggttacttgcttctgattgctataggttatcaaaaataaggcaacacaagttattaaaccataagcttctcccttcaattaatcctttttcgaaggttaattcaagagagaagacaaagggtgcaaacacatgtttattaacaagggtgaaatataaacaacaaagagtaaaacatgctactcatcttcgtgtttctgcccttatagtttttgtttcttgcaatataacgaataattacaaacgtaccttcggctccacaagaatgatagctcgaaggtacttcaaaggataagctaaacgaaactctgagctctcgaaaggtgaatttatgcatgacattgttcctctatttataggggaaagatacaacttcgtatgaagttacaagtatacccataacgtttacgcatatgatttttaaatataacaagggcaatgtcatccttcctcctttcttgctgatcaagacttttggttcttctcctcctctgcttcgtagatcaaggccttcggcaacgaagccgtcagcttcgtcccatgcctttgcagcatca

SEQ ID NO: 731 - DNA, 9690 bp, Zea mays
  Intron number 3 from transcript GRMZM2G030915_T02 (locus G RMZM2G030915) derived from phytozome v7.0 (chr-ID 9; pos 1 48078597 to 148088286 reverse strand)
tgctcacaaacttttgggtaatgatcggcattcttttgctagcagctgttgccctttgttgtgttgtttatcactaatttgttttctattactagggtatgaattttaccactgataaattgaggtccctagtgaagaagtggcagacattaatcgaagcccatgttgatgtcaagacaaccgacaactacatgttgcgtttgttctgcatcggcttcaccaagaggcgcccaaaccaggtcaagagaacctgctatgctcaggcatcccagatccgtcaggtaacgtttctgttctttccacatatgcagcagtcgtaaaactgtagcaatttctcaaaacgtcaaacagtcacctgctatatttgcctgttatctttatacttgccatgtattgtgcgcagatccgccgtaagatggttgagattatgatcaaccaggcttctacatgtgacctgaaagaacttgtttcgaagttcattccagaagttattggtaaggagattgagaagtctacctccagcatcttcccacttcaaaacgtcttcatccgcaagggtgaagatactcaaggcccccaagttcgatcttgggaaactcatggaggtaattgctacatgcatgcaaatagatttaccagactatctccctgttacttgttatcctaaaacttgttgcttatcaggttcacggcgactacaaagaggatgttggtgtgaagcttgagaggcctgtcgagggagatgaggctgggcaggaggttgctgctgccgagtagtttgtttgctagttctatatctaggcgagtctggacatgaggttgcttatgacgtgaacttatagagttgtcttggctatgtgttttcgtctagccctaagattttgtcttgaaacaagtttaaaattaagattatttgtaacaagtgtttaggattactcgtggtgatattctgtgttcgattactgctgtactaagttccatcatcctcatttttgtttggtcatcgataatttactttctcattcgtatgagatgttctctgcttatttgttgttagctgacactgtcagttaaactagtgcccccattcttttttatttatcatgatttagtttaaaaatgaactaggactccctctcgtgtattattagttgttgttttggataagatttgactaaaacttataaactcttgactacaaataattattttattatttagttttgaaacctaatgattatatgttcttatttattttaacatgtacttttataaaagtgtaattgtattaagagtttatttgtattttaacatttaacaaaaaaatattggttaacgttatattttggagaaatataggggcccattgagaagaaatatgttatagttgacactgaagtgaggcgaagcaccaggcttcgtgagaaatcaggaggctttatgaagtctggacacttgcatagtgcctacttttgcactacccctcccataaaccccagaaacatcaaaaggcttggcgcggagctctgcatggttgacaaagagattgctccccccccccccccccccccgaagctctagcagcaactaagaaacagctggaggtgatccaacgtccttgcaaagctaactccaacactaggggcaagagagagaaaaagaaagatgacaagaagaaaggacccaagagccagacagaaagtagagcatgattgctctactctgctatgtttgcttattgcaacgatattttattttggggtttcttattttgtctcctataaagttattgcaacggtatttcattttggggtttcttattttgtctcacatgaatagatacaatacaagtctagtggggcctcacaagcagccgaacattttagattgtgtatttttacttttggataatcatagaactgataggttgcacattggctttatcttcaatgatcgttggttaattttattttggacttatgcactcgtttgcatggattggttgctttggagggttacacatcactatattatatacatgacaatacttcgtcgctccctaattttttggctttatctgttaagtgcatggaccgctctaattttaaggtgttcagttgattccctttggcataattggcattatgtatgcaccatggcacatggcattccgaacgcacactccgtgtttgttactggtcttatgaatcacaatctttatacatacgatgaacaaacaaggagaatggaagatactggtccataatagttgggagatcaatgcatcagaaaaatgaaattccctgcataacagaattgcataatctaaatgtgacataatatggctccaagaaacaaaaagagaatcttttgatgaaccatacattagaattttctgccctcgaccttatgatggtttttgttataactcttagttggttcatctggtggcttgattactatttggcaaggtgccaagttttatggagaaaggattttccacaatgagcatgcacatatggtgagatttaaatacaaaataataaaccaagaatggttcctcgtaaacatttagcgccttccacccccgactcaaaaaattgagtttctgcaatggttctctaactttagtgctaaccctgttcaacctataatttttatgggagatttcaatcttatttgcagcttggacaacagaaacaagcctggaggaagtacaacattgatgcttgaatttaatagtgcaataagtcaacttggcattctggaaattgctttaagagggcaattatacacttggtcgaacaaacaaacaacaaccactcttggagaaactaaactggtgctttgtgacacaagaatggatctcgcacttcctaggtacagaggctcatacactcgtaagagacgtgtcacaccacgtgccctgtctggttgaaataaagatatgcattccaaaacctaacatctttagattcaaaaattactggttgatgcatgataacttcctttcagtttttcaagacacctggacccaaccattatatcaactggacccagtcaggagactaatggccaagtttaaaagggcaaggaaggcattgtctaaatggcataaacaactttccaaactagccaataccattgaaaataacaagcttattattcaattcatggacttgattgaagagacgagggatctaaccatccaagagtgcaaccttagagatattctcacacaccaacttcaaaacatgctagaacaacagaaggtatattggaaacaaaggtgtaaaatgaaatggtcccaaagtggagatgctagtacaattttttttcataccactgcctctatgagacaaaatcataacttcattgctacaatacaagatgacacatgacatatgatatcttatcatgaggccaaagccaatgtattgtttgaggcttacagaagtatacttggcacttcgggggattctgaaatggtttttgaccatgatacgatattacaaaatacacaagatttgagtattttggagtcaccattcatggaagacgaaattaactcagtaattacaagcctccctaatggcaaaacaccgggtctggatggcttcaatacatattttctaaaaaaatgttgaccgattatcacttagtatttttatgatctttgtacaagctttcatgctgaaaatgtttgtatgcaaagtatcaatgggtcacacattaccttgataccgaagaaaacttccccctcacagtcagtgactagaggccaatctctctacttaacacaagcatcaaactagtgacaaagcttcttgctagtaggcttcagaatgtcatcaccaaactaatccacagaaactaatatgggttcatcagggggcgcaccatataggactgtcttgcttgagcctctaaatatatttatatgtgcagaaaatctcaaaggcaaatggttattcttaaacttgactttgaaaatcatttgataaaatagagcataatgccataacggatattcttcgtcataaaggcttcagaacaaaatggttgaagtggatagatatgatcacgagctcagggacatcatttgtcatgttgaactaagttccagggaaaacgtttcattccaagagaggagttcgtcaaggagaccctctctcaccgctaccgtttgtccttgcagctgacctccttaattccatactcaataaagcaaaagacgttggtatcatcaagctccccttaatacaacttatcattgagctcccctcgaatacaacttcagggcatgacctctcgattatacaatatgctgatgacacaattttggttatggaggcttgtcctagacaacttttcttcctcaaggctctaatgaactcatttgttgactccacaggactccatgtcaattatcaaaaatcaaacataaaccctatcaacgtgtcaaatgaaagaatggagctactagctaaaaccttcaactgcaaaattggtacctaccctttcacatatctagggcttccaatgggaactacaaaactaaggattgacacattcttacctctggttcagaaaattgaaataacgcccatcagcatctttcttcctctcgcaagctggcacgctacagatggtaaatgcggccttcaccttgaaagtcgcctagaggggggtgaataggcaaatctgaaatttataaactttaagcacaactacaagccaaggtcagtgttagaaataaagtcaagtccgaaagagagggtgaaaacaaatcaaccaaagaaatagatcggatgacacgatgatttgttttaccgaggttcggttcttgcaaacctactctccgttgaggtggtcacaaagaccggatctctttcaacccttcccctctctcaaacggtcacctagacagagtgatcttttctccttaatcaacgagtcgcttagacccctcacaaggaccaccacaacttagtgtaccttgcgttgattacaagttgcttgagaacaagaatggaggaagaaaaaaagcgatccaagcgacaagaactcaaatgaacacaaaaatctctctctcactagccactaaatgtttggagtgaatttggacttggagaggatttgatctcttgatttgtgtcttggagtgaagtctagagctcttgtatttgaatgcaatggctgaaaacttggataccttgaagtgtggtggttgggggggtatttatagccccaaccaccaaaatggccgttggggaggctgtctgtcgatgggcgcaccagacagtccggtgcgccaccagacactgtccggtgtgccagccacgtcacccaatcgttagggttctgacggtttcgaccgttggagctctgacagattagggcaccggacagtccggtgccgcaccggacatcactgttcagtgtccggtgtgccttctggcgctgatctgactctgcgcgcgctgtccgcgcactgttcacgttcactgttcacttttgcagacgaccgttggcgcaatagccgttgcttcgcatggcacaccggacagtccggtgctacaccgaacagttcggtgctacacgtgacagtccggtgctacacctgacagtccggtgaattatagcggagtggctctcagaaacccgaagctgagtagttcatagttgatctccctggtgcaccggacactgtctggtggcacaccggacagtccggtgcgccatgccgccataccagggcagtcttcggttggttttgctcctttctttttgaaccctatcttggacctttttattggtttgtgttgaaccttttgcacatgtagaacttataatctagagcaaactagttagtccaattatttgtgttggacaattcgaccaccaaaatcatttaggaaaaggtttgatcctatttccctttcacacctccctaccaacattttatttatgtacactcaagatacacaactctgtcgtgaagcaaattgacaaatacaaaaaacattgcctatggagaggtgatgatattaatgccacacgacctcctcaggcagcctggcatctagcatgcagaccgaaatagaaagggggcctgtgattctagatctcaagaaacacaatgaagaattactgatgaaaatgctatacaaattctacaacaaacaagatatatcacgagtgcatgtgatatgggacaataggtacaaaaatggttcactgccctcagaaggtagtaaaggatcgttctggtggagagatatattgaaaaacttgccagcgttcttagaaatagccaaagtcaaaacatgcaacggaaccacaactcatctttggcaagaaaaatggggcgacattctgatttgtgataaattcctagagttttttcctatatagtgaacaaggatacaactctaagacaagcaaaattgacacccatgatttaggatttgttccatctacctctatctgcccctgcttacttgcaaatgctttcattggtcacaatgcatcataacatggaactgacggacacatcagacaaatggagatgcgccaacattgcagataagtactcttcccgtaagatctatgaaatcaaacataaagtcccagaagcgccatatacctttgctctgatctggaaagcaaaatgccagcctaaaaatattcttttggctactctgcactacaaacaaaacaccaaatcagtgctcaagagaagagagatggaattagactcctacacatgtgacaattgcatacgacagaaagaagaaacatggagtcatttgtttctaaagtgtagcttcacaaagagatgctaggaaattgtcgggatcacactaacatgatctttgaacccacacattgcaatccgggatatgagaaggaaactagtataactttgggccatggagacaattatcacaatgatgtggtgcatttagaaatgtagaaatggttcaatcttcgaaaacacctctccgaccacccactggtgcaaaatcagcttcgttcaagagttgaaccttaatatctataagataagatgcgggaaacgataactgacaatgttagacaatgcatatagtcattgtaatatgacaaaatataatctgtaaaaacatatatagaaaagtaatgaaaggaatactgtaggagcccctacagtaggaaactttatcaaataaaactttacaatagaactagaatgatagaaatagaatgggatgacaatgcaattctctatgaatgtgatttgaggtccaattcagttcatccattgcaatcgtgatattcaaaaagagctcaacctaatgatttatctcctgtaaaatagtattggttctaaaatattggatatagtattaatgatcaccattagtgcttttcaaaaatataatctcctccagtagatgactaataatctccttgaatacatgaaacacatataccatgtatcgtttcctctccttttctcgtggccttctcccgtgctcccgaccgccgatgctcttatccgtcattgttctacgcatgttcgacgcttgtgcctccatctatgtttgcgagatggcgtcgacacggacactcacagactcacctgacgacgcaatgaaatagtaggtgatgtcatatcatcctgtgtccaatcgatactattccacgtgattggttcatgggctacccgcagctaggctcgcgcgcagcaggctggctggatacggtaactttgggtgtacaagcggatgcaaataaataaccttaaaataacttattcctgttgattggatgcctgtattcggacgcgtaggctcgggtggccctggctgatctgatacggcatttttctacgtacgagtatccgctcatacagcctgcgtctcctttgtgcgggtaaccaaacaggagctgagacaaagtcaatgcatacggtggtaaagatgagatggtgcgggtaaccaaacatacggattttgaattcactcgtacacctcgcgtctcacacgtgtaagtaaccaaatacattcttagacaaagttaacgcagtgatgattaaggatgtgattatacagatccgagtgaactccgtcaccgtagcccgtagtgttcctgaactcactttctctgcaccgtccgttacgctgcagatgggccgaatcagatgggccaaccatgcctcgaagcacacatatgggccacaccgcatcgtgtgcgtccatccgctcttgggtgcctgctgaccgcatgatcgaacctggaaaccctcgagtcgtatataggtagtccgctctgcctcgaagtgccttctcccgcagagccgccgacaactctctctaccgtccgataccccaagcaccagcgcggcggcggcgaccatggctgtcggaaagaacaagaggatctccaagggaaagaagggtggcaagaaaaagacgttagtttgcttgcctgttatatcccagttcttcagatcttacttgggtcgattgctttctttctttatccgttgctgatgcggttgcgtggttgcgttacttcttttatgcagcgtcgaccctttctctaagaaggattggtatgacatcaaggcaccgtcggtgttcagtgtgcgcaacatcgggaagactctcgtatccaggacacagggtaccagggtatgtttttctttgattatcgatgtttttccgtactgcccctacattctgtgttgtgaacttgcgcatatatgcatgtatatgtagaccgcgctagtcatgcggtatattagatacgctcgttcgcgcgtttgtttgtggggactactattcaggtttcattgcaagaattcgtaggggaggtaattaatattgttcgggtttgattgatagatagtttgtcagtatttgagatcatacccttgcgtgcttattctaagctgttcgtaggtatcattaagtgcaatgcaactagaacggcatagtgaatctgctgctttactgataattaagaattagcctctgattgtatttcttctaaacgccagctgctcaaacccatagtcaaaatagaattttgtaatagctcaccttagtttctgatgtcccactcccatctgttactatctgtaatgtgtttatgtttgttggcacctatcatttttgcactttctgttggaatgattattattagtttgtgcttttgctttcatatgtacaataacgaattgccatttatttgagcaccccaatggcaacttgtccttgttcatttcaagtttcaaatcttttttcgtgcactatatcttgataagtaatcaatgatctgtcactgaaggccacatgatcttataatgacatggatatgattagtcttattaggtgccactctgtttgcaatgttattcagaacgtagatgcactgcttgctgtcctaatttactgattgacgtactttatctggttttagattgcttctgagggtctgaagcacagagtctttgaggtttgcctagctgatcttcagggcgacgaggatcaagcttacaggaaaatcaggctccgtgctgaagatgtgcagggcaggaatgtgctcacaaacttttgggtaataatcggcattcttttgctaacagctgttgccctttgttgtggtgtttatcactaacttgttttctatttctagggt

SEQ ID NO: 732 - DNA, 11101 bp, Zea mays
  Intron number 4 from transcript GRMZM2G032315_T01 (locus G RMZM2G032315) derived from phytozome v7.0 (chr-ID 6; pos 4 595390 to 4606490)
ctgttcattaaaaaaagaaaaaaggctaccaaaaggtgagccccaggtaccacggttggctatgacatgagaatatatgatgtgcttaaggccaccaaaccaacagaccctatatgcggctacacaaccatcatctatgacctaatcacctaaccactaacaccacaactcatttttaaggttgaactcgcgtgtgccagaggctgttgaagggcaccggcacctcccctataccaaatggcaccttcataaacagcttcttgaataacagcaggaacaaatggccttctctcctcaaagacaacatttcggtgcttccaaattttccaagtaaccaaaataattatggaattgagacctttttgatgctccttaggaactgccctaacagtgcttctccaccaacttaggccctgttcgttttgtgctcatccacagggattgagggggattaaatcccctacaagtcaaaatcctctccaatcccttccaatccccctcaatccctatggttttgggatcaaacgaacatggccttaggaatatgtcattgtgccaccgcatattaatgaataaatgagtccatacttctctagcaaaaacacatgtgactaggcagtgttgaatggtttctttagtctgatcacaaagaggacaagatgcatgataaatttacaggtgtaaagaaggcctcatacccaaatttgctagagcatgatccatatctatttagacaccaaatatgttggcgtgtgatcttgcagttccagattgtcaacaagattccaaagctgtagatactccattaatacttgtacaatcaacacccctctaatatcagaaacccatctccggtctcgtagctcttgcgttaccatcctttgcctcttatcccttttgggaattaagagaaaaagattaggggtccattcgccgatagtcttgagatgcaacaggctgcaggagctactcctgatatgcaaaggccatcacggtattggaacctccatcaccaagatgaacagataacggatcccttggcgcagaccacggtgatggaaaatacactcttcaggctcactattaatcatgactctcgcagaggtggacaacagttagctagctgactaagttgcaccatttccggccaaaaccaagatgttgtgatgagaggcaaaaccaacagatagtctaaacaaaaatcaaacttttggatcagagaaataaatctatataactttgtaatttgatgaattaaatgcatcataactttttagttaatttataattataagatattttagttaatttctgctaatgtacccggtgaaaaatatatatgatgtacttgatagtcgcctagagggggggtgaatagggcgaaactgaaatttacaaatataaacacaactacaagccgggttagcgttagaaatataaacgagtccgcgagagagggcgcaaaacaaatcccaagcgagtaatcaagtgagacacggagatttgttttaccgaggttcggttcttacaaacctactccccgttgaggaggccacaaaggccgggtctctttcaacccttccctctctcaaacggtccctcgaaccgagtgagcttcttttctcaaatcaaagtcgggaacaaaacttccccgcaagggccatcacacaattggtgcctcttgccttgattacaatgaaactttgatcacaagaacaagtaagaaagaaaagaagcaatccaagtgcaagagctcaaatgaacacggcaaatcactctcactagtcgctagggctttgtgtggaattggagaggatttgatctctttggtgtgtctagaattgaatgctagagctcttgtagtagttgggaagtggaaaacttggatgcaatgaatagtggggtggttggggtatttatagccccaaccaccaaacttgaccgttggctggaggcgtctgctcgatggcgcaccggacagtccggtgcacaccggacagtccggtgcccctgccacgtcatcactgccgttggattctagccgttggagcttctgacttctgggtcctcctgggtgtccggtgcacaccggacatgtactgtttgatgtccggtgcaccggtatgggtatgtctgacgtctgcgcgcgctgcgcgcgcattaaatgcaccgcagggagccgttggcgccgaaaagagccgttgctccgctggtacaccggacagtccggtgcacaccggacagtccggtgaattttagcggagcggctgccgcacgaacccgaggctggcgagttccggagaccgcgcttccttggagcatcggacatgtccggtgcacaccggacagtccggtgaattatagcgcgccggcttccgagaattcccgagggcgaagagttggagttggagtcctctggacgcactggacactgtccggtgcacaccggacagtccggtgccttcagccagaggtgccttcggttgcctcgttgctcctttgttgaatcctatacttggtctttatattggctaaatgtgaaccttttacacctgtataatctatacacttgggcaaacaagttagtccaaagatttgtgttgggcaattcaaccaccaaaattatttaggaactaggtgtaagcctaattccctttcaatctccccctttttggtgattgatgccaacacaaaccaaagcaaatatagaagtgcataattgaactagtttgcataatgtaagtgtaaaggttgcttggaattgagccaataaaactacttacaagatatgcatggaatgtttctttctatatttagcattttggaccacgtttgcaccacatgttttgtttttgcaaatcctcttgtaaatccatttcaaagatcttttgcaaatagtcaaagataaatgaataagagtttgcaaagcattttcaagatttgaaattttctcccctcgtttcaaatgcttttcctttgacttaacaaaactccccctaaatgagatactcctcttagtgttcaagagggttttgatataccatttttgaaatactactttctcccccttttgaacatagtaggataccatttgataaatactcttggaaagcactaagtttttgaaattggtggtggtgcggtccttttgctttgggctcctttctccccctttttggcatgaatcgccaaaaacggaatcatttagagcccgcaaaggctatcttcccctttggtcataaataaatgagtttagattataccaaagatgaagtcccttttgcttggtgctcatgttttctccccctagaatggagagtagcttggagcgacggcgatggatgagttacggagtggaagcctttttgtcttcgccaaagactccaattccctttcaatatacctaagacttggtttgaaatagacttgaaaacacattagtcatagcatatgaaggggtatgatcaaggtatataaatgagttgtgtgtgcaattaaaagaagttcctagaatcaagaatattgagctcatgcctaagtttgttaaaagattgttcatcaagaggcttggtaaagatatcggctaattgatctttagtattaatgtaagaaatctcgatatctcccttttgttggtgatcccttagaaagtgataccgaatggctatgtgcttagtgcgactatgctcgacgggattatccgccattttgattgcactctcattatcacatagcaatgggactttggttaatttgtaaccgtagtcccgcagggtttgcctcatccaaagcaattgcgcgcaacaatgacctgcggcaatatactcggcctcggcggtggaaagagcgaccgaattttgcttctttgaagcccaagacaccaaggatcttcccaagaactggcaagtccccgatgtgctcttcctattgattttgcaccccacccaatcggcatccgaataaccaattaaatcaaatgtggatcccctaggataccaaagcccaaacttaggagtataagctaaatatctcaagattcgttttacggccgtaaggtgagcttccttagggtcggcttggaatcttgcacacatgcatacggaaagcataatatccggtcgagatgcacataaatagagtaatgaacctatcatcgaccggtataccttttgatccacggacttacctcccgtgtcgaggtcgagatgcccatttgttcccatgggtgtcttgatgggtttggcatccttcatcccaaacttggttagaatgtcttgagtgtactttgtttggctgatgaaggtgccttcttggagttgcttcacttggaatcctagaaaatacttcaactcccccatcatagacatctcgaacttctgtgtcatgatcctactaaactcttcacatgtagactcgttagtagacccaaatataatatcatcaacataaatttggcatacaaacaagtcattttcaagagttttagtaaagagtgtaggatcggctttaccgactttgaatccatttgcaataagaaaatctctaaggcattcataccatgctcttggggcttgcttgagcccataaagcgccttagagagcttatagacatgattaggatacttactgtcttcaaagccgggaggttgctcaacatagacctcttccttgattggtccattgaggaaggcacttttcacgtccatttgataaagcttaaagccatggtaagtagcataggctaataatatgcgaattgactcaagcctagctacgggtgcataggtttcaccgaaatccaaaccttcgacttgggagtatcccttggccacaagtcgagctttgttccttgtcaccacaccatgctcgtcttgcttgttgcggaagacccatttggttcctacaacattttgattaggacgtggaactaaatgccatacctcatttctcgtgaagttgttgagctcctcttgcatcgccactacccaatccgaattttggagtgcttcctctatcctgtgtggctcaatagaggaaacaaaagagtaatgttcgcaaaaatgtgcaacccgagatcgagtagttacccccttatgaatgtcgccgaggatggtgtcgacggggtgatctcgttggattgcttggtggactcttgggtgtggcggccttggttcttcctcatcctccttttcatctcccccttgatcattgccattatcttgaggtggctcatcttcttgattttgctcttcatcaacttgagcctcatcctcattttgagttggtggagatgcttgcatggaggaggatggttgatcttgtgcacttggaggctcttcggattccttaggacacacatccccaatggacatgttccttagcgctatgcatggagcctgttcttcacctatctcatcaagatcaacttgctctacttgagagccgttagtttcatcaaacacaacgtcacatgagacttcaactagtccagtggacttgttaaagaccctatatgcccttgtgtttgagtcataaccaagtaaaaagccttctacagtcttaggagcaaatttagattttctacctcttttaacaagtataaagcatttgctaccaaagactctaaaatatgaaatgttgggctttttaccgattaggagttcatatgatgtcttcttgaggattcggtgtagatataatcggttgatggcgtagcaagcggtgttgactgcctccgcccaaaaccgatccgaagtcttgtattcatcaagcatggttcttgccatgtccaatagagttcgattctttctctctactacaccattttgttgtggcgtgtagggagaggagaactcatgcttgatgccctcctcctcaaggaagccttcaatttgtgagttcttgaactccgtcccgttgtcgcttcttattttcttgatccttaagccgaactcattttgagcccgtctcaagaatccctttaaggtctcttgggtttgagatttttcctgtaaaaagaatacccaagtgaagcgagaataatcatccactattacaagacaatacttactcccgccgatgcttatgtaagcaatcgggccgaatagatccatgtggagtagctcaagcggcctgtcggtcgtcatgatgttcttgtgtggatgatgaactccaacttgcttccccgcctggcatgcgctacaaatcctgtctttctcaaaatgaacatttgttaatcctaaaatgtgctctccctttagaagcttatgaaggttcttcatcccaacatgggctagtcggcggtgccagagccaacccatgttagtcttagcaattaagcatgtgtcgagctcagctctaacaaaatctactaagtatagctgaccctctaacatacccttaaatgctattgaatcatcacttcttctaaagacagtgacacctacatcagtaaaaagacagttgtagcccatttgacataattgggaaacagaaagcaagttgtaatccaaagaatctacaagaaaaacattggaaatagaatggtcaggagatatagcaattttaccaagtcctttgaccaaaccttgatttccatccccgaatgtgatagctcgttggggatcttggtttttctcatatgaggagaacatccttttctccccggtcatgtggtttgtgcacccgctgtcgagtatccaacttgagcccccggatgcataaacctacaaaacaattttagttcttgactttaggtacccaaacggttttgggtcctttggcattagacacaagaactttgggtacccaaacacaagtcttggaacccttgtgtttgcccccaacaaacttggcaactactttgccggatttgttagtaagcacataagaagcatcaaaagttttaaatgaaatagcatgatcatttgatgcaataggagttttctttctaggcaacttggcacgggttggttgcctagagctagatgtctcacccttatacataaaagcatgattagggccagagtgagacttcctagaatgaattctcctaattttgcccttgggataaccggcagggtacaaaatgtagccctcgttatcctgaggcatgggagccttgcccttaacaaagttagacaagttcttaggaggggcattaagtttgacattgtctcccctttggaagccaatgccatccttgatgccagggcgtctcccattataaagcatgctacgagcaaatttaaatttctcattttctaagttgtgctcggcaattttagcatctagtttagctatatgatcattttgttgcttaattaaaatcatgtgatcatgaatagcatcaatatcaacatttctacatctagtacaaatagtgacatgttcaatggtagatgtagatggtttgcaagaattaagttcaacaatcttagcacgaagtatatcattcttatctctaagatcggcaattgtaactttgcaaacatcaaaatctttggccttagcaatcaaattttcattctctaatctaaggctagcaagagaaatgtttaattcttcaatcctagcaagcaaatcatcattattatctctaggagtgggaattgaaacattacaaacatgagaatcaaccttagcatttaaactagcattttcatttctaaggttgtcaattgtctcacggcaagtgcttagctcactagacaatttttcacatttttcaacttgtagagcgtaagcatttttaaccttaacatgtttcttgttttccttaataaggaggtcctcttgcgaatccaagaggtcatccttttcatgaatagcactaaccaattcattcaatttttccttttgagctatgttaaggttggcaaaaagggaacgcaaattgtcttcctcatcactagcattgtcatcactagaggattcatatttagtggaggatttagatttaaccttctttttgccgtcctttgccatgaggcacttgtggccgacgttggggaagagaagccccttggtgacggcgatgttggcggcgtcctcgttgtcggagtagtcgcttgagctctcgtcggagtcccactcgcgacaaacatgggcatcgccgcccttcttcttgtaatacctcttcttctcctttcttctccccttcttgtcgtcgcctcggtcactgtcactagatataggacatttagcaataaaatgaccgggcttaccacacttgtagcaaaccttcttggagcgggacttgtaatccttccccctcctttgcttgaggatttggcggaagctcttgatgacgagcgccatttcctcattgtcgagcttggaggcgtctatgggttgtcgacttggtgtagactcctccttcttctcctccgttgccttgaatgcaacgggttgagcttcggatgtggtggcatcatcaagctcgttgatcttcctcgagccttcgatcatgcactcaaaacttacaaaattcccgataacttcctcgggggtcattttagtgtatctaggattaccacgaattaattgaacttgagtagggttaaggaaaataagtgatcttagaataaccttaaccacctcgtggtcatcccactttacgctcccgaggttgcgcgcttggttcaccaaggtcttgagccgattgtacatgtgttgtggttcctcccctttgcgaagccggaaccgaccgagctccccctcaatcgtttcccgcttggtgatcttggtgagctcatcaccttcatgcgcggtcttgagtaaatcccaaatctcttttgcgttcttcaacccttgaactttgttatactcctctctacttaaagaggctaggagtattgttgttgcttgagagttgaagtgctcgatttgggccacctcatcctcatcatagttctcatcccctacggatggtacctgcgcgccaaactcaacaacatcccatatgcttttgtggagcgaggttagatgaaatcgcattaaatcgctccacctagcgtaatcttcaccatcaaaagttggtggtttgcctaatgggacggaaagtaaaggtgtatgtttggaaatgcgagggtagcgtagggggatcttactatacttcttgcgctcttggcgcttagaagtgacggagggcgcatcggagtcggaggtcgatgttgatgaagtgtcggtctcgtagtagaccaccttcctcatccttttgtgcttgtcgcctttccgatgcggcttgtgggaagaagacttttccttcttctctttgtggtgagaagaggaagactttttctcctttcgtttggaggagtccttcttcttctctttcctcttggtgcgggactcttccgatgaagtgctcccgtggcttgtagtgggcttttcgccggtctccatctccttcttggcgtgatctcccgacatcacttcgagcggttaggctctaatgaagcaccgggctctgataccaattgatagtcgcctagagggggggtgaatagggcgaaactgaaatttacaaatataaacacaactacaagccgggttagcgttagaaatataaacgagtccgcgagagagggcgcaaaacaaatcccaagcgagtaatcaagtgagacacggagatttgttttaccgaggttcggttcttacaaacctactccccgttgaggaggccacaaaggccgggtctctttcaacccttccctctctcaaacggtccctcggaccgagtgagcttcttttctcaaatcaaagtcgggaacaaaacttccccgcaagggccatcacacaattggtgcctcttgccttgattacaatgaaactttgatcacaagaacaagtaagaaagaaaagaagcaatccaagtgcaagagctcaaatgaacacgacaaatcactctcactagtcgctagggctttgtgtggaattggagaggatttgatctctttggtgtgtctagaattgaatgctagagctcttgtagtagttgggaagtggaaaacttggatgcaatgaatagtggggtggttggggtatttatagccccaaccaccaaacttgaccgttggctggaggcgtctgctcgatggcgcaccggacagtccggtgcacaccggacagtccggtgcccctgccacgtcatcactgccgttggattctagccgttggagcttctgacttctgggtcctcctgggtgtccggtgcacaccggacatgtactgtttgatgtccggtgcaccggtatgggtatgtctgacgtctgcgcgcgctgcgcgcgcattaaatgcaccgcagggagccgttggcgccgaaaagagccgttgctccgctggtacaccggacagtccggtgcacaccggacagtccggtgaattttagcggagcggctgccgcacgaacccgaggctggcgagttccggagaccgcgcttccttggagcaccggacatgtccggtgcacaccggacagtccggtgaattatagcgcgccggcttccgagaattcccgagggcgaagagttggagttggagtcctctgggcgcaccggacactgtccggtgcacaccggacagtccggtgccttcagccagaggtgccttcggttgcctcgttgctcctttgttgaatcctatacttggtctttatattggctaaatgtgaaccttttacacctgtataatctatacacttgggcaaacaagttagtccaaagatttgtgttgggcaattcaaccaccaaaattatttaggaactaggtgtaagcctaattccctttcagtactaaatatacatggtattacatattttttattcttgactatcctagatttaaatcctggatccacaacctttaatgacagttcgactactcgacaatacgtttgtcagcgtaccccctacctccgctaagttcattatggtgaaatcagaaatatccatggcccatgaacggcgaagtttgtaaacatagccgtggcataaaacagtggtgttgctacacataacataagccctctcacacttcatttacaagagccgtcgacaaaacttctagaagctacacctagaccgcaaaaaaaaaaaaaaaa

SEQ ID NO: 733 - DNA, 2752 bp, Zea mays
  Intron number 17 from transcript GRMZM2G052142_T01 (locus GRMZM2G052142) derived from phytozome v7.0 (chr-ID 2; pos 33777176 to 33779927 reverse strand)
ttgcatactttggagtggaattttaccaaaaacaggtaagttaatgtgtgatgttttgtttgtagtaatatttggtggatgtttgatgatcccataagatagaaaccgacaagtgatcccgatttttttaataatgctttactctaaagttcagcgtcggagttacgtttggccatgcccccccccccccaacgattctctctggctggcatagagggagtctgtggccacatccctctgtgtatttggccttcgtgtttgtgatctgcagccactggccagccggccagggccagacccactcccaacgcagcagcctcctattgctcacaggctaaaagtaccataagtagccgattgaataatatttacttgtcaatcgagatcatgtgttactttcctttagagaattttattatttgatttgatattttatttgctctaatctacaaattacgtagtacttctacatactactatctgctagttttgcaaaaaaaaaaaatctcgaacgtgcaggagaattgcgcatcgttccattaaaaagaaaggagagaaaaaaaaagatacatgaaacaacgcgctcacaaccacacccaaccccaccacccacacaagacaccaaggaagtaccacagtacctcaacctgggtcatggacaaaacctgacgacatagaaggcccttttaccccagcagcacaccaaagactatattcatctccggctacagtcaaaatcttagcgatactaggctgagacccattgaacacacactcattccggtggcaccaaatgctccaggctcctaagatcaccaaagaagtaaaccccttccgggcatcttcaaggatgcggtcagccgagctgatccactaattgtcaaagctaatctcatcaaaacccggtgccaaggctgccaggcccgccctttgcagaaaataaaaccagaattgcctcgcgaagacacacgacaccagcaagtgatggatggtttcctcctcttggtcacaaagagggcaagaggtcgggtaaggaagacccctcctagccaaccgatcagcagtccaatatctatggtgcattacaagccaaagaaaaaattcgcacttagctggtgcccaggatttccaaaccccctcataaggggcaaaggaagtggaccccacaaagagcagctcataagccgatttagaggagtactgccccgaactagataacctccaaaagtgtctatctggaactccgggctgggtatcaaagtttgaaatggcttcacataaggaaaggaactcaaggatgaactcccaggaaaccacatctctcaagtctctaacccaattagagttatctaaagcttcggccaccgtccttttgatagcaacacgcttaggaaccatagcaaccacaagaggggccaaatcctcaatctgctgccccatgagccatctatcctgctagaaaatagtatccctgctatctcccaccaccaactccatggaagtagagaagataaactgcactatatccttggactgcataggaagctctgcctaaggcttagaagagtctgtcttcctcaaccaaagccatctaacacgaagaggcccaattaagattctggaagttagaaataccgagacctcccagctcctttggacgagtcacctcggaccaagccaccaactagttttgcaattaactactccctccgtctcagaaagaatgcaattctagtacaatgttatgttttagtatcttaagtttgatcaagcataaattaaaaaagtattaatatttatgttattaaataaataccattagattaattatgaaatattttttataataaattgatttagagccataaatgtgactaacattcgctagaaacttggtcaaacatgaaccactttaactggcacacaactgatagttacattttttaggacggaggatgtagtactttgcaattttgcaggtacgaattgcttccccctacaaattgcttccccctacatattgcatcgagctcgaccactgctgaaattgatcttgtattgctatcatgggcagtccgcagtcggcttggcctacgagccatttcagtattatgagaggccaattagggttagggttagaaatgagattagtcatcttgcttagaagtcaagtgaggctttctatttatggggagatgtatcagccaaatcaaataagaagaatattaatctattaccctagtccccttctccaatccttcccttgtggtttggctgccacctgcgaaagggcctctagttgagttggttaggtggtctgagtagcattccttaggtcctgagttcgaattccagtgggagtgaatttcagactgaggttaaaaatgtcactcactaggtcccctggctgtgtgcacatgagatggactgatctattaggagcggatcctcgagtaggggttgggaggcctcaaaacacgagtaaagatccggcctataggaggcggaccctcatgctgcacggggtggtagctttcgtgacctttctcggtcgaggctctgattgagcttctttttaatatattaccgtgggggcggtctttcccctaccggccgagttttttttggctgtcacctatccgctggctgttgttgttttgcatgggttagaatcatcctgattcatgtttataaaacaattttctacaattttctaggggaaacacagtgaaaatcttaactcaaggaggag

SEQ ID NO: 734 - DNA, 6911 bp, Zea mays
  Intron number 6 from transcript GRMZM2G104501_T01 (locus G RMZM2G104501) derived from phytozome v7.0 (chr-ID 1; pos 2 60958812 to 260965722 reverse strand)
gctggacaagtcaagtaagtgcctactccaatctgtattgtaaaactgaaaaattactctttgttgttgttgttgtcgtccttagtattctattaagtttattctaataaatttaggtgttgttaaagatacgatgcaaaccatatagcttctggtattggctttgtgaatgttgggaatgcaatatactgctaggagcctaggacattgtgtgacgtgtgattaatatgttgccaatgcatcacaaacaagctcagacaagatcagttgtaaaaaaaactgctaaatggaaacttgtatggctggtgtgtccacacatcaatcacattataccatatgtcaactactaaaagaaaacagaaaatgataacccctgagtatatgaatgcagaaacattgtaggcacaaggatgaatggggccagactggcaaatggtggttgatctaatgatctgggagcaggtgtagccagatttcgacaggggtaggtcgctagatttggatatctatccctttagactggtagagagattttaaacatctggagattttatcattttttacagaaaagagtagtagatataatatttgatttcagttattatttatgctgtcttatgaggattggacgatgataaaggcaataacagtgacttcgatgtgggtaactggatatcagaaacctaagttcagctatactacacttatgttccatagatgcacctgtaccctatgatatgttgtagaagaacagcaacatggccttctaatataacaaatcaaatgggctcccgcgtcccctctctcctcaccgtccgctcctctccgcctctctcgtctccacctccgtcatccttctcgcccttgctccggctctcctttggcacttggccaatggaggtttcctatgatctgcttctcctttcaagcttctccttctcttctcgcctttcctctttcatccttttccttcttcctcctcccctgcttctcttggcgatggatccggatgatcgtccgcttcttcgagctcatgacttagacccatcccctggtttggaatttcaaaaggaagtgctccgcaggtttgcttcttcagtgcatcatccttctgcttgcgttgatggctcgtttcttttgattgcggtctttcaaagatttacttttaggccccgtttgtttcgttggaattgaattccattttaataattataatttagaccaaactaattaagtttatatatttatatatgtaatatatttgtacattatcctaaatcatataagggagatagttatatactacatttatgttatagcgaagcaagtagaagaatgtgctataagttgtgcatcggaaaaatagcatgtaaatttatagaatcaatttccatctctcaccccatgaatttgggataggtttatatgataactttgaaaagtggtggaatgtcacattctaaaaaaatagtatattccattagtaggattccaattcctcaaaataaaaggaaacaaacgggaccttaaaccctttgagcattcagttagtttagctcttcaagcaattcttgggggttcccctgctgcatttcatgttcgtgaagaatcttatcgccattttcgattctccgtggcctccaaaaagtgggggtttttcctttcgcttcgaagagttaggaatatgagcgagcaacaattattttatttaattacgcaaatcaggattcgaactcaagacctttggatttgataccatattaagttgcatgcaccaaccactttaatccaaaagcttaagctaattgaaagaggtggacaattcactcatattccaacactcacagttgaatctagctaagtaaacgctatgaacctagacactagcatacaccgagacacacaagattatttccaacaattaatatgtgaggcgctaggtagattgacaacgtaggattgatgttcgtacattcatcttgaaaaagtacataatatgtattttcaatgacattttcatagattttttttttgaaaagacatttttcatagaaattactactcaaagttccacttaatagattgttgatgtccaaaagaacttatatttacatttttagaggggaaaattctaactatgttttttctcgaacgaaaattctaactatgtggatatcattatttgtatatctgctttgaattgtgtgctaacacattgttagattcatgatagcgcatagtgcaatgtcttgattacattctagaacaaaaaataattttgatgtttattactactgattagcagctaaattgtttgtgggcaagaacgcttgtcagtaggaccatagatctttgtatgcattgtgctggatttttcaaacttcttagtggtcagtaggtgggtataataatgttgggttcaatgaggttggagatggcccaagataatcgtggtttatccactgctgaagtttagcttaggaattctctcaagaaacatttcttagccctatcttctctctcgcggactattgcccgtttgagatcaagaatcacatggcttaaagatggagatgctaatacttccttgttcatgcccaagcaagttttagaaagaggaatattttcataacggttgttaatgatgaggagggacgtcccctgacttctcaggaggacaagactgttgcttttttcgacttttatcatgggataattagttctgctgaaggcagacatgttacggtggacctagatgctcttgggattcttttttatgatctcagtgctcttgatgctcctttttcaaaagaattgttggaaactatcaaacacctcccatccaacaaatccttgggtcatgatggcacacttgcaggttctataaagcttactagcccatcatcaaaacagacctgttggaagctttatgttgtgtttgggcccgaaagtttaggagcatgggtttgttaaattcaacctatattactctgcctcaaaaactggagggtgcttcccatgtcaaggatttttgtccgatcaatcttgtgcatagtttcatcaagattgcttcctacgcaaagggaagctcacgcgagggccaagcaccacagtcgagtaactccgtaaagagtcgcgggccttctccacacgcaagtgttgctccgcttccggctcctctcggacgctccccgttgtctccactatcgtgcttccggtcgaaacgccacgggcctcgttccatccagtatacggtggcggccgtgacacaaacacgttgtcacggtctcgcaagactctcgtcccactcgatacaattacaacaactcgcgcaagagccgaggggttgtgtggtttttctaaactcactcactcagctaatacggtctaactaacctaagcacttcgcaaagcacctatgctaatcaccgagtgattctattaagcacttgggtgtttgagcacttggaaatgtctacaatatgccttggtatgttgtttgggctcccacaccttgaaatggccggttggggggtatttatagcctcccccacaattatagtcgttggacagaagcaacatctttctgtcgatggacgcaccggacagtccagtgaacaccggacatgcactgttcactgtccggtgtcttgccacgtcaaccgaccgttgagatctgtagcagtcgaccattggatccgaccgttgcccagactgtccggtgctacagcccgagagcgtccgttgtgggcctctctacgcagactgaccggtgtcccaccagtgcgctggctgactggccacttcatggatttcttcgttgtttccttgggcttcttttattcttgagtcttggacttctatgcttcttttatgtcttcttttgaaggtgttgcatccttagtgccttagtccaatcctcttcgtatcctgtgaactataaacataaacactagcaaacatattagtccacaggttatgttgatcatcaaacatcaaaatctctttagccaaatggcccgggtccatttttgttacagttcgggtggtcgcagcaccgtccagaccgcctgcgccggcttgatgtgttggtgcctgcgcactcgcttgtgccgcgggggtcagaggcagacaatggaacggcgtcgggccttggcgtggggaaggcttgacgctgcgggttggtgatgccggcgtttgcgcgtgtttcgaaagcccgtgccaagtacatcgcagtctgtaggtctcgtggctcccgaagctcgacatcaatctggaaggccaccgacgaacaactctgccttctatgccgctgagaaattgtgggtgtcgcacagtacaacgttgaagcggtcggcgtagtcctgtaccgtgaaggtgaacggaaggcgtgccaactcaaagagacatgtaccccgcacggttggcccgaagcggagggtgcacagttcccggaagcattcccatgcgggcattacttcgttctgctcaagggtggtaggaggccagtcacgttcaatccgaggtccgcgtccgctgaccacggaacaactgcccgcactgatttatccagtggaaggggatctgtcgtgccatcgtaggtggggaactctagtttgtagaaacgaggctgagtcatggcgaatgctgggtctggggcgatgccctggtaatgctggatggcagggctgccacagtcattggttggctccctataaattaaagttccatcgaccccgccataaaaaccccgctggggctagggttgggttgtgcggccgtggttgagattgttgccatcgtgtattgcgggggttgtggtagtggcaggacgtatgacggaattggcaatggtgatggtggcatgggcaggaggtggatagggacggggttgctggttgtctgggtgggtcctaggagctggggaactgacgctggtggtaaggctggtggcagctgctggatgtgttgctgtgttgggttgctggatggtaggaaagtgttggataggaaggtggtgatggctgccatggatcgggtgagatcggtgacctcctgtgcgacggaatctagggttatgggtggcgtgggtaagggaaatggaggacaatggatgtggtgggttgtggggggcatagatgtcgctggtggcgtggaggtgatgggtggaggacctgacattgccgataccagattgataggattcctgatcctaccggggatgtcgcgtagggaataggggtgaggagatggagcaggctgatgtcgcgtagggaataggggtgaggagatggagtaggctggggatcacggcacacgggcgccgtggctgggtgttcctgggcgattcacagcgattcacagagaggaggcgagtgctgctgctgggcgcaggtagcaacaattgctgcttctgcttgattccattagatgatccttacaagtatttatatccctgctagatcctatcttgatctaaggataagagatcatatccaactatcttagataatctcttatctttatctaactaatcctaagataatctctattctattagataagccttatctaatctccctggctagctgtgacctatggttggtgcctatattggtggccgaccataacatctctcccggtctgcgcaaatagctcgtcctcgagctggaagttggggtagaggcggcgaagttgtcaagttcctcccaggttgcctcctcttgaggaagcccttgccgctgcactaggatgtgccaggtgccccgatgaagctgagccctcagagctttggttggtgcaggcaggaggtgtccatcatgaactgggggaatggatgctcgctcggtagggggatcacccttgtggcactttttttttgagagaacaggaggggggaacccctactgaaaattttattaaaactagaaaaaatacagttgttagagcatacagatagacatattacacaagggaggggttagctattactgccattgctgaagccagtcaggaatggaggaatcgaatcttccatccttgtggcacttcagcagacccacatggaacacgtcgtggagacgggcgccctctggtagctgtagtcggtaggcgaccttcccgatgcactccagtatgcggaagggacctgcagagcgtgggtctagcttcccctattggaggttggctaggcctttgctcccaacaggaggaccgttcttttgagacatgttggatgagtagcagtttcagagtggacaaagcagcaggaaaggcttcaattctcctaaagcttggattatctggaagcatagtaacaggtgtgtgttcaatggctgcagtccaagtctggttgtggctctttgggcagcaagggaggaagccgtcctctggtgtttggctggggccaaagctctgtctttccttcaggttgatgagctcctggtctagttgtgttgtagagttctttgtctagctagtgctggggtgagttctgtgttgtttgtcatggatgtgtttttgtactctagattctggccaccgtgaggtggctttcttttactagtccactctggatctttttctctccttaatataaaagatgcgcaagtctcctgcgtattagagaaaaaaagagaggttcaccgatccatgtttgcggtcattgcaaggaccaaagcacattttgaaccaaaaggcgtacttttattttgttttgaagcaacaaattcaaagtcgatggttgcaaaggaaatctactggcactagtgtaactctgcttgcatgatggtacccatatatttgaaagacaatcctcattttacttattcatcattgccatctcattttctaaggatgataatttaattcaaacgtcactgcagagaaagttggaaagatcagaaaacggc

SEQ ID NO: 735 - DNA, 2037 bp, Zea mays
  Intron number 1 from transcript GRMZM2G006745_T01 (locus G RMZM2G006745) derived from phytozome v7.0 (chr-ID 8; pos 9 5020202 to 95022238)
cagcccccggccctgcagcccggaaggtgagatcagccttccagatacttctttcgatttacttgtatgctagaggattagccgactagggtttgaggatgttgggattttaactctcgagccactcaatttgactgcccatgttcgtctggcggggaacgggtatctgtggaatttttttttggggctcataggttggtaaattttcgaggggtactggtcggttcacttgtcgagatttttaattagggttctgggaaattatatccgtaagatgccccttggtgagggttgtgggatttccttgtcggattgtgccattgtgccctagcaattccggaattagggtttctggtggtggtccgtgtaatttgggcccataggatggtggttgaggtatttttcgttggtgtggaattggggtaaagggctttaaatggggatcgttgtcctgtttgtcattctaatttgactgcagtggatgattgctagttcctgtatggttgagcatagtatggcgcccttaaaatagggggaagctcatgctgttgcttgtttgtcatgttgaaagctggaatcgtatgtttaatctactagaaactttattctgggtatcaactgctgtaagatgtggttttagaagcctatcttgggtatttatagcggtgtagatataggcttaagcttcagagctgtgagtattgttcatattatttgatcttcaggttatgagtattgtttgcatcgtactgagtggcagtacagtgtgcatcatctccacagaaacgtgtatacttggaagcttgtagagcgtgcctaacttgctgctaactttgtttctgtatgttgtcaaattctattgttgttagttttccttaatccactatctgatacgtactatgtctatttgtcttgtcttatcggtaatctatagagcatatggagcagagggcagtgctgtggtgcatggttccatcagaacagtaggtatgactgctttgatcacctcttgtgaaaaggaaatattgactgatatgagtccacactaggcctggccctataaaacacaatcacacaaataacaataacagtttatgtttcagcaggaggccctactcttgccttgaatgagtgccagattttggtacagcagaaaccccagggagattcacgactgctggcctctaatctgtggtgtgttttaactgttctatatctggttgctctctgctagagcatctgagctatcactagcagtctttgactgatagtgttgtgtgcttgatgagtgagttacccttgtgctgtggtgtgtttttacttgttctatatcgatctggctgctctctgctagagcatctgagctgtcacttgcagtctctgactgatagtgttgtgcgcttgatgagtgagttatccttgcgctgtggtgtgttttaactgttctatatctggctgctctctgctagagcatctcagctatcactagcagtctttgactggtagtgttgtgcgcttgatcagtgagttacgcttgcgccagatactgaagtgatatctgtttctcttaacatggttgtctactctgtagaaaattatgcaatgtgttcaaaattaaatattagtaggtttacaatgacaaatattgtatctgtttatgcaaatatgtttaatgtgtaggaccttttgattaaaaggtcaactaacagcgtgtagggagcaaaatagtatctgtttctgtggaggtgatgatattaccatgtttgaacatttggtattctgagcactctaagatgaggagtgggtgagatagtcacctgttctgttttaacgttttgttattttgattgttctctgcttattattgcatggttattattagtttatttctggttgaaatagtatacctgttggggcatttttgttattttgcttatttgtacttcattgcattctcgatacagtgttctatgcgacgcgagtactaaaatttacttcgtcaattaagcaggaagaagcgacctcgcagatcacgag

SEQ ID NO: 736 - DNA, 4309 bp, Zea mays
  Intron number 2 from transcript GRMZM2G165195_T02 (locus G RMZM2G165195) derived from phytozome v7.0 (chr-ID 7; pos 1 48322691 to 148326999)
ggatctgcaaaggtagtttacttttcttgatttttttggtacaagtgttaggccctgtttgtaccctctagattatataatccagcttaaataagttaagagacaaacaaacaacgcatattattaagtagattatatgatctagatacctagattatgataatccataagcaggtcataggtgcttaactgattatataatctataagctagattatattatccaacaaggaaacaaacagggccttactctgctagtctgcttgctctctcgtgcttagcatagttcgttgggattttgagagtaccacagtttgtcaaggtgaatctaggaacaatgtagatactaatcaaattgatctcctgccactaaacctaaggttttagaattgatgttcatttcattgtgtaatgtggatttagttctattacatgagcgaaaaaaatcctacaggtcttagtgcaggaatattggacacgataggaggagcaattgcactgaataaaaaaaacaatatcataaccttttcacacctcattacgaattttatatgccaatgccatacatttgatagactataactcttggtgtaaagcttcatatctggcaatctaatataatatgaagcatgtttttctcaccgcaaagagagtgaatgtgaaactggatttgcttacattatataggttgaggatgattggatttttttctccctatctgtttcttacctttattgtgttgtctggttatctgtgaaggaaggagaaaatgcgtataatatgtgggatgtttattgcttgagccctcgagctgtttatataagagtacatggcttggagggcaaggcgcctctcctagagataagaaggctatcatcggattacaatcaatcctaaactatccatatccggtgttgcctaatatactttaacatccctccgcagtcacagagggagtggcgcagacgatgagactgtagaagaagcagtcgagctgacatcccctccacagtcgtaacagtcgatgcgacgtagatgctgtggctagagtggaagccaatgaggttgcccaagcaaggcagtagccctttgtgccgatgtcgaggtagccaaggatgaggacgcagagccgttgtcgaagtgccgtgtgttgggtagtcgtggtcgaggaagatgtcgaggatgacggagaaaacaaactgcacaagtcacagcgctccagaggacgtcgtggtgaccgtggcgttgagaagcagtcgtagacaaaggtgcgatgcgtcgaggcagatgagggtgtcgatgccgggggcgacgtgtcaagcagccatggacgatgtgtgttctaggtttgccaagcctagaaatgtgtcgtggatgaatgcacgtgtcgatggtgccagtaccagacatactaggtagagggccccaacccatatgtgccagcatctcaagggaccagcaaaggaggcctccgtgacggttgtgatgaagcacggagggagtgtcgatgcaacgcacggttgtcagagcggagtatatgaagtagtcgaggacgcgataatgaattccctagatctggcgacaaggctgtgctagacaaagcgaagaggtaggcgtgagcgaagaggtaggcgtggcgacacatcgaggttcctggagtcgcggcggcgagagccacgactcataggaaactaacctcaatggtgccagtggagcgcgatggtggtatttgtcggcgaagaactcgatgacaaatgcggtgcagttcggcgacggtggttgcctggctggcacgcctaggacaggcacaacatcagcgcaaggtgttgacgcagcatgcaggaggacccgcagcgcagaacaatgggtgtgtcgacgcagctcgcatgtgtcgaaccgcttgctcaaaccgtgcgcgggagacacgcactgacgaggtcgacgatgatgtagatgcaacgacgttagttgacgacagacgacgatgctgctaattgaggtggcgacgtaactacgaccctcttgcttggcgaagcatcgcgcgatggacgacaaacgtctcaggaggatggttcacccgcgatcggttgatcaggccgatggcgtgcgagtcggagacgacgatggtgatgtcgatggtggagcctcctgatcggtggcggcgacgacgagccgacattgatggacgtgcaaacgaagaggagagacacatgcatgcgttttggttacgccacatgccatgccagttgcaccatcggataagatgaagaagtcggggttgttgaagccgatgtcgagggcgcgcgagtcgactggcggtgggcgatggagatgcaaacccgatcactgaccgggaaaacaaaaaaagacgtaacaacaacaaatctagggaattcatcggggtaccgaggcgcatcccctgcgggcgtgcggcacagtggcgcgaccacgcggacccgacttgctggcgcgacctcggcggctcagcgcggcgcggcctggcgaggtcacagcctcggcgcgggcgtagcgtccccggcgtaggcacacggctccaacgcgagcgcgcaagcctgacgcgcggatccggcgggattgaccgacagcgacagtcggagccgccaccatggcggcgcacgacccagctagcacgcggggattcaacccggccacaaccgtcaccacgacggcgtgtggaggtgttggatccagccggtgcaggtcgacaggggccgatccgagcaacgccgacggtgagtttttcgatctgctgctactttgacttgacacgatgacgatgatgggcacaacaaatcagagggaccgtccgcgcatcctacaagggcgctgcccccggcggaggacgatcttcccgagggcggcacagcgacggcagcgcggcggtggcagcggaagacacctgttgtatctaaaccctaaactcgtgataccatgcaggaaggagagaatgcgtataatatgtgggatgtttattgcttgagccctcgagctgtttatataagagtacatggcttggagggcaaggcacctctcttagagataaggaaggctatcatgggattacaatcaatcctgaactatccatatccggtgttgcctaatactctaacaatctcaccttgaaatggaacaggctacattaaatatttaaatctgtaccaatcaaagaaataatggaaaacatcaatatatgattagtctcatatttagctctgtgttgttagtgaaagggcctccggctgaattgtccgggcggtctgagtagcattccactataggtcctgagttcgactacccgtaggagcaaatttcgtgccgaagttaaaaaatcttcttgtttgtttcacaccaaagcacaggtctaagacctagccccgatagtggtcattatcatttgggctatgataccactatgtataggtgaggcagttgttcaggggttttctcgacttgtttgagaatgtattccctttcccttcataacaatgcggttgagtttttttttttttactttgcgttattatgccagctaaatataatttcttctgatctttgatttgttcatcatcagaaaggcaagctactgtagcaatgtacaaatagttactaatgttagatctcatttttaaaattttcctgttcttgaatagttgctacacatgtgacaactattcaagaacaatagttgatgttacaatagcagagaatgaataaggcacactcatgccatttaaaacatgttcttaagtactgagggattgtaagtagttagggattgaagtttgccaaactatatacgacaatggcagattgcttgtccaccaagttgtcatggtggtgctggttgctctcaggactgtagaattaagcacagaccacttttcccagcagcaagttgtaaaaatgagttagaaactatttccagcagcatactgttgtcccagctttcacgaatatttttattataagcagcagctgcgtactggggggcacaagggtggttatttgaacaccttgttagttgttacagagaattcattagttcatgaacacacatctcattcacatgtaccagcatttctgtgtgttttcctccttggcatatcaggttccaaacttcaacagcagacacatacaatgtcaatttttcatcactgatcttatctgtcagaataactgaataaggctaacagtttggtgtactgttgattgttgatgttatgacatatttttcatgacaggctcttgctaaggaacttgtaagatcaagacgtgctgttaatcgtct

SEQ ID NO: 737 - DNA, 11311 bp, Zea mays
  Intron number 1 from transcript GRMZM2G170452_T01 (locus G RMZM2G170452) derived from phytozome v7.0 (chr-ID 2; pos 1 34833701 to 134845011)
ccagatcccagagaagcagttgggtatcctaagtgcaagcaaagtgaaaaggtatcatttgtagtagtattaattctgttcaacaatcaattccagaaaaggcaatagcacatcccatgttgaagaaacgatcataaaatatcaagttataccacaaattaattaattaattaagaaaaaatagtttgaaccccaatttaaccaagcgaccaaaaagacagccggagcatcatcctctctttctagcagcaagtgcaacacaaactgctaagagtccaacaactagcaagaatataaagttctagatacatgtagcattttaagctcttctgtcttctactcttctcggtatgcagaagctcagaaagtaaaagaacaattggtgactagagcttttgtcatgattctgagatactatagtaaaaaccaccataaaaattcgagattaaaaaaaatcttatatcaacttctaggtacctgtccaattgacccaaagcgatacatgacattttcttccgtttcatcagaatttggtggggaccaatacggatcaaaagaaactgcactaacctgtataattgcaaattaattcgactcaaaatggaggtttcaattaaaaatgctatgtgataaaagcaaagacaattgtaacgataatgtcacccatgaattatgcccttcaccccatgcaactatctttctatcatccatgctccatacttgcacaagatcatcttcaccacctgataacaaatatttgccatccgcactacagaacatcacaacgaactaattagcaccttccagaatctaattcacagaagtgtagagagaataaaacaagattcaaacatgcaatggttgtatgcataaattaggcaatccattcggtgttgttattaagtcctgtttcctaagcatgtcctgtttcctaagcattctcctagttacttgtgctagttaattatagtcattaaagaccttgagcagctcaacaggtgtgtgcggctgccaaggctcctatcagattagctaagctctaatgagctgttatgtaatcaatgtgactcatctttctatataatcaagcaatgatagctgaggttagtagtcccggcaaaacactctgtctacctctaacatttggtatcagagcttaggttagacacctgagagcctcaaggccgactcctctcttctctactcatgtcgacctctgttgagcgcgctgccaggctcaaggccaagggaaccagcgaaggagagctgggcgacttctccagccgggctgcatgtctgaaggctgcagaggaagcagcggtgctggcagtccaggcagcaaagcaggcagcggctgcagcagaggcggcggcaaggacggcgcaggagctgcgggctgaaatcgccgccgagaagggagaagatgaggaggtcgaggaagaggaagaggagatggagaagaatcggaggccgtggactcctccgcgagatcggaggcgttcgcagtcaccactgcgggaccggaggcgctgccgcggcggtggtcgctacgagtcgccgcaaggaagggtggtgtaccgcgactccggcagcggcacggcgtggccgatgctggacaagacgaattactacgagtggagccagactatgaagctgaggatgcaggcgcgcgatctctgggacgccattgaaggcggtcctgtccagttccgcgatgacagacgcgcactggaggtgatcgtcggggctgtacccaaggagatgggtctcccactgctcgacaaggctacggcgaaggaggcgtgggacgccatcgctgcgacccgcatcggcgtggacagagtccgtcgagcaacgctgcagcgcctacgctgtgattgggagaacatcagtgtcaatcctggtgagcaagtggatgactttgttgtgcggttgtcaactctgcaccagcagcttgtcatccatggtgatagggacatcactgaggagcgcgtggtggagaaattcctgcgcacggtgccagccaagtactcacagatcgtcgtcgccattgagcagttccttgattttgaggcactgactcttgaggaggtgactagaaggcttaaggcggtggacaatcgcgaagaacaagtactgaccgagccggtggccatcaatggcaagctattgtacactgaggagcagtggaaagcgcgatgcagaaaggagaagaagggagacgatgcaggtggctctggttccaggaaccagcgcggtggcggtggatgcagccgcggtggtggacgaggacgaggcagaggaggtggacgtggtggcggacgaggagacggcaatgttgctggccgtgtcggccccaacacctgcctcaactgcaaccaggaaggccactgggcacgtgagtgtccgcaaccgcgccgtgaggatgcagagcacggcagtggcggtggaaaccgtgctggtcgcggcggtggcaatcgtggtggaggtcgcggcggtggcaatcgtggtggaggtcgcggcggcggaaatcaggctggacagcgtggcgggaaccaaggaaggcatgaggcgcgcgtccagtacgccgaatgtgaagaagatggtgctctgtttctggcacatggctttatcagcctggaacagagcacgccggcgcacagctaaacggcgcagcacgtcgagctctctgagccacgtgcctgtgcctaccttggcgtggatgaagatatggacagcggttggtacctagactctggcgcaacacatcacatgaccggacgtcaagaactctttgctgatctgaacactggcgttcgaggaacggtccggttcggggatgcatcgaaggtggaaatcaagggagttggatccatcatttttcaagccaagactggtgagcagagagttcttcacggcgtttactacattccagcgctgaagaactccatactaagtctgggacagcttgatgaaggagggtccaaggttgttattaaccatggcgtgctccgcatttgggacaatcatcaccgattgctggccaaggtacatcgagggaagaacaggttgtacattttgtacctcgaggctgcacaacctatctgtctcgcggcgcgcaaggatgttgaggcatggcagtggcacgaacgtttcggccatctaaacttcgatgcactccggcgactcagcaaggagaagatggcgcgtgggatgccggtggtcgatcatgtggaccaggtatgtgacacttgtgtcaccacgaagcagaggcggcgctcttttccggccgcagcagcatatcgtgcccagaatcaactcgaattggtgcacggtgatctgtgcggcccagtcacgccagcgacaccggcgggcaaccgctacattctgctgctcgtcgatgatgccacccgttttatgtgggctgtgttgctgccatccaaggacgcagcggccgaagcaatcaagaagatcaaggcagcagcagaggtggaaagcgggcgcaagttgaaggtcctgcgcaccgacaatggcggggaattcaccgtcgcggagttcgccgcatactgcgctgatgaaggtattaaaaggcatttcagtgctccttattcaccgcaacagaatggtgtggttgagcgcaggaatcaaactgtggtggccatggcacgagctctgctcaagcaacgccggatgccttctcggttttggggggaggctgtgatgacggctgtgcacattctgaatcgatctccaacaaaggcactgaagaatgtcactccgtatgaggcatggcatggccaggcaccaacagttggccatctcaaggtatttggttgcgtggcttatacccggcggcttactcagctccagaaacttgatgatcgtggtgaggctggagtgttcattggctatgcagaaggggccaaggcatatcgtgtatttgatccagtgtcccagcgcgtgcgagtcagccgtgatgtggtatttgatgaaggacgtggctgggactgggcatcagcggcagcaggtactttagaggcagcaggcagcgattttgttgttgagtttccatgggcagaagagttttctgaagcagagagttcagtgttaccctcaccacctcttcagtcacatcctacatcacctagtctccctttggtgagtgcaggagagtctgcagcagaagcagaggaatccgcagtggagacagaggtgtatgtgtcgcctagaacacctacaccagctccagcaagcccgcagatagagcatgtgactcctctggagaatgatagtgaaagggtggatgcttatcatgatggtgaagagcttcgttataggaagatccataatttgtccagatctctttgatctggatttatctcttcttcttaatatattgaggcgcagttctcctgcgtttttccaaaaaaaatattattggtaatcagccaacccctttgccggcacagaggttgtttgcagaactgaacctcactcatgccggtgagcccacaagctatgaagaggccaaagatgacccagattggcaggcagcaatgaaggaagagctgagctcagttgagcggaatgggacttgggaacttgttactcctagtccaggtcatcgcccaatttcattgaagtgggtgtttaaattgaagaaggatgaacatggtgctgtgatcaggcacaaggcaagacttgtggcacgtggctttgttcagaaggaagggattgactatgaagatgcctttgcaccagttgcaagaatggaatcagtacgtgttttacttgatctagcagcacaagaaggttgggcagtacatcacatggatgtgaagtctgcatttctgaatggagaactcaaagaagaggtttatgttactcagccaccaggctttgaagtatcaggagaagagaagaaagtgtacaggttacacaaggcattgtatggcctaagacaggctcctcgggcttggaatgccaaacttgatttgactctcaagcaaatgggttttcagcagaatgtatatgaggctgccatgtacaggaaaggctcaggtgattctttgctggtaattggagtctatgttgatgaattgatcatcactggagtcaatcagcagaaggttgaagttttcaaggcaaaaatgaagcagacattcgaaatgagtgatttgggtctgttgtctttctatcttggggttgaggtaagacaatcagagggaagcattactctgaaacagactcattatgctaagaagatacttgagctcggtggtatggcagactgtaatccagccaccacccccatggaagaaaggttgaaactgagcaaggaaagtacagcaaaggaggtaaatccaactcagtatagaagactagttggtagcctgagatatctagtgcacacaaggccagatttggcttttgttgtagggtatgttagcagatttctggagaagccaacagctgaacatcttcaggctgtaaaaagaatcttgagatatgtggctggtactctagatcatgggctatgctatactagaatgacaggcaaggcaagatttgtgggttatagtgactcagacttggctggagatattgatacaagtaaaagcactactggatgtttgtttttccttggaaacagtctggtcagctggcaatctatcaagcagagagttgttgccttgtcaagctgtgaggctgaatatgtggcaatgacaacagctgcaacccaagccttgtggttgtcaaggctgtttgcagaattattgggaagagaagttgaggtggtggaacctagagtagacaataaatctgctctagctttggcaaagaatcctgttttccatgacaggagcaaacatattagaatcaagcatcacttcatcagggactgtgtggaagaaggtagcatcaaaacagaatttattcccactgcagatcagcttgctgatatactgaccaaagccttgggcaagaccaagttggaagatatgagaagcagaattgggatcaaggagatcaagatcagttgaaacaggccttagggggagaaatgttgttattaagtcctgtttcctaagcatgtcttgtttcctaagcattctcctagttacttgtgctagttaattatagtcattaaagaccttgagcagctcaacaggtgtgtgcggctgccaaggctcctatcagattagctaagctctaatgagctgttatgtaatcaatgtgactcatctttctatataatcaagcaatgatagctgaggttagtagtcccggcaaaacactatgtctacctctaacattcggaagataagatgttagcaggaaaggtttgagtatggaacttgttcaacaaatagccatataacaaatactgagaaccaagtagtagcttggtttgttagtactccagttgagatgatggccactgagctcaaccagaggatcaccaacttgcaggtacctccctgagaaaatgggattcagtgacttcatggctagcaaaggttcaccctacttgctgctatcctatcacaactcccactcaaccgacctcattgcaagcccttcttttccattcattccatcccaccccaaagcctttaacttcaagggcacaactaaaactgaattaagcactgtccccctacggccctaccctagcaatgtgcaggatgattttgaaaaaactggctggccgggtattatatgtggctatgtacttatgtagcccatctttacaatgagctgagaatattgtttgttaatgcagtatatcattgtcagctgaggtagaagccatggtggtgtgtcattgtaccagctgctgcaagccaatatacaagtacatcaccatgtaccacacttagaagtagtaatggatcatgatccaaatatttcttcacaataagttagggtccttaataaattttagttcaaaaatgaataggaatagagcctgaacctaatccgagtggatccttagattttgtagtgtaaaatttagagctcattaccacccctaaccacacttcaaatttatacattgtactagatgtgccttcatcctttctcgttccttcatcttcgactcagttactccgttatgtacttgttcccatcttgccatttctactttttctccaagaatttcagattttctatttagatgtttgtaaccatgaattattcaactaacagaaaaacttgcatctgacatattctatatcgtaatattgcttcatctaatatttatcgattctgaatgttaggaagaggaaaagccgagcagatggactaaatatcttgcccctagcctgctataaactatccattctaaaactccatacattatgctcatgtaattatgcaaaaatggccaacggtactaattcgagttttgacaaacatctcaaaactaagtttaacaaggtaaaatgacatgaaaaagattggaataggtttgctatatagtgattcacatattactcatgagtcatcaggactacacaagttaaaaatatataaaatctaaaaaccaggcagtaatacaaccatagttgttaaggtgtcccatccccaaggcgacgcttaagcgtcacctaggcggtaagcgcgccggcgacgtaaggcgtcctgctcgccttacgcctgcacctaaggcgagtgggagaggccagtggtggctccagcagcggctcctccaacagtggcgttgtggctcctccagcatcggcgccgcagcggctccagaggctcctccagcagcagctggcacaggagagagggagccagctggagagagagaagaagagggagagacgccagtggggagagagggggaggcagggtcgctgggagtcgggagtgaggcggctaggtcactgcctcgctgggaggggaggagtcaggagtggcggctgagactgggagaagatagagagggagaggtctaggagagaaaatggtcttaacgctagtgggcttttgggctgatttgtagattgggggctaagtttttcttttatcttttcctcgtttttatcctaaatactttctcaaatatcaatatttttctatttttaactatatttaaggcatcgcctcgccttacaccttatcgcctaaaaggtaaaagagggccagtcgccttacctcgccttgccgccttaacaactatgaatacaattgatgcaatacatcattaagggaaccatgcacagtcccgtatatgtcagacttggacatgcaaaaatatttcagttctatgaaacttatgcagaataggtggcagaccatatctaggaagcaaaacatgctattggcagcttacctccaagagcaacacaacagtgcaccgtagtaacttttcccaccaaatattagttgttctttagcaaagtcaaatactcttaaatggcctgcataagatcagattgttttagtgcagtatacaacttttccaacagcttaccattttctgcgtaaagctgtcgattctcattcttgggtagagaaatttaccatcacgcccaacagttgccaagtaagcaccatccggtgaaaaggaaatgtcattgattgcaccttgacagatgtgccaccttgcaattggattgctctgcagtataattttaaaccatagaatgaatcatagcagacgcaacattaggactcaatgatgttaaaaaaatccaattaagggcatgcttaattctcttgctcacccttgtctagccttgcctagcaaggtagagaagaaaaactcatgaagctttgtttggtttgaatttgggcaaggtggggatttcccttgctttggaaggagtgctagattggctaacctcgcctgtgccttgcctaaccttgccaagcaaggaaagtgggcaagtttgttcaagacaaccaaacatgccgtaactctcataggtacttcgcaaatcttgtcataaaatcacagcaatgataattgtttcacacacttatattatatatttccagtatgacctgctggaatgggtttagtactattcggtagctggtattagctgataaaaaggtcaggccaaggatacacaagtttatgctttaatgtcgactaccaagaggcaagaatgcagccaacgccagtgcacacctttaattttgtcagccttcaggtacttatgatagatattttggtatgtgtcagctacaaagaaagggcaatagagtgttgcaggaggtcaaagcacttgtctccataacaattttccagaaaaaaaacattttactaataccctgaagtaaattatggaacgtacatagccatgtcaatgtaatttttagtaaaagagatatcatgtagcttgagataccttactcgactttgcatgtgaaatcagcacctgactttgatcctttacagttggaaatgtccaatcagtatttccatccttgcactgaatgtagaaaagaaaacttatcagcaaagtaaatttaacaaagtatggttacttcatacaaagttccatgagcattaagggctcactttgtcatacacgtacagattcccatcagcatgactaacaacaaaaattccttcacgctctggaacccatgcaacacaagtgctccgactgcatagattggtgtccaagcatcaatatatacttacaatttaattactgtgtaaagaaaagcattcatctacacacagaaatagtatcttctgttttaacttcggcatcgtagttgcctttgaactaagaaaataagtttaagtaaactctactaaaaaatgacaagggaaaatccattcaaatatcctagacagcaggcacagcacataatcaagattatcatccttcggtagtttaatcgccacaacggtttcaatatagcagatcccactatacaagtatgtatgcatgctaaccaaaatgcttccctttagatcttactcatgacacggtctcccgaagtatcctttgaccatttatttattattttatattatattgttcatacttataaacttatgatagttggattgtacatttgattgcaaatctaacggtgtcaagtttgtattataatcaatgttttcaggttgtccgactaatcatgattagttgctattagttggtcttatcggtcctatcgataaggctccctaacgtgatcaggtcaactagaaacctagtcatctgattagtcggcgactaatcgcgactagtcatccaaatagggtggccggctactaacctaatgtgtgatgtcatgggctccgagaccggacccttgaggaattttagcctaggcccattagagttcagattcagatatactctagttagtctcttatctcatcctctctcctctctacccgtgactccgagcgcctcctctctccagcccgtgcaccacctagacctagagaccatcggccgccgcttcttggacctagaggcagactgatccgctgctgcttggaccactgcctggacagccacaaagactgtcgccacggacgacgcttggagatgaattcctcttcagatggtatggctcattggctctgctctgctctgctctttgggttctgccgtgttgctcctagctcgaagtgctgctgtagtgctacgcgctgctgtcaattgtcaggttgtgctctgttgctaagtggtgctgttgttgatgaagctcttggtgcaactcagcatctaagagggaagaatatgccaagggctgctgctgctcgtgctgcctctgtgggtgctactgttagacaaacatacactagaagcatgcaaggaatactatagttgcagctctagttattgttgaagaggacaatgaggagatggaggaagatgaaccagcagcacatggaggagactttgattatgatgagatggagaaagaagcacctgttgcagctgggccatctactgtagcagcagctggagatggaaaagaaggcttccattggatgatgatgtacttgtttagtagatgcttcaaatctaaaatttattaatataatattctctttgtcatttagatgcatttaaactctaatttgttgttgttctagacattgatatggttcgattatgtaatatggagttttagaccaatttacttggctgttggctgcttggtcatatggtttaatccttctttacttggcggcttggtcatacggtttaattacctgattttgcatcattgcttggttgctgcgctgccacttcttactcatttaatccttgtttcagatacaagagctgcaactcagcaagattggagtggg

SEQ ID NO: 738 - DNA, 3898 bp, Zea mays
  Intron number 1 from transcript GRMZM2G108424_T02 (locus G RMZM2G108424) derived from phytozome v7.0 (chr-ID 3; pos 2 04361878 to 204365775 reverse strand)
cggtcctctcctcccgctccaacatcgacctcaaggtatcttcccctgcatcttccccgccgctctccatctacctggccgcgacggaactagccgtgcgccgtgcgcgtccctatgggcctgtttggttgtggagcaaagaagcctgaccaaaattaggtaagtgaccaaagctaggctaccaaccagaatttggcaaatgtcgtgatgtttcgtaccgtcgtgtgcttctgagcgtgtggtgattattccctgcatagctctctctctctctattagttgtgcggtgcagtttcgtcggtagtacggtagtagatttgggtcgtcgaaggcgagattttgggttttggggaactgataataaatgtaggtgaaggttgaaatggtcgtgttctgctgctgagggatgctgtgatgtgatattttgctcaaggacaatgatgctgtggtggtcatggacaccgttgtgagattacacatggcagtgtgaatgttttatgatctgggctgtatggtgtgcttaagttgttttcatacttgtgaacaattgattattgaattcagtagtgttgctgatcacatgttaaacagtttttctgaagaagcaaatcacagacagattacttttgatgtcctcttgcccatggatgttgcccttgtgccattgattatcaggaatttactttaacggatgggactcatttccttgtttcttaacattgttttgattggtttgagttcctgatcatgtgatgatgattcatgagtaggtgatttcttaaatcacattctttttgtttgatgacaaatgcaagcatgccagtggagagacactctagtcagtgactcaacatgctcagctgttattgctgttgggctaggattcagtgtgataaatttgatggatatcctggtaatgctaccatattgtacactcaagaagttgcttagggttttcaaccttagcaattaagggccataatattttaatgaaatctgcaaaaacattccttctctgctgtcccctctgattccaaattaagtcattttatgatcctagctggtcaaacttctttgacttgacctatcaaatatcaatatatgaaaattggcataaattcataacacatggttgatgttactagaaggataggcctgacgcagtggtgagaagcctttccactgagcaaaaaggtcatgggttcgacgtggcctctctacaaaatgcagggataaggcttgccttggttatttcttccctagacccaacacatgtgggagccaccagcactaggtctgtccttttttatttcaagttgtatgcttctacaataaaagctgcaagtcaaattttcatatcagagacagtatcacaatcctaagcaacttaagtttggaatcagatggagcgaatggccttcatgttaccctctatctccattgaaccaatggtgttgcaacatattttaagaaacataaggaacacatcaatcttcctgactaattgcttgtgtgcatcctgcttgtataggtattggcaattgctatcacacatctgttcaccttgaccctcaagtactcgggcggcattaccgagtagtgcaagagtacatctattttagcaaaaaacatcaaataagtgttgcaacacctttccttcaagacatgaattgttagtttgttacatgtgtctatatagaccatgaaactattgtgagacaacatatatgaatttacttgtctcctggaataaacggaagtggtaaccaggaatgagcttgaaaccgagggaaagaaggcaggagtcccctgtgttccccacctaaatttctgtctgagctccgctgctgctagtgaggagctcactaagagccaaggatccaactgagtaccaaaggccacactcatgtgccaccatttgctgtactacctgaacatttggtctgaccttttcaaacacaagaatttctttgtttccaaatttctcagactaccaaaatgataaaaaaaatgaaagtttcaaacccttcctcaaatccttgggaacatcttttatagcattgtatcaccacctggagaaatgagacagaaggttaagggtaataggaagcagccccatgtgttggaggatcattgtccaaacctgtctggaggacacacaggagatgaggatgtgctgaattgtctcatcagcctgttcacataaagagacacagcaaatccagtatttattttcttgtagcaacatgtttgcactatgttggatttggaaagataacttttctcacccttcgtttttacctttccctgagtcgataactggagcaaaggcatagcatgttttgcaagtgattaataactatcccactgaccactggtttgagaatatgcttgtaactatcccattgttttgatactatctttggcttttgatactatcccattgtctgcaaatgcgatggctttggcttcaaaaaactgctccttccaagccatggagtggccttgatcttaaaatctcgtcccacgccagagctttatttcaggttgcagtgtctaccaccattggtaatggtacttcaaccttcttttggaaagataagtggattcatgggtgttccattgtggatttagctcccctcattgctgctgcagttccaaagaagattagagaagtaaggactgtgcagctggcccttacctcatattattgggttcatgatatccagagaaatctctccctggctgctattgagcaatacctacagctatgggaggttcttgaaacttttcagcttcaaaattcaaatgataaacatgtgtggttatttagtagtaatggtttatacacctccaaatctgtctacagagctttctacattggagcggaatcctttgagccctggaaaagaatttggaagagctgggcagcccctaagtgtaaggtctttgtttggcttgctataaacaataaatgttggacaaccgacagactcgaaaaaaggggtcttgattatcctgaaaattgtgttctatgcgatcaagaagatgaaactgtgcagcatattctatcaaattgcgtcttcacaagacagttttggcataatatattaactccaattggtctctcttctgtggcttctaagagaagagattcttgttttgctgaatggtggaggaaggcttcaattaggattcctaaaagcaaaagaaagggctttaatagtgtggtcatccttggggcctggaggctttggaaacagagaaataggtgtgtttttatggagctcggccctgcctttctaccttagaggatggtttcaaagatgagatgtggccgtggttttttgcaggagccaagaacatgcgttctctttttgatcctggttagaggaaggaaagtcttttagcctctttgtaggctggggtggtggtgttgtgtgtggctggtatgtgtatgtgtttgtgtgtgtgtttggtgtgtgttttgttgtgtgagtctggtgcgtgtttttgtgtgttgtgtcctgtttgttccaggcctcaggcctttttccctctcctttaatataatgatatgcatcctgcgtattcgagaaaaaagatactatcttgcccaattgatcagcatgatttgtcatgtagcatgttatgctaaagaaatatgcatgtctgttgtggtttcactttgaaatggataaacattgtaattgttcttcatccatacaatccaatgtaaaaggtgtgaaaagtaagacagtttgttgtagcagctctatcatatgtaaaagatgtgaaatgcgcgtcaattcagctgtgccagtgaagcttgcaccatggtcataggtttttcattttggtcttctatgtgatattctatttggtatttccaggacaa

SEQ ID NO: 739 - DNA, 4009 bp, Zea mays
  Intron number 1 from transcript GRMZM2G137426_T01 (locus G RMZM2G137426) derived from phytozome v7.0 (chr-ID 5; pos 1 82085998 to 182090006)
ggtcggcttcttctccaacctcgtggtggacaacggtgagctagcgagagaaaccacaccacagttccatttccatgtgtgctttcctttatcttcaccaactgcggggcacgaattagtcctagagcatgcatgattattttagtttggaactagcaatttgcattggccagtagtaatgcctaataaatggccacagtcatgcacccaaccctttcgacaaatggccaattcccccatgaagaagcaggccgaacagaaggcagggcgtggttttttgttgcattgatgataggcgccggccggccgccgcaaaggaaatctactaagctagtgcaccggccactagctaacaagtttctgcaacttgttgtcttgttccgtgtcgtgcactggccagaactttacctgcccgttttggtcgatttaaagcggggagccggtaccgaaattttgctacatgaggccgcacaagctagctagtttgcataaacagacgcgcgcgcgtgcggcttttcgctggctgtgctgccccttgcatgccatggcccatggcccatggagagggcagcgccggcatcttttacagtttcaacttgccatggttactttaatcggtcttaaatttctgccacaaatacgtactcactcacatggtggttaatataaggattaacttttgttcagcataaaattacagaccctttgctactgaacgaagtttgcattaaatcttaaaccacaatatgcataagtagattgtatatataatacaaaagcaacaggtttctcctccacccctcaaaatcttagcttatacatgtggcctcttgcatagtcccctagtttgctaggggacggggaacaaaatggttatgtttgcgacggtctcctcgatagtgaaatgtgatcgatgtctaggattttgaaagtcatggttttctatattgttgttaaactcacatgtccacaatatatatgtttcattttctaataccagtatatatagctaatgttaattgaaagttctttttgccacttgcgcaatatgctgacgtgttgtgcgccattgccttccatttatccattcattaatctgcaccggttgttgtgaagtcattatgcatgtacactatgtcatttggtactatatatatatctagaatctcgaaagttaattgagaggagcagagttggctcatgttacgttggcttctttctctagtggaggataagaaaacaacccatttgctgaagttttctagagtcaaacatataaatgcttttgtatgctcttccaacctactaccgcacacagttttccttagcgtctctatatgctaatgtttatttcaccttagttgctgctgagctatctatacatatatagtatgatggaaaacgctaatctgtagataatccttaactagagtactatatatggaaataataaaacgaataacatatgatagtggaggagcacaacttgatgttgacatgacctcttttttttaaaaaaaaaaaagaaacaaggcatattagcacacatccttgattcgtctgaagccagccaaacaagtgcaatttctattcttaactatatatatagtaatgtagttaggctttcttagcaaatttagcttgtccaaaagtggtgaagccggaacaggttagttcgcttaagatttaagtcagttgttcatattgctgcagctgcagttaatagagacaaaaatactatagaagcagtatcaagcgaacaggctgtacattttttgtggcttcggcttctagaccaaaactgcttcacttcatcactttttttgcttgattttgacttcacaagttgttctcgcatgtgattgtttgggagacttcttcgaaaagccacagaagctacatgtgaaaccttttactagaagccttgctaatttgctaaagaaacccttactatatcgatgggtttataagcttatttgtatgtcataatcggtggtctttgctaaagtttttcatttgaaattaaaacaattgtttgtttctcctctcactttttatttattaaattaatgctaatatagtgtactactactccatctaccctagaaccaaagcaactcgaattttgtcccaaattaagatattaggtatttggatatattaaaacattcattaaatactcaaccttatttgggtaagggacaattaatatcctgcgtgacttgggccaatcaaagtatgtgttgtcttaggccattcttaatgcgagtttcataagggtttcattcttattaaatgatatgacacataagcaaagtagacgacatgacatgtaacatgatgaagagagatatgagagagtttcatggtgatgaaactctgtttacactgttttctagataaatattgacatggcaccttggaaacagtgtaatgaaacccccattgagaatagccttagggcatgtacaacactgagacaccagtttagtttttcaagtataagagatgactaagagattgcatggtacatccctgagacactggatcatcaatgcagctaaaagacaacgtgtatggaaagtcgtgaagagacgggctcttcgcgaagtgtccatctcttgtatttttcacttagccccttagagactactcaagaaaccatattaaatggtgttgtacatgcccttatatatgaaggagtacaagcaagcgacttctgtcatatcccttaaactatcctagaaatcctagaggaagcttatattgggatccgagggaataatctcaaaggagataaagagaaaactcatgtaaacactaggatgcacatagtagagaacacacttgtggtgccaaatataccgtcagacctttatatatatgttgcctacacaatttatctcatacccgtttagatgtagatattggagcatggaattagaaattggaatcagctttctagaattctattatttagttgtatatggaattgagatttaaaatcagagagccaattccctagaattggattataattagaaactttctctcccaatataaagcatcatccctctgtattacatggaattagaccaaacaattccaaactctaattcagtgacatccaaacaatagaataagaattatatctcatttcaataacatggctgatttggtattgaacccagttcaattctatgccttccaatatcgacatctaaacggagcattattgaattgaaaaccagaacttgtctcaagcaaaccaattctgctactacaaaggtgcatgacatcatcacggtgcatgccctaactaacgacgatacttctttcgaaacggaggtcaatactaccaaatggatcccacatggcagggttggctactgctttctctggaggggctagattctggtctaggttggccaagttgtgaattatatgaggctcacactaattaatgggggtgttaattagtgcctcaaaccctaaccaaggcagccacttgtgttaatcaaaggtaggggaccacatggcacgcccacttggctgcggtgggcccggcggtgtctgcagtccaggttcagctgacggctccaccatgacgtcaccgccgtcttgctaaaaacagtagcctatatatgcaagttgcaaagtgtcttggcactttgtgcgatcctcctcctaacggccacaccggatcttgtatagtttggccgacgtcttccgttattctgatctccgtgtttaaattagttcgacaagagctagcgtcagatttcttcttcgtcatcaggaagagctaccaaatggacagtcaagtttgtaaattagctagttgcccactggttcagtccatgcattaaccatcttggcaagttgacagcttatttaatctctcgatcgaaaaagctgacagttagataatatagtgcgcggctggttggaattaatgggaataaactacgcagggtatccacgctcaaataaagccggaggcggtggt

SEQ ID NO: 740 - DNA, 2405 bp, Zea mays
  Intron number 7 from transcript GRMZM2G470556_T01 (locus G RMZM2G470556) derived from phytozome v7.0 (chr-ID 4; pos 2 39513682 to 239516086 reverse strand)
aggttagtgatactatatcttctttgaggaaacggtgccaaataaatcaacctgaacctatgacccatatgtttatgactattctgtaaaaaactcaccacaggggggagatgcccccctgaatttgccttaggactgatttggtggatagagatcacgagaggatctatggtggaggaatccccttactatttaattttgaatagcaaggggattcctcccccatggatcccctcgtgatcctgtccaccaaatcagccggattggaggggattgagggagaaattagttcatttccccctcaatcctctccaatcctgccgtgatcaccttgtcaccaaatcaaccctaagaggatgtatcagggacttagggttcgaacacagactggtaaggggagaaccccatgagcacgtctcttaccggcataacttgcaagaagttggtgtttattctgcgagttgtcttcgatttgtaatatgaaggattagaagattgacactaaattaacaagcagtttctttgttgtagtttggatactcaagcacaatgagctttgtttatttacctgattttgagttcttggcgaaacatattatgacacggcagtttccttagtgtagttgggagattcaagcacaatgggatttgctcattaagataaaaaggtttactaatcaagaattcattacttttatatttttgtcagtacaatatttctctttatctacagcaacaacaacaaagcctttttgtcccaagcacgttgggtaggctagagatgaaaccccatatgaaaacctaagagctcaacccctaaagaaaagaaaagggagacaaaggcaaaggagaaccgaaaaacgacgaaacggggaaacacataaaaagagataaaacctacaagaaccagcaagatctaaaggggcataagaaaaggtcaaacaattaaggaggaaaagcgaaactacaaatcagggttctggcacgtgaattgcacacttccaccccttcttatccacggcgagctctttatcaatattccactcctttaggtccctcttcacagcctctgtccacgtcaaggttagtcgacctctacctctcttcacattctcgggacacctaattattccgatatgcactggtgcctcttcaggtcttcgttggatatgttatgtccaaaccatctcaaacgatgttgcataagcttctcctcaattggcgccactcctactctctctcgtatatcatcattccagactcggatctctccttgtgtggccacatatccagcgcaacatacgcatctctgccacacttagttgttggacatgtcgtcttttagtggaccaacattctgctccatacaacatagccggccggataagacacccgcagcttgccgccacttcaaccatccagctttaattctatgactgacatcctcatcgatgtctccctccttctgaagcattgatcctaagtaacgaaaagtgtctttcttgggtaccacttgcccatcaagactatcatcgccatcctcataccccattggcactgaaatcacacttcatatactctgttttagatctactaagcctaaaaccttttgcttccagcgtttgcctccataattccaacttttgcgaaacgccactcctactctcctcaataagtaccacatcatcggcaaaaagcatacaccacggtatatctccttgtatgtcccttgtgacctcatctatcaccaaagcgaaaagataagggctcaaagccgacccttgatgtagtcctatattaattggaaagtaatcggtgtctccatcacttgttcggacacttgtcacaacattagtgtacatatctttaataagattaatgtactttgttgatactttgtgtttttccaaggcccaccacattacagtatttctctttatctacaaagatagtaatagccttttgttgggaggtgggattgctgcctatcaataggagaatataggtgaactgcagatagcaaataggctggtggcttccaacatcaccataggtgaagtggacaagaaccattgcacatagcaggtttcctctattgatgcagagcatggtttcatgaagtggttggatttcttatttgggtaaataggatgacacagtagatagcagtcaaagttgtcttgttaaacaattatttatttatttacttttgtgctagatttccttgtatacatactattaggtacttttttccgtgtacgaactacgaagcattatgctgcacttattctttttgccatcaaatttgattcctggtatgatgtcctttcactccatcaagtccacttctaattatgccttacttggtagattcctggagcggaaggacttgtggtcagagttgt

SEQ ID NO: 741 - DNA, 404 bp, Zea mays
  Intron number 6 from transcript GRMZM2G063238_T01 (locus G RMZM2G063238) derived from phytozome v7.0 (chr-ID 2; pos 2 04432248 to 204432651)
tcacgtcgcttttgcaggtatctgaccataatttgctcgatttggttgtgcaacgagatcatgattggatttttttcttttttgtgcctgtttgatttctggtctccttttgttttgtttcttaaattaataattgtagtgatcgcaaagcaagcaggaaactgtataaaaaggatacatgtgttgtaggaattgcattgatatgcttaatcttagcagaatataagaggaattcgttcttgatgatttgatttagaggttgaagagtggtggaggaacttggaagcaactcatgagccatgtatgagccatggttgttctggttggctagactgattgatggtgatgaattgcaatgaaaattccaagtctggagcttcgtcgaggtgtgctggttgtcaagg

SEQ ID NO: 742 - DNA, 9330 bp, Zea mays
  Intron number 9 from transcript GRMZM2G163159_T03 (locus G RMZM2G163159) derived from phytozome v7.0 (chr-ID 8; pos 1 50128382 to 150137711 reverse strand)
aaaacctcattctgctattctcatttcttgtatacgtgttgtttgaaccaaaaaagagctggcggacggtccggtcctgaggccggacggtccgcggtccgcggtccggacattccgcgcctgtgggccggacggtccgcgcgtgcgcagaacagattagggttccgagttttgtgctacggttgttagctatattcgcggaattagctcggaatcagttgtgtaaaaggtctagcccccctcctctataaatagagaggtctatggccgatttggatcaacaatcgaatcaatacaacttctattcgcattttatcctaggagtagttctagtctagtttaggtttagcctctcaatccccaaattctccgcctctcctcgactctatgtcgattagaggagtctaggtcggccggcccgagcctagacaacccctaggatctctcctccccgacggggtccctcccgggagcgagatccaggcgccgccaacgatcttccgccgcccctgcacacgcgcggaccgtccggccccagggcgcggaccgtccggacgtcaggcaggaaaacctagctcctgcgccaggtcgcggaccgtccggctccgtgttgcggaccgtccgcgcctgaccagagagcaccgccgccggttcttcttgagtatttggcactccgaaaaggcgtcaacatacgttttggcgactccgctggggaagacaaatatagacgcatcaaatcggccctcaatggtcggttcaagagatagctctgatatttccctaagcaacatcatagagccgacttgggagaccttgccggctgacgaacagctccaattcgaggagcacaaggagcgtatgatccaggaggcaaaagcaaaattcttggccggcttcaaagtggacaggaacaacaaggtcgtccgacatcgggcgacagatccggcttcgctccaacccacaccaaatatccccaatgtaagtaataccaacgagctacaatctcttagaaattatgtagaagagcaacgtgagcaaatgcagaacatcatagggggtatgcaaagcgattttaagagactagtacgtgcatttgatatatctaatatcgtaaattttccttcgcacgaggttgagttagggggtaacacgcgtaatacatcggctacagggttgtcacgacccagtcacaaccccctgtatgggatgcccgatggacacataccctgagcaaccgcaaatcggcagtaaatcagccgatctgcacatgcccggaccgtccgcacgtgagcgcggaccgtccgggccagcaacagtcgggcctatttttaatgagttacctagatatgcgcccgagccaccacacacggcacagaacccaaactacccagtcggacggtccgcatacaacgacggacggtccgcatataaccacggacggtccgggtacgtatccggacagtccgcacatgagtcttttgaggaggattattacatgaatcctcgcccgtcccagcaacacttcccatcacactatgcaatgcaccagcccattaattcaggatccaaagcccaggaaagcttttccggccccacctagaaggccggaaagaaacgatcaaacatatgagccatatagagcaaatggaaatgcaccacgtaactcaaaccaatggggggaaagacaacatgctaatatccagccaaccccacctatgtttgaccagagagccggtggtctcgcaccggctgccattgatatagtaagggaagaaatagccggggcgttccgagataagctcggagtaagcatggtccctggggggcaatcatatcagaaaccttatgacaaccgatttgatcaccacccatacccacagggaaccaggatacccgaattcacaaaattttcgggtgatcaaggaaagaacacacgtgaacacataggccaatttttagcacaattaggagagttggccgacacagaggcatttcacgtacgtttattttcattatctttaacaggaactgcgtttgcatggtacgccactttacctcctaattccatttcatcatggggggatttagaacaaaaatttcatgatcattttttttttcggtgactatgagttggatttggtagatttagcgtcgttgcgacagacaaaagatgaatcggttaatgattacatccggagattccgagatacaagaaaccgatgctttcaaattcatttagcagagaaacagctagtaggattagcttttaatggtctgcgatattatttaaaagaaagattagaaggcatccaattctttacactagcacaattacaccagagagctttagcttgtgaaagccgaagcaaagaaactactaaaacaattcgtcacaacgtacatgtagtagaatgcgaccaaagtagctcagaagacgaatcaacagaggtgtatgctgctgaaatggtttggccaaagcaggccaaatcttcggcttgtgcctccttacagccggttcaaaagaaacgacaagaggaggttaagtttacatttaatgttggtaagtgtgatagaatatttgatgaattactcaaaaatggcaacattaaaataaatcacactgttccatccgccgacgagctaaaacgtcgtgcatattgcaagtggcataactcattttctcatgccactaatgattgtaatgtattccgtcgacagatccaatcggccattaacgaaggacgattgaaatttcaggaaatgcaggtggacacggagccctttccaatgaacatgatcgactttgagggcaagaaagtcctgactcggccaaacacagccgatgaaggcaaaggcaaagaaatagtcatcggcgatgcaagagaggccggtgggaatcataaaacttcttgcagaaaagtggtggccgagaagactcctgatggaggggagaccttgaaaggtgaccatcacagcctctggcactaggggcaaacacagacagggagacaggcgcaagaacccattttgcgcatcgcggacggtccgccatccagacgcggacggtccgacgcttctccggactgtccgaacgaaactccagcggacggtccggccgtgctcaggacccgcagcaaccacgtaccttcaagccacgacgacccgagataggtacgtggaaaaacaaatacatttaaagcagctggtcggctgatcaagcctggcccgactttcgatcaattgttgtctaaatacgtgaaaaagaaggccggtcccagtaaccggccaccaaagcgaccccgctcacccattcatgagcaacgtcaggtcaagccgattggaccacctcaccaatcagaagaaataaaaggtcctattgtacaattgagacctaacataccgacatggacccctccacccccttatccatctatgtcatatccatacacatacttatctccaccatatgacccaaatcaaatgtggggcatgccaccatatccacttgggatgccacagtactccgcctgggggcaccccaaacatccgtttttgataggttggcgccgccagtgcaagaccgattgagcgctgctgaatctggtcaccaggcacaggcccaacaagattgccggactactcggccttctaggccgaccaatccggcaggggggcatatgcctgtagcaactcaaagaacaacgaaaaaagacatcatcaaaataggcactgcagatgttgtcatatagggggacaataaagggccgatgatttttggtgaatcggccaacacaaccaaaaaggataacacaaccaaaaaggatacggctatcgtcaaaacagccgatccaaaatactccatgcctcgatggtgcccggcgggattgacacgatcccaaaagagaaaattacagcgcctaagagtgaaggagagccaggagaaagaggcggaaaagatattcaatgacacgcatccactatacccgccaccgcaaaagaaatggagaccaaaggccgtcgagaaaaaacaaacggccacggaaatagaaagtcaacctgcaccaggcgcggaccgtctggcctctacgcgcggaccgtccgtccctcaccaggaagcgtctggacaatctgcaccaggcgcggaccgtccggcccctgcgcacggaccgtccgactttcaccaggaagcgtctggacaacctgcaccaggcgcagaccatccggcctccgcgcgtggaccgtccgccgttcaccaggaggcctccaacgacacgacaacatcaatggaggaggacgacctgctgggagaagacctggtcgactacgaggcttctccagaacgcccaggtatggatgtaaatattattacattttctgccgattgtactattatcggcgacgatgaacctgttgttgcccaatttgattttggtcttaaagaagccgcctttactaaaccaaaagaatcggtaaatcatttaaagccgctcttcgtgcgcggccacattgatgggataccgattgctaagatgttggtagatggaggggcagctgtaaatctaatgccttattcattatacagaaaattaggtaaacaagatgacgaacttgtcaagaccaacatgaccctcagcggtgttggaactgatagttcgatcaaagccaggggagtcacgtccgttgaattaaccatcgggactaagacccttgctgctgcattcttcgtcgctgatgtagaaggaaattacagtttaatcctaggcagagattggattcacgccaatcaatgtataccttctacattacatcaaatgttgatacaatgggtacgcgatgacatagaataagtacatgctgatgtatcggcctgcatcgctctgaccaatgcccctgtactctggacttatgagactgctacatgtctcacaggagtagacttttctgattatcaattcataagtatagataagaaatgtttcattcctgtaatgctagagccgatggagaatcggctaaatcctaaataaagctaaatgatgaatacacacaaagttcatgagtctttggtcatggacagttcggccgccaaggccggatggtctggtctttcataaaagggttcggactttaagaccgaacatatatcacagcaaaaggacagtattacggacgatccggtccccgagaccggaaattccgccgtcacacaaagatcttctaattcttctgtggggaacatgatagaggaattcagagatcttgataaactaggacaggggtttacatctgccgatcctttggaggagattgacataggggatggtaaaactccaaggctgacttttgtaaacaagaccctggagaccgatcctagagatgagatgatcggtctattgaaggaatattcagattgctttgcttggaattacactgagatgcctggattgagccgagagatcgtagagcatcggctgcctattaaatctggtttcagacctttccagcaaaagagctagaacatttcgtccagatcttctcccacgcatcaagacgaaatccaccggctgctagaagctgattttatcagacttgcagatacacagaatgggtctccaatattgtgccggtggagaaggagtcaggtaaacttagagtatgcattgattttcgcaatttaaataaagcaactcctaaagatgaatatcccatgcccatagccgacacattaatcaataatgcatcaggaaatagaattattagcttccttgatggtaatgccggatataatcagattttcatggccgaagaagatgcgtctaaaacagcctttatatgtccaggcttcattggtttatttgagtgggttgtcatgacatttggtctgaaaaatgctggtgctacttatcagagagctatgaatttgatcttccatgaattgttaggaaacactttggaagtttacattgatgatattgtagtcaaatcggctgagtttagttctcatatagctgatttgcgcaaaggctttgataaaatgcgtcagtatggtttgaaaatgaacccacgtaaatgtgcttttggagtgtcggctggtaagtttttaggatttgtcatacatgaacatggtatagagatagaccctgaccgaatcaagtctattcggaatgtaggacctccgacctgcaaggtcgaggtacagaggtttctcggcaaggtgaattatttgcgaaggtttatttctaacctagccgggaagattgacgcgttcacccctatcttcggcttaagaatgatgccgaattcgcttgggggcagagcagcaagaagcatttgatctcataaaaaaatacttatcttcggctcccgtattaaaagcaccacgagcaggagtaccattccgattatacattgcagctgaggacaaggtcattggggctgttctgacacaagaaactgagggaaaggagcatgtggtgacatatctaagccaaaggttgatggatgctgaaacaaggtacacttttattgaaaagttatgcttatgcttgttttatgcatgcaccaaatgtagatgttatttactgtctagtcattgcactgtttctggtcaagccgatgtgatcaaatacatgttgcataacccaattatgagtggtagaattggtaagtgggcttatgcactcatagaatatgacttggcctatgaaccattgaaatctatgaaaggccaagtcatagcggatttcattgtagaacatcgggttaatgatattcatgaactagacatgttatacctcactattactcattggactttatattttgatggatcggtttgcaatgaaggtcaaggaattggcattgtgcttgtttcacaaagtaatgtctcctttgacttctctagccgattgaaaacttattgcactaataatcaagctaaatatgaggccctcctattcggtttaaagcttttaaatggtatgggagtaaaacatgtgaaggtatttggtgattctcagctggttgtccaacaagtgttagaagaatatcaatgttttgatggtactctaaatagttaccttgagaaatgttggagcataattcattcttttgacgaattcagtattcggcatatctctagagttgagaatcatagagctaacgatttggcacaagatgcatcaggttatcggataaagagagggaaatttcacaagaccgaaaatctgataaccagtgcagagccaaattcccaggtcgcggaccgtccgcgtgatggcgccggaccgttcggggttaccagaaatgttctcttaatcgattcggctgacaatgaagccaatgcaagcgattggaggacacctatacttaattatttacgaaatcctaatatcaaaacagataagaacattcggcgaacaactttcaagtatgttttgatgagtgatgaactttaccgccgaacagtcaatggcattctgcttaagtgcttgggcccagatgatgctatattagccatggccgaagtacatgaagggatttgcggtactcatcaatcagctccaaagatgaagtggttgttgcgaaggtctggtttttattggcctaacatgatagctgattgtttcaagtactacaagggttgccaagtgtgtcaaaaattcggtgacctacagttggtctctgcagccgaattacatcctattatcaagccttggcctttcagaggatggggattagactttattggagaaattcatccttcatcatcaaaggggcatcggttcgtgttagttgccactgactactttaccaaatggactgaagccgttgctctgaaaaacatgacgcacaaggaggtaattgagttcataactgagcatattattcatagattcggcattccccagaccttgactacagatcaagggacttcttttatgtcaaaggaggtacgtgaatttgctgaattatacagaattaaactacttaattcatctccatattatgttcaggccaatggacaggccgagtctagtaataggacattgattaatttgataaaaaagaagatatctgataatcctaaacattggcataagattttgtctgaagctttatgggctcatagaatatctaaacatagtgctactaaagtatctccttttgagcttgtctatgggcaggaagcagtattgcctgtggaaataagtttgaatgctgtcagattcgccagacaaaatgatctaactgtcacagattattataattcaatgatggataatattgatgaggtgaccgacaagagggtgatagctttgggagcaatagaaaaggacaagattatggtagccagggcctacaataagaaggtcaaagcaaagtcatttcaagtaggggatctagtgtggaagaccatcttacctctaaggaataaagaccggaagtttgggaaatggtcgccaagctgggagggtccttataaagtaaaacaggtaatgtctggtaacgcctatttgctacaaacattacaagacaaggatttaccaaaggctttgaatgggcgtttcctcaaacagtaccatcctagtatgtggcaagatgcctaagagaaccgatgtgatcacatcgagttagttgcttttggttcgcccagctccaccaaaaggcagaggggcatatgtttgaaccaaaaaagagctggcggacggtccggccctgaggccggacggtccgcggtccggacagtccgcgcctgtgggccggacggtccgcgcgtgcgcagaacagattagggttccgagttttgtgctacggttgttagctatattcgcggaattagctcggaatcagttgtgtaaagggtccagcccccctcctctataaatagagaggtctacggccgatttggatcaacaatcgaatcaatacaacttttattcgcattttatcctaggagtagttctagtctagtttaggtttagcctctcaatccccaaattctccgcctctcctcgactctacgtcgattagaggagtctaggtcggtcggcccgagcctagacaacccctaggatctctcctccccgacggggtccctcccgggagcgagatccaggcgccgccggcgatcttccgccgcccctgcacacgcgcggaccgtccggccccagggcgcggaccgtccggacgtcaggcaggaaaacctagcccctgcgccaggtcgtggaccgtccggctccgtgctgcggaccgtccgcgcctgaccagagagcaccgccgccggttcttcttgagtatttggcgctccgaaaaggcgtcaacacgtgt

SEQ ID NO: 743 - DNA, 1643 bp, Zea mays
  Intron number 1 from transcript GRMZM2G177539_T02 (locus G RMZM2G177539) derived from phytozome v7.0 (chr-ID 7; pos 3 7255022 to 37256664)
ccgcgcccaccgcataccctacatctcccttggaggtacacagccgatcccttttttgctccccttcccccgcttatttctcgttttattttcttattatgttcgtgcgactccagtaatgttggagttggaggaaagggaattatgatgtgaatgatgctcgtcgtgaaattatgtgcatttcattcagtatttccgaataagctgcaattgtctgcatctccatctgggtgaattatcttcaattcataagcaaacttgtgatcatcaatgttcccaacaatgaaacatttgcagcaggaaatctggctgtatttctctagttgtctggcatcatatgtcactgtttcttcaattgtttctacaaaagtaagaatgaattttaacctaagaaaatatctgagccgttgaacacattgaaagcaacacctagctacgaaaatttctgagccgctgaacacattgaaaggggcagctatttcacgtctctttctgaaattggaaacaccctggacattgcagttcaacaactgcagtcaatttctcattacaatatgtgtggctgtaaccatctgattgtcagatgaaaacatgaaaaaaaaacactttcaagctacttctgtttaaagcactaaagtgtttagcacatagacgtaggtgccttgttcccttggcaatggtatcatgacctactcgttgcatctgttctgtgtaaaagatgcattttggaaagtggtatatgcagccttgggatggagcaatacacttttcttcctgatgtgtactttgattttgttgctagtcacacatttcaagccttgcccatttggttaaaccgacaggttacccttattctgtggtttttgatgcaatgacgtgtgatttactcatgctgctagtcacacaatacctgtgctggtaagctggtattctcataatggtcccttattttgtggttcctataagaatatgctgccggacttatctcgaggaccacaaatcactactgacctttagatttacataggttgtctattaagactacacaactctttttgtcattactgcatcacgtatattttccttgccgtactatgatatggacagcttgttgagaagttgagatgcatctcctagcacaaataaccgcagtttaattgaaatactgttaaattgtctgctcatttttttatactttctgcacttttccttcatttgatttattatttgtcgtgtattaatctttttttttgtgctgaaatgctaattttaatgtttgcacagaatcctttttaaataaactaacgagttgtacaattgaatatatatgcaatcaccaaccaaaaattgcaaaccagctgcttttggtttattgaacaataaattttttgctgtaagatcaggactagacgactagtcactaagctccaataaaaataaaaagtatctagagaatttttttatgatgcttttgttgatcctgtggtttactgtcaaactgttcagtgtcataactatttgttactcagctgttaatcagaaagtacatagctgacttgtttttttggaaaccatacaacttacttgaacttatgttggtatgttcagtgtggctgcagctcattgcttggggagtacttgca

SEQ ID NO: 744 - DNA, 17564 bp, Zea mays
  Intron number 9 from transcript GRMZM2G445766_T02 (locus G RMZM2G445766) derived from phytozome v7.0 (chr-ID 6; pos 1 43533246 to 143550809 reverse strand)
agcaagtaagcctatttctatctgtatacttagatgctagaggcgcctaaatgagatgacctcctgtcataggccacactacccggtccagaacacaagggcagagataggacaagggactgggataatagatctaatcttctttcttgattagatgaatacatctccttatgagaaaaacattagattggttaaacgattatatcctctagaggaggccgcatgatgtatatttatatcgacataaattgccaacaagttgtagtctgactcagtcacaatagtggtaactgatcaggattctatgtctagtcatgttcggttacaactctatctataactagaatacatctctatttatacagaacaaggcatgtaggcctaaataattaatccttccatattctaacaacctctctcaatcataacttgtgcaagttaagattgtttctaaagtgctccatcttcttagtagtaagtgccttggtgaactcatctgcaatctggatattaatctcacatctagtagctttctagctacccttccacgcacaaagtgaaaatcaatgtcaacatgttttacttgaccgtgaaataaaagatttggcgtgagatatgtagctccaatattatcgcaccaaattctcgctgtttggagcttagtaaccgggaacatggaacttggccacgttcctcgtttctgggaacgtttgttccgttacaggaacgtgggaacaatcttgttccgatagtgttaaaacctagtttagtagcgtactgcgtaccacgttcctattcatcgatcccatcgatcagagaacctggttactaaggttgggagactaggaactttcaattcttgttgaagagattgaaccctcattagttatgcggtggtatttgctagaactttatactcagcattagtgctcaacttagacatgattatgtattgcttaatttatgtgtttgttggatggttgggcaattaatatcatcggtacgaactacccgacaactatccggtacctacccgagtagtatccgttatccgtttcttacacgcccggattattacccggtcccgtcttgtatccgtcctgaatcttaactacccgtatccggtcccgtatccgagagaaatatattagggtaggatacaggatgaccctgtatccgactgtatccgtcccattttcatccctaataataggtgttggatggtttcaaattcttgctcacaaaagggacatgtcggggggtgcgaagccccccgctttgcaagtctatcggctgtccaacacctaatcttgatattactttatgaaatgcagatttgctatgctgttcgtggttttattgttgtagtttatccaagacaaagaaaaacacataaattgctgtttgggctattttaccttgtacatttctctttcctcaaatattttaaccctgaggtctgaattggccatttttttccatttcacagtgaaacatatggggtttgtaaatgatcaatggaccatatgcacttgatttaattttcacatttcttgttttccagtgcctgatgtatctatatcatcatcctgatatatggtacgattatgctatgtggcatgtgaagaatggttctatggattctgcatcaaaaatatttcagcgagctctaaaagcaatccatggtaatctttttagaattcttttgattagttcacttatggatatttgttccactagtcaatgtactagtttggaagtatgtatatagttggagagtgaaaccctatcctattaatagaccaatagatgttgggcctatcctattacacaagggtatgaagatatacaaggggctaaccccaaaaccctaaacaggttctacctccctccccgcagtcttaactctattttgcacatatgttgagactggatcgaaaatcggtgaagacactcgacgacaaccccttggtgaagatgtcagcgaactgcaacgtggttgggacgctgagaacccaaatgtcaccggcggcgatacgctcgcggatgaagtgcagttcgatctccacgtgcttcgtgcgctgataccgcacgtcgttggccactgtgcggtactcggcctatgcgctggagcgagagacgatgggctgccgcttggcggtctaggagatgaggctggtgtccagaaacacagcatagccggaagtggaccgacgcgtgtcagggcagccaacctagtcagtgtcggtgtagaccacgagctccgacgtcggggagggtcgaaggagaaggccgtagtcgatggagccgcggtggtagcacatgatccgcttgagagcttggagatggggctcccacgtggtgtgcatgtggaggtacacccgctggacagcgtcggcgatgtcgggcctagagaaagtcaggtactgaagggcgacggtgaggctccggtaggacgtcccgtcggcgaccgggggcctgtcgtccttagagagcttcacctgagtgttgacaggcgtggagcagggcttgcagtcggacatgccagcacgctccagtatgtcgagggcgtactggcgctggtggaggaagagaccctgaggcattcgctcgacggtgatgctgaggaagtggtggaaaggtcccaggtctgtcattgcgaattcgcgctgaatggcgacaatcgtgcgctgaagaatatcaggactggacgccgtgagcacgatgtcgtcggcacagagcagtaggtagacgacgtcgtcaccgcgccggtagatcaacagggacgtgtctgacttggccttgacgaagccgagggaggccaagtgggaggcgaaacgactgtaccagggccgcgatgtaggcaacgtgactcttactctcatcgagaggatgtcactatgagttggggcgattttctgtttattttctcaaacactacacaatgccatacccatctaagggttggggacacatatttatagccctaggggctgcactacacactgcactacacactacacagtgaacacgctgcactacagatgttgctgtccttgctatcctctagatgttaaaggaggacaatcaaaagctcctgctgtcctctagatagtaaaggagatgttgtccttcatactaaacctgttgtccttaaagcagtcaaaactgcagtaaggaatcctgctgtcctctacccacagaccacaagacttattccaacaattctccccctaagtcttgtgcgtcgtcttgttggatagttgggccatcccggacctggagcaaagctcaaggaacttgatcctcccaaggggcttggtgagcaggtccgcaagctaatccttggtgttgatgtagcacgcattgatgatcccttctgccaaacagtcacggatgaagtggtacctcacccggatgtgcttgctccgttcatggaacacaaggttcttggccaacgctaggacaaactggctgtccacctggagttccactgctccaacgtctctcccgaggagatcaccgagcaggcgagcaagccagagcgcctgagttgaaacggtggaggccgctatgtattcggcctcgcagctggacatggccaccacctgctgcttgaccgactgctagctgatggggcacttgccgaggaagaagagtatcccgattgtgctcttgctggtgtcgatgtcgccgacgtggtcgctgtactgaacaaggtgtgcctccctaggtcacctcgggtagtagagaccgtggtcaagagtccccgcaacatagcagacgatcctcttcacaacctgctcgtgctctgacgtcggttgctgcaggaaccgactaacgtagccgacggagtatgctagatccggtcgtgtgtggacgaggtagcgaagactccccacaagacgctggtactgagtagcgtccacctcctccgtcgtgctgtcacggctcaacttcagcctctcctccaccggagtgagagctgggttgcatttagtgagcctagccagctcaacaatgcgcttggcgtaggcggtctggcgaagtgtgatcccagagtcattctggtgcacctcaatccctaggtagaaggagagatgccccaggtcactcatctggaaggtggccttcatctcatccttaaacgtcgccacctctgcatccttggcgtcggtgatcaccaaattatcgacgtagacacccaccagcagggcattttctccattgccccgccgatagatggccgcctcgtgcgggcttggcatgaagcccatcctcttgagcgtggaatccagcttggcattccacgccctcggtgcctgtcgcaagccgtagagggccctgcgcaggcgtaacaccttgccttccttgctagggatcgcaaaacctggcggctgatgtacgtagacctcctcctttaagttgccgttaagaaacgccgacttgacgtccatgtgatgaacgtgccagccctcctgggctgacagcgcaaggagtcgcacggattccctccgtgccacgggggcgaaagcattgtcgaagtcgaacccctcctgctgtaagaaaccgtgtgccatcaaccgagtcttatgcttgacaatggagccgacttcatacgtcttcaatttgaacacccacttaagggtgatcgcgcgatgaccatgagggagatcagcgagctcccaagtgcggttcgtcttgaaagtagcctagaggggggggggggtgaataggctaatatgaaaattttgaaaaccaacttcgaaagattgttaaatccacagttcaactggtgcaggccggttcaactgctacgcgggcaagttgaaccactctgaaccaatccaactgttttgcaaatgttgctcacaagagcggaattacaaacttcttggggtcgtccacaaatttggagactcccaagaaacctagggtttcaagaacaccaagaatgcacaagaggtgtttgcaacaagctcaagatcttaaatgagatgggagaggaaaaaccaaaatcgtgagcacaagcacaaacctcacacccaagagttcctccaaccaagttgaatctagagcaagatttaagtgtgagagaggggagaggagtgcttttgtctcaagttaggtgagcaataaatgtggggtgttcagcctctttaaagagaggggtgtggggtcctatttatagtcacggctcaaaaactagccgtttgacccaggaccccgtctaaaaccggttgaaccgcccctggcatgtcaggcagactgtctgccagtctgactgactggcagactgacctgcagtctgactaggttgaccagaccggttgaaccgcccctgacatctctggcgacctgtttgccagtctgactagcagactgttggtcagaagtcagaggggtcagagaccagttgaactgcccctcaaaaccagttcaactggtcttgaccagagagtttaggagagaaaaccccagttcaactgcccggaggcaagttcagctggtgtatggtcaaagaggttcacaactgaagttgaagttcagctggagttgagaaagctcaactgtagttgaaaaagctcaactcagctgaagttcagctcagctgaaaagctcaactgtagttgaaaaagttcaactcagctgaaaagctcaactgcagttgaacaagttcaactgcttttcaacaagaacactctaggtttctcaaacctaaccacggtcaaccatataatattaaagagatttttggttttcaaaaattagcttttgaatttgaaggcttgagctatagcaaacatcattacctgtgcgaaaactactaaggaagaagtacatcatgcaactcaagatatacatagagttttatacgtccgtcgcatgaagtccttgcaaggagactgcatagtgtttctttttgtccttattacttttttagttcctgtacattctaaacatatgctgggaacaaaaactgttagtacccttatttgttttgtcattaaatcaccaaaactctgacttagggttgattgctcttacaatctccccatttttggtgattgatgccaaaacaaataaggtcaaaaagataaacatttgaagtagtaaggttcttttgaacaattgtatgtagatggcccccccctaaatgtgtgcacaaattttgaatcaagtgtgttgacatactatgtcaaataagcaacacatttagaggtagtgactaagtccacactaaatacaattatccgaggggtgcaagagtgtcattaagagagctgtgatgcatatgattgtttctaaacacacatcatttgtatttcgtagcaatatatttattacaaacagatggggcaaaagatgatggccgaaagaccatcataacacagtgaataatatgccaactattttattacatccattaataaaaagatacaagtcataacagtggccaaaaacaaaacaataaacaagaaagaaataaagaaccaaaaaaacgacttggctatccatagattttagaatttctccccctttttggcagcaaggaccaaaaacgaggagagagagaaagagagaacaggaatcataccctccaggaggaggataggatggaggatatgaagggtagtccgtaaagaaagtccgcatcatgtcttcctcaaatgatgagtcccgagggggctcatcaccagagggaaaaccagatgcagaagacgtcctctgatgaggagtaggaggatggtggtaaccggagccagaaggcctcgggtcaccaggaatgggtccctgacccggtagggaggaggaaagtgaccggagccggatggtctggggtcaccgggaatgggtccctgacccgaatagggaggagtcgaggtatagtaggatcctcatcctcaggagtaatgaatggcacaacaaattcctgttggtgccactcattaaggttcgcagggaaggtgggggtcggaggcggaggggacccaggaggcaggggatgacccatggcggcggcataacgacgaaagtcctcatgcagcgcgtcagtccggcacctgtgcacggactcctcgattgcccggtcgtggcacatggcgaaggcgccaaaaatgcccttggccagatgaataaacagtccccggcctcgaccccgtccctgaccctgacctctacctctctcgccgcggtccatcggacgtgaggcagcagcgacgcgagaggaggactcatgatgaggaggctgaggaggtggctcatcagaagaagcagggcctccggatcctgagggagcctgctttgtacgagcagctgggttgctggaatcaacccagtatggtacatagcgggagtgtttgacaagcttctcgaagcgagtctgagtgaccacttcgatcatcttcataataaagggtgcaaggagacaccccttgagtggagaccaggaagcacgaaggatctcttcttagatcatgtcaaacacgtttatgcgggcaagactatttggagcaaggagaagaaggagaatccgactctccccaaggacattcattcgatttccgcctttcgggagaacgatcatcctggacaaagagttaaggtacctatagtacctatgcatgttggcagtgatccaaaactcccgttccatagaaatatgaataaattcagtttcttcccgcatgggcagcctaatgtcatggactttaaggttgctgccctgaatatcttcatcacagaagcctaagttagctaccgtcgttttgcccacatcttgcccgtgtagcagttgaaccggcctgcaccagttgaactgtggatttaacaatctttcgaagtttgttttgaaattttttagattagcctattcaacccccagtggccaagcttgccatagttgtgaaagccgtcatctcgtgccagcttcttgttgccgacgccgccgccttgggcgcctccgcgggcaccacccttagcttgtcctcgcgccccggcctgggcgcctccccgtgccttgcgtggcttgccacgtttgcggccccgtgtcgaggaggagtcccccttcttgtcaccctggcaggcctctcactgctcctgagtgagatgtagcttcccgccgatggtgataggcctagagagggcctgtggttcgtcgacgaccttgagacgaccaatcgcttcttcgatcgtcatcgtgaagaggtctagcagcgactcgattgagtgagcgatctgcttgtacttctcgggaatgcaacgaaagagcttctcaatggctttctcatcgtaggtgtcgtcgctgaactgcaccatcctcgttgtagtcgacgtcgccgtaccgaattgcttcccacatgtggcgaaacctggagccgtaccctcatcaccgcgacccactcgacgtagttggtcttggtgagggtaggccacccaccgccaggaccgatgtccttgacaacggcctggaccccacggtgaccatggtgggagccgcgccgcctgtagaggccgcgatctctgtcgacccggccgccgccaccgggtgcgttctcgcccagagcgccgtcagcgcgtctgcacctatctaggttgccgccgcgcgcgcccccatgggggtgcgcggctgcccattgagccgcctgctcttgcgctgcctcccttgctagcctaagctcgtcgttggtgctgccgtcgccggaaacagagctgccagcgctactgccgcgcagagcctcgagctctgccgccgccgcttgggcagcatccgccgcctccgctgcttctacttcctctctcgctgccgctagttccgtagccgctcgtggcgtgggtggaagcgcgagtcgtggcgtctgggtcgcgcgtggcgtaagtagaggcgcgagtggagacatatgaggaacatgatcagtctcaaggagggagtcgagatcggtaggtggggaggagccagcaaggtgaaagacatcttcgtcaaaaacaacatgacgagagatgatgcgatgggagaggaggtcaaggcagcggtaacccttgtggtcaggagagtaaccgagaaaaaggcagcgagtggggtggctcaccgccttcgaggggaggcgattgaggagatgggtagcagtgtttagggcctatatccagtagctggcagggagagacgcctgaaagaggaggcaacagatcatgttggtttaggcgcaaaggaaaggtccaaagaaagtgagagaagtcatccataatgaccagatagtatttgtaaccagaaaggctgaggacaggagaggtctagagatcacaatgaactagatcaatgggctgagcagccctggacgtggaagtataagacgagagtgacggccaagctagcaagcatgtcagaggtgtctagaggtactccgactgcaagaaatatcggagcggctggagagctgggacatcacgtcaggtccagggtgatcgaggcgacgatgccaaatggcaggggtggtggtggcgacaataagagcatggggggaggatacaccggtgggggaagtggagggcaagtgaatagagtagaggggactggatctgtcacaacgagcgagcacgacacgagtgggaaggtagtgtatggtgagcccccagggatcgaactccatagaatagtggttgtcgctagtgaagcgatggaccgagagaaggggatgagtcagatggggagcaacgaagacgtcgttaaggtagaatggtcacgaaagaactgatgcacctactgagatgaccgggagggtggaaccgttgcccacaacgatagagggaggatgggaggggtttggagcatgcgagtgagataacgagctagcagtagtggtgtggaaggaggctccggagtcgaccacccaatcagtgggagagggagggggtggcgaaggcacgatgtgtgcggaaagggctaggggaggagcgccgacagagccactaggaggggagggagacaacaaggtgtcaatcgccagagaggcaatcacagcacgggggaagacaagcggtccaggcatgtgacggcccacctgagggtggatctcgacgtcatcacgaaggacatgattcatggcttgatcgaaggccacgaaaatgccacgaataatctgactgttgtgaagggtgacgcgcacaacatccgtggcaaaaccaggcgaagccgggaaggaggtgtcatcgacggccagggcaaaggcagggcccccggcgacaggaggagggacaccatgtagagctgggaccatgcgcgagcaaggatagacggatcttcgttgcctgaggcgagggagcagagagcggaagaccttgaagggaacaggggcgggcgactcgactccggcgagcagaggcgcaggagaagccgcgacttgggaccctcagtggatggaggcggcacgaccaggcgcgggcccgcggcgcgggttggcggtgtcgacgactgttgaggcaggcgtgggcccgcagtgggggcgtgcgtcgcggctaccaagaggatgcagctaacagggactggacggagctcggagtggagcacaacgtggggaagacggtggtcagcgtcggaggagctcgcaagagcacgacgatgtcctggtgcgcgttaaggaagagctcgtgcggacctggagatgcgcggtaggacggctggggagaggccaggggtggccgacggctgtgtgggtggggggaggaagagaaagaaatctaaacctagctctggtactaacttggagaatgaaatcgtaaccctaactcaggtttgggacttgtattaatagaccaatagatgttggacctggcccattacacaagagtatgaaggtaattacaaggctaaccccaaaaccctaaacgggttctaacatatatattattctgattggtctagcaaaaaaacacagaacatgctttgaggacgtggatatgttgttggaataaaaagcaaaattagagttttaataaggtttctctgctgtgagggttgtttggcacctttacctggtagcattaaatggctggtttaagtaaatttcataaatgaattggaatccctgagatacatgtctagaggtagatgtgtctatggagggggaactgcctctgggatttgatgtcttttgggaagtttgttttaggagctgcatattttctaggaggttatttaactccgctatgtaccgaagatgtcagggtcatacccctccagttgatacgtgttccaagagctgattaaaaaaacatgtttaaagagcagctagcatttcatttgtctaccctaaagagcagagattgtaggtcctgcagatcaaatgtaattgcgacttgatgtaagaacttggtcacaggtcaagttacattcttgaatccttgatcaaaagatgatacatgactaatcgaccatatggatgaactcaaaagccggtgcagttgatattactttgacctgtttactctgaatttttagtcaaagactctttgctctcacaggatttttgggttccctatcccctacaaatcccatatgaaccctgcagtcttaaaagttcacctttgtctagccttctgcattcaacaaagaacacgggcacatggttttttttctcgtacgcgcaggagagctgcacatctttataaattagagaagagaaataaaaagctttacaagaaagtcccagcttggtctggccaaaacaccgattacatagcgtaaaaaaaaactcgacctagcgaccctaaaagacccagttaaaccaggctgcccagctgcttggctccagccaaagcccagcaagctaactcgtccagaaaactttttttttctcgaaagcactcgtccagaaaaccttgcagcactttttgaatggagggagacttcccatcaaaggcaacccgatttctctgcagccacaaacaccaggctcccaggatgatgatattgttcaaaccttgcttatctttgtgaattctatttcaaacctctcgccatcattcagcaaaggaactgtttctcagcactgggtgtcaggtgccccaacccgaaggatgctagaatcctgtaccaaaattgccgagcaaacacacatgagatcaagaggtgttgaattgtctcttgttcttggtcacataagggacagactacaggtaggacaaccccccttttttgcaacatgtcagctgtccaacatttgtttttaatggccagccaaagaaaagtcttacatttggggggcgtccaagatttccataacctcttccatggctaaaaaatgacagagcccttgaaaagaaccttatatcacgatttcgaagagaaacggccagaagtttcatgtctccatatgtgctgattgtactcgtcattcagcaatacctcatcaacagtatcccataggagaaggtattgctgtataccgattcaggagagaggggttttgacatctcacacccaaaatctgttatctaaagcttgagccaccgtcctagaagctacaacctttttgtctaccttctgaaacacatctggtgccaggacagcaatagagcatccattcagcccaaaacaaggtgttttttccattaccaacataagaatccaccgagatagcaaataactttttgatctgaggtcagatgggtatatctagatcactccatggcctgttgggatcagtcttttcttagccaaagccatcttgcttgcaaatcctaaccctgaagctgaaggttaggtatgccaagtccctatgtcgccctgatacggcgatacggatatgtatacacgatacaccgataccctgatacgctatttctcaaaaaaacactgatatgacgatacacaatatatattataaatgaaatttaatgctgtaatagtggaccacagcttatcagttcaatacttcaatttaagggcatcagaagttaatgttcaacaactttcactgaagtaaacatttacttcctcttctagaatttatctgaactcaaataaatgaatccagcattccaaaaacatcgctaatgatctatgttttctggtcgctcgaccagctagttgaaccgggagaacgaccagacgactaatctcgattagtcgtcgactaggtcgactaatcgacctctggtcgacctggtcgtttactagtcgtcctgttcatccaggacctatgtatatagtatatactgtatggtatatagtatatagtatatagtatatagtatatagtatatactatataatatatactattatactatatagtatataattatataactatataatatatatgaaggatagggtaaacatgacatgaattcagcaatactgaaaacagcaaagaaacacctactagttactaatactaccagtcccagataccacacaacacacattaccacccagttacctaaagaagatcttcatccaactgaaattcatcacctgcagctccccttccacctgattcttgttcacgcgtgtctgaacgagaaatctggggtggtgaagtctggaactctggattctagaactagaaccgtgcagcgcgcacagatggtcgccggtcagccggtgtactggtgaagtctggattctggaacgagaagtctaggagccggtaggaaaatagagaagaagagaagaaaaggaaagagatcgagatgccaggaaagtaggagatgtgaaccgtctgttttatagagagtagagacggcgctggcgttccatctccctgtagccgggtcgcccgccaaaaaaaaagcccatgaaatcaaaaattcaggatcctaaaccctagtcgtgcagaatcggctgatcgagcgactaatcgcccctaatcgtcgactagtcggacgaccagggcgattaggtgctttgatcgggtcggatgtgctagtcgagtaccctaaaccgactagcccgactaatcgcgactaatcgcgattagtcggacgacttgaaaacagagctaatgatctatgttttctggtcgctcgaccagctagttgaaccgggagaacgaccagacgactaatctcgattagtcgtcgactaggtcgactaatcgacctctggtcgacctggtcgtttactagtcgtcctgttcatccaggacctatgtatatagtatatactgtatggtatatagtatatagtatatagtatatagtatatagtatatactatataatatatactattatactatatagtatataattatataactatataatatatatgaaggatagggtaacatgacatgaatcagcaatactgaaacagcaaagaaacacctacttagttactaatactaccagtcccagataccacacaacacacattaccacccagttacctaaagaagatcttcatccaactgaaattcatcacctgcagctccccttccacctgattcttgttcacgcgtgtctgaacgagaaatctgggggtggtgaagtctggaactctggattctagaactagaaccgtgcagcgcgcacagatggtcgccggtcagccggtgtactggtgaagtctgggattctggaacgagaagtctaggagccggtaggaaaatagagaagaagagaagaaaaggaaagagatcgagatgccaggaaagtaggagatgtgaaccgtctgttttatagagagtagagacggcgctggcgttccatctccctgtagccgggtcgcccgccaaaaaaaaagcccatgaaatcaaaaattcaggatcctaaaccctagtcgtgcagaatcggctgatcgagcgactaatcgcccctaatcgtcgactagtcggacgaccagggcgattaggtgctttgatcgggtcggatgtgctagtcgagtaccctaaaccgactagcccgactaatcgcgactaatcgcgattagtcggacgacttgaaaacagagctaatgatatgctagaccactagactcagataatcatcagttgaccacacaagctcacagaccacacaagtgctaatttctaacagaccacagactagaccagtggcggacgcagcaggggggcagccggggcaagcgcaccccctacatgccgcttgtcctaggtaccccacgtaacaaaatatttagattctttgatgactgattgcaaaatagagttttggatgcaaaatttcagtcactagacagcagtagaggcatttgaactcgccgccatggagcctaacaagaacagagaatgggagaagtagcagcgagtgtcaagcagccagtagactgagatttgaggagtttgagaaggaagaagggaagaacacagccacatatgacagacctcaaggtgacggctccaatccgtgggtgacgggctgaaggccacagatcggcggcggcggtggctccaaccggtggcggcggctccaattggtgggggctccaatcggtggcagctagcgacacacatacaagaggcagtgagccttcgtgcctttggctgctcgctacagtagcacgtgcactgtagggttataacgtatcccgcaggtatcggagaagtgtcccaggcgtatctgacttttctttatttatttaaatccacagaaatttccgatacgtcccggatacatatccgaaagtatccgtatccgatacggtatctgacatcggtacgtgagttttgcgaagtatccttgcatcctagccaagccctcctaggttcagcggcctcgttactttgtcccatggcacaagacaactacctccattcacctctttcttcccttccaaaggaaaccttgcctaattttgtcaatcaccttaatcacccatttggagacagtcatggcaataagatagaccgggatgacattacagtggtgatttctactccaagtcagtacatctaaatataatatatttttttctcaaaaagcgtaaaagaaaggacgggcctggtgcagcggtagagcctaccgtctgtaaccggaaggtcccgggtttgagtcctagcctctgcatattatgcgggtaaggcttggcgcttaaagatacccttccccagaccccacacagtgcgggaagcctacggcactgggtacacccttttttttaaaaaagcgtaagagaactgcgtcccattatattaagcaaaggaaggaaacaaaggggctagaaagggccccgggtacaagcactccttacggaggccagcaatagacatacataaaactatccataaaggacctccacagaccctaaacaatatgtctaggagcagccaaaaaggataaacctttggctcctgcaacttgccatttctctctttcctcattaccagactccggaagaagtgtgagattgggcgaaactccatcaaacaccaaacactattacaccactctgtttctatgcttccataccatccaagctcccaaggtaatgagagagtctgaacatttcctccctagaccagaaacaatagctgtataatatatatatttctatttctattatttggataggacattggtgtactgaaccgtgatcttatattaaacattgctactgcttactctcttttttcagctttagctacaacaatttgggttggaacaaaatgctttgttatttttgtagcaatgtatttttgcattagaggtttattaatccatttcatggttaaagttgttaagacttgagtaagaatttgctcatatttctatgcatctcttgacataactactaagtaataacctgttgaagtagttgccttgctcactcagaactgtactggagcactggtgtcattaaaatgtatttatacttaaattattaacaattctcctacttctatcatgttgagtatgctacaagtgaagggcaggcctgacacagtggtgaaagctgtctcaatgagtcactaggtcacgggtttgaagcagtctcttcgtatttgcgaggggaagacttgccttagtttattccagcactggcttggccttagtatgctacaaatatctaattaagaatgtggaatggcatgcttagttcttaattctaatcatgttgtgtacttgggttgacctgtgatctttttattcattttgagttacattgttatgtctagagcagcgaaagggcctttagctgagttggttaggtggtctctgagtagcactcctcatgtactgagttctaatctcgatgggagcgaatttcaggctgaggttaaagaaggtcacttgctggttcccctggttgtgcacacacgagatggactgacctattggtggcggaaccttgtggaggggctagtaggcctcaaagcacgagtaaaatatggctgcttacgaccttccctcatgttgcacgggggaggggggcagcttccgtgacatttctcggtctagggtctgattgagcttcttcttaatataatatcgtgggggcggtctttcccctactgggcgagtttttttggttatgtctagagcagcattcctggcttaatttgatccatgaaattctcttttagattctgaagtacttaagt

SEQ ID NO: 745 - DNA, 9012 bp, Zea mays
  Intron number 10 from transcript GRMZM2G113062_T04 (locus GRMZM2G113062) derived from phytozome v7.0 (chr-ID 1; pos 224799122 to 224808133 reverse strand)
ccaggtcctacttgaatttgcacactaaattgatctttcatttgtctagtgataatgacctcttcagcgcctttcttgagtgttgctttagccattgttgacttacatgtataaatattgtctttctatatttacttccatgcatgaagatttatttttatatgtactcacatgtattacaagttgcaactatttatctttcttgagttctatttgtatggtagcacctgatagaatctgtaaataatatgttcaaatacattgcatagacccattcaattttgaaagtaattaccagggaagcaagtcaggagctgataagtctgataacagcacacatttagtttgtcctacaataatttgcatagacccattcaattttgaaagtaattaccagcgaaacaagtcaggagctgataagtctgataacagcacacatttagtttgtcctacaagtaggtttttggcttgatttcatctaattcacaatacttggtttagagttgggcacgagaattagggaggaggtaaaatgaccatcttaccgacaaataatgttctctaaagtgtgcatggactgataaaaagttagttaatgatgcaattagggaattgtagaaactggaaaataggctgaagttgccttgacgttgtagatcaacaagtattttgaatgaagacaatacaacaacaacaacaaagcctttttgtcccaagcacgttggggtaggctagagatgaaaccccgtatgaaaacctcagagctcaacccccaaagaaaaaaaggggaaacaaaggcaaaggagaaccgaaaaacgacaaaacggggaaacacataaaagagataaaacccacaagaaccagcaagatctaaatgggcacaagaaaaggtcaaacgattaaggaggaaaagcgaaactataaatcaaggttctggcacgtgaattgcacacttccaccccttcctatccacgacgagctctttatcaatattccactccttcaggtccctcttcacagcctctgtccacgtcaaggttggtcgacctctacctctcttcacattctcgggacgcctaattattccgatatgcactggtgcctcttcaggtcttcgttggatatgtccaaaccatctcaaacgatgttgcataagcttctcctcaattggcgccactcctactctctctcgtatatcatcattccggactcggtctctccttgtgtggccacatatccagcgcaacatacgcatctctgccacacatagttgttggacatgtcgtcttttagtgggccaacattctgctccatacaacatagccggccggattgttgtcctgtagaatttgccttttagtttgtgtggcacccgggggtcgcataagacacccgccgcttgccgccacttcaaccatccagctttaattctatgactgacatcctcatcgatgtctccatccttctgaagcattgatcctaagtaacgaaaagtgtctttcttgggtaccacttgcccatcaagactaacatcgccatcttcataccccatggcactgaaatcacacttcatatactccgttttagacctactaagcctaaaaccttttgcttcagcgtctgcctccacaattccaacttttgcgaaacaccactcctactctcctcaataagtaccacatcatcggcaaaaagcatacaccacggtatatctccttgtatatcccttgtgacctcatctatcaccaaagcgaaaagataagggctcaaagccgacccttgatgtagtcctatgttaattggaaagtcatcggtgtccccatcacttgttcggacacttgtcacaacattagtgtacatatctttaataagattaatgtactttgttgctactttgtgtttttccaaggcccaccacattacactcctaggtactttgtcataagccttctccaagtctatgaagaccatatgcaggtctttcttttgttccctttatctctccataagttgtcttagtaagaaaatggcctccatagttgatctcccgggcatgaaaccaaactgattttgggttacgctcgtcatctttcgcaggcggtgttcaatgactctctcccatagcttcattgtatggctcatgagcttaattccacggtaattagtacaactttgaacatctcctttgttcttgaagattggtactaatgtactccgccgccactcgtcgggcattctgtttgtccgaaagatggtgttgaaaagcttagtcagccatactatcgctatgtctccaaagcatctccatacctcgatagggataccatcagggtccatcgcctttcctaccttcatcctttttaacgcctccttaactttatattcttgtatccttcgtacaaaacccctgttgttgtcatcgaataaaataagttttttttacgaaggggcgaagccccctatttcattaagaaataggaaagtttgaaacaactgcacccacgcgaccaacaatccaaaaggaacgaccaaggtcagatctctatctagactcctaacactatcaaactagatcagtggagggcctagaatagcagataaagtttgacctacgattagcaacataagcctttcttatttacaaccataacatggcagactggtgcaacaaagtatactgaactaaggcaaccaccaaaagaaaggatagcgccagcaccaccattcaagttccagcttaagatcaaccagaaatacgcctgtcgatcgggcaccacccaaacgcccggccgaacgcttcacttgctgtctttcagattagcttgcttccttggaccaccattttttgctccttctttttctgtcgaatagcccaggaatccagccagaagcagcaaagaaaaatgatgttagagggatcaagcatagttttattcccaaagcaccaatcatttctagtgcgccaaatagcccaaaacatagctccacagccaaacaaaaccagattagcaatcatatcttttggtctacaaaaccagttgtcataaaggttgctaatactactcggaatcatcctcagattcaaggccacttgaatcactctccacatatatctcgcaatgggacaatgaaagaataaatgatcaatggattcatccacgccacagaaacaacattccaaagaaccattccagttccttttcttcagattgtctttagtaagaattttatttctcacaaccaaccacatgaaaatcttgattttctgtggcaacttggatttccacaagaacttatatggaatcaaaatttgatctgccattttctttttgtaaatagaattaacagaaaagccttttctccccagactccatataagtctgtcctcctgatcagacaagaacacatgattgcaacatctcaccatctcatccattagaaccctcagattaccaacaatccttcttctaaatgtaagtacctcaaaattagaagccaagacaacattaaccgtaatatctttatcataagccaattcaaatagaacaggaaactgaacagacaagggcagattaccaatccagttactcttccaaaagctagtcttcaaaccgtttcccaccccagatttgcaaaatttgtaaaaattatcacgcaaccttagaatttttttccagaagtgtgaatcaccttgtttttgccggatcaaaataaggggttttcccttaatatatttactggtaataattttttgccataagccattcgaagtttcaatattccaaagccattttagtcattaaggaatcattcataaaatcgagattcagaacacccagacctccctgactttttgggagagcacaccgacaaccagtcaactaaatgacatttttttggactgacgacccccttgccaaagaagacgcctcctaagaatatcaatctttcagataatcgacttaggggtaggataaatcgaaagcatatataacgggacattggataagcagctgtttaaaagagttagtctaccacctagactcaaaaacctaccctgccacccaacgagccttttttccaattttgcaatcatgggcacccagagacttttatttatcttcttattatcaattggcaccccaagatatttcatagggagacaaccaataggacaagtgaagatatcagcatacaaatagtcaatttccttagcttttccaaaacacaaaatttcacttttgtgaaagtttattttcaaccccgacatgctttcaaacaaacacaaaatgaatttaagatttcgggcaccttctaaacaatcttgaataagaaaaatggtatcatcagcatattgtaggcagcaacatccattttggatgatatgaggaatcaaaccctcaatcagaccctcaacttgagctttatggatcatgcacgccaagccatcagcaaccaaattgaacaagagaggagaaaaaggatccccttgtctaacccctttatgagtggtgaagtaaggccctaatgtatcattagttttaatggctactttgccacctcgcataattttcattacccaatcacaccaagtactcccaaaacctttttccccatcatggtatagaggaaatgccaatttaccttgtcataggctttttcaaaatcaattttaaggaccacaccgctttgatctttcctctacctcatgaagaatttcattaagggagatgaccccatccataatgtatctgtttttaatgaagccgtactgagagtcacttattacctttgtaatacaactcgccagcctgttattcaaaactttggaaataattttataacacacattcaaaagacagataggtctgaaattcttcatgtcaaccgcattatcaacctttggtaacaaagtaaccatcccataattcagtctttcaatattaagatttccaacataaaaatccttgataagttcaaaatacatttgaatcaaatcccaaaagttttgaaagaattccgcaggaaaaccatccggaccaggagcactattatgcttcaactcgaaaatcactttttaaatctcattaatggaaaaaggagccgttagaaatgatctgtcagtgtccgacaactgcttcatattgagattagaaatattaatactagatagaacagaaggaccaaaaagatctttataataagaagaagcaattttattgatacctttagaatcattcacagaaataccatcatgacacaaaaaggggattttaacccgtcgcttccgacctttcgctaaaaggtgaaagaatttagtattttcatcaccctcaatgatgaatttctctcttgcagtttgtttttttttgcaactttcttcttccatgatttttttttcaaattccactccaaatcgagcttttcgattctttcagcatccgaaatacccataacttcgcattttttatctaaaatgtcaatattcttcatcagctcttttttaatttcaaatatctaccttcaacgttaatattccaacctttcaacattttcttgagacgctttgttttttctttccaaatctcaatactctttttacctctaacaggcagagcccaattattttcaaccaaactcctaaaatcaggtctaagtctccaacataattcttatctaaaatctctcacagtagggggagtaaaatcagttttgagacataaaggcacatgatcagaaaaatatctactaagaccagaaacattcacattattaaaatgcagatcccactccgggctaacaagaaatctgtccaacttttcataagtggggggatttctattattagaccaggtaaaaagcctaccactaagctccaattcaatcagatcatgtacatcaataatagagttaaataaggaactccacttattggtgccaccaggtttgttttaatctgattcttttctaagaatgttaaagtcgccaccaatcaacattggatgagagcatttggagcacatagaggataactcactctggaatttctatttttgatcattttgagcagccccataaacattaataaaattccaaataaatcctgattctttttgaatcaccagaatacgaatcataaattctcccacttctttctctctgacatcaaaaatgtcagcatcaaaccctaccagcaagcctccagacctaccattagggggagaccagacccaagcaaaatttctattaccaccaatgaagttcaaccaagagtcttcaaagtttttcttgttggtttcttgcaaaccaataaaataaattctctctcctaatagtatctcgaaggaactcacttttcacttctttacccagaccctgacagttccaaattaaacctatcattctaaacaattttgggtctgcccctcattctgacctctccacttaatagggatgttcctatttttaggagatttactatccttttttttcttcctcagtttttttcctgtgacgaattttacgtccttttctgagaaccataacatcatcaagatcagtcaaagcattatccacactttcattatgactattattttccacctcagaatcaagaatgtctaccttggaattatcaacattaaacttaacagattgaacaaccaaattttttctagagagctctaaggatttaatcagatttaaattttccacagcatcattaaaagaagaacctaattccacccatattttatgagcaacatccataagaacaacattatcagtattaagaacagaaaatggattgtatgacgtacctttgttaatgaatgcatctttagccattgctcttgctgctgccttatctgcaatcttcatatcttcagtagactccaacctgctgctcctcctaactccttctgccagctctccttccatggatcctcctttcttaactccaacattcttaccaacatcttcagaaccagaaacatttgtattcgtttttcttttctcttgaggaggagaaggaataagttcatcatccttgatgaattcctccagatcctgggaatccagcaaatcatcctcactatcattgaaatcatcatcttcattaccctgattgtcaaggtatcctttggctccttcagagcttttcccaatcttcatactatcagaatgttcagactgagacccagctacattaacatgaaccgaagaaacttttaagggagattttcccttaacatccctgccagattctttatcaccacttttggcttttttaatagatttctcaaaagagaggtcaccaaagccttgtctatcaacagaagccctcttgcccagatttatagattcatcattccacccttcatcagtaatattatcaattttaaagaagatgtcatacagaaaaggtttgacaccaacttcaatgatagggggaatcatggccacactcttaacatgaactttgaatcttacaatttctttagagtttaaagataaaatgtctacttcctccacaaccccaattgtagagcccaattcacagatagcctggtaattctgaagttcttcaggcacattttcagccacaatccaaacagaatggagtttggattttggcttagcctgagagctccacgaagatacagagatttttgcaccagacaatttcatcttcagttcagggaaattaatcatctcatcaagcctctcttgagaaggaaattgcatcaggaaaccagagtgacacttggtggctttccaagtacggccccaggggaaatgaaaaccgaaatccttctcaagatcctcacccgagatcaaaccctcaacaattttaaccaaacctattaaactgcgcttcggtttattcgacagcggtttggagaaatgagaagagtaaaaccctaatccatccgccgccatcccaacaataggcatgcaaggcttgttttgtttggggagaacgcaccgagcggtattatgtgtttctttgcgatagatctcacaccacaaagatttgaagcactccctagcatgatggccatccataccacatttttgacagaaaaccctacgcaccatttcattaactttagaatgggaggaggggttttaagaatacctgtctgaccgccatcgctggaagacgagatagggatatcatctttgttctcgggctttccagtccccggcttcaagcgccagctaaggctccggtattttccccaggattgggatccctgaggcgcatctttcggccccaacggtcccagttagggttacggttcttcggatccatccggagcggagcagccgagagacccgggaggggccactcctcggcgatcgcgggcggacgaaacggggaagaaaaccaaccaccgcagaaactagaacgcgacgagcacgggagagaccagagccgagagagacgcgacgcgaaatgggggaaagaatgtgatccaacgaagtcgggtggaaaccctagccgcttacctgaagacaatcctccaccgcgctccgacgcgactgcacgtcgccctaggccgagcgaagccgacttcacagaagaccgaccaatgccgggggaatgcgcgagaggcggcccatgtaccacgggcgcgatgacacgggccgacgatgaacaggaagaagacgcggtgggagcagggcttcaccctttctttttttcctccgcatttttttggtctccctacttgtcccgaaccaagtagtacaccgtcgaagacaataaaagaagttataacaagttttttgaactggtggtgataagtaggttggtagtagattttagatttgcgaataccagattctgactttctagtttcatgttagacacaagtaaagcttttgtttgtttattagttgcacgtcaataataatttcactatcattaagttttgtccaagttggtatatttgattccaattagttttgataattatctcttttcttttaacaggaaacttgagg

SEQ ID NO: 746 - DNA, 9619 bp, Zea mays
  Intron number 3 from transcript GRMZM2G022001_T01 (locus G RMZM2G022001) derived from phytozome v7.0 (chr-ID 6; pos 1 66387608 to 166397226)
gaggccgagctaaacaaaagagaacgggtatgctgccttatcattgcagagctttcagcctgtctgctccttttgccagttatagcagttctgacaaataagatgcaagttcatttttcacaatgagtacatgtaaacaaacaacacatatattattatggacctcaacatcttacatttttttgtcaacaatcaatacagtgttactccctaattttacatcagccattcaaagtctatctcactatttaattttttagatgattttttttttatcaaatatagactcttcatactacttccagtcgtaagctaaagattttttgctaatgtagtgaaactgcttaacaatatgaaggagaagagtgtggttgaagtgactgggacctgggtaacactgccaatgctcacgctcaaatgaggtaaaccacgggaaaatgatctacttttgacatgatggtaccttggcatacaccaccaatccacaacttcagttcaaccctctgacttatcatccttgagcacttgaaactactacctaatcatattttcaaataaatcatcataccaagaccacgtgctgccacatatgtggcagccgtcatgggactcttgtcgctcttaaactctgcaagaacatagttcttttttgtttggagaaatatcaagatacgattcccatcaattagatcagacaatagcttactgagtctgtgggaaagaagcaaaaatcaactcgcaccatgtccatttgtaattggtattagtatagtgagtgaatgtaagagtttttagtcacaagagcatcaacctacataccttggatacttttctcatgatctgaaataccttccgcaatttgttgtatggaatgattagctttgggttcaggcgatcctatgattacctgcattataatatataagccaaaagttaagaggggctgccaaaatcaattcaacacaacatagtaaaaaacagaaaataacggtaacagcagcgaacacacaccttgtaaggattttgcagaaactgtcttgccaaggcttcaacttctctaggtcatttggcactccaatacaaggtttgtctgtctgggtagatctatggatagcacaagtgttttacaagcattagagctagacattaggcaagacaatagaaaatagtaagtattctgcatttctacatgaaactgtacctatgcaactatttttcaaatttgtggctcaaaacccatatctagcatccggtctgcctcatctagaacagggtatgccatatgtaggtttgtgtgactggcttccagcatatcaatcaaccgaccaggagttgcaatgtcattttcaactcctaaaagtgcagatgatacaataaattgagtttaaaagtattcatctaaaaataattgaaatggacagaagtgtgcaggtacctcttctttttttttttttgaaaaggcaggaggtctgccaagatatattgataagaagaataacaagaggtttaagtcaatacagtgaccgaagtactaggcaaagatccaacctgaagagaagcaaacaaaaataaaaaacagaccccactaaatagttgttaaggggtaactaggtgcttggcccctgccaaaatccaggctgctgtctcactcttgattttggcaatgatttgttggcagctcgagaatctgcgatcaaagattctcgcatttcgttctcgccaaatctcccagtttacaaggatcaaaagtgatctgatgccttttctattgcatcccggcaaaaaagccagcttttcccaccaatgccccagctcggggggtcgcccccagttagacggcttcaggccctgaacagctacccagacagcaacttcctcccaaattcttttgatgaaacgacattccacaaaaagatgaagccccgattcctgggcagcacgacacaagacgcaagttggttcatggggccaattcctggcggctaatcgatctgctgtccaaatgcgattttgaattgctaaccagctgaaaaacttgcattttggaggcgcccagttcttccagatgatgaggtcataatttgtgtgaacagagcccaaaaattgtgcctgatatgccgatttgactgtgtagcggtgatccacagtgaaattccaggtgatggcatcatcacgctctgggtgaaactggatcttttggacttcagaccaaagaatgcagaactcatgaatgtggtggggagtaatcggtctgtcgaacagcgcaagatccatgatccaggcattgtttgtgaccgcctccgctaaagatttcctcttatttcttgatatagaaaagagacgaggcgccaagtcctttggcctttgccccctcacccaagcgttgccccagaaggagattttagaaccatcaccaatatcaatggtcgtcgatgccgcaaaaagcagtctatcaacatcagagcaaggaatctctaagttgtcccaaatattctgtgatgaggtgcaattatgccagagccatcgcgcgcgcaaggcacgcgcaaaagcgcccaagtcaagaactcccaagcccccaagggattttggcctcgccacccgtttccagttgactttgcactttccgcccgtcagtcgttcagaaccagcccaaaggaattgtcttcttttggagtctagaaggctaatcgttgccttgggagcattaagggcggttaatagataaattggttgtgaggtaagcactgttttcaccagatttaagcgccctgccactgagaaatttctcccattccagctgctcagtttgttcaatactttgtccaccaaaaactggaagtgctccttcctgagtctagttgtggagagagggaggcccaggtaccggatcgggaaggttgctcttctggctgggaagcaactaagaatgtcatcaaggggtagcccctggcaacggattgggacgatcatggacttctgaaaattggtcatcagaccagaggcctcgccaaatgaggtgagcaacttgacaattgtctcaatatcctcttttttcggcttaacaaacaaagctgcatcatcagcatatagcgagatcctaatgctgggcgagctgtttcccaacttgctcaatgctccactgtccgcggcgatctttagaattttttgcaaagggtctatcgccaagacgaacagaagaggggagagaggatcgccttgcctgagacctctctcatgatgaataggagggttagggaccccgttaacgagcactcttgatgttgaggtggataggatagaagcgatccagtcagtccacctcacagggaatcccaaattgcggagtaaggcaatcaagtaatcccagcggacggagtcaaaagctttttcaatgtctagcttgaggaatagcgtgggcgaattaatacgctggaagcgcctaacagcgcttctaactgcaaggaagttttcatgaatgctccttttttgaatgaaggcactttggcaaggtgaaactaactcattcattctcggcgccagacgaagagccagggttttggtgataatcttaatgaaagaatggatgaggcttataggtctgaagtccccagctacctccgcgccttcctttttggggattagaatgatgtttgctgaattgattaattggaggttgaggcatcgattattatagaaagcattcactgcagccatgagatcatgtcttataatggtccaacaagatttaaggaaaacaccagtgaagccgtccggccctggagccttatctcctggtaaaagatcaatacttctcttaatttcctcctcggagaacggcgcgtcgaggcttgatagatcaaacggctggtcagagataatgtcccagttaaggtcgatagatctaggggttggccgctttaaagcattatggaagaaattttgtagctcttgcgctttttcattgtgcgagaagacccacccattaccgctccgcaaccgttgaatgaaattttttcgcctcctggagccagctttccggtggaaaaatttagtgttggcatctccgaatttaagccaaagcatgcgtgagttttgcctgtttcgtgccctttcaattaccgcatagccaaggatgcgcatcttcaatctatttcggaggttcacttccatgtcggacagtcccctattttcttgtgccatgtccagtcttagaataacttctagggccatatacataaagagtctagcatcaggtattaacttggagctccattccttaagcgccttggccgtgaactgcagtttgtagtacagcctatgaaaaggctcacgatgttgggtcggtgccagccaggcttgctcaactgtatgctggtaacctggtaatttggtccagaaattctcaaatctaaaggaacgtggacgcctcggcatagtagtattggataggagcaacgggcagtggtcagagaccgaggatgatagtgcatgcagaccaaatattccgaacatctcctcccattcagagttgcagaagaatctgtctagtcttacgagagtgggatgtcgtctctcattgctccaagtgaacttcctgttttgcaaaggaatttctttcaagtcgcaaatgtcaagagcttgcctgaacagaagcattaggcgagggttgactctagaattgtttttgtcgcttgctttgtatgtgcagttgaaatccccaaggaccaaccagggggaaggtgaaggaggcctctgtgcactcatctctcttagaaaatcaggcttgcggcctctacaagatggtccatagacgactgtcaggtagaaggaagcacaacgatccttaagagagacatttgcagatatgtggaattctccgatagtaaaattggacaattcgagtaggtcgctatcccaaagcaaaagaataccaccccgtgttccactaattccttccgcaggtttaaaactgaatttattaagctttggtcctccaagcgccatcacaatggacctgtcgaccgttgataatttagtctcttgcaaacaggcaagatggcaagtggtggtggagatcatcgcgcgcactgcatctcggcgcgcttgcaaatttaaacccctaacattccagcacaggatgctaaagtcagacatggaggagaaaagcaccccgattaattgccgacagctggatgaaattgcagcactgcacaataatgacagtgaaacataaaggggccaccagggccaacacaagcatggctgttataggtctgaagcaaaacagcaacccaatacagtccagggtgctcacaaaagtagtagaaactgagctgagactcattgacataacaaaagcagaccctcatcatctaacatggagctaaaacagccatcaatcaagccgcagtaactgctctggcctctgcatgcatggcgtccacctcctcttggatctcagctatagcatctccagcaattcccagcaaggccttgtcgaggcgaactgtgtctggcgtatccagattgaacagagcatctagggccgtccccatctccacagtcagtggcttcttgaaccaatcctgaaattcctgcaaagcagtattaaaatcagcagcgtcatcttttgccaagagaccaagcttgcggcagaggacgcgctgggcccgttgcatgacattcgttcgagggccgttggcaagtctggcgctacgacgtaccgtcgaaaggttgaagccgtgtcgctgcttgattcttctagcaggtgctgcaggaatagtagacagagtggtcgctggtgttgttaccccctccgaaggatgtagcactggtcgctcgagtatggcaggcgagggcttggtgaatatggtgttgagtagatggctttgcgcggtggttgacaccgcagcaacatctgttgaaggttcatgcaccgcagctatcatccgagaggaagcgtcgacattggagtcctttacagcttcggcgttgtagcccgcagcaaccgtgctgcagggagagcctaacagcacatggtcctcctcagactgcaccaaaggcagtagctgcatagcagggcatgttggaagggaatcaagaatagttgtgaatgctcgctgcactgggatgagacttacgttgtctgcgaacttcatcctactgccatcccagacagcaaggttgctgtcgccagcagcagccccagggaccggatcgacttggcccttaggcaccaagcgcggtcgccttcggtacacgcagccaacgcggtaacgacctttaggaagagctgcagccttcacagcagggcgcggagaaccgtcgttgccaccaccgcgtgagctgcggatgccgggactgcaggcgcttggtggaaatctggggcgagcaggatgccgtgggggggtcgctgaacggccacgccggacagcaacacgggtggaacggcgcacacggctgcgtccacgtatcgccgggtcacgaccaatcgccgggtcacggccaacatgtggcgtaaccaacgacgtgcctccggcatgacgaggctgctgatcgccatgaaggtggtgacgaagttgctgatcgccgtcgaggtggtgacgccgcctgggtgagtcatggcgctggccatggcgcgaccccgagcgctcccgctcgcggtccctgggagcccgcgagatgctacgaaagagccgggagctccaactgtcgtcgcgtcctgggcggcgaccacgacggtcactatcaccatcctcatccctgcgacggttgctgcgaggtggtggagggtcgtgacggtcacgtggttcgcactcgccgtcaacaacaccaagcctccaatcatacgcacgtgaatgcccatggccatccctggtaggggggtcttccaccatatcaaggtggacgatgaccctgaaggttaagccgctacgccccgccggtgtggcgtcgtgggcagtgctgctcctgtcaacaatggtcagccacgttaccttaggtatgtcagacgggtttcgcgcccacgcccacagattgagcgtcgtagcatcctccattcgcagcgactgggcttcaacgtagtccagcacacaggacttagccaccgcacgcttggcgatgccatcgttccatgcgtgcagagggatgccttccaggcacaggcgcacgtgggagccgaagacgctgtggtcgccgtggacggggagctgccacggcctgacgcggatgtcgatgttgttgtaggtgaagtcgcgctgcgccacagccgtgtcccggtgatgctggtgttcaaaggtgacgaggaagtcctctggatagtgtctcaccaccttgatgtcttcttcgcgcatcctgaacctagagcagaaagcccttcttactgtgttggtgcttgtcgccggtcgaacgccgccgagccaggcccatgccgcgtgggtgctcaaccgcgccagctcgctgtccatgtcccgagaggacgcggcaacagcgaaagtctcctgcgggcgctccatggggttgccaggcttcaccatgttgacttggcgcagaggagggaagttgacgttgtcgaagcagggaggtggtgggaaggcagagggggtagaagcagcagcactaatcttcttgggacattgccaggctctgtgtccagggccgccgcagttgaagcatttcaacggatccctgcaatcaatggcgtagtgccctctggccagacatcggaagcatttacctctcaggcttaccttaagatttttgttgtccagatggcggaaccttgaatgctcggttgttggcttcaatgaagtcgcaggcgaattgaatctcttgcggagtcgccgatggaccgttgtccagccaggcaaatcttcagcgccggattccgcggatttgctgcgttgaggagtgatgggacgcaggcctgggtattgaagtcggtgggtagcagtcccatcccggccgtgcggagtgattttcgttggagcagcagacgcgtcaaagcaggaacgatgagattggtcagcggacagagctgattcggcgaacctaactctcctggtgcaggcggccttagctgtcgacgaaccggcggcaggcttgaggcaggaccgcgtcgaagaagaagtcccggagtcagatctgggaatgcgggcgtccgcgtcgaatgctggaatctccaccgaggcagggtggctctggaggatggaggcctgatcaatggggtgatggaggggttggggttggttttccggcgagcaggcggggggagcggcagcggcggcaggtgcggtgctagccgccgcgaggacggggagagcgtccatgccgaccgacttcagttgcaaggtcacatatttgtggacccttaggtgccccaccatagacatttgcatctagttcttgaatatgatcaaaattttgtagattcttcatgtatttgaacagccaattctcttgtgggggcgaggattaataaaattgggtcatcgccttgttctaaaggcattacaatcacaatgcataaaatgcagaaagctcatagcaagtttataggaaacaaacctagctgtggctgggcaccaacatgaaccaacccaggtagcagataagatagtgttttccctgagcctatttgagcgatacatatcaggtccctacccttcaaagccataggccaaccttgagattgtataggtgtttgctccacaaatctagatttggcaatcgcttgcatgcagtaatctgttaaaggaatcgtgaaacggtagtataagaaatcataggtattgcgaaggaatcgtgaaatagtagtataagaactcacaggtattgcattactttcaacggactcacggacaggaaacagtggaagtggactaaacctgggaagttggcttcttggaagtatcggaccggcttgggcacatcccagccctcgaccgtgatatcctggaggtggcagtattgtgacacctctgccttcaacatagcctggacacataatccattctcacgagaggtgtaggttagatttcaatatgagatacaacaaaatccttctcccttgtaacacacttaaactcattgtcgattttacccaatatataatgccatcatagccaagcaaatatttcagcacactgcatgctttgacaagaggggtctcaaggacccatcctccattcaaatgcagggacccgatcatcttgatgcattgcgatgtacagtttttggtccacgcagagtctctacacatttgaagcacaaagctgtttctagagtatttgaagcttttaaattacagaacattagatatgctcgtgcttaagcactaacttgctgaaagttgcttttgatgatctgaccgtcttctccattttctcgtatgatgtccatcagcttggacctggtgatcctcagaatctgagatagtttcgtagtccagaaagtgaatgacgaccctcggctacttggtagttagaaagtagctatgggtttaatgtgacacaatagaaaattatattggcggctgactgctggtctattacatgagagctgtaaagtttgtttgactatcctttggcacactctaatgttttgcagggtgccaagaaag

SEQ ID NO: 747 - DNA, 2044 bp, Zea mays
  Intron number 4 from transcript GRMZM2G157172_T01 (locus G RMZM2G157172) derived from phytozome v7.0 (chr-ID 5; pos 1 1941427 to 11943470 reverse strand)
agaagtatagtggtacgatagttggtggaatggtttgtcatgtcttactgttacacttgtttattgagatgcactgtacctttgtgggaaaaatctgttgattattctgatgcatccatgttaatacgacactagaaaagttgcatgatggaatactactccggtgttggatattaccagttaatttatttttctagtgtcatatactgacaaagtagctgtaagccagcagaatattagacaaattggttggctatggtttgtagatgattgagtaatagcattgctggttttgttgaccacaaagttgccaagttcttggtctccatgtgtagctattataaaatactaggaaatataaaaaagcaaacaaaaagattgcccttagcttttatacactacactattttggtggttatatgaacgaagttctgttgctatcatcggtagaatcaaaactgagcttagtgatggcaacatttaggttaggttattcattcatgcaatcccctttccaattttctatttcctcacaaggatgcattcttccaaggtttttaaatccagtatgctggaatgatcgtatctaaaatagaacgtttcatacaaaacaatgatgacaacatccttttatgattgctgaatgtcatggttcttgtatgttaatctatgcaccttattcacccttttgtaaatcgacttggtgcattgattacgtacttaattgaatgttgtgaagtctgtctcttaccagaattttctagtgtacatgttgtctagtttcaaatatctttcatctgatttttaaaattttaaattagcttcaaactttttttcatctggatgttctatagactttaaattgaatacttcctccatccacaaaagaatgagggaaaccctagactagagattctaatacccttcactacaatataataccttaacaggatgcaattctcactttttgaggagtcaaaagatttgaagtttaaccaaggttatagaaaaaagtactaacgtttctgatacaaaataactatcactaaattaattataaaatatatttttgtagcaaacctacttggaaatataaatgtcaatactattcactataaacctaatcaaagttaagctagtttgactcgcacaaatcccatagttgcatccttttgtggacggagggagtacatgccaaggtttgatatcctacccaaatagccttttgatatagaagcagtatcaaagtaaaccacatttgtccccttaggaaataaatagagacttgattgataccaatatattacaagaccacttcaactcattttccttcatacttacctggtctgatttcaaggttatatgacagcgtccatacgccaccccacttcccaaccataagaaattgcaacacattcattgtgttttaaacggagaccatcctagcacttagcatgttcatcaattgggtcaaggatgagcctcacctttggtgtagggctggagcccgtggattatctaacatcctagctctccagcattccaatcggtgaactctgttttgggtcctcaaggtcatgggtccactttttctctttgtaaaactgtatctagattagggcgtgtggttttgtgtggagttatatgatgttttctttttacctaacctttttccttcttaatataaagatacacagctctcctgcgtattcgaaaaaaaaattgcaacgacctctccttgctgcagccacaacacacaactttcctaccaactacaagcccatatttgagcactgcagaaaaccgttcttgaccctaatttatcacataatttgctggcaattgtgacccctccttactagaaaagacaacagttcagcattttttggatgaatttcttgaatgcgcatttagtttgttttttattgcataacatggaatctatccatttcaagctctagtttctgtgtacgaatttggtttactttacctggcttaatgaactattagtttccttattcagaaggaagtgctagcgaatctg

SEQ ID NO: 748 - DNA, 13055 bp, Zea mays
  Intron number 6 from transcript GRMZM2G064390_T01 (locus G RMZM2G064390) derived from phytozome v7.0 (chr-ID 5; pos 3 7083211 to 37096265)
cagcaaagaattgaagttagtcctcagttatctttggaactcttctaagtaaatgccaaaatttacgtgcttggtccaaatattatggaaggaaacaaaaatgttaggtgttttcagcattccagccagcttgtgtgctttattaagtcggtcaaccaaacagtttggaagaaaacaaaaacacatgtatagcttagctgatgtaatattataaaactgatacgaacatccacctgtaactttgtaagaggcatgctactttaccatcatgaacatcaccaactttgctataacctttagagatgccacattttttgatattgtaaatagcaaatatctcaccggtataaaaccaatcatttcatgtccttgactgtctgcttgttttttttagaatttattgtctttgcttagagtcaagaaatagtttgactgatgtcactacaagtgcttggatcagaaatttagaatatgtcactttggtaaaaaaaaagactattatgttcttttaggaaaagaatgaatcgtgttcattctttggaggtgattgcacgtataccaatctatcaactagtgcaacgctcggtccttatcgctaagtgaaacttggctcaaaaataaattgaagaagcactcccttggacttgcctcattaaagcgcaccatcgcccgtctaagatctagagtttcttggctcaaagaaggtgatgctaatacgaaattgtttcatatgcatgcccgtcaccggaaaagaaaaaattttgtggcaagattggttgctgacaaccaggttttcactggacataatgagaaggccattctaatggatcaattctattccaatctgctgggtgtcagcattgacagagattgctctgtcaatcttgaagctgtgggagtttcgacctttgatttggctgctctggacttgcctttcttggagaaagaagtgtgggaaacagttaaattgcttccttcagataaggctccgggtccggatggtttcacaggaggattttataaggcatgctggtctataattaaagtggatataatggcagcagtttcagcagtttggagcaggagatttgcgcagttcaataggctgaacacagcgtacatcacattgatcccaaagatggagggggctgatcaagtaaaagacttcagaccaattagcctggtacatagcttcgcaaaattgatcaccaagctgctagctaatcgcctagctggaaggttaaatgagatgatttcacccattcaaagcgcttttataaaaggccgttttattcaggataactacatgttagttcagcaaactgcaaggtttcttcatcgacgaagacatgcccatttgcttctgaaattggacatcacaaaagcctttgattctgtctcctggccttttctcatagaggtattacaaaggatgggatttggacagctttggagggatattctatgtgggctgcttgcaacctcttccactcaagtgatggtaaatgggtttccgggcaaacatattgttcatcgtcaaggactacgacagggtgaccccctctcaccgatgctcttcattctagtcatggatgtgcttgggcgaatggtcactgcagctgaaggggcaggacttcttcaaccccttgctacaagatctgtgcatcaccgagtctctatgtatgctgatgatgtagtcctcttcttgcgaccagctgccaaagatatagcaacctgttgggtctatgcttcgtcgccgaaggtcttcaagggagaagcggttttataatgtgtgagcaggtatcttcggacttgtatcagaaagggagaagctcaaaagatacaaaggttgacacagcgccgaagctgtgaagcaggaaagcttcggcatgttcgcagaaaagggaaccgacttaaagatgaaaaggccatttagacctcgatagagtgctatagaattatcaccaaatgtaaagggcatgtatgtaattttgtatgggttgtaccccgtgcctataaataggtgaacagtacccccgtactgttcacgttgactttgcatttgcttctgcgtcacatttatacttttatctcctttcaagccgaaggtacatttataattcgatattgtctttatttctctatgatgatataaaaaagttaaatgtatgatgttatatgattattcatgccatcttttatgtttcatatgcttcgtttttcattaacgtatactgagatcatgaaggttcgtccttcatgaccttcgtccgaagatcgttatatcctaagggaaataatgcttcaaaggacgaaggactttatcgtttaacattctctgtgttgccttgttcttaactcatagcatttgagaacaagtccccaatattggcgcccacctccggtgaactcacttccactttttgagctgatggcttcgttcaacgaccaagctggagctgcttcggacccgaagctggtgctaccgatcacaggtggctcgtcctcagaaccagctaacaagaaacagaagaaggaagcacagagaagggtacagcatgttggggtgcaaggacccttcatcaagacaagatggtctcacattcctattaccttctcccaagaggaccttcagctaaaagattacccacacaatgatgccatggttatctcttgtgttatcaaaggatttctggtccacaatgtcttggttgacacaggcagtgcagctgacatcatatttgctaaagccttcagacaaatgcaagagccagaagataagattcatgatgctacacatcctctctgtggcttcggaggaagacagattgtagcactgggcaagatcaccatgtcagtgaccttcggattcatcaacaacactagaactgagcaagttgtgtttgacattgttgacatggaatatccttacaatgcaattattggtcgtggtactcttaatgccttcgaagcaatccttcatcctgcttatctttgcatgaagataccttcggatcagggacccattgctatccatggaagtcaggaagccgcaagaagggccgaaggtaactggactgactccaaagcaatccataatatagatggagccgaagcttgtgaacagtacaaattcagaagggagaaagcagcttcagcagatcagccgaagcctatgctcttatgtgaggacatagcagagcagaaggtgctgttaggctctcaactatccgaagagcaggaaaaaaccttgataaggtttttgttcaataacaaagatgtttttgcatggtcagccaatgatctatgcggagttaatagggatgttattgagcactcgctcaatgtcgatccatccttcagacccagaaagcaaaggcttcggaaaatgtcagatgataaggccgaaggtgctcgcaacgaagtcaaaagactcctcagtgcaggagttattagagaagtgaagtacccagaatggctggctaacactgttatggtaaaaaaggccaatggcaagtggcgaatgtgcatcgattttacagatcttaacaaggcttgtccgaaggatgaattcccactaccaaggatagactctttagttgatgcagcagcttcgtcagagctcatgagtctgttagactgctattcaggctatcaccaaatttggatgaagaaggaagatgagccgaagactagcttcatcactccaagtggcacatattgctatcttcggatgcctgaggggctcaaaaacgctggaggaagtttcagccgaatgactgcgaaggttcttcaatctcaaataggcagaaatgtgttaacttatgttgatgacatcattgtcaaaagcacgaagcaggagaatcatattgctgatctgcaggagaccttcgccagtttcaggcaagctggcttaaagttaaatccagaaaaatgtgtcttcggagtgaagaaggggaaatttcttggatgcttggtttcaacaaagggaattgaagctaatccaagtaaaattgaagccatacttcggatggagccaccaactacaaagaagggggctcaaagattgacaggaaggttggcatctctcaatagattcatatccagatcggcagagagaaatttaccattcttcgaagtgctgaagtcggccgaagtctttcaatggggaccaatccagcagaaggctttcgaagaactgaaacagtatttgatagatctaacaacattgactccaccaatgccagggcctcctttattgttatatgtggcagcttcgcactcagcggtaagtgcagcgcttgttcaggagaagcttgatggtcaagtcaaaaggcaggccccaatatattttgtttccgaggtccttagtttatcaaagaaaaattatacagagttggagaagatactgtatgctgtcttgatggcctccaggaagcttcggcactatttccaagcttacaacataattgttccttcatcacaacctctgaaggatattatgaggaacagagaagctactggaaggattggaaaatgggctgcagagctcaatgaattttgtattgaatatgttcatagatcttcgattcagtcgcaggcactggcagactttattgctgattggacaccaggggctcaggaggaggaaacaaataaagacaacgaagcctggatagtgttttgtgatggatcttggggaaccttcggagcaggagcggctgctgtgttggtttcaccttccaaagtcaaaacctgttatgcggcaaaacttgattttaattgcacaaataacattgctgagtacgaagcattgattttaggtcttcggaagttaaaagcaatgggaatcagaagggccatacttaaaactgattcccaggttgtttcgggtcatattgacaaaagttgtaaggctaaggatccgaagcttgaaaaatatctggatatggttcgaagagtcgaagcttccttcgaagggttttctgtcaagaatatccctcgaggacaaaatgagcatgctgatctgctagctaagtcagcagcacaggggctgcctttaccttcggatgtgttctttgaaacaataaaagcaccttcggtgtaactccttgaaagagcagttcttaatatatctcctgtttttagtgaagattggagaactgagatcatctcttaccttcagggtaaatttctttcagatgacgaagcttataacaagagaatagaggcaagagctcgtccatatgtcatgatagaaggggagttgtacaaacatggagtttgtgctccgttgctcaaatgcttatccagaaccgaaggtatagagttaatgaaagaaatacatgcaggcctgtgtggatctcacatcggatctaggccgttacttggaaaaattttccgtcaaggattttattggccgaaggcagcttcggatgcagcagaattggttcaaaagtgcgaaggttgtcagaaatgtgcaagagataaaaaacaaccttcgtccttgacacagctcatacaacccacttggccattgcaaaggtggggccttgacttgttaggtccgttaccaccggcccaagggaacttgagatatgttgtggtagctgtggaatatttttctaaatggattgaggcgaagcctttagccacaataacttcggctaccatccaaaagtttttctggcagaatattgtttgtcgtttcggggtgccaaaggctatcactgtggacaatggaacacagtttgactccgaagctttcagggatttctgtgaccaaattggtacgaagatccattttgcatcagtcaggcacccggagtcaaatggactcgttgaaagagccaacggcattataatgacaggaataatgaagctaatcttcaatcaacctagaggaaaatggccagatcagctaaccaaagtggtgtggagccacaacacgacaacatcaaggtctacaggcttcactccatttaagttattgttcggtgacgaagcaataactccagaggaagctaaagccggatcaataaggatagtagcttcggcagaatcagattccgaagctgcttattctatagaaaaagatgctttagaagggatcagactgcaagccgtggagaatattaataaatatcaagctgaaacagtcaaatggcgggatagaaaggttcggctaaaaaatattgagccagggcacttggtacttcggagggtggccaacccggaaacagtgggcaaattgcagttgaaaatgggacgggcctttcttagtagcatcttcgtcaaggcccggttcatacagattgaaagatatggacggcaatgacattcctaggtcttggaatgcggatgagcttcggcgatattatgtataattcgatgtaatttttcacatttttattttttctttcatggcacccttttcctttccaaagggggagaaaggtttttaatggggccagcatatgtaatttccttttttagtcttataagagcaaaatcccccaaagaatgtaaatgtaaaagctgagagcgcaccatcgagtgccgaaaagtacaaacgaagaagctccaaagacgttcctaagggaatgcagagcttataccgcctaagtaaaaggcgaagaagctccaaagtcgttcctaagggaatgcagagcttacagcgaaaagtcaacgctgattccgcctaagtaaaaggcgaagaagctccaaagtcgttcctaagggaatgcagagcttacagcgaaaagtcaacgctgattccgccaaaagtaaaggcgaagaagctccaaagtcgttcctaagggaatgcagagctaaggtgtgattgtttttaagaaaataatggctatgaatatagcttcggatacgtgtttggccattcatttgcacaacacattacatcatagcatttgcattcataaacattcatctaggcatatgtaggataatcatcttcatcgcataaaatgattgcttcggcaagaagagaaaaaagaaagggaaaaagagcttcgtgcacaaaaaagaggggaagctgttgtttttatgaaggagagcttcggaaaaaaggaaaatgatgttttctatgcttcgttgcgtacgaaaagaagggaaggtgttttttttcgccttcgactcaaaaaaaaaggaaatttcgtccacatcaaagcatttctcataaatcagtgaaaggttaaggatatattacaaggtatgaacagtatacatggaagttttgtttacatttacaaaagttatctcaaaagtttttcaagtactgtctgcagtctactatctaaatctccaaggagcttcggcttcggcgttatttttgatcatcagcttcggcttcgtcatcctacatgaataaggtcattggaagtcagaatcaagtttataggaaaaggtaagcacaaggtatgatttcttactggatcaaggtggctacgagcttcgtctccagctttctctcgaccaccttttgtccatatcatttttacaaatcgattcgagatgcttcgggcgagatcagggatgtcatccaggattgatggtgacaaggtaaaatttggcctattgacaattttcccatgatcacagccagccttcatgaaggctgcagcagtccctcgagaagccacccaggcacagaagtcaccatgcccagctatgacttcgtcgagctcgtcaatctccccctcaatgtgttcgaaggtttttggtagatcttcagctgagggggtaaatttttcgctgctagctccaaccgagtaaaaaatctttcttaatcgttgaatgcacttgttgctaaattctaggcatttttcttgaagatttgtcagtagttttctcaaatccgaattctgctgagcttcggcttcaagtttttcattgagatcttgtttttctcgttcgaactgctcagactggcggagaagcttcgagtttagttctgatatttttgcttcagcttccgccagtaagccttcggctgcctggagctcaaagttctttttctcaaaagcatctgattgctcctttattttgttttccaaatttccgattataatttcatgctttttatcttcaagatcttgctgcatttgcaaggctttgctcaataacatactctacacaaacacaaccttcgtcagacatgtttttattagaagcaataaaagttaagagacgtcattcaccttgaagttggagtaaaacaaactaccaacgacatgttgtcgtcggtagcggctgatatctgcttctagcttcgggaatccaatactcttggacagagtactaataactttggcccctgtttggtcccgaatacactctaatttctcatcatcaacgcctccgaagaggagtgccccaggtttgtatccacaggattgggcatactctttaagctcttctatttcagcttttgttagatgttctccaactaagttttggaacgcgaaggcttcgttttctgaagcttcgtcagcaatttcttttcctttctttgacgctacggtcacagtctcttcggcaacagtggcagcttcttctgcagccatgtctagcagcatttggtcaatatgttcaattgtgctctctaaattcaaatcttcagctgaggcaacttcggcggttgcggcctccgaaggtgcaatttcaatatctgccccctctgtagctgctcgtgttttttgggccgaagctcttggcggtgttttgtcaattacctctgttacggtaatgattctttgtttctttgtcttgattgttttcctcgatttctcgggctccttgtccttctgaaaaaactttgtcagttgaggatccagtggacttagcttcgcaggtaaggattcagtcattaccttcagaatttcctcaacaacagcagcagaaggtgatgcgggagtttcttctgcttcggatatttgttgcttcggagaagaagctttccttttcttcggtattttcttctttattggctctttctcaccttcatctagggcttcagttcctcgtttccttttttggcctccggcacctttgttcagattttcgtagtctgggtattcgaaacccaaggcgtccaacacccgattcagtcttcgttttggacgggtgccgaaggctgcggtcatcaattgatcttcttttttggaataattaccaagtatctcgttgcacatcacttcaatcgtatccagccactcttggcaaggagttttaaagtatttcttaaatttgaagtagtaaggcaagcgtacaagttcaccttttttcttctccccctccagcttcggcatttcccactcttttacactagggaaaaccttgaaagccaagaattcctggaccaggtcccttgtactgatattctctgcaattattttgaattcatacattgctttttgagtcggaccctctggtaacatgtggcactgggggcgggtttctccgaaggtcagttcaagtggactctgcacaagcttttccttatcgtcatcaaccttgacgtagaaccattccgatttccaccctgctgcccatttgcttcggtagctgatcacaggatacttcgtagttttccgataagcaaagttatagcaaccaaaattctcatgtaatccatcttttctagcctttgtctgatagtgcaattcatgaacccggcaaaagctgtccgcaaacggttccaccgcctggcttcggagtgcccagatataaacattgagcctaacgatagcgttgggggtcagctggtgaaaatagattccaaaattctttaatatctctgcaataatcccatgaagggggaatcttaatccagcctttaggaagctcttaaaaataacaatttcatctttttccggctttggggtagtctcttctcccccgaagcgtaatagcttcttttgattttcagtaaaatagcctgactttaccatcttggacaaatcagccttcgaaacagtagatttcccgaagtccaaatggctgggtttgcttggcgtagcaaggtgataatcatcttcggggtcagtttcctcagcatcttctccttctgcttcagcgattgattgttctacatcatcaataggagcctttcccgaagtcactagcccggatcgttgcatggcttcggagatagggacagtctccgaagcttcagtttcgtccccctcacgttcaaccctagcggtagaacggactctggccatttaactatgaacttgtgaaactttaatacttttttctccgaagcaggcttcaagatggagcttcgttcaattctgacaaacaagcttcggcaacggttaaaaattttggcagcaaaacagtgcaaatagcagtaaatgctgtggtaacttcacacctactcgtctgtttatatagtgccgcaggtaagaaggcgaagcgccagaagttttacaccaggcggacacccgctcgcactcgctgaacggtggaccacagagaccgaacagtaactctgcaaggtggggccgctacgcgcagggagagtgaatcgtttctcggcaacgagctcagggaaggtgtttttttggaccttcggctccccgaagcttaagagacttttttcacggatcaagctcgttacgaaaaacgatctagcaccgcgaaaggggctactgttgggtctatgcttcgtcgccgaaggtcttcaagggagaagcggttttataatgtgtgagcaggtatcttcggacttgtatcagaaagggagaagctcaaaagatacaaaggttgacacagcgccgaagctgtgaagcaggaaaacttcggcatgttcgcagaaaagggaaccgacttaaagatgaaaaggccatttagacctcgatagagtgctatagaattatcaccaaatgtaaagggcatgtatgtaattttgtatgggttgtaccccgtgcctataaataggtgaacagtacccccgtactgttcacgttgactttgcatttgcttctgcgtcacatttatacttttatctcctttcaagccgaaggtacatttataattcgatattgtctttatttctctatgatgatataaaaaagttaaatgtatgatgttatatgattattcatgccatcttttatgtttcatatgcttcgtttttcattaacgtatactgagatcatgaaggttcgtccttcatgaccttcgtccgaagatcgttatatcctaagggaaataatgcttcaaaggacgaaggactttatcgtttaacattctctgtgttgccttgttcttaactcatagcatttgagaacaagtccccaacacaaccatagtggatattcttcacttattcggcgaggcttctgggctacataataatgtccagaaatctaatgtatatcccattcgttgcgacgagagtgacattgcagttgtgcatggtttgctgccgtgtggaatttcgtccttcccctgtaaatatcttggacttccattaacgctgcgaaagataaccaaggaacaggcgcagccaattatcgacaaatttgcaaatcagcttcctggatggaaggcagacttgatgacaagggctgggagaacagttcaagtgcggtttgtgcttactgggatgctcatctacttagcaatggcaattgatctcccaacttatatcacaaaagcaatcgataaaatccgaagaggctttctttggagaggtcgcaaagagataaatggggggcattgccttgtttcttggagcaaagtttgtcggcctcttgatttgggtggtcttggtatttcaagcattaaggagctgagttgggcgctgcggatgcgttggttatggccgcaaaaaacggagcctaaccgaccttggtcatccttgactatccgagttccggacaaggttcaagccttcttcagtatggcgatgcaaacggaagttggaaatggtgctaatactcttttttggaaggatcgatggattcaaggacagagggtggcagatattgcgccaagacttcttcaagttgttccgaaaagaaaaatcaatacaaggacaatgcaagaagctattactagaagagcatggatgtcggatattcgaggggccctatctgtgggggcaattgttgattatcttcacctctggaacttactgttaactgctgaattaaggccgaatgttgaagataagcacatttttaggctggctgccaatggaaaatattcagcgaaatctgcctacgaggggtttttcactggctcgattccttttgaaccgtacgagaggatatggaaaacctgggcgcctcctaaatgtcggttttttatgtggttagttgctcaaaaaagttgttggacagctgatcgtcttgcaaaaagaggattagatcaccctgatagtcctctttgtgaacaagaaagtgaaacaatagaccatcttctggtctcttgtgttttctcaagggagtgttggttccttttgttgagacaatttggactgcatactctgtcccctcaaccggaaaatgatagtttcctagactggtggaggacaataagtgaaatggcagttggacaaatgaagatggggtttaactcccttgttttgcttggtgcatggatcttatggaagcaccgtaatcagtgtgtcttcgagggcggcagtccgagtgttgctgctgttctggagcaggttggagaagagcgaaggttgtgggagatggcagaggctaaggggcttattttcctagcagctaaccgtcctcacggctaatttctgttcatgggtttgttgtttttatctgttttttctgctgttttttgaggagttttaaacctcagtggtttggtttgtaagggttttggcccgacttttttcttcttaaatataatgatatgcagctctcctgcatattcgagaaaaaaaaaactagtgtaacggaatattgttcgtagtatttaagaatctgactgaggtttgttctgtatattgtttttttattacattaggagcaattgaagccattggttgcacaacttgatag

SEQ ID NO: 749 - DNA, 818 bp, Zea mays
  Intron number 3 from transcript GRMZM2G426735_T01 (locus G RMZM2G426735) derived from phytozome v7.0 (chr-ID 5; pos 1 575724 to 1576541)
gaccatttctttgtgtctgtgacggcgtttttttcatgctcggcatgttgcagagctcttgtttctgtgcaagattcaaaattttacccagcaaattttgttctttgccaactacgggtgacaggtgacagtgtgctctaaattttacactataaacgctagtttgggagccacaaaaccggagaggattggagaggctaaaatttatttcttatttaaatttgaataagaaagatattttagtccctccaatcctattcggttttgtagctcctaaactagctttaaaatttaagaatcgagccttattttatttatttttgaattagaaataattttggactaacaaaattgtgaacaagcatttggattgtaaaccattaccaacgctgtactcatgccctgactcccttgtccttcgtgtacgttggacagcggagcgaagaggagagggcaagaaagagataaaagcggcactctccagtttgaagcaagggattgaattccacttcgctgcaatgaagagatgtgtaccaagcattctcttgctggcgcctttgtgtgcttctttttgcagagtgtgtgtttacataataatattaaatggtcacagaataagtaaaaaataattttcatatatatggccatagaatacagtacttgtatgcatatggtgaaattcgtttgaaatttaatttgatttccgggtctcaaacaagccaagcacaaccccaaacatcgcattacgcttacgcatgatgatcactccaaactttcacgaagaaagggaaaaaataaacaaagcaagagcaactaaa

SEQ ID NO: 750 - DNA, 5708 bp, Zea mays
  Intron number 1 from transcript GRMZM2G012209_T02 (locus G RMZM2G012209) derived from phytozome v7.0 (chr-ID 5; pos 3 9871132 to 39876839)
ccgaggcgtatccatacccctgcatctacacacaggtcggttcgcgacctcctggatgtcttctgattcgggggatagtttgatgcccgtttctggtgatgaatgtgaacttcgtcgtgttatatagatgcatatttctcgaaaatgcaagctttggctgggttcacggcacatataagtacataaagttgttgttttcctaaccgtcttaattgaaagacaaagctcttgccactccttcaagggaaaaaaaaacttcatgggctgggtcaaaaattaactgaattgaggggtttggattcaggcaaatgtagagcgtaccttctatttgattgcaagagtaaatggatatgagacattacattatgcatccattgctatgatatgaaattaagtattgattggcagttaatggtaacatgcagattggagtgatgcacgtgaaggtaagtgttctaaatggttctggttagtcataatgctactagtttatttcacatgagagttcgtttatgctgattttggatgttatttgatattacaattgtgatgttcatttggcaagtacgttttactcgtagctcttttgttttgtctattgtattttatttttgaacattgtagttctagcttttgatttgcacttcttgcatagaaggaagtttcaatatgttgtaatgtctatcttttctttctataaaacataagtttttggtttctataaataaaagggctgactattgtgttaaatgttcacttggtatatggggagccttatagatttgggaggaccattccaattacacgcgagctatttttctttggtccatgtgtaccagtgtattatcatcttttcatgtctttcctctttttgtgatgattcttcgggcctggtgggagtgggactacttcacactaaaattccaccttggagaggtaactgaggtgcttgccttagaagttggctcaaacttcagcaatgggaggttttgctgagaatggtatgccctcccgggttttttcatgtatactatctggttgtaactttgcatttgtaagtgtttcccaaccaaaacatatttttaacttaaaaagaactgtttgctaagtttttttcttggttttttaatctttttctgcttgtggttggtacaagattctttcttattttttcttattaatggtttgtttttgaagtgaactaagtgggcatagaccaagaactattgtttgtttattctttattaactatattcatgtgattctaaagcgcccatcatagctttggtatagctctgctatagctttttacacgagccaatctttttagcttcaatgacacccttttcagaggacaggagctctgaactggcaggttccaagatgcagccaccacctccagaaacccagggaattcaagccaaaaactcttgaagtggaaccatcgcttccccatgcagacctctctgactttgagggttaagggacaatgatatgaagatgtggtagcattactatgaagagaagcatccaaaaataaatcctcccaactgcttgtgcggaatacatggtccaacttaacaagagtgggatcattcctctgattggaccaagtatatctccttcccttcaatggaacttccttcagattcaaggaattaacaagtccacggaagctacccagcatagccctgtttatattgggatcgttcttgtcttcctccctataaatcagattaaaatcaccaccaatgatccacagtccctcacattcatctctgatctctcttaattcttgaaggaaagatggcttaagattgtcctgatgaaccaccagcaatcaccattcccttcctggaattgaactgaaacaaaaaactgcttgataactgaagccactgaagaaaaagccccatcacgccaagatatcaacactcctctggttccaacatctgggctatatacaaaattactaaacccggacccaagaatggaaagaatatcaaagtctgaaatagaacacaatttggtttcctgcaggcaaacgattgaaggcctaatatcgaccaccagatatttaactgagtctcttttcgcatggtcattcagacctcttgcattccatatcagaaaacagctagactccatataaaaacaaatggaagactaccagcatatcaccaaaaacagcacctaaacaggtctgtcttgaggaaacacccagccaaatagagctgccaacgcagcaatgtgattgctagagagcccaatatcaaataacttcacatactttctggcgtcctggagggaaataacttcattaacatcacagaaacctagatgcctgcagacctgggcagccgattcgaattcgagctctggagggaatttgaccaccctcctgcttcgcctgggctgaaaattacttggtagggtctttttccttctcttgatagtctgtggaggtggcagcaagccatcaactggcttagtgaccatactttggaactccttcaaaggtgaggaaatttcacaagatacatccagagctagctacactaggatgtcatcatgatcaggcatagtcagagaccttcttctggaatagactttgaaacatggtggcttcgctctccaactggctgacccaaacaatacaccagtcgtcgaactcttcaccctggaagattccttaacaacatcttgctagacgaccccaatcaacagacaagaagaatctttgtcattgcaactcacagcagcaatctgttcagacataatcgaagtatccaagccaacctcctgaccttccaccggtacaacgaccatttcagcaggggcaccagaatccatatgtgatcccaccggtttagatactaaaggtcagcctccccaacagcaataccagattcgaagcgagactgatacactataaaatgagcatttggtcccactagagcaggggccataacaacatgtagcaccttgacgcccagggtagacaccttcggacaagaattcaaaaagtcaggaacaccaggcgccgccaactcctcaaccgaaacatgtgggagagcaggggcatcaactggtccagtcaatgaaaccgaagagacacgcctaggaaaaacaggtgccgccaatgcacccactgaggttgatgggcagcatgaatcatctgaaggtccatgcatcggcgccgattgaatggcccagccgctagtgcaccgaggcctgagcagatgaggcctgatggcccagcagccgtggccgccgttcacgacgatcttgatcccgaccatcattagagagatccggtggaggtagaggaggttgctcctcccccaggacacccttcggtcgaagcttagtaaccaggttcccggatcgatgggatcgatgaacgggaacgtggtacacggtacgctactaaaactaggatttaacactactggaacgagattgttcccacgttctcggaacggaacgaacgttcccggaacgaggaacgtggccaagttcccggttcccggttactaagggtcgaagaaccttcaccgtcacagggaacaccaacgaacgtggaacccaatccccgtcctcgccaaggaccgctggctccacagcatggaggcccaacacctccggcagccgattaggagagtggcaccatgccttcaacttgataacagacagaatgaaccaagcagagcctccatcgtctcaattccccagaggtgagcaggaacaccctagagctcaatgtcgattagggaaggcatgacactgctaccggaagcaaaagcttgacgagaccacctcttaacatgcatccggagaggagggacgtgaagtggtgctcccccattgaagactcgaatagctaggtcctctgaagggaagaagaggaaggaacctgacgcaacattacgtaggtggagcgcatcagcgtcaaggtcaaacctcaaggcgagcgcatcccggacctcgctggcgcgaccagagcccttctgtccaataacgctgacgatgagagcacaatgaagctcaatatcagcacgatcgatcttcccagaacgcccaatgattctcaaaggtcgagcatcatccaaagcagtaggcgacgaattcttcaatgatagcagcaatggaacgctgccggccacgccatgatcgccaagtccatcaccagccttgatcctacgctttcgctgtccgcgacgagtatgtcgcttcccaccatcagtggtagcggaaccacccaacgctgagccgcccgccatggcatgctccgcactagcgcctgccgggacttccttggagactcgccgccacatcaacttgcgcctaggaacgacctagactgtctgccggtgtgggcacacgtaaacacggtgccccggcagccgacagaggaagcaccgtacacggttccgacacctcgccgctcggtgataaaaaaagaatcaattgaagcatcttacccgcagatcaacaggaacgggcctgggagctggcttggaagggcagcgggctaagcgacgagctcgatgaccttccaccttcacccaactgtcatcaccattcccttcctcgagacgagaaacaagggactgtgaagacaccaacacattcttataggccgcaccgtcttcacaccaacgttgcgccttcgatcgcccaccgcatcgagaaacaagggagggacctgtcgacgctagtgagggggaggggagtggccatcgaacccggaataggcaccgacgtggggctagtggaggtaggggaagaggcgtcggtgggagaggagaggtccaggggtgggagaggaagcgtcgccattcaataaaaattacaactacaaagccttcaaaataaaatccttgaaagaatctaatgcacttattgttgtgtcacagtactgaagtattggggagggaggagatggcggctgaatgtccatggaggtgatggttaagagagcagggaggggcagaagctgaaaaaacagaagagagcttggttagttggctaatgggtgtctagctcaattgggtgtttagggtttagggtttttagctcaattgggtgtcatttacttctaaaatatgtcttaagtttgctaatgggtgtctagctcaattggttagttggcctcaatagcactcaggtcctgggtttgactcctgggagcgaattttaggctggagctataaaaatcccctacctccctgtgtgggagcaccttggcctgtgataacggtgtggcccaacctgggggttgcggcagtggtcgctggcccattttacagtctgctccacgggtgaggctggggttcagcagttttctcgactgagatcttagtgaaataccgtgggacagtcttacccccactgtcagagtttttaaatatgtctcaagtttcaaaccgattgaacttgtctgagccactgtacaatgacatcttgaggaaagactaatctctatctgtacgcaatgtcagtagtatttgtataataaaatgtataattgcaaaactccgacatgcattgctgatatgcatatcctgtgacctgtgaatcaattttgggcctccagtatgatgctcttgtgctaactaatttgcattatgtttctgtattaactgacccccctttcattggattgtgaagatcgagacggaagctatttctgacgaggagtctga

SEQ ID NO: 751 - DNA, 2940 bp, Zea mays
  Intron number 1 from transcript GRMZM2G002420_T01 (locus G RMZM2G002420) derived from phytozome v7.0 (chr-ID 4; pos 2 23436394 to 223439333 reverse strand)
tcatcgaaggtacgtagcttgcaagcggcgttctcaataacattcagatgcgcagccacgtcgtagcaggcctaggcttttttgaggagcgcggactagggagtagggaggacgggacgggagagagagagagaggcgcgtgcgttcgtggtcggtgccggtgcgtgcgtggcgtggtggccgctgccgtacgtgatccgtccaccccctctcctcttccgacgccggcgacagcgggaggtactcccggggaggaatggccgtggcaagggctccgctcggcgcggttgctgcgatggcggtggccgctctcgtcttcgccatactcatgaccgccgccgctgcggcgcaggcaccggcgcccgcgcccaccagcgacggtgcgcagtctcgctctttctctctcatctcccttcatttcttcctgcccgcaatcacaatgcaatccggacgccgcgaatctgtgctccgcgcgcctggatcgtggggccggacgccggaatcgcgttctgttcgttccccattgtaacaaaaaaaaaaaatctccggtgtttgtcgatctggttcttttgggaaccaagatggagaaaatctcacaactgttcatcgcacaagtttttcccagtgctacctgcattgccgtagaatttagatcccccatgtctggacgttaattaattattacagacacaataataatcgcgaatctcctgcatgtgtgctttcttctgcggcagtgctggtcaggaaaggatgcgttttcgcgaaaatacaaagttaacgcgaacagttgaggccccggaggaaactgccatctttcaattaaataaattctttcagttttgacacataactccaatgcaatttttttgttatatgcaaaacttctcttatgaagaatattcacatcttgactaaactgctgtcagatttgcacttcgtctgttgcgcctgtcagcaatgagtttggtggttttgcagttcgtagaaatcttgattcttgctatggccgtctccttgcatttacgttctaatataatactagtactctggcagctaccattgcctactttttcatggaatgcctcttagggggtgtttgggaacaaagtttttctgcagttttggaagaatactgcagtattctcaaatactgcagtattatatacataatggtgtttggcaagctgggtaaaatctctgttttcaaaactgaagtattgcaaatactatagttgttttaaggcattctaaacttagctctggacctcagttttcaaaactgcggtattataaactacggtattgtcataactaaagtatagtatagtatttcaaaaactgtagttttcaaaaactttgttcccaaacagggccttacttgttgtctgttccacaaacaaactgtcacattgccacaagtaacgggtttgctaggtatatctgatgtgaaatgaaaaatgtagtcctctttaatgatctaggctgtatgtatttgttggctgcccttgattgatcaaagagataatcctctttggtgccgttataaaagagagatggtcccctgttaatctttttatggtcctagatagatccacacaggtcctttttcttgtgcaagttcagccagcttctattttcctaccattgtttatactgccgattggttgtgcagtagttttctgcccatattggtaccttcccttggcaagcatgcctttgtctaggacgatggagattttctttgtctgaaaatgattgcaaaccaaaatttccaacgctttgctgtgtgtttgagtgatttgaagaatgtgacatttgtagctttgtctgaaaatcacttatgtttgatcagactccataaattgctggtctatggggaactgtcttatactaatggggtgtttggtttgaagaatgaatccattctagatgaggtggtgcatcataagttcaatccacaaatttggtggaatgaactcattcctcatattaatactaattattagcctatgagaaatgaaatagtgatggatcaactcattacattcaacaaaccaaacaagaaaaatgagcagtaagaaggtgatagactacctcattcctcaaaccaaacaccccataaaggttttcatgatgttactagatatacgaagggtgggttttgggtagaagaacaccccattcacaccgagtactgaaaatgacttctctttggctagtttccccaaattgttttaatgtgccaactgctgtgtcctattggttttcatgagataacagagataggaaaactgacttgatattgtgccatttgtaccgagtactctaaaggactcatccctgtcagttttcacaaatttgtttacgtataaatgctgagtactagtagcattcatggtgttattggacacagtaataataagtataaggtaatactaggaaaatgtctgaaactagcacgcagaagaaaatttccattgcttgtttcaagcatgataaaatcatcagtcagctctcaataacttgtcatgtgtatataaatgcgcacgcaaacgatctgtagtcattagggacacgtttcaaattcagatactcgtaccagtaggaattgtgcactccatgttgaacaatgtatggaaattttctcacatgcagtcattgaaaaattgcataaggtactagtagtgactgtattgttatctttatatatcttcttcttcttttctttaaaagagtgagttggatatgcatcgtcaatgcatgtacaattgataaactaccacatgtgacagtgaacagtatttttcatctcgtgcagcacacaggaatcttattcttgacgatctccagtgattccaaagactaaaacatgtgcaactgtcttgtgattgattccttgcaggcacatcaatcgacctggggattgcgtacatcctt

SEQ ID NO: 752 - DNA, 2721 bp, Zea mays
  Intron number 2 from transcript GRMZM2G177098_T01 (locus G RMZM2G177098) derived from phytozome v7.0 (chr-ID 9; pos 1 1741881 to 11744601)
ccaagttcaagtcgaacctcccgcctgagtctgtcagtgacgcactcagtacgccgtgtgatgtgtgctgcttcccaattgatgctctgtcctgatgctgttcttttttttctgacgagtgcaggggcgcaaggtcagagtgttcatgtaccctagcagcatttaaggttagggtcctcaaacgctggacatgctttatttgtttggcggctggttgatgttgaatctgttgcttgtgattgaatgatacgacaaggaattctgattagactgcactcgtcgttgctgtagaccatgggctaggagttttaggtgcttaaacgcatcatagtttgtgtgtgacgtcctgtggccaccggcgttggtggccgggacgtgagatcgccagacaccctcgcggtgacaaatttgcacaccgtgcctggttgaaagtttattcaggattctgttatttgataccattgccaactggccattacagtacttatagtacgccacttgggctagcccattacctcacataaccacgtttcagacgctaatccagcccatggcccaaccatcagatgacagctaccaaatgacaactagacttacccacttcccgccatggccttctactcctccaccgttgcaccttcaggcaccactgcactgtctgtgacattgtggtttcggaatgtttagaagtcggacgacttgctggtcgtctggctgaccaacttggacgattaatcgcgattagtcggaagacttggcgattaatcgcgattttcccataccgacttggacgagtaatcgcgattaataggacgatttgaaaacattgtttcggttgtttattatgagacacattgagtctgtgtagcagcaaacactggctattctgctgcaaatcatggtaatttggcttttgtggtttggtttgcacatgttgatactggctttaatttggtgagtttgtatctgactgagggagtattcacttcgtgaagatttcaagttaaaactgctgtttggtatttggggatggttaacttcccactgttcgttacttacatgtcacaatgataccaagtacacgtggaatatgcattacctaatttcattagttgtcagtattactccctctgtttacaaatttaggcatttctagtagcaaaggaaatgacacgctcgtcatcagtcaatatcatgagagagacaaaactgcaggaaaattagcagtgaggaatggggatagcggcatgtgccagaaatttttacatctgtggaaacttttgaatgcttaaaaaaaatgcttactcttatgaaccggggggggggggggggtctagtttttccaactaatgtattggatttagtgatgcctattttcagcactttagacttagcagttttccatatatatttataattgtgcatttttcttgccatagaaatttatgatatttctgtccacactgatgtttagggaatgtttctttgatacagtagaatggttttaaacatactgtctgtttagaacatttacattgggcatggggctgccaacacaaagtttgaacttgtagcttgaaccattgcttaccctttcaaaagtcaccctctgcttatgctattctgggcttttatgtctgcaggttttgttggagtaaagatggactaaaaatgtcatgcgtatttcttacttttttctgagcttaaaatgctatttgttggcaacttagattgttcatgcagtcatgcacttgaccggtggaagttctgtctaaatttgttgtcgaacggatgaactatatattgtcggtgttatgcgagcagcagagcttattttgtcccgtgccaccgatgtccgatgctatctcttcaacagatcccctatcatatccgctatttcaaactacactttataaatattgtcatcaacggttccgcgcccccgattttatactagcttgagacggtctgattctcgtattttcgaattcatatgcttatattttaacttgtttgcctacaactacaatgttcgtgtgccacctcaaatagcatcgtgcaatatggatgctactccctctattttttaatttgttgcgttttagttcaaaaataaactatcgtaagacaaaatatttgagaatggatgaaatattttgttaaccagcaatataattactttactcgtcctaaaattgggagtttgttgtatttcttcatcgtggtttgatctaatttatataataatatacaaatatttataacactgaattaatatcattagatagagtattacagttatataatcttttaatgtcatggatattggtagtctttataaaattgttcaggccggtttattcaaacaaaggcagatttattccatgacaaaattttaataggggattaactctgctttaatttaggaaagcatatgaggttcatacgaagagcatgtattagtgaaattatgtttgtttggttaacttgtagattcctaaaagtctgattttaggtgtgatctgtgaaaaaactgttgcgacctgatggttgcaagagtatggtagcttggtagcttggttgagagctacacagaaaatctggtgtagaaggtaattataaatttaactagagggatacgtagattttcagtaatctattccactgttgtacttgtttgatttagatttcagtttttttccccaacgaatctgttcagaa

SEQ ID NO: 753 - DNA, 3149 bp, Zea mays
  Intron number 1 from transcript GRMZM2G095037_T02 (locus G RMZM2G095037) derived from phytozome v7.0 (chr-ID 5; pos 1 41196253 to 141199401 reverse strand)
gcatcgacgggaaccaggcatcactcttcctatctctctggtacacatttatttcgtctcactctgtgctcgcatctaccatggacactagggtctagagtttagtagcgccgccgccaacattctcgccgttgtgacaagcaccgaccggtcccttccccctccctcctctcgtcggcgccagcgagccgcacgccgtgtgtcgtgtgggtcggctacccgggtattggccaccaagaggaagcagcgcatcatctacctaggcgacggtcgcggctctctcgtgcccctgctgaagagctctctcgtgcccctactatagctccttctttctaaacaccacgggcaagggcgcaaagcatcgcgtgttgttgtttcgagatgcgtgggcatggccgtgctttcccttccgttggggtcaagctgaccggcctcgtgtgccccgtactcccaccgccatcctgcacgcaaatcgcaaaaatcagataaaaaagattggtttttctccccgttatccttttccccccactaatcgctttaggttcttggtcaggcgttcctaccgctcttcttcctcccgtgtcgtcagaggaagccgcgaacagcacgcaggaatcaggtgagaaagcggccactcaacctccaacttccagctttactgccattagtattgttctttccagcaagatagatgctcgcccgctcttttgtttgcttgtttgtttgtttcccactttgggggagaaataagggatttttttgtgttgatggccaggcggtcttgaggacgaggagctataggtgcaggatgcagttgccagtggttccaagaggagcaaagactccgccgccgccgccacacgcagagccaatgttagctcaccctctgtggttcactcacaccctgccatcctccttgctcccgcgcagcagattctagaggttaagcaagcaggtatcctctgtccctgattcttctcttctttcgtgtggtaaaaagatgcgccatctttcccatcaaattgctccatgagcagctagctagctaaaccccaccgggaaatgcgagcgacgaagaaaaaaaagaaaatacctccattgaaattcttcagggtcttaggcatgtcgttgcgaaacgcatattggtcagacagacactcaagaccatcgatgttgctgctgctttttggaccactgtgcctttgattacgctctctatcctctgtgtccgtgccgcatcttccttcgcctttcttgagatgagagcaacgtaggcagcaccatcccgttgcaatagctgatagtagattgctctgtttctaggcctctcgtgcgatcatagttccgtaggggctggtagtctaccatgaaccctgttccttctccgtcaagctccttcccattccttctatctctactaccttgtggtgaacaaaacatcactaatcacttgaagctccttcacaggcggtagtggggtcctaggggatggtgcacgagctcttaaaggcatacagggacacggaggaggaagtgaccggactagggtcgagcatatgtctgggtggtcgcacggtgatgcacgttgttgtgctcacgagcaatggtgagtctctcctgactgctaccttgtggtgagcatatgcatatgtctgccatccagtgcctgtggggcaccttccgagttctcaacacccatgatgtgcctatcatagcactccgagacacgctcctccagatccagcatcctcacccagtcggtcaagtcgaccacgccatcgttcatgcagatgatctcaccggcaatcttccctgtcatcaactccagcaggatgacaccgaaggcatgcacgtcgcacttcagagatgggcatggcttgctggtgcttgaaaactctggaggggaatatcctagcgcgccggcgtttaggacctgctctgccatgccgatcgaagtcatctgcctatgaaggctgtagtcagtcaccagagcagatggagtggagttctgaatcagggcattgtgcatgtaatctagacagcgggcaatatcaatcgcaatgttcagccgctatccagctgataggggcgggagattctgctcatcaaattctagaaataagaaatatgcatcagaaaacgtccatattgagtatgaaacagagtttgatgagtaaagggggtgaaggaaaggaaccatcataccagacaagtaggtagacagagatgtggcatctgcatagtctgatatcatgatcctctcttgctctttgggggcccagtagtagccacgcaaggggacaagattggggtgccttacactaccaagcttctttatttcacgggaaaattctttcttgctcttagcaaagccctccttcagccacttcactgtcagcatgtacccattgtcatgtgtagccttgtaggatgtcccatggcagctcctgccaattatctcagtaggggcacgagagagctcttcagcagtgaacacaacttgatgccgtgcacaccgtgtgggacctcgtctgcgaggcccccgaacggccgggttggaggagacgttgttgcgcctcatggtgaggtctctcgtggaagacatcacgctgctaccgccactcgactgcaagctcgagtccatgcccgttgctgcataggacgatatgcccatcatgccgctaggcgtgaagaactgatagaaggttgagaattgctggtcgctcgagcaagtgcacgcgaggcacaacgtacgattagtagcatttcactaattttgtgtgtgtggtgtagtgtatccctccgatcgagtctgttgctgctgaattggctatggctcgctgtatcttactgaaaaggtagtacaatttgtagctacatatactcaattagcgatgcgaaattcattcgattttagttgcaaatcaagcgtgcgtgatattggtcgcttcttccatacattttgtgatgctaccatatcctataaatatattggagcagaattggcaatttaataaattttggagtaattgcaaaactaaagtgtcttttgtaggtgaggcgattcacggattgaatcgcaatcctgtgcggccttttctactccaagtaaggctagctctcacctcgtgctcttggttttgcccagg

SEQ ID NO: 754 - DNA, 17335 bp, Zea mays
  Intron number 1 from transcript GRMZM2G127704_T01 (locus G RMZM2G127704) derived from phytozome v7.0 (chr-ID 3; pos 1 72581588 to 172598922 reverse strand)
tttttgctttcatccgagtcaacttagtagtggtatgacgcatcgtttttacgactaatttaattgatgaatagattaatagttattgaaagtcgcctagaggggggtgaataggcaaatctgaaatttataaagtttaagcacaactacaagtcgaggttagcgttagaaatataatcgagtctgaaagagagggcgaaaacaaatcacaagcaaataaagagtgtgacacggtgatttgttttaccgaggttcggttcttgcaaacctactccccgttgaggtggtcacaaagaccgggtctctttcaaccctttccctctctcaaacggtcacttacaccgagtgagcttctcttctcaaacaattgggacacttagtccccacaaggaccaccacacaattggtgtctcttgctttgattacaaatgacttggaacaagaaaatggggaagaagaaaagcgatccaagcataagagctcaaaagaacacgacaaaactctctcttctagtcactcttgctttgagtggaattgggacttggagagattttgattcactctaattgtgtcttgtattgaatgcactagctcttgtattgattgtgttggctgaaaacttggatgccttgaagtgtggtggttgggggtatttatagccccaaccaccaaagtggtcgttggggaaggctgctgtcgaagggtgcaccagacagtccggtgcgccaaccacgtcacccaaccgttagggttcgaccgttggagctctgacaagtggggccaccggacagtcattgttcactgtccggtgcgccatctgcgcctgctctgacttctgcgcgcgcagtccgcgcactgtagctcaatgttcaccttttgcagacgaccgttggcgctgtagcccttactccgcttggcacaccggacagtccggtgctacaccggacagtccggtgaattatagaagagaggcaattccagaaacccgaaggtggcaagttcggagttgatctccctggtgcaccggacactgtccggtggcacaccggacagtccggtgctccagaccagggcagccttcggttgtcttttcttctttttatttgaaccctttcttagactttttattggtttgtgttgaacctttggcacctgtagaacttacaatctagagcaaactagttagtccaattatttgtgttgggcaattcaaccactaaaatcaattaggaaaaggttttagcctatttccctttcaatatccccctttttggtgattgatgccaacacaaaccaaagcaaatatataagtgcagcattgaactagtttgcataaggtaagtgcaaaggttacttggagttaaaccaatttatacattcataggatatgcatggattgctttatttattttaacattttggaccacgcttgcaccacttgttttgtttttgtaaatgttttggaaattctttttcaaagtcttttgcaaatagtcaaaggtatatgaataagattttgagaagcattttcaagatttgaaattttctccccctgtttgaaatgcttttcctttgactaaacaactccccctcaatgaaattctcctcttagtgttcaagagggttttagatattaattttgaaagaggtcataccaatttgaaattatatcaaaaataagataccaattgaaaattttctttaatacaaattgaaaagactacatttttttgaaattggtggtggtggtgcggtccttttgctttgggctaatactttctcaccctttggcatgaatcgccaaaaacggatacttgtgagtgaaatataagcccttattactttctctccccctttggcaaacaatatgtaagtaaaggactataccaaagtggagagcgatgcggagtgacggcgaagtgtaaataacatgatggagtggagtggaagccttgtattcgccgaagactccatttccctttcaatctatgacttagcatgaaatacacttgaaaaacacattagtcatagcacatgaaagagatatgatcaaaggtataaatgagctatgtgtgcaagggatcaatcgaagttcctagaatcaagaatgtttagctcatgcctaagtttggtaaaagttttctcatctagtggtttggtaaagatatcggctaattgttctttggtgctaacataagcaatctcgatatcccctctttgttggtgatccctcaaaaagtgataccgaatggctatgtgcttagtgcggctgtgctcaacgggattatccgtcatgcgcattgcactctcattatcacataggagaggaactttggttaatttgtaaccatagtccctaatggtttgcctcatccaaagcaattgcgcgcaacaatggcctgcggcaatatactcggtttcggcggtagaaagagctacagaattttgtttttttgaagcccaagacaccagggatcttcccaagaactgacaagtccctgatgtgctctttctatcaattttacaccctgcccaatcagcatctgaatatccaattaaatcaaaagtggatcccttggtgtaccaaagaccaaacttaggagtatgaactaaatatctcaagatttgttttatggccctaaggtgaacttccttagattcggcttggaatcttgcacacatgcatacggaaagcataatatccggtcgagatgcacataaatagagtaaagatcctatcatcgaccggtataccttttgatctacggatttacctcctgtgtcgaggtcgagatgcccattggttcccattggtgtcttgatgggcttgacatccttcatcccaaacttggtgagtatgtcttgagtgtacttcgtttggctgatgaaggtgccctcttggagttgcttcacttgaaatcctaggaagtatttcaactcccccatcatagacatctcgtatttttgaatcataatcctactaaactcttcacaagtagatttgttagtagacccaaatatgatatcgtcaacataaatttggcatacaaacaaatcatttgaaattgttttagtaaagagagtaggatcggcttttccgactttgaagccattagcgataagaaaatctcttaggcattcataccatgctattggggcttgcttgagcccataaagcgccttagagagtttataaacatggttagggtactcactatcttcaaagccgggaggttgctcaacatagacctcttccttgattggcccattgaggaaggcacttttcacgtccatttgataaaggttgaagtaagtagcatagacaagtaatatgcgaattgactcaagactagcttcgggtgcataggtttcaccgaaatccaaaccttcgacttgggagtatcccttggccataagtcgagctttgttccttgtcaccacaccatgctcatcatgcttgttgcggaagacccacttggttcctacaacattttggttagggcgtggaactaaatgccatacctcatttctcgtgaagttgttgagctcctcttgcatcgccaacacccaatccgaatctcttaatgtgtcttccaccctgtatggctcaatagatacacaaaggagtaatgttcacaaaaatgaacaacacgagatcgagtggttacctccttttgaatatcgctgaggatagtgtttacggggtgatctcgttgtattgcttggtggactcttgggtatggtggccttggaccctcatcatcttccttgtcttgatcattagcatctcctccttgatcattgtcttcctcttgaggtggctcctcttgatcttcattttcatcatcttgagcttgatcctcatcttgggttggtggagatgcttgcatggaggaagatgattgatcttatgcatatggaggttcttcggattccttaggacacacatccccaatgaacatgttccttagtgcgacgcatggagcctcttcatcatctagttcatcaagatcaacttgctctacttgagagccgttagtctcatcaaacacaatgtcacaagaaacttcaactagtccagtggacttgttaaagactctatatacccttgtgtttgagtcataaccaagtaaaaagccttctacagccttaggagcaaatttagattttctacctcttttaacaagaataaagcatttgctaccaaagactctaaaatatgaaacattgggctttttaccggttaggagttcatatgatgtcttcttgaggatttggtgaaggtagagacggttgatggcgtagctgaaagggaaatgtgcccttgggccatttctaagtattttggtgattgagtgccaacacaagtgcttaaatgtgaattcatgcttatggatggacaaagtgcaaaacaagagcaaaggtatgtttccaagtcttagtacattggttttgtgtactaatatacttgtctaagtattagaaacagaaagaagaagaaaagagaagagttggctgtgtacaaccaaaaggctgtttcggtctggggcaccggactgtccggtggtgcaccggacagtgtccggtgcgccaggctgcctcgagcgaagtggccgctctcgggaattcgccgacggcgtacagctaaaattcaccggactgttcggtgcgcaccggactgtccagtgagccaacggtcggccgggccaacggtcggccgcggaatccgcgcgcgacacgtggccgagccaacggtcggaagggggcaccggactgtccggtgtgcaccggacatgttcggtgcgccaacggctcccagatctgcaacggtcgactgagccattttgggaaggaaatcgggcaccggacagtgtctggtgtgcaccggactgtccggtgcgcccgatgacagaaggcaagaatggccttccagatttgctctcaacggctcctagctgtcttggggctataaaagggacccctaggcgcatggagaaataataccaagcaaccaaagagcattcttgatcatccacactcagtctttgcgcattctcagtgattcgagctccgttctagtgagaaccttgagatagtcttttgagctcgattcttggccgtgtgtgtgcgcattttgccgtggatttgtgtgtgttgcttcccttccttactccgtgattctttgtgaacatcaaaagtgtaagggcgagaggctccaagttgtggagattcctcgcgaacgggataagaaaagaaaagcataacactgtggtattcaagttgatcattggatcacttgagaggagttgagtgcaactctcatccgttgggacgccacaacgtggagtaggcaagttttgtacttggccgaaccacgagataaaccactatgtcttctctgtgttgaactctttgtggttatcgtattgtgcaagatcttctctctagccacttggcattaactgtgctaacgtttaaccaagttttgtggcttaagtttttaagttttacaggatcacctattcaccccccctctaggtgctctcaattggtatcagagccgttctcttcacaaagggactaaccgcccgaagagatggatcctaaggggaagggtatcgtgatcaacgataaagagaaggaatccttcgtcaacgagccgaaggacgacaagcctaccgactccggctcgggccatagacggaaggaagggaagaagaagaagacgaggcgcatcaaggagatcgtctactacgacgacagcgatgagtctacttcctcccaaaaggacgacgaccacaacgactacgagagaaggaaaccggtcaattcgaacttttcttttgactactctcgtattcctcaaagtgcaaatgctcatttattatctattccacttggtaaacctcctcattttgatgaagaggactacggattttggagtcacaaaatgcgtagtcacttgttctctctccatcctagtatatgggagattgtagaaagtggaatgcactttgatagttccgatagtcccatgttcattaatgagcaaatacataagaatgcacaagctactactgttcttctagcttctttgtgcagggatgaatacaacaaagtgagcggcttggataacgccaagcaaatatgggacaccctcaagatctctcatgaggggaacgacgtcaccttgctcaccaagatggagttggtggagggcgagcttggacggttcgcaatgataaggggcgaggagccaactcaaacatacaaccggctcaagacccttatcaacaaaataaagagctatggaagcacgcgatggacggaccacgacgtcgtccgactgatgctaaggtcctttaccgttcttgatcctcatttggtgaataatattcgtgagaatcccaggtacaccaaaatgtcgcccgaagaagtccttggaaaattcgtaagtgggcgaatgatgatcaaggaggcaaggtacgtggacgacgccttgaatggaccgatcaacgagccgcaacctcttgctctcaaagcaacaagaagcaaggaggcgctacctaacaaggtggcacaaattgaggcggccggacttaatgatgaagagatggctctcatcatcaagagattcaagacggcgctcaagggtcgcaagggacagccaagcaagaccaaagccaaagggaagcgctcatgcttcaaatgcggtaagattggtcattttattgctaactgtcccgataatgaaagtgaccaggaactcgggagcaagagggaaaagaagaaacattacaagaaggccaagggcgaggcacatatcggaaaggagtgggattcggattgctcctcctccgactccgacaatgaaggactcgccgccaccgccttcaacaagtcatccctcttccccaacgagcatcacacatgcctcatggcgaaggagaagaaggtatgtactcgagaaagtaccacttattcttctagtgatgatgattctagtgacgacaatgaaatagactattctagtttatttaaaggtctagatagaattaaaattggcaaaattaatgagttaattgatgccttgaatgaaaaggataggcttttagaaaagcaagaggatttgttatatgatgaacatgataaatttgtagaagcacaaaaatctcatgctttagaagttaaaagaaacgaaatgctttcttgtgaattatcttcttgccatgagacaatttctagcttaaggagcattaatgatgacttgaatgctaagattgctagtaaatctaactcttgcgtagagaatgttataacttgcactaggtgtaaagatattaacattgatgcttatagtgaacacctagcttgcatttctaaattaaatgaagaggtggctagtcttaatacccaactcgagactagcaaaagtgattttgagaaactaaaatttgctagggatgcctacacggttggtagacacccctcaattaaggatggacttggcttcaagagggaagccaagaacttaacaagccataaggctcccatctccgccaaggagaaagggaaggcccctatggctaaaagtactaaaaggaaccatgcttttatgtatcatgataggagacaaactagaaatgcttataggagttataatgcttatgatgactttaactctcatgccatggttgcttctagttcttcctatatgcatggtagaaatatgtctaggagaaatactattcatcatgtgcctagaaagaatattattcatgctcctaggaaagtagtgaatgaatcttctacaatttattgtgctttaaatgcttcctttgctatttgtagaaaggataggaaaatagttgctaggaagttaggggcaaaatgcaagggagacaaaacttgcatttgggtccctaaggatatttgcactaaccttgtaggacccaacatgagttgggtacctaagacccaagcctaaatttgccttgcaggtttatgcatccgggggttcaagctggattatcgacagcggatgcacaaaccatatgacgggggagaagaagatgtccacctcctatgtcaagaataaagattcccaagattcaattatattcggtgatgggaatcaaggcaaggtaaaagggttaggtaaaattgcaatttctaatgagcactctatctctaatgtgtttttagttgagtctcttggctacaatttgttatctgttagccaactatgcaatatgggatataattgtctttttacaaatgtagatgtgtctgtctttagaagaagtgatggttcactagattttaagggtgtattagacggcaaactttatttagttgattttgcaaaagaggaggccggtctagatgcatgcttaatagctaagactagcatgggctggctgtggcatcgccgcttagcacatgtaggaatgaagaacctacacaagcttctaaagggagaacacgtgataggtttgactaacgtacaattcgaaaaagatagaccttgtgcagcttgtcaggcaggtaaacaggtgggaggaacgcatcacagcaagaatgtgatgaccacatcaagacccctggagctgctacatatggacctcttcggacccgtcgcctatctgagcataggaggaagtaagtatggtctagttattgttgatgacttttcccgcttcacttgggtgttctttttgcaggataagtctgaaacccaagggaccctcaagcgcttcctcaggagagctcaaaatgagtttgagctcaaggtgaagaagataaggagcgacaacgggtccgagttcaagaaccttcaagtggaggaattccttgaggaggaagggatcaagcacgagttctccgctccctacacaccacagcaaaatggtgtggtagagaggaagaacaggacgctaatcgacatggcaaggacgatgcttggagaattcaagacccccgagcatttttggtcggaagctgtgaacacggcttgccacgccatcaacagggtctaccttcaccgcctcctcaagaagacttcgtatgagcttttaaccggtaacaaacccaatgtatcttactttcgtgtatttgggagtaaatgctacattctagtgaagaagggtagaaattctaagtttgctcccaaagctgtagaagggtttttgttaggttatgattcaaatacaaaggcgtatagggttttcaacaaatcatcgggtttggttgaagtctctagcgacgttgtatttgatgagactaatggctctccaagagagcaagttgttgattatgatgatgtagatgaagaagatgttccgacggccgcaatacgcaccatggcgattggagatgtacggcctcgggagcaattggagcaagatcaaccatcttcctcaacgatggtgcatcccccaactcaagacgatgaacaggttcatcaaaaggaggcgtgtgatcaatggggagcacaagatgatcacatgatggaggaagaagcgcaaccggcacctccaactcaagttcgagcagtgattcaaagggatcatcctgtcgaccaaattttgggtgacattagcaagggagtaactactcgatctcgattagttaatttttgtgagcattactcttttgtctcttctattgagcctttcagggtagaggaggccttgctagatccggactgggtattggccatgcaggaggaactcaacaacttcaagcgcaatgaagtttggacactggtgcctcgtcctaagcaaaatgttgtgggaaccaagtgggtgttccgcaacaaacaagacgagcatggagtggtgacaaggaacaaggctcgacttgtggcaaaaggttatgcccaagtcgcaggtttggactttgaggagacttttgctcctgtggctaggctagagtctattcgtatcttgctagcatatgctgctcaccattctttcaggttgtaccaaatggatgtgaagagcgctttcctcaatgggccgatcaaggaggaggtgtacgtggagcaaccccctggcttcgaggatgaacggtaccccgaccacgtgtgtaagctctctaaggcgctctatggacttaagcaagccccatgagcatggtatgaatgccttagagactttttaattgctaatgctttcaaggttgggaaagctgatccaactctttttactaagacttgcgatggtgatctttttgtgtgccaaatttatgtcgatgacataatatttggttctactaatcaaaagtcttgtgaagagtttagcagggtgatgacgcagaaatttgagatgtcgatgatgggcgagttgaactacttccttgggttccaagtaaagcaactcaaggacgacaccttcatctcccaaacaaagtacacgcaagacttgctgaagcggtttgggatgaaggacgccaagcccgcaaagactccgatgggaaccaacggacacaccgacctcaacaaaggagtctccaaggaggatcgaaagggaaaaggtggacttggaccatgcaagacttccactgcactccgatgaaaagagtaacttttccaagttcatctttaaactcttattgcctattttgctcttaattgaagaatttggtgaggcaatggggttacagggccaagattgatcccgttttggtgcttgatgccaaagggggagaaaataaaggccaaagcaatagatggatcagctaccacttgagaaattttgaaaatagtagaatagagcttttggtttgtcaaaactcttgcattgtctcttttgtcaaaagttggcctcttgtggggagaagtgttgattatgggaaatagggggagtttttgaaatctttgatcaatctcttttggaatgactctctttatgcttcaacatgtgtgtttgacttagagatagagatttgagtttgatttgcaaaaacaaaccaagtggtggcaaaggatgatccatatatgccaaaaatgaatcaaaataaatttgagttttatttgaagtgattttgcacttattctagttgctttatgttgtgttggcataaatcaccaaaaagggggagattgaaagggaaatgtgcccttgggccatttctaagtattttggtgattgagtgccaacacaagtgcttaaatgtgaattcatgcttatggatggacaaagtgcaaaacaagagcaaaggtatgtttccaagtcttagtacattggttttgtgtactaatatacttgtctaagtattagaaacagaaagaagaagaaaagagaagagttggctgtgtacagccaaaaggctgtttcggtctggggcaccggactttccggtggtgcaccggacagtgtccggtgcgccaggctgcctcgagcgaagtggccgctctcgggaattcgccgacggcgtacgactaaaattcaccggactgtccggtgcgcaccggactgtccggtgagccaacggtcggccgggccaacggtcggccgcggaatccgcgcgcgacacgtggccgagccaacggtcggaagggggcaccggactgtccggtgtgcaccggacatgtccggtgcgccaacggctcccagatctgcaacggtcgactgagccattttgggaaggaaatcgggcaccggacagtgtccggtgtgcaccggactgtccggtgtgcaccggactgtccggtgcgcccgatgacagaaggcaagaatggccttccagatttgctctcaacggctcctagctgtcttggggctataaaagggacccctaggcgcatggagaaataataccaagcaaccaaagagcattcttgatcatccacactcagtctttgcgcattctcagtgattcgagctccgttctagtgagaaccttgagatagtcttttgagctcgattcttggccgtgtgtgtgcgcattttgctgtggatttgtgtgtgttgcttcccttccttactccgtgattctttgtgaacatcaaaagtgtaagggcgagaggctccaagttgtggagattcctcgcgaacgggataagaaaagaaaagcataacactgtggtattcaagttgatcattggatcacttgagaggagttgagtgcaactctcgtccgttgggacgccacaacgtggagtaggcaagttttgtacttggccgaaccacgggataaaccactgtgtcttctctgtgttgaactctttgtggttatcgtattgtgcaagatcttctctctagccacttggcattaactgtgctaacgtttaaccaagttttgtggcttaagtttttaagttttataggatcacctattcaccccccctctaggtgctctcagtagcaagcggtgttgattgctttcgcccaaaaccggtccgaagtcttgtactcatcaagcatggtcctcgccatgtcaagtagagttctattcttcctctccactacaccattttgttgaggtgtgtagggagaagagaactcatgattgatgccctcgtcctcaagtaagccttcaatttgagagttcttgaactcagtcccattgtcgcttctaatcttttttatccttaagccgaactcattttgagcccgtctcaagaatccctttaaggtctcttgggtttgtgatttttcctgcaaaaagaacacccaagtgaagcgataataatcatccacaactacaagacaatacttactcccgcagatgcttatgtaagcaatcgggccggatagatccatgtggagtagctcaagcggcctgtcggtcgtcatgatgttcttgtgtggatgatgaacaccaacttgcttccctgcttgacatgcgctacaaaccctgtctttctcaaaatgaacatttgttagtcccaaaatgtattctccctttagaagcttgtgaagattcttcatcccaacgtgggctagtcggcgatgccaaagccaaccatgttattcttagcaattaagcaagtgtcgagttcagctctattaaaatcaactaagtatagctaaccctctaacactcccttaaatgctactgaatcatcacttcttctaaagacagtaacacctatatccgtaaaaagacaattgtagcccattttgcataattgagaaactgaaagcaagttataatctaaagaatctacaagaaaaacattggaaatagaatggtcagaagatatagcaattttaccaagtcctttgaccaaacctttatttccatccccgaatgtgatagctctttggggatcatggtttttctcgtaggagaacattcttttctccccagtcatgtggtttgtgcacccgctatcaattatccaacttgagcccccggatgcataaacctacaaaacaaatttaggccttgttcttaggtacccaaacgatcttgggtcctttgacattagaaacaagcaccttgggtacccaaacacaagtctttgagcccttgtgtttggccccaacatatttggcaactactttacctgatttgttagttaaaacatatgaagcatcaaaagtcttaaatgaaataataggctcatttgatgcaataggagttttcttcttaggcgatttaacatgagtggattacctagaactagatgcctcactcttatacataaatgcatgatgagagccagagtgagactttctagaatgaattctcctaattttgtgatcgggataaccagcaggatataaaatgtaaccctcattatcctgagccatgggagctttgcccttaacaaagttagacaatttcttaggggcattaagcttgacattgtctccctgttggaagccaatgccatccttaatgcctgggcgtctcccactatagagcatgcttctagcaaatttaaaattttcattttctaagtcatgctcattaatcttagcactaagttgagctatgtgatcattttgttgtttggttaaagctaggtgatcatgtatagcatcaacattaatacctctacatctagtgcaaatagtaacatgctcaatggtagatgtagagggtttgtaaacatttaattcatcaatcatagcatgtaaaatagcattctcattcttaagattggaaatataaatattgcaaacatttaaatctttagccttagcaactaatttttcattctcaattttaaggctagagagtgattcattcaacttgtcaatcttagtaatcaaactagcattatcatttttaaggttgacaagagaatcatcactaacatttaatttctcaaccttagcaatcaatttatcattctcaaacctaaggttggaaatagtgtcatggcaagtgcttagctcactagttaatttttcacatttttctatctcctgagcataagcatttttaactttaacatgcttcttattttctttaataaggaagtcctcttggctatccaagagttcatccttctcatgaatagcactaattaattcattcaatttttctttttgttgcatgtttaagttggcaaaaagggttagcaaatcatcctcatcatcactagagctagcctcatcactagatgttgtatatttattgtaagctctagattttaccttcttctttttgccgtcctttgccatgaggcacttgtggccgacgttggggaagaggagacccttgttgacggtgatgtttgcggtgtcctcgtcggaggaggagtcggtggagctctcgtcgaagtcccactcctggcaaacatgggcttcaccgcccttcttcttgtagtacctcttcttctccttcttcttccctctcttgtcgtcgcccctgtcactatcactagaaataggacattttgctataaagtgatcgtgcttaccacacttgtagcaaaccttcttggaacggggcttgtagtctttcccctccctttgcttggggatttggcgaaagcttttgatgattaaagtcatctcctcattgtcgagcttggaggcatcgatggggagcctacttgacgtagactcttctttcttctcttccgtcgctttgaatgcgacgggttgcacctcgggtgtggaggtggcgcctcgctcgatgatttgtttggagcctttgatcattagctcaaagctcacaaacttccctatcacttcctcgggagacattagtttatatctaggatcaccacgaattaattgaacttgagtaaggttaagaaaaacgagtgatctaagaataaccttgaccatttcatggtcatcccatttggtgctcccgaggttgcgcacttggttcaccaaggttttgagtcggttgtacattgcttgtggctcctctccttggttgagcataaatcgaccgagctccccctcgatcatttcctgcttggtgatcttggtcaatagtcacatcatctccttcgtgtgcggttttgagcacgtcccaaatctctttggcgcttttcaacccttgcaccttattatactcctctcgacttagagaggcgagaagtatagtagtggcttgggagttgaagtgccgaatttgggctacctcgtccgaatcatagccttcatcccccacggatggttcctgcgcaccaaactcaacaatgtcccaaatgctagcgtggagtgaggttagatggtgcctcattttatcactccacatacaataatcttcaccgtcaaaaactggtggtttgcctagtgggacggaaagtaaaggagtgtgtttggaaatgcgtggatagcgtaagaggatcttactaaacttcttgcgctcatggcgcttagaagttacggacggcgtgtcggaaccggaggtggaaggcgacgaagaatcggtctcgtagtagaccactttcttcattttcttcttcttgtcgccactccggtgcgacttgacgcgggaaggtgattcctccctcttcttgttgccggactctcccgatggagctttcccgtggcttatggcgggcttctcgccggtcaccatctccttcttggcgtgagctcccgacatcacttcgagcggttaggctctaatgaagtaccgggctctgataccaattgaaagtcgtctagagggggtgaataggcaaatctgaaatttataaagtttaagcacaactacaagccggggttagcgttagaaatataatcgagtctgaaagagagggcaaaacaaatcacaagcaaatgaagagtgtgacacggtgatttgttttaccgaggttcagttcttgcaaacctactccccgttgaggtggtcacaaaaatcgggtctctttcaaccctttccctctctcaaacggtcacttagaccgagtgagcttctcttctcaaacaattgggacacttagtccccacaaggaccaccacacaattggtgtctcttgctttgattacaaatgacttggaacaagaaaatagggaagaagaaaagcgatccaagcacaagagctcaaaagaacacgacaaaactctcttctagtcactcttgctttgagtggaattgggacttggagagattttgattcactctaattgtgtcttgtattgaatgcactagctcttgtattgattgtgttggctgaaaacttggatgccttgaagtgtggtggttgagggtatttatagccccaaccaccaaagtggtcgttggggaatgctgctgtcgaagggcgcaccggacagtccggtgcaccaccggacactgtccggtgcgccagccacgtcacccaaccgttagggttcgaccgttggagctctaacaagtggggccaccggacagtcactgttcactgtccgatgcgccatctgcgcctgctctgacttctgcgcgcgcagtcgacgcactgtagctcattgttcaccttttgcagacgaccgttggcgctgtagccgttactccgcttggcacaccggacagtccggtgctacaccggacagtccgatgaattatagcggagaggcaattccagaaacctgaaggtggcaagttcggagttgatctccctggtgcaccggacactgttcggtggcacaccggacagtccggtgcgccagaccagggcagccttcggttgtcttttctcctttttatttgaaccctttcttggactttttattggtttgtgttgaacctttggcacctgtagaacttacaatttagagcaaactagttagtccaattatttgtgttgggcaattcaaccaccaaaatcaattagaaaaaggttttagcctatttccgtttcagttatattagtcacgatggtttcttatatgtaggaggtgtgcgaggtattgatctctgggtcttttga

SEQ ID NO: 755 - DNA, 4080 bp, Zea mays
  Intron number 3 from transcript GRMZM2G446171_T01 (locus G RMZM2G446171) derived from phytozome v7.0 (chr-ID 7; pos 1 09048158 to 109052237 reverse strand)
aggtaccatgcttgtttcttccaaaatttgtcgtgcttttcggtagcattattttcttgattcagaatatgctgatgttccattcttggtggcatttgaatatacttcattttctggtatccatattgttttgatatagactttgttgatattatattcttggtgacaattacattatttaactgacaattttcactctttacacactcagtactgcaacggagataaattaataaagagctaagtcagctatagattatttgaaataaattacttatgagagaaacttaaaactaaagagtgctcgaaagaagttggaaaacataactgctagttgtagcagtaacagcaagttctattcagtgttggtatctaaacgcatggctggttctgggtaatcttatgatcgaacaacttgtgctcgaatatagaactattttaatcctatcaagtgggttcaggttgatcagatttttaacactagcacaacatgtctgtccttatgaacagacagagagccataccacgagctcagtcattatcaatcaataggaaaaaccgcaaaaggttccactgtatggtattagcattcaatcattatcaaaacaagaggctcagaataaagaagtatttttagtataataagaaaaaaaacaatgaatcagtatactccgaaccactcaacatgttttctgaaggacaaaatgtcttagaagaatgttccatttaggtgtcatgattgaatgcaacagccttgccgcaataacaaagacagataaacaaggacagattaaatgcacaaactttctgaaggatttgtttttgacacaaaggcagataaacatgattcaatactcaagagtggatgggaagactaaactcagagttctagtctgatccgcatcaataactcaagaaacatatatccaaatgaatcccaaatctcagataggaataggaatgcgccaaaattatccacaaatgttatcaacagattagagcataagcattaaaatgatttaataagcaatagaggagataagaagctgaccttgcatgaaactgtatgtccttcaagaaacatccacctgcactgatcttgagggtggtgctgagcagttggggtcgagggcgaacaatgaagacgtgaccgcgaggccctgatggcggtgtggttggactatgggctgttgaggcatcaaggggtcgagggaaaacttttccactatatcaaacgttctagtcgaactatggtttcaaactgtttctaacccgaacatctcaaaccaattccaaacccaaccagtccatcatagctaattagctattacccaaactgaacgagcccattaggccctccagtccatttctacccaaaccataaataaaggcccaattaagaaactgaaccagtcaatctggttttaatcaaaccattaccaggtttggttgtatcctggaagtggaaactgtgaactctaaaatgacatttatttgcggaaggagatccagataataactctggtgtttggtttgagggattgtttcatcctatgctagattggtccaacatggcatcatcctataagattggtggatgaccacattctttgggtttctaccgatatggttatgggagatgaaaatattggtggaccaacttatcaaattcatccagttaatactccctctgttccaaattgtaattgggggtttgtcctaagtcaaactactttaactttgaccaagatttggaagtagtttgatgccacgacgatctaggggttgctaatctaaggtcaaggctctcgctatatgctgatgatgtggtgttctttatcaaaccacaagaggaggacttgagatgtgccaaattgatcctagactgttttggagaagctagtgggttgaagaccaacatgcaaaaaagttgtgtcatccccatttattgtgaagattctttggtgcgagattgttgtagctgctgcattgtaatgctgcttcattcccttgtacttatctagggctgccaatttccaacaaaaaactgaggaggactgatctctggttttgggttgaaaagattgcagaccggttacctagttggaaggcttcccttcttaaccttgctgggagaactgctctagtccggtttgtcctttctgccatcccagtttatcttctcattgccttgcatgtccccaagtgggtaatcaaatctattgataagattcaaagggcttttctttggaagggcagaaaggaggtgaatggaggtaattgtagtgtcttgggagaaggtcactaggcccctgagtctggggggtctagggatccccaacttaatttataagggttgggcgttgcaaatgtggctgtggcttcagaaaacagatcagcatagaccgtggtgcggcggtgcggcctggacctccccatccagtcacagatcaaggtcttgtttgattgctcggttatcactagagggaaatggcaacaatacaagattctggactgataggtggctgaatgagaattctatttcgattctggccccggaagtgttttataaagttgacaaaagagctattaaatcccgaactgttgcagaggctcttgaggacagatcttgggtaagggacatcaggtcgccactctctcttgttggtattcagcaatatctagttttgtgggattttttggaggaggtagctctgaatgacgatgaggataaacacgaatggaggcatgaggcctctggctgtttctctcctgcttcctgcaatcctgctataagatcttatttatgggctccatcacgtttgagccatggaagagattatggaaatcgtgggcacctccaaaatgcaagatgtttctttggttggccatgagggacaaatgttggactgcagataggctgcacaagaatggtctgccgcaccctgaaacatgccctctgtgtgatcaggaagatgagacaattcaccatctcttgacttcgtgtgtctttgctcgacatttttgattcagcatcttgtctcccttcgggttagggcatctcattctgggttcggatgattcctcctttactaattggtggggtgaggtatgctctaaggtccacaaagacaagaagggtatcaacagcgtcatcatgcttggcgcctggtgtctctggttgcagtggaatagagtggtttttgataagatatccccctctattagctcggtgctgagaaacttccttgatgagctctcttgttgggtgatggttggaggcttggagctaagcagctaggtagtcttgctttagctgacacccccttggcacctgggtagtctctggtggttgtagtgcgttgtgtgtgtatccgtggggtttttgtttgttggtttttctctttttttgtaagtcttgttctttctattatctataaagatgtgtagttctcgtgcgctttctaaaaaaaaatggaaaaatatattgacgtctacaagtccaaataaatatgttatcaaactttattccatggatctactgcatatttgagagagagaacatacattttggataatttaataaaactaaattggtgttttagatgttattgcatatttcaaagttagataattttgatttaggacaaaaccaaagtgaactataatttgcaacggaggtaggattggtgaaccattgagtcagaaacattaacaaccttggttgctgacacagggatccatcagcagaacctgtttgtctgggctttgtagcctgtacacagtggtcttcatggcagtgcatattgtgtattgtttggtctttgtgagtacagcgggtgactatatcaggtggtgctggtgtttcagtgacactggatattcatctaccacccctaatagaacttattgagtgctgtatgggaagctcgagtacaatacccttgctatatcatttgatgttttaccaattttcttgcagtataatctatctatgacagttttgtagctgccgactaacgtgtgttgtcctttgttattgcagttcgtcacatctgctctgaagcaacaaggtttgga

SEQ ID NO: 756 - DNA, 7202 bp, Zea mays
  Intron number 1 from transcript GRMZM2G124281_T02 (locus G RMZM2G124281) derived from phytozome v7.0 (chr-ID 1; pos 2 12059982 to 212067183 reverse strand)
gccccagtgcagcagtacgtcggccgccaattcaggtgatactgtacgatgagaattcatgaacatctccaaattttgactaacttttggaagctatgttaatcacaattgctggttagactatctgcaattcagcacccgttcctccacatgttcctttaccggtgataccgtagaggaatagagagaaaatctgcagtacctgtcccggtaaaacaccctaaaacataggcaaaattgcttatttgggtcctttatgttccacttgccaaaatacctcactaaagttgtcaataactaaaataccccacaatacgggtgttcatcaccgtcacttttttgccaccaaataagattacggttttgctatagtaccattttatccctgcacaatgctaagcactctattaacagagcattactgcagtattttgagcattgaagatacactagctgttgatttagaccatgtattggatggacatatttctagaaaagatgttggcatggtttaacctaaatttgaacatagttttcaaaggtatgacaatatatagcatggaagcaaaaaaattcaccgaaattccaatatgggtttagcctaaatttgaacatgtttatttacgagagtcacaatatatatcatggaagcaataagttttacccctacgttcagccatacattcaaccattcagttcagccatacattcaaccattcagccatacgttctcacattattcaagtcttacacaatgtgattaaaaaggtccaagcataatgtaagacattcaagtcttacatcacacgactgaaataggtccaaaatgttatgataaaagaagtagcagcaaggctagacggtagttttcatttttagagtcagtttcttgtgcctacgggtaattggggctgctactacatgtttaaggctttatgtcaacatttttcagaaatatgtacatccaatacatggcctaattcaacaactagtgcatcttcaatgctcggatactgtagtaatgctcggctaacagagtacttaatgatgtggagcaggggtaaaacgggtactgtagcaaggttgtgcccatatttggtgcaaataaatgatggtcgggtaatctggcgaggaacactcgtattgtgtggtaatagctattgacaacattagtggggtattttggcgagcgacaatgtatagagacccaaataagcactttcaccaaacatctttcattatctcctcgcatacaacttggctcaccgtcgatcatgcataaaaaataaatgcacttttacattaggcatgatagttggatgtatatgtattgttttaaaggtgatgcctaggcgtctaggcgccaaaattatctgggcattggtgccgccttgctccaggggctcatggcgttcgtcttggtgctctaggcatctgtcttggtgctctaggtgtccgtcttcaagcgccttgagcctcaaatttctgcatcgtgcgccaggcacggttggccatcaaatttcatgcatccctgccttgctgcgcgggaagataaggaagggaggaagagataagggaagattagggaagagaagggaaagtcagagaggttttggcggtgacacctttctcttcgtggacggtgacttcatcggcgtcatggcaccaaggatttgatggtcgacgtctgtgttttcaagtcgtccgactaatcgcgattagtcgcgattagtcgggctagtcggttagcagagctcgattaggcagccgactcgactagagtacctggtcgccctggtcgtccgactagtcgccgattagggccgattagtcgctcgattagccggttctaggcgactaggtttaggacctaggttttttgatttcctggcttcgtgggcttttttggcgggcggcccgactacaggcagttgaaacgccacacgccagccgcctctattgaacatggaacgccagccgccctgcctgttctgtcttctgatcttctctttatttccctaaaccctaattccctacctgctcggcggctgttcttgagttcttgttctggaatccaggcttccaaagtccactgctcccctccagacttccaatccagcacgtgggaatccaatctcgagttccaggcttccagcacgcgcgaatccagttcaccgacggactccagacttcatccttcaatctccagcacgcgcgaatccagtttttttcgtcggcatgagttcatcttctggaggtattcttttgtgtagttctgttcttcatccttcatccttcaatcattcatccttgtatgtgctgtctgctgtgtcattctgtaatctggactggacttctgaatttctattcttgtactccatcagtccatcagatcagtccatccttattccttattcttgtacagagtttggtcgtcgccgtcaggataatgttgaggtgatcttcccagaatcacaagttgtgggcagcggcaatccatcttctgttgcggataacacagttcttgcttcggcatcatcagcctcagccgctgcagattctgcagctctcgttgataaggctattgcaaagttgcctgctgatgttcgtgcacacgcaactggtatctgggacttgtagtattaataactagtaagtgtttctctgctgttttcacttttcagtattgctgaattcatgtcatgtttactctatccttcataatatagtatatgaagttcatatatactatatatttactatatagtataatagtatatattatatagtatatacataggtcctggtctcctggatgaacaggacgaccagtaaacgaccaggtcgaccagagctcgattagtcggacctagtcgacgactaatcgagattagtcgctggtcggtctcccagttcgactagctggtcgagcgaccagaaaacataggtcgacgtggcacctgcgcctgatgcgcgatcatctgtccaagggcgtcgggtaggcctgcttcctctcctctcaatctcccttgcttctttctttccctcgatctcacctgattcttctcaatcagtcttgctacctcttgatctctactaggttgtagagatagcacaatggcatctccaattgtaactataacttatgttggtagtgactatgatcccaagactgtcgttgatccagggtggaagtatggatttttggccagacctttaaaacaaatataagatggaaatggaatgcatcttgtgtggtcaagtcgttagtggagggataaaaaggttgaagcaacatttggcaggagcctacagagatgcaaagttgttccaaggcaatcggtaaattagagatgacaagttatttggaggcaaacaagaggaaaagaccaatcttcctagataaatatgaagatgatgatgaagtggttgaggtggcagcaataatagatggggagaataatgcttctgttgtggtggagtctcaagcgtccaaggtgcagcataagccctgttcaagtacaatagccaaaaaaagacaatccaccttgcaatttaaggcaagtagtaaagcataacaaaaaacaaccaactctatagttgagatgttgcagagaacacaagaagtgatggatgagagacatttaggctcgtaccagcccacaatcttggatagtgcaaaaagtaaggaagacaagcaatatgtggacatacaatgggctttgttcttctatgagtttgatgtacctttcaatacaacaacaactaggcaattttagattgcagttgaggcaacaacacaatttgcttcaggatataagactccaacaccttatcaacttggtgagccaatgagccattgcttcgagaggctatgaagcaataaagacaacgaaggaggaacatgagcgtgtatagaaacactatgggcctgtttggttcggcttttttctgaggagcttttttgaaaagctggctgtggtgaaaagctggctgtggtgagaagctatctgagaagaatgtgagtgtttggttcgactactatgagcagaagctgatgattagaatccgggtgtttggatacgcagattctgaaattgtagatatagagtaaaaaaagtacaaacaggaaaagacataataatcaacacttgactacaattagacagatatgtccattacaccataactatgcattggttcacataagtaactacgacactaacacattagcaatttctagtgtttagatggttagattttttaaagaacagattctaacaataaatatgataaaatgtaaattgtcgtaataatgagcacctaattggaaattgtcccatgtgttatccattacaacatatatgttaatcatcattttttaataactagtcattggtttttgaataaaacggagcatgctacctcacaataagtacgacaaagagtacaagacttaccagtttctgcaactgtaccaacacgctgataaaatcaaccggccaaataattttacgagaactcagctcaaatgtcatgcaatagttcatctacagttaagaaaaaacaagggggccccagtgagtatggggtaaagctgagctagaatcatgcggcttgtcccagccgtgcgccctcgaccgcttctgcgttgccgttgaaactcagattatgggcgaagcacttctccaagaagccacggtagaagctgagcgtttggaccccaaaagcagcttctggccactggaatcggtaaataagcggatccaaacggggcctatagctgcacactcatgtccgatggatggtctaataggaggggacgtcatctgattaacttagtgaatagagagtacttttaggagtccattgatgcatcaagtaaagtacatgatgcaagcatgcttgctgatttgctacagaaaaacattgatggcattaagagagacaaggtggttcaagttgtcagttgtcactgataatggtgccaattacaagtcagcagggaagcttctaatggcgaggtcctacattattgtagagtccatgtactgtacattgcttggacctcaggttggagaacatatgaaacttgaaggaattcaagaaaccaattgaatgtacaaggcatgtgacaactttcatatatggacatgggagaatccttgttgccatgagagagaactggtggggctgatcttttgaggcccactaccactcgttttgctacttattttttcacattgaagagcatgtacaagcacaaagatcctttgaagtctttttttactagtggataatgccattggagcaccagaagcacttcgtggctgaaactttctaataagagcccatgaaactttttaacaagagcccatgaaactttcaagacactacaagaaaccggggaaacattggttttgttaagtacgtcggggccgacgttcttataggcattaagcacgtcggtttattccaaccgatgtagttacctttttaagtttgtcggctgagtgcggggccgacatacttaagtttaagttcgtcggctgtaggggccaccaacgtacttaagctttaagtacgttgattatactggccgactttcttaatttcttaatgttaagtacgtcggccccaacgtacgaacttgacgaagtacgtcgaattaagcgcaacggttaaatacgtcggttaaccaacggtctattagagtaagaacgtcggttcctagccgacgttctttaatggttttttcgtagtgagaagaaattatgctgctgcatacaatgtggcagagactgaaggtgaagaggaagaaaatgatccacatgatgttgcagaaatcacagattgtgatggtgaggaaagggaagcactcgatatcctaggagagtttgatgatgtcttttgagagatgggagagttcagaaatcagaactagctagtagctacttctagaatgctttgctagttcacatatttgctgcattagcagctagttattattaattatgccgttagaaagtactttgtgactatttcagatttggtattgtgctgttttatattttgtgacttgtttataagatgagtgttcaaaactcgttattatgccattagtgactacggctatttcagatccactattgcgatgatttatattctatgatttatgcagagtttatagctgcagtatatattggttggtttgtattgcgtcgcctaggcgatcgcctaggcgtccgggcggtggctgagtccctagtgccctagtctgtcttacctcctttaaaaccatgtatatatgaataaaatagtggatagttgcatgcagaggaaacatataaagaaaataggagccggaaagaatttgatttagaaaaaagaatcttactgatagactagaatattctctctacagtagatatttggaaaaataaaatactgagaatagtctttagggtgttggtatggcactcaccttgctattgattaaaatgtgccacgtgctctatttttagtgaactaacgacggtgtgagcatatgggtcattcatgaaataggtgaagtacttgaggacaggaatggttagaatccatttcctttcccaattcatgtatacagaaaaatgacaaatgtgattgcattttgtttacaaaaggaaatggtgtgaattctctgtacccaaatacttctatacctagacaagtgcctgtctaggtacatggccaaaaggtacagtaaaaaaaacctttggggcagatggagtgtgtacattataaaatgactagtgttaacttgttaggcacaacgaagatttatctcaagttatgttcgttacagcagttatgtacgacagactgactaatgtaaaacctagccgtttggttcacatgttggtaacataatgagtaactgataacattaaatgatgtttgttgaagtccaaccgtaatcgaataccacaatagaaatggataccaacctattcaaatttgttaccgccggtactcaagtgtgaatcattaccattaccatttacgttacaaaatgtaaacgaaacagcaccctagttcattccattttgatacacttgctttttattgccaagaaatgagcttcattcatgctgatacgagacttcctttttttgggagcatgtagactaatttgtttgttctggtgaacagtgagttgg

SEQ ID NO: 757 - DNA, 27999 bp, Zea mays
  Intron number 1 from transcript GRMZM2G138410_T01 (locus G RMZM2G138410) derived from phytozome v7.0 (chr-ID 7; pos 8 8519357 to 88547355 reverse strand)
cggtggaacacgccaaaaacctcgcgttccacaaggtaatcattccaataagcacgcctcaacgtgaccgatcccttcgtgtggcggtgtgggtcacgcgcgttgatttgtgtttttgtgatatatatactcagagtacacagtgacagtatacgccatcgtgctgttggtctggtgattatttcggcctgctgttggtatggcgattattttgtacgtatatgttagaagtaatgtttttcaacctttattggtggggcttacgtacggttcgccagaaaaatttagatttgagcgccaagcagagtgagtgatagttagccgccaaaggtaatttggttgcggttctttctgggtaggcttcgtgggcttcccttttctcggtgatttgagttgctgaactgggtttcggaatgcctgtggatttctccctctccttttatggggggggggggggggggggggcgtgcagcctataacctttttaacattttatttgattgatggaaaacgcatttgaatctgaatttggttaacatgttcagattttacttgggaagggggaaatgcgcagattgatcttggctaggaagtataaattcagattagatatgtgcccatgcgttgcgacaatgtatactatttgataaatgttaatgcacaacgatcttaagttacactacgaaaattggccccagttgatagtgtaattttaccattttcaacagatagaagtttaaaagcagatccaactattacaataaacatatgctttacaatgtatcgtaacagattttagtagcattttgaagtaaagaaactttgagtgcgtgccaaaaaacaaattatttttccgaaacaacgatggtgccgcaaactatgagataggtaacccgacttcatctacaatccttgactgcatgggcataaaatagcaaacctgcaagcaaaattttagtcaaaactgaggatatgtgaccatgatcttaagtagcactaagaaaattggtctcagttgacaatgtagtaacttaaccaattttcatagatagaaaattagaagcagatcctgtaagtagagggactctaactctcatcaagaggatgacactatgagttggggcaattttctgtttatttcctcaaacactacacaatgtcatacccttagaggggttggggacacatatttatagccctacgggctgcactaccacaccttctcacacacactacacaacaggattgtcctctagatgctaaagagactacagaggacagtcaaaagcgactgttgtcctctagatgctaaagcgactacagaggacagtcaaaaaacgactgctgtcctctagatgctaaaaagactacagaggacagtcaaactgtcctctagatgctaaaggactacagaggacagtcaaaagcaggctgtcctctagatgctcaagacttattccatcattctccccctaagtcttgggcgtcgtcttgtgagaaagttgggccatcccggacctggagcaaagctcaacaaacttgatcttcccaaggggcttggtgagcaggtctgcaagctgatccttggtgttgatgtagcgcgccttgatgctcccttctgccaagcagtctcggatgaagtggtatatcagctggatgtgcttgctccgttcatggaacacggggttcttggccaatgccagagcggactggctgtccaccctgagttccaccgctccagtgtctctcccgaggagatcaccgagcagtcgagccagccagagagcctgagtcgaagcagtggacgccgctatgtactcggcctcgcagctggacatggccgccacctgctgcttgaccgactgccagctgatggggcacttgccgaggaagaagaggatcccgcttgtgctcttgctggcgtcgatgtcgccggcgtggtcgctatcgctgtacccgacaaggtgtgcctccctagggcacctcgggtagtagagaccgtggtcgagagtccccgcaacatagcggatgatcctcttcacagcctgctcatgctccgtcgtcggtcgctgcagaaaccgactaacgtagccgacagagtatgccaagtcaggccgtgtgtgaacgaggtagcgaaggctccccacaagacgccggtactgtgtagcgtccacctcctccgtcgtgctgtcgcgactcagcttcagcctctcctccatcggagtgagagctgggttgcagtcggtgagcccagccagctcaacaatgcgcttggcgtaggcggtctggcgaagtgtgatcccggagtccccctggtgcacctcaatccccaggtagaaggagaggtgccccaggtcactcatttggaaggtgaccttcatctcttccttgaacgctgccacctctgcatccttggcgccggtgatcaccaagtcgtcgacgtagacacccaccagcagggcattttctccattgccccgccgatagatggccgcctcgtgcgggcttggcgtgaaacccattcctttgagtgtggaatccagcttggcattccacgccctcggtgcctgtcgcaggccatagagagccttgcgcaggcgcaacaccttgccctccttgccagggatagcaaaacctggcggctggtgtacgtagacctcctcctttaagtcgccgttgagaaacgccgacttgacgtccatgtgatgaacgtgccagccctgctgggctgacaacgcaaggaggagtcgcacggattccatccgtgccacgggggcgaaggcatcgtcgaagtcgatcccctcctgctgtaggaaaccacgtgccaccaagcgagccttgtgcttgacgatggcgccggcttcatccctcttcagtttgaacacccatttaagggtgatcgcgcgatgaccatgagggagatcagcgagctcccaggtgcggttcgtctcaaccgcgtccatctccgactgcatcgcggcacgccaagtcgcatgtttctcggcctccgcgaaagaccgaggctcaccatcgtcgcatgcaagatgcaactctcctgccagaatgcgagatgcagggcctggtaccgacgggtcgatgagaaggccctccacccttcgataccgcaacggctcgccgtcgtagcacgcgtcgacccgctcctcgtcgcgggacagaggggtcacgagctccactgggtcgtgctcgacacgagctggtgtcggagatgacgttcccggagagggtaccgtcggtgctggagtacgtggtggcgaagagctcgctgcagtcggagtcgtggctggagtgcgtggtggtgaagagctcgttgtagcaggagctggagagtttggcgctggagtcggtggagacttgggggctggggtagacctgctcggagaagagttgcctactccctcagctccctcaaagtggacgtactcgatggtgaagtcgtacgtcggagtcgtgccatcgtccaccaccttgtcccacgcccatcctcgcccttcgtcgaacactacgtcgcgcgccgtgcgcacacgctgtgttcttgggtcaaggatgcggtaggccttcgagcccttcgcgtagccaatgaacacccccggggtgctcctatcgtcgagcttgctgatgtggccaagctccttggtgaatgcgagacagccgaagacccgtaggtgagagaccgccggcttgcgcccatgccaagcctcgtacggtgtcatcccgttgagagccttggtgggcgagcggttgaggatgtaaaccgctgtcaccaccgcctctccccagaagacagctggcattcctctctgcttgaggagagcccgagccatccccacaaccgtctggttgcgccgctcgacgacgccgttctgctgcgggctgtacggcgcggagtagtggcgctgaacgccctcatccgcgcagtacgacgcgaactcagccgccgtgaattcgtcgccgttgtcggtgcgcagcacgcgcagcttgcggccgcactccgcctccgcagcgacctgcacacacctgatggcgttcgcagcctctccattgctgccaaggatcatcacccacatgtagcgggagagatcgtcgacgagcagcaagaagtagcgtcgtcctcccggtgtggctggtgtcaccgggccacacaagtccccatgcacgagctcgagcctctccttggctcggaagctcgactgctggggaaaggggagccgtctctgctttgtcagcacacagacatcgcagaattgctccacatggtcaaggcacggcagtcctcgtaccatctccttggcactgagccgcttcagggcctcgaagttaaggtgcccgaagcgctcgtgccactgccacgccccgtcgtctcgacgagcagcaaggcagcaaggttgtgccaccttcacattgaggatgtatagccgatttggactcctgcgtaccttggcaagaaggcgacgagagggatcccagatcctcatgactccgtgctcgacctccacgcgcgaaccgttctcatccagctgtcccaagctgatgatagagttcctcaacgcggggatgtagtagactccggtgagcagcctgtgctcaccagacgcggcggtgaagacgactgagccggcgcccttgatctctacgccggaggcatccccaaacttgacggagcctcgaacgctagagtcaagctcggtgaagaactcccgtcggccggtcatgtgatgagtggcgccggtgtcgaggcaccatccttcgatcatgtccttgttggagccgtcgccgaggaaagcgcgtgctttcgactcatcaaggtggaggagtgccgctgcggccggtgccgctggagatggctcgatgcttgcatgtgccaggagcagggcctcctcctccgcctccgcctgtgcgacgttggcctgaccacgtcgtggctgccgacagtctctggcccagtggccaagcttgccgcaattgtgacagccgtcgtctcgtgccggcttcttgttgccgacggcgccgccttgggcacctccacgtgcaccaccctcagcatgtcctcgcgccccggcctgggcgcctccacgcgccttgcgcggcttgccgcgtttgcggcctcgtgtcgaggaggactcccccttcttcttgtcatcctggcaggcctcccactgctcccgagtgagatgtagcttcccgccgatagtgataggcccagagagagcctgtggttcgtcgtcgtcgaccaccttgaggcgaccaatcgcctcttcgatcgtcatcgtggagaggtctagcagagactcgatcgagcgagcaatctgcctgtacttctcggggatgcaacggaagagcttctcaacaactctctcctcatcgtaggtgtcgtcgctgaactgcaccatcttctgcaacagagtgttgaggcggagagcaaagtcatcaacatcctcacctggcttgaaggtcaggttctcccactccttgcgaagtgcttgcagtgtggtcttgcgggcacgatcgctgccgatgcgggtcgcagcgatggcgtcccaggcctccttggcagtccgcttctgggaaagcgaaaactgcatctcgggcgggactgcagcaatgagggcatccagcgcccgccgatcctcgtggtagtcgatgtcgtcgtaccgaactgcttcccacatgtggcgaacctggagccgtaccctcatcaccgcggcccacttgacgtagttggtcttggtgagggtaggccacccaccgtcgggaccgatgtccctgacaatggcctgggccatgcggcgaccatggtaccgatccggggagggagaaccgcgccgcctgtagaggccgcgatctccgtcgactcggtcgtcgccgccgggagcaccgccggcgcgtctacgcccgtctgggctgccgccgcgtgcgccctcgcctggagcgccgtcagcgcgtcagcgcctatctgggctgccgccacgcgcgcccccatggggatgcgcgactgcccactgtgccgcctgctctcgcgctgtttccctcgccagcctgagctcttcgtcggtgttgtcgtcgacagaagcagagctgccagctctactgccgcgcagaacctcgaactctgttgccgccgcacgtgcagcatccgccgcctccgctgcttctacttccgctctcgccgctgccaattccgccgccgccaaacgtgctgccctcgccgctgtcgctgcagccgctgctgctgctcgctcgcgttcttgtgccgcggcgacctcggcctcctgctgacgccgcgcactcgaagtggccgagcgtagggacatggtgggctagtgaggggtcgctgcgtgtggaagaggctgtctcagacgaaaggctgctcgtctgagcaggggaggaaggaacagttggagctcttgctgccgactgagtgtggggagaggcgcgggaaggagatgaacacgagatgtttaggctgcaggatagtttggcctctgataccaattgtaagtagagggactctaacacttatcaagaggatgacactatgagttgggacaattttctatttatttcctcaaacactacacaatgccatacccttagaggggttggggacacatatttatagccctaggggctgcactaccacaccttctcacacacactacacaacaggattgtcctctagatgctgaagagactacagaggacagtcaaaagcgactgttgtcctctagatgctaaagcgactacagaggacagtcaaaaagcgaatgctgtcctcaagatgctaaagagactacagaggacagtcaagctgtcctctagatgctaaaggactacagaggacagtcaaaagcaggctgtcctctagatgctcaagacttattccatcagatccaaccattacagtaatcctatgctttatgttgtatcatagcagatttcagtagcattttgaagaaaataaactttgagtgtgcgctgaaagaaacattttagaactgttggaagctcatttcaccggggagatagatagcccgacttcatctacaatccctgactgcgtgggcgcaaaatagccgacctacaagcaaaattttagaacacaaacattttagaactctaatatgtgactccaaaaaaaatcttacatctgtatcgattacaaataatttgcattaaaaactattggaagctcgtttcaccagggagacactcaaatccttataagcaacacaatagtctagtacacggattatctcaaaaaaatatagcatacggcgagagtcatgtacctggggcacaagtcctgcttccatttatacttccgtgtccacgccacacacgacagatccatagccaatttatacaatagaaacatagaaaggggaagtgcttcctagatcaaaacattgtgcaaaatcattaataagttcaacaagagcttaaggccgtaaagacaacacaatggtgcactcttgagtagttaaaactcaacagctattcagacaataaagtggtaagcacacatcagcaagagcataacagaataggttaacagttacaaggaacctacaactctgattacagatggaagccatcctctgtataaagcaggaaagtcttcttcatcgtagatttgtcaagaaagtttcatgcttttgctacacttttgggtagccttcattgtatacagttgcggacgcaggataaaattataggtgggcaacattataaaagctaaatcactagactagatcacaactcacaagataaaactagttttatgatgacaatataaaggctaagtaataatattataaaggtttcataataacatgcataccgaaacttctctcttaatctgcagtgtggcaccaaaatcaccaacaaaaatccaatctacagttagaaaagatgtatattagatgaacatcaatacaagaaaagtacattaatgaaaatagtgtagtgaatataccactaagttgtcaatcttgtagttgtgactcgaggcaattgcttcatatttatcacccttcactgcttgcttaaaaagaaagcaataaaagcaatacactgcatcttttgattcactatactccaaccaatcatacttgtcataccattcctctttaaaaggccttgaactttgtccatactgtctacgagggaaatctaaaccctttggttggcatggaccattcagaacatatgcccttctcacttgatcttggacatctttatcatattcataaatttgcctccttaaagcgggatctgcaactatgtcatctggattgaacgtccctccaacagttggtgtgttattcacattattattagcactagtgccagagcctcttgaaagtggttggaaaaaccttctcatttgcttcacccaatgtttctgtgaggtttaaaggcctaaaaaatcatagaaacaatatctgataaaacacaacagttggccaattgttaacttgaattctatgggctggagcattttgccgaacaccttgcgctcaccaatggacttatggactgttgccccaaatggccaaatcggctctataaatctaaatcactacgctgctataggaccgagtcatcgagcgaccgagcggcaagcgcaaaggcagatcaagcggcgagcgcagaggcagatctaggcatggaacagaagtacagaacggaaggaccaaggatttaccgtctccgtctaggtgcatactgggtggctcgtggctgggtcctggcctcgccggctggggcgctgcgctggccgctgggcgaacagcggaacgactggctggctgggcggctgggcgcctgggtgaaaggcggaacttgcggccactgcgattttgatttcctggcgaatggattatggatggctggcggctggctccgtggctcctattcctataccatattatgaagattataaaatttgaggtggggccatgacccaccttgccctcactgtggatccgctactgattgtatacatatcttcgttggttccattggtctgcatagttcgaataggctgtttagattagctacaggtcatataaaaacatggaaatgaggcaaaaaatatcaaagggtcatttaacaggcaagttaagtaaaaggaaagaaatgtaaatgtatacaagttttttcattccaatcgtgtcatatttatggattaacctcacaaggtattcaatggttgaagctattacaattacgacccgtttggatctttggaattgaatttcattctaataaggccccgtttgtttcctttcattttcaggaattggaatcttactattggaataggctattttttagaatgtgaaattccaccactttctaaagttatcacataagcctatctcaaattcatggggtgagagatggaaactgattctatagatttacatgctatttttccgatgtaccacttatagcacacttttctcttgcttcgttataacattagtgtagtatataactatctctctcataagatttaagataatatacaaatatattacatatataaatatatgaacttaattagttttgtctaaattataattattaaaatggaattcaattccaatgaaacaaacggggcctaatagtaatttaggcatatatcaattaagctaattcggttttatgcaaaatatatttggctgaaacgacacctgctccgtccccgggccctccaccaccggcctttcccctccccggcgaccacaccctgcccttcccctccctggcggccacacccaccgccgcagcccctcgccggacttcgctccgaacacggcgaccaccagcacaaatcacactctcttggcgccaaggctcacggtgcaagccgtttcgacttcccaggcggggcggtccaaattccagaggtggagcaataccagtcctatctcttcgtcttctggtggttcttgggcggcgctgcgctcctacaaagatgcggcccttgccatggacgggtaccctgctcccacgcctccgtcctcagtccctccccgaccgtgcagagcccctctggctggtgcggtggggtcttcggaggccgaccagttggtgcattcccaagggtcggcgcggtcgcttccttcggagggcgggtggcaggtggtggcacgtaggcgttctggacgtccccctcccgctcctcgtagatggtcccctgaggatctccgagggcggtgtttcaattgtctctcaccctctcacttcgtcgcttcctgccgtcgtccttcccgctgctttcggtgcctgggttttggccaccgtgctcctgggtgcccgcttaaggtggctcggaaggcgcaccctgagcatcaggttggtcgggttccagtgtggcagcgcctcggagcgatgcaagatcctgttcagcatggaggtttcaggcgaagagagtcggtgtggaggcggatttctccgtcgcagccggccaccgggggagaactccttccccccccgttgatggcccgaggctccggagagtctactccaccggcaactggaggtaggaggaagaggcgcagggcaaagcggtggcgggctgcagttggcgatactcatgagcagcgatcacggtcccctgcttctacctcctctggtggtttgggcgcggagggggctgtgcaacatattgtttgcgttgagaccccttcatgcgtgcaggatttctccactgaaatggcaagggaagaggctgcgctgcggaaggccctgttcgtcacagttgctggtaccaggcctgaggttccagcagttgacatcatcgaagaaataactcaaagtttcaacgtcaatagagctaacatgtctattcatcggaccttgccggaagatttcttggtgttttttcccgatgaagatacagtttcaagggtgctcaatggaggaaagatctttagaggcccccagtttgatcttgtgttcaagaggtggacgcgctgtgcgaacgcgtctacgacatctttaccagtgctactggatgtggagattaggggtattccggcacatgcgtggtcaagagctaccgccgaacagctgctgcgtgactcatgtattatcgatgaattacacccggcgaccgtgttgaagtcggattactcatccttcatgttgagagcgtggtgtttcaaaccggcgaagcttcatcgtaatatggatctccttatcacggagaaaggccccggctttggtgagaagagatgtttatcctacaaactaaacatattggctacccctgtcccggttgaagatggcgccctccctgcggatgatggtgatggtgctccccccgatggcgatggcggccactccccgagaggtggcggcggacaccagcttggtggcagccaaggcctttcttccaggccttcttccccatgtcagtcacgcggctcggatggcgggcgtcgctcggccctttctcgcctagggtcgcagcagccctcccgaagagttggcaatgacctggtgatcgcgcctggggagactatcaatggcgcggtgggcgaagcggcaaaagtcctaccgtcggtgctgcgccgttccactgagggcgcggggctcaatgtgggggaagcgcgtgtgacagatggtatgccagacagacaagccgaagagttgctgccagctaaagaagctgaagagctgatcccagacatacaagctgacgagtcgctgggacgggcccttgacgggctagtctcgccccgttgtctgtcctctttggctggaactgcagaagaaataggccagtgcgaggttgcaggtcagggctgctcggttccatctactaccattcacgagagtccaacattgaaggtttacagcagaagaaggcagagggatcccttacagcagatgcctagcccacatgaagatatttcagtggaatctgaacatgttgaagacacaactccggtttgtgatttcgttgccatggtgacaaagaagacagatggtctgctccccccgccggtgtctctcagaaggggatgtaagcagttaccgcctgattttatccctcgccgaagtagcagattggcaaagcggaggaccccaaatgacgcaaccaggcagatccaatttgaattattaagaacaatggatattggtgatgcggatgaggcgttcagtgataaagctcttgaaaaatatggcaggctgttcaactctcccctgtctgaatcacatattaaagccttggctgctttgttcggttggtcagtgcctgtcgatatccatctccaggatgtccaggtgctgcctgctgtcctaggtccagaggatataatgtaagccatcacccatggttatgtagttcttgatgcctttgtttcctatggatccttcaaaaattcttttttggaatgttagaggtttgaatagaaaagtcagaagggatgtggttcgtgctatggtcaataatacttgtcctgacgtggtatgtttacaagaaacaaagaagagttctatttctcgtttcatggttgcgtctctcctgggagttgtttttgatgaatttgtaacgctcccggcagttggcactagggggggaattttattggcctgtaaaagttcttcgtgcaaggttactcaatatagaattgacaccttttcagtctcagctcagttccagcatagcgatggcacccactggtggctcactggagtttatggtccccaattggataacctcaagattctattcctgcaggcattgcaactgattcgtaatttgtgcaatggcccgtggatgattgggggggatttcaaccttatttacagagctgaagataaaaacaatggcaacctaaacagagccatgatgggaagatttagacgtctgttaaacgagctgaatctgaaggagctgccattgcttggaaggaaatatacatggtccaatgagagatcttcccccaccctggtccgtttagacagggtgttccatactgcagattgggaaaccttataccccaactctgtccttcaaagcttagcttccttgatttctgatcactgtccccttttgcttggtttgcatgaactcgtacaaggaaaaagaaggtttcattttgagagtttttggacaagaatggagggttttatggatgaagtgcagcagtcttggctgcaacctttggagggctgctgccctctacagcgttttgctgggaaactaaagaggctgtccaaacatctgcattcttggagtcagaaaaaggtgggcaacataaaaagacaggtgttgatggctaaagaaattcttcataagctggaaattgcaagagattctagatctctatccccacaagaagagtggctaagacaacgattaaaacatcattctttggctttggtttcccttgagagaaccatagcccgtttgaggagtaggctgctgtggatgaaagaaggtgatgccaacactgaatactttcaccagcacgccagatataggaaaaagaagaattttattggaaaaatccaggttcaaaacagattaatcgttgatcaaaaggagaagaaggaggctgtttgggatttttataattcgctgcttggaatggtccctcccagagcttcagccctgaatctggaagcctttcatagatgtcctttgaacctccaagaacttgagcagatggtcaccgaggaggaggtttggcacaccatcaggtcgcttccttctgacaaggccccggggccagatgggtacacaggtagattttacaaaaaggtttggcctatcatcaaaatggattttatgtcagccttgaagaaagtttggcagggggatgcttctagattatatctgctcaactcagcttatgttactttgttgccaaagaagagtgaggccattgaggtgaaggatttcaggccaataagcctaattcacagttttgcaaaaattgttaccaagattttggctaatagacttgctcctaagctccctgacttggtctctgtgaatcaaagtgcgtttgtgaaaggtagaagtatacatgataattttgtcatggtgcagcaaacagccaaggctatttatgggcaaaaaatgtctagaatcttattgaagttggacattggaaaggcttttgactctgtctcttggaccttcctttttgaggttcttagacatttgggttttggtcctctgtggtgtggaatagtctcaagggtcctgagttcttccactactagggtcttggttaatggagagcctggggatattattcatcacagaagaggtcttaggcaggggaccccctgtcccctatgctctttatcattgttatggatgtcctcaactcgctgatactgaaggtgcaagatctgggtttgttgcaacctcttctaaggcgcggtaggggccaacgcatttccttatatgcagacgatgtggtgctgtttttaaagcctgaaatagatgagctcaatttgctgaaggaaatattaaggatttttggggaagctacaggtcttgtcacaaatatcaacaagcgtagcatcacacccatacattgtaatgagcaacaagttgacatgccccaggagattttcccttgtaatgtgcagcagttcccctgtagatatttgggactgcctctatcggtaaagaagcttccaaagattgcttttcaagaacttattgacaaggtggctgacaaattgccagggtggaaatctgccctgatcaccaatgctggaaggctgacattggttaaggctgtcctcactgccattcctatataccatcttcttgtccttttatgccctaaatgggttatcaaagccattgacaagattcgcaggggtttcctctggaagggcagaaaagatatcaagggaggccattgtgctgttggatggacaagggtgtgtcgaccacttaagtttggcggcttgggtattcacaacctggaaatccttggttgggctcttaatgtgagatggctctggctcagaaaaacacaggtagagagaccatggactgagttcgacataaaagttcatccaaatgctgaagctctctttcgggcctcggttcactcttctgtgggggatggtgccacaaccctcttttggatggatagatggattcaaggacaatctattgcattttttgccccttacctattcagtcgtattccgagtagggtcagaacaggtcgtacggtgcaggaggctcttgctgataataattggattcaggatatctctgggggtctgactgctgttgtcatcagggagttccttctggtttgggatctaattcaggatgttcatttacagacaggagttcctgatgtccacatttgggtgccttgcgcttctggcctttattcctctaagacggcttataacagcttttggaacggtacaacatcttttgagccggctaaaagaatttggaagagttgggctcctccaaaatgtaaattcttcatttggctagcctctctcaaccggtgttggacagctgacagattggcccggcgaggtatggatcatcatgacaaatgcctcttttgcgatcaacatgaagaaacagtccagcatattttgctctcttgtgtgttctctagaaacatttggtggcaggtgtggtgtaaagtggggctgcaatacctggcacctgggcctgaggacatgattttccaagattggtggagcaatgccgaaggccaggtttctaaagagaagagaaaaggttttaacacgttggtaatccttgtggcttggtggctgtggaaacatcgaaacacctgtgtcttcgagggagcttccccgagcactagagatatcctgcaacacatccaggaggatgctacgctgtggggtatggccggggctagagggcttaagggcttatggccttaagactaggagggcctgctgttgtgtcagataagggatgagtgtgtttctgtatttgtgttttcgacctccgtaaggagtcgtttgtaccccggtctgttctcagacctatctctttcttaatataaattatacacagctctcttgcgtgtttcgaaaaaaaaatattagcaagatgtcggagatatttatgtgctatattttactatatataagtgagacgatgagtgtcatgtaagttacagagtagaaacaaattctactaatgcataaatcatttcccaccctccactccatgaatttgagataggcttatatcttaactttggaaagtggtggaatgttaaattccaaactaaataagttactttattgagtgaattccaattcctctaaaatgaagggatccaaacgccccgttagcagaatttgcaatggaatgagaaatatactgaaatggacatgtgaaagatagttgaatgctgcattgacagagtaacacatgtataatccataagcaggttgttaatcaaatggttaaaccatggtgaaattgcatagtaccttgtgagtgcaggaaaatgtgcaagataagcaggctctgccgacctggacggggcttctaactcagccaaaaacagcacccggtgactgcatgaaaatctgaaacataagtagcctgagccaagctgaagcaagggtaaaaagtgtaacctgatgaagagctgaaaagatccggtaggaggtgatatgggtgcgcggaatccgcacaagatagtacatggagtcatggacactgcacaagaaattgagaactaaattagccagtagtaaagaaaacagtcagaataaataaaaacagcccagaaacataatcatttaggtggaattacaattaaaaatgagaactaaaaaaagaattgagaaaacctcacactgacctatgcaacaagtaactaacaaactgacaagatcaaatagagcacactaccatttgtttctgtgagaactgaagtttgcgtcaaatataggccaagaagacagagaacatcaatactggaagagaacacatatgtatttaggacaatactttaaaatgactcgctcaaatattataaataaaaaacaatactcattggcttacgtccctgctttccccctactttcttccttatgtgcatcaacgccggcacgccaaaggcaattgtcttctgtggagtacccaaatgacgtgattacaagtttattcacaaatttgaatacggttaggcaaagaaatgaacaagggatggattagcacctgataagctcactactttgtagttgcccgttgaatatagttcaatatagctgaaacaatatcataactgaaaaggcattgctactgaacaaatcgtttctctggttgtgttaattcctttcaagttctttttagttcacttaaacaaagcctatacactgcaaaagaagcttgtaattttaaagcaacatatgtaataactatagtgcaacacaattcttaatcgtcttgagataatttccaaggtgaaccaatcatgttggttgtacaccggaatactactcataggatgagcaatgctactttggatgcaaccaccaaccgactccatatatgatggtacatgtgtttatatatagccttgcaaagaagattgaagatgtacactttagttgaaattatggtactgtcgtctcaaacactgtagttctgattggaagcaaagcagaaaccaagagtacttgtgcactgaaagttttctctgggaaaacagaaaacccatggcatttgttgtgggccaaaccgtgcaaagtttaaaccaaaccagtgttggacaaaattccctagctatttcattatgtgttggtgaagacaaaatctcagtgcatattttcaatccaattttagtttaacagtggccatttagaaggagaagaaggtggatatctaaagcacaacatgtcagtcgtgctcaagtgttgaatcacatattcatacatcgaaaatggagcatgagatccagctagctgatagattcactttcatttggcgtcagtagaaaggagacgtctcaaatcgagacatgaacaccagatcaaatcccaaacattctcagcacacaagcagggacaatagtagcaactgaacaagcaaagatttgtctcattaccaagcgaactgccaagaagcgctgctagtcctcatctcatcaaaatgaggtctgtgtggatcgtaggggccgcatcagatcgagacgagaaccacctgaccgacaagatctcgctgctctcgccgccattggctccaagcaaaaggaaaaaatgtggaagaagagagatccattatgcggacctgtctagacggagctggcggcggaggggaggatcccgcctataggtccacaacgatgtgtcggtgccgcgccaacgcctcgcgtagcgcaaacgccttgtcggtgggggacaccaccaatgcgagggcgacacacgagggggccagagatccagccgtagagtgggtacgcgttgtcggagggagacgtcgtcggtgctggtgcgggcacgcgcccgcgtgggggtgggtttgcgggaggcgaggaggcaggggtgtccgtggtcagatgggacgggcaggcgaggtggggaggaccaaaacagtgagggtgcgacggggcaggcgagggtgggcagcgggcagcgggggctgccgcgagtgggcgggtctggcggcgagatttggagatggcggcggagagcagagagcgggggcgcgagagaggagagcgggggcgtggagatggcgacgagagagacgcagattgcgggcgggggcgggtctggcggcgagatttggagatggcgacggacagcagagagcgggggcgcgagagaggagagcgggggctggggcgacgacagacgacagaaccgtgcaccgaaattcgtggacgcctacactagtagtagagattttgtaaatatttttttctcgaaatgcaagagagctatgtatcattatattaatgagaaaaagataggtataaggtccaaaatagaccgaagtataataaaccgtcttacggcagctaaaatctaataatccatcaaaaaaaatctaaaagctctaaaaagcatctatgagtggggctgcaaggaaggacatccccctctagcaagctcccactttcgatactcctccccaacgtggattaaaacttcaacaatactagaaagagagaggccgtcaaatacatatctatttctatgattccatagcacccaagcacctaggacaagagagtattgagaccatgtctaaaaggaccatcaacagtttcactaacttctttccaccaaaccatgagagcttggagcccaaattgcctaagcatcagaacacaagctacaaggagatgatcgactgtctccctttcctgatcacaaagaggtcattttcccagtgatcaaggccacgtttttcgagtctgtctgctgtccaacacttcttaaaggtcgctaaccacatgaaaaaaatgacattttggcggtgatcaagtttttcaaatcccgtaataaggttcaaattgcatagatcaaagaaagaggccctcatagtcagctttagccgagtatttgccattagtagctaaccgaaagatatgcttgttatctttgtctagatgaagctcaatctgtgcaacaatatctcaaatgtgaaggaagtctgcaagggcccaattgacaacccccacgattgtcatttatccacatcttatctctgatcacctcctacattgtccgcttgctaatcgttcttttcgggattgtctccagaaggagatgagcaatatcagcgacccgctgccctccaagccaccgattgctccaaaagagggtagaggccccatttctaaccttagattgcatggccatttttaagaaatctcagactttcctcgggacatggagaggtagcgaggaccagggacggtttggctcagttttctgcagccatacccaatgcatttttagagcaaatcttagctcattgatgctgaaaatacccagtcccccgagctcaagaggtctgcacactcttgcccaagccgcaagccactgccaatatattggaggataatttaatctggactgtagattctcaactcctgtggtgaaattttggatttgtcacttttgcttggttgctgtctcgtgttttactgaatgcaatagatggataacgatgacaagcattggaagcttcgatagcatggctgtaattcctcaaattcaggttctgggtttgttgccaatttatgtttgagctgcaactgtttaagattgtacttgacatttacgggtagagctgccaaatcggcaaactttggatggtgtcggtgctttcactggtcaatgcttgaacatgtctcacttcagtagtgcacaatttatacaactggcttcaatatgacctacttcgtatttgttattgccattgacaaaatcttggctggttaatgaatttggtagcttgatttgtctgtttttgatggaacaagttcttccttgagcacaatcaaagactgtttatggatgaagtggagtgtaggagtagggctggtgcaaagcatcttgagagccttggtctcccggctgcctttaatagggtcagggctatttcaagcgcttagtgctgtggcagctggggtcatcctattgcagcatgagatgaggatagagttccctgtttgtttgctgttttggtctagttttttcttgtgttattttgccttgttcgggcattatattgtggtccactttggacctttgtctctcttaatataatgatgcgcagctctcctgcgcgttcgagaaaaaaatgaatttggtagcttgatttatctgtgacagaaccaaatgggttggtagatatataaatggcatgtccttgctgttgaggacttggttcatgcattcatcagggtgataatatctgtagtcttttcctcaatctagttttttcaaatttaccgttcatagacaatacactgtttggttaactaggatggtttgccatattcttatttgttgacttgtgcaaaaaagttttgcatcttctaggaaaatcattcactaagaaatcccaggagcatgtaaacttgcactcgaagctgaaaagtacatatttgcaccaaattaatttccatgataaataaaatttgccgataggggaaagaccgcctccacgatattatattaagaagttcaatcggagccccgaccaagaaaggtcacgaaagctgccccctgatgcaacataagggttcaccctctattggtcagatctttactcgtgctttgagccctcccaacccccacacgaggatccttgagagcacctagaggaggggtgaataggtgatcctgcaaaatatgacttggcttcttccatttcagatcattgccctttattgctgggtttgagggactccatgggtaaacgtcgctttcatttcgaaagtttttggccaaaacttgatggctttatggaggttgtgcaacagtcctgggagcagccgattatggctgtttgccctctacagaggctcgcagacaagctgcggaggcttgccaaaaatctgcaatcttggagtcataggaagacaggcaatatcaagcgacaacttcttcttgcgagggagattattcttcaactggaatctgcccaggattcaagattgctgtcctcactggaaatttggcttcggagacagcttaagcatcatattttgggcttgtcttccttggagagaaccagggcaaggctgcgttctggtctaagatggctcaaagagggggatgccaatactgcttacttccaacaccatgccagatataggaaaaaagaaaaattttattgccagtttgaagaaagaggacagggtgtttactgatcagaaggataagattgaggtggtttgggatttttacagcaatttattgggatctgagggtcagtgtaacttcacttttgatcttcaatcctttcatcgatcagctgttgatcttaccgagttagaccggattattgatgaggaagaaatttggaacaccatcaaatccatgccttcagagaaagctcacgggccagatggctttacaggtagattctacaagatggcttggcaatttatcaaagtagattttatggctgctgtgaatagactgttttagggtgatgatagtagactttttctcctcaattctgcatatattaccctgctgcccaagaaagttgatgtggaggaggtaaaagattttcgccccataagtctgatccatagtttcgccaagatcatcactaaactgctggctaatcggttatcagggaaattatcgcagcttgtgtcacctaatcaaagtgcgttcgtgaaaggtagatacattttggataactttgttcttgtgcaacagatggcccgagctttgcataggcaaaaggaaccgagagtgctcctaaagctcgacatcaccaaggcctttgattcagtttcatggcctttccttttggaggtcttacaacatcttggttttggcactcggtggtgtaatttgttggcaaagttgctacgctcttcttctactagagttttggttaacggtgaaccgagagagttgatttaccatcaaagcggtcttcgtcagggagaccctttatctcctatgctctttgtgtgtgttatggacgttctaaattcaataatcttgaaggcttagagctttggtttgttacagccgctgcttcgtcagggaattggacagagaatttccttatacgctgatgatgtggttctttttatgcatccggtgaggagcgacttggagacagtcaaacaagttttgaaggtttttggtgaagcctcaggacttgttactaatttagcaaagagctcgtttactccaatttgctgcaatgaccaggaggttttgacaatccaagagacgctatcttgtaatttggtgaattttccttgcaagtacttgggcctgcctttgtctattagaaagctctccaagagggaccttctccctctagttgagaaggttgcagatcgattgcctagttggaaagctgctcttattcactcggccggtagggctactcttgtcaaatctgtcctctcagctattccagtttaccaccttattgcacttcaatgccccaaatgggtcatcaaagccattgacaagattaggagaggtttcctctggaaaggccgcaaaaatatcaaaggagggcactgtttagtgggatggcagaaggtgtgtttaccattgactttgggtggtttaggtgttctaaatcttgaagttatgggctggtccctcaatatgagatggttatggttgaagaaaacacaacctgagcggccatgggctttgttggatgtccaagttcatcccaatgctgctgccctttttgctgcatcggttcagtcagtagtgggcagtggaactgacaccaaattttggactgatcgctggctgcacggcaaaaggattgcagattgggctccttcattgtttgctgctgttaacaagaaggctgtgaggtcaagaactgtccaggaagcaattaatggtagcagttgggttcttgacatttggggaaatttctcctctatggctttctccgaattcttccagatctgggatcttgttcgggaggttcgactgttatcagatgttccagatcagcacatatggacaccttcctcctcaggctcttacttgtccaaatcggcgtatgatcgttttatgatgggaaaggtgggttttgcgcctgctgagcttatttggagaagctgggcccctccaagatgcaagttctttctttggcttgcgactcgagataggtgctggactgcagatcgtttggcgaagaggggtttggaccatcctgttcaatgccccctttgtgatcaagaggatgaaacggtgtatcatcttttaatttcttgtgtcttctctagggaggtgtggtttaggattttctccctggttaatctgcggcagctctcccccacaagggctgatttggttttccaagattggtgggctaatttggaggccaaggtcccttatgcgctgcgcaaagggattaactcccttgtgatgttggtggcatggtggctttggaagcagcggaataattgtgtgtttgagggggatccgcctagtggcaaccagattattcagaacatcaaggacgatgctcagaggtggtgtctcgcgggtgccaaagatctaggcaccatctggccttagtttaggggcagctttggttgtcttctagatggatgtttattttatttttatttttatttttttttgttttcttgatttttctctgtactctggtcttctttcgaccattggtgtttcttctatcttaatatatctaatgcgcagttctcctacgcgttttagaaaaaaaaaacacacaaacttggcctaaaagttaaaattagtgcaaattaaaccaagtttgagagaaagaaagggaggttcccttcacttgattgctctatcaagatatgaattagacttagagcaatatcacaagtgagaatatagaacttagaaagatagaaaaatcgcaataaagtaaatgacacaagagacatgacgatttttattccgtggtttggtcaagcataatatacttgcctactccatgtcgtggcgttccaatgaatgaaggttgcgctcaaccctctcaagtgatccaaagatcaaacttgagtaccacagttcctccttatatcacaatcctgtattcccgtttgtgagaaatctccacaaatttggagtctctcatagccttacacgatgatctcaatcaacacttagagtaaggagagagaaagaatacacacacaaaggcaccacacagcaacacacgcacaagtaaagacaagtgcgcgactacaagatcacacaagaaactcaaaaacaacgctcgaatctctctcaaatcactagagggcgtggtggcagagtgtcggagtgttggtgtgctctttagatgcttgggtaccgaatggaggcgtcatggggtcccttttatagccccacttggggcctaggagccgttgctccttccttgtaaaaactgccaaaattctgcactctgcgtgggcatcggatttctgggtctcgcagggtactacaggaaatttatacataacttcggagtcatagcagcaccccttacacagcttttgcgcaaagaaggcttcaaatggactgaagcagccgagtctgcctttgcagccctcaaaacagcattaacagaagcacctgtactccagctaccatcattcaccaaagacttcatggttgattgtgatgcatctggcacaggctttggggcagtccttcatcaaggaacaggagccatggcattcttcagtcgtccttttgcagcaagacaccacaaattagcagcatatgaaagagagcttattggtctcgtacaagcagtacgacactggcggccatatttgtggggacgccgcttcatcatacggacagaccactatagtctcaagttcctcctcgaccagcgactctccacaatcccgcaacaccagtggattagtaaaatccttgggtttgatttctctgtccagtaccagccaggtcgcctcaacacagtagcagatgcactctcccgtcgcaatgcggacacccttttctctgcaactctatcggggccaacttttaccctctatgatgacctcagaagggacactgctagggacccagattgccagaccatgtgcacccagattagagaggggaccttacctcctccatggcgcgtgcaggatggtctcattctccatggccgacgcatttacgtgccaacatcatcagattgtttgacggcgctgctgcaaacagtccataatgcaggccatgaagggattcagaaaacacttaccagactaagggctgatttctatatcccacgggacaaagctcgagttcgagagtttgttaagtcctgtacaacatgtcaacgcaacaaaacagagcatctgcacctagcaggcctcttacagccattagacattccctcacaggtgtgggcagatatctcaatggactttgttgaaggattgccacgagttcatggaaaatctgtgatcctgacagtagtggatcgattctccaaatacacccatttcattgcactcagtcacccctacaccgcagcttctgttgccaggatcttctttgcggaaattgttcgtcttcatggcattccctcatctattgtgagtgatcgggacccggtcttcactagccatctatggaaggacttattcaagctgactgtcagcaaactctggttaagcactgtgttccacccccaaacagatggtcaatcggaagtcgtcaatcgcacaattgctatgtacttgtgatgcatcacaggagattgacctcgttcctggctggactggcttccatgggcggaatattgctataatacatccttccactcagcgctgcagactacaccattcaaattggtatacggacgtgagcctccggcactggtaccataccaacagggcacggcgcaatcccaaaccgtggaagacctgctacaagaccgagacaatttcctggaagaggtgcgggaccgtcttcttcaagcacagcagcatgccaagcgttggtatgacaaccatcaccgggaagtgacttttgaggtaggagactgggtctggcttcgactcctacataggccaatgcgctccctggttgacaaagcacacaacaagctggcaccaaagtatgcaggtcctttccaagttttggaacgagtcgggttagtaccctacagacttcagctcccagccggcgctcgtttacatgatgtttttcatgtgggactcttaaaggcatttcacggcactccgccaacagagattccacaattgcccccaacagcacagggtcgcttattgccagtaccagacaaggtcctacatgccagtcttcggcgaggcatttggcatgttctcgtccagtggggaggcatgactaccgagcaggctacatgggaaccactgcagaagttcaaggaccagtacccagatcatcagctcgaggacgagctgttcttgaaggcggggagagatgttatggtcgggcagacatacaagagaagggataaggatggcgagtcctaggccgcctgaagggataagtctgctataggggagtttgttaagatagatattcaagctgtttatatcagcctatttgttaggagatttcagttggttcaagctgtttagatcagcctatttgttaggagatttcagttggctataggcctatataagtaggacttttgtaatctgccagataggcaagaagtaataaagatattattgctccctgccccttgttcacctaccagcctctcctctcgggcagccacggcgcctggaccatcttcaaggcgacgagccaccacgccccgccctccagtttcccaccagtacaacctgcacagtaccggccgtaccagctatagtaagcaagacatgcatggtgctagttgcctagtccatagttttgaaactgtgttagcccaattttatttccctcgtaaatgtttgcatgaacttatcacattacctctcttcagtgtatgctggtatcattttcactgtttatgtgtaaatccttggaatatatgtggggggtcactatatgtgacatattccaatcaatcgttttcactttagttttatctgggtgggctgtatgcaccatttaattgcatatcttggggggaaatatctcttaaatctactagggcgtagaccaggaaatcaatgccatattacgtatttaacctatttataaaattgttaatggccttttggaacatacaatcagtgttctcaaattttctgtttctgcaggttgatatccgtgacaaag

SEQ ID NO: 758 - DNA, 9112 bp, Zea mays
  Intron number 1 from transcript GRMZM2G102802_T02 (locus G RMZM2G102802) derived from phytozome v7.0 (chr-ID 9; pos 1 47631219 to 147640330)
cggcgtcgcgtcccgcttcggggttcgccagaccggtacggcgcgagggcgaggctcggcgttcgtcggcggctcccgtacaatctcccgtctgcgctgcgctccgctgactgaccccgtcgctggttgctgcttgttgcagggctgtggaggctgcggcaggaggtgagcacgtgcgagtacgaggacgtgcacgtgatgtgggagatgctgagccgcaccacggcgccggcgccggcgccagcgcccaggcggcacagccggttccggccgcagccgcggccgtggggcggcaggttccgtctctgccgaggcttctagtggtagatcaaggccgccgcgcgcgtcagctccgatgatgttgctgcggtgcggggtactagtgattccgcttcattttggcttcttttttctgtctctctctctcttgttctttggttttcgctgcttgtatgtaccgtcggcgtccatccctcctggctctgagatgtacgtacttccattcctcctcgtatatccgtctccatccgcctgcagatgatataccggggcacgtgaatgaacagagctgatttcggtcgggtaataatcctgtcattgtttctaccataccacctacctacttctccatctatctgttgcataatcatgcctccttatctgttctctttttgacccttgacgacgaattcatctgtaaacaaaggggtagagagtattagtgtaggatttcaagattcagccagttggtcttgctttgtgcgtcctgtttattcaggttaatttcaagcaaagcaattcaatttgactgtccgaggaggagggcccatggcatcttcagtcgaaaaaaactcgtcagtcaccaggaccaggaggtagggggggacgaatattcgttccgcagtcgctagataggtgcgcaagaaagaattgacgtctcgctctgacccgccctgatggtggatgcagctctgtgctgtagtttttcggtggtcactgaagccgatcgatcgtgatcagtctcgcaaaccatcgccccgtgatgggtaatggcgttgcgggcggcgcacttcagctagcctcggctgatacctacgtgctactgaacgctatcagctcctgcaggctgcagcacaaccacccccctggtactcttctgtcttctcccaccactgccagtaacttcaggcataagtattctccaaaagaaaactaaagaaagatagaaaattagagcaagatagaattggggaaaggtacatgcatgcgcagaggcataatagctttcagtcattggactggcttttctctcactagcatctctttgggtcgtcctgtcctggcaaaagacgcgaggccggcgaggggggcagggcgccctggtttttaattgagcacacgccaaaacacccccgtccgaccgggcggccacgacagtttcttgcggctttctttcgatcccgctcggatgctgctgtctcccgcggaaatccgctccgccgcgcgcgcgcgcgggttcctgtcatttagcacacacaaacttagattaagcgaggtgcttttatgtagtagtactgtagtagtaagtatttttttccccggtgatctgtcgcagtcagaccttcttcgtttgatcctggagaggggattgagtgaggggggactcgcttaaatgtagcgaacaggagcacagacaggaccttgcgtgatggttgggtacgtgtgcagtacacacttcagctcaccgccctgggaccgagagatactgggtattcaggctatccgcaaccgttacctctaaatatttccccctatatcactttttccccctattttcccccctattttttcatctcccgcagcggttccccctaaatactcccctataccccactaccactataaaatatcattttctatatcaactatcaattttttatctactaacaattactcgtggacccacagcacagtgtttagggtgatgaacagtgacacgctagatctgaggggagagagaaggggaccgacacgtagggggcgctgtagggggcaccgctgcggctatagggtgccccctacgcgccgcatgcaaggggagggagcggtgcagcgtgcaccgctgcggctagtctcagatcatcaatcatagacgaacgacacctgtacaccggctactgtagcgaccgctgtcgcgttgtcagtttactgtcggtacagcaacaccggtgtctagagggcggctgatgcagatttgtcagtagcccgtcagtgtcatgattagtaagtcataacctacaaaaaaaaaatgggatgcatagatacgcatgtcaaggcgcatacatctttctgacaggccgtttctccgataaaacgggcgctatgatcaggccttctttattttagttttttcgaagctgcaattgactgggcacccgcacctcaccgcaatttctctgctcgcgtatggaagtttgcaatcctattttcattaaaaaattgcgaagtttgtggcatgaccgcactgaggatatatggtttattagtagtataaggatgtgtttggtttgacttttggctttgatttttgccccctaaaagccagaagtcaaattaaaatgctgaatctggaaagcagttttttctaaaagccgactttcttatagtgcaaaactaaaatcacctctggacctgcttttagcagcttttaggtggaactgtgaaaatatatatggaggaatttttagcgacttttagtggttttcaccaaacgatttttagctttttagcagttcacagcacacagtagcttttttcacagctcacagcccacaacagcttttttttacagccacatcccaaccaaacagaccctaaatcatgacatcgagatagtgagataccacgtcataaataacagggacgtcaacgtggtagccttttacactacgtgatcctgatgtgttttcatatgcgtcaagcttaatgaggcccgtttcccctggcgtggcgttagtcgttagatgtctgaaaccatttgtaatttatataattttttggtcaaccggaacaattcgtacgtacgctcatttctagacaaacgaacaaggcccaatctgaggttggtagctgattgtatactcgtaaatatgtatatacgcaaaaacaattgagcatatattccaatcaatggccgaatggcgccgtgcactgccattcgtggatgccgccgggcgaggctgatggatggggacgcaacaacggttcttcacgtacgccgtcggctgctgccatcatcatgttgttggcgtgcggggtgctgccctgttcaggcatcctgcgtatatagatgctttttacattgcttgctggttgtgtgtcgtcggcagcttatctaatgccaaaatccatgttagtatacgcaaggctagctagatgacaaacatgaggcggccgtatggcctatctcaagccccactgacgtgtataagtagaaacagaaaaactggattgctttcgaccgacgtgtcctgcctgcctagggtgatatagaatttaagataactatatatatatattaaaaagtatgtatagacaatacaaatagacaattcatacaattagttgcctgttatactgtctatgcgatttttaattcatttgacagtcattaagagatccaatatacaagttgcattgaacacggtcgaagtagccatacattattggttatcttaacgtctcttaacgttggaacatgggacaaagccgtcaccacacgtccacacgagagaacaaccgaccgaccgatgactctctctccttaattagcgtacacgttggatttttctgtttagttattgcttatgtgccctcggtctgaactgaagaacgttacttccacgcgggttacaacaaaaagaacttttagatagtgtttggtttcgaagttagatgggaccgaaccaactcactcttaatttgttgttgtttgaattgattcgagtatcttaaaaaggaaaaaatatttttaaatgatgaatctgactcttcaagaaaaaaaaatagacggaacagctccctggcatagagccggaccatccccgaaatcaaacactagaccacgtgtctccgccttcttccctgcccccgcacagccacctcgcacgaagtccttgctgctagactggagacgatgctagccgtagccgggaccgccctcaacgacgcctccgacgcgcgctcatgctgctttgaagacggggcaaccagcgactggtgatgattactagaatgatctacaatgagcttcaacaatgttttccttcaggcccttaatccgatcacctaaatctggaactgacgggacctagccccccggcacggcccaactcaaacccccatcagaatctagtccactggattctgccgtgcaacacactggtgcctagactttgctgcgcaactccctccctccctccctatccatccacggcccacggcccaccgatttgggggaaaaaaacaagtacggtacccgcaccgattaaaccgtgcttcttgcttcccgctcccctcccctgcttggcttgactgcttcatcacaccctgaaatttcgaagggttggcgctggtaaatctgcaatcaaacaatgggacgtgctagtgctgaatagataggactgttagctagctttgcctctagatcgacaagcaagcaactaaaacaaattaaaggacctcgttacgttgtgcagatcacacacatgccgattcttctattgctgctttgccttagaatacgattgtcagtcagaaaaggggaatcctaccaccgtagtccgtagcagtgtgtgtgtcctcaacctgcaacacgtgttgaaatataaagcgtctctgaaacaggtgacaatgcagtgccgtcagaatagatatagaaatcaagtttccatttgactctctgttctgatccatttaactcaattactcatgttactagctacggcctacggcagaatagatatagaaagcgcgtgattacctatcatgaactagtcatgtaggggcgtgataactggtatcatgttggactatagatgttactagccacctatacgatgccataatcttccagttccacatagctggctggttgctaggatttgcaggattgcttttagcttaagctcggacaagcagaacaaactaatggcgatggtttccatcagtggcctctttctttccaacctttttctcaatcgccgtcccactgacaaagtgacaaagacacacaccacacgatgccacacatacatacttttgtttaagaaactttgctggattttttattctacgatacatgtcactattctaggcttctagcaatcaaaaactagtatatgccagaagcaaattctgaccgaactgaactttgcgccagaaggaaaaaaaaaggtatgtttctacacgaagactccggttaggtagaatagaaagaaagtgtatcgcaagtgtgaaggaagttgaatgaggaagtagaacaatacctgaccttgagcttagaaaaacacatcgattcacacatgctgagaaaggaatcaaaatattattgtcgtcaacttggataaagctggaacgacgacatgagacgacgacctaatcaccagcaggcatcactcgcaacaacactgattaccaccatcatgttccttctgtttcaaggcagtatataacaaccagtagcatcctagttaaatcggcgtaccccatgcactacagaaaagtttaaaaccatgaagcatgcttggtaatcagttatcgcacatctcactagtgagagggacataattaccttatctccactgaagaacggaccagaacttccagaaggctctcttaattgggttgggttctggtgctaactgaccgaaaaaatcgtgctttattggtgacacttaccttcgttgatggatctattactactaactaactagctaactagcattattatcggacaactctgatggctgagcaccaccgatgttaaaactcagcgatcagcagtcgctgctgggtgacgcctcagctaataatgctgaagcttgtcagagtgaaagcaacgtgaacatgaagcttgtcaaagttttgctgttctttcattcaacagcgttcttagctagctagtacctggatagtggatatacagtcaccgacaaacagttttgtctttttttacattggaaaagcaggtattcccatgtgtttaacaaattagaaatctatggccaacatttcttcctttacgactagaataacctgcctcgatcgcaatctttttaaggttgtacacttgtactactcactcttagcgaatggtggttcaggctgaggttgctctgtaacaagcattcaagaaaaagtttcgatggccttctattttatttctggtagagcttatggttggagagaaacaacagaatcttcaagggtcaacagagaacgacagaacaagtggtgcagatggtgaaagatcttgtgggtagaggtctgacctgctagtagtgtctgggggcctggccagagggttagattttattcagtggtgctagataggtgttgcttgtctagtgtttttggtgttgacgtcattttttgtgccagtttttgtacagtgtttactccttttatctaatatattggaaggcaattcttttgtctttccctttcaaaaaatgtactactccatttatctgagcattcaaagagaaaagtggatccagcgttgacaaattcctaagcttcggtcgagaatagatttttcgatgcaagtccagcaccgcaaacaatgtctactttcccgatcgggggcacggtatgtgaagcgaagcaactgcatgcgttttggattctctgagtggtccgtttccagcaataagcaaaggagtatgtgcccaactaaacagctaaaaaaaaggtcgaataatctcaacgaactggatggagcattgaactccaagcttgtcgaaacttactttgcgttgtgctaatggtggtgctagtactagtaccatcctagctttgtaaccagctagtacatacgcatggggcttggcaaacacacagagcatcaggcaatgatgaagtcgctcgtctcgtctccatgtgtacaagaggtgtacatcataaagatgaacttcaccactacagaattaatgtttgttaggagtgagagtacgagtacatcaaacataaacgctcgcgttcagcggaggtacctgactacggtaggtgcagccagcgtacctagcttctgctgtggtaagaggcaaactcgtcagtacagtacctcaaactgaacttcccagtcactactgtcccggtacatgagatgaactgcattgtgctggcactgataacactagtgtgattccgtaccagctctagtcgtttaaactactgtgccactggataaaaaagagcagtgcaatggtccacctagctcttctaagatgctgtcgctttttacggtctgcagcagcagcagaaccagcagccagatatcagccctttgcgcacatgcgctagcacatggttaaatgctaacggggtcatgtgtttgcagacctaaagcatatgtgactaaggggctgtttggtttctagggactaatgtttagtccctttattttattcctttttagtatataaattgctaaatatagaaactaaaataaagttttattttctatatttagcaattttggaactaaaatggaataaaatgtagagactaaacattagtcgctagaaaccaaataccccctaaagctattcgcgaaatgttacagacggtttgtgaattagctaggatactaataatgtgacccacaaggctgaataattgattaaaggcataaaaaaagatcgcagaacaacctccttagaagcaaagggggaggaggtcaaggactgatatatagaggggagggaacagtgtggggcctcacgaagcttaacctgcaaacaatgtacgtctttaaggctgatttggtgaccagggataatgaggagatcggaggggattgaggagcccctaaaactgatgctcgctgggttttggagcctcgtttatgaggttcgtttatgaggagcccctaaacgtactcgtagtcgtagcctacaactaatgagtaggagtccacctagttgtatcgtcatttctgtcgtctcgccaacgcagagtcgacagtttaagcaacgtcaggcttctgggcccagcccaacacagcacagcagctcgcgcgggtgacctaactctcctcccacattctgacatggttccacaatccacgcccccgcaaccaccactcaaccgcctccgccacatacccgccgcgcccatgaaatatgaacccctcttctcttcctgggccccgctttatcagcatcgcgccgacgtgtgcgacgccgcctaccgcctcacggcacgtgcccgccctagcccgttaagtaactgccccgcaacaaccgtacccaccagccccactgacgctcgtgccccacgcagtaccactcccggtccgagcccaccgcgtcagtgtcacttgagcgcgagcgtcggtgcctcgcggttctcctctccccccgcgcgtacaaatagggggaggcggagagggaacgagggatagaggagagaggaccgaccagagtaccggacacgcagcgagggggaggaagaaggaagcaagagggaggaccgagcaggcctaggccctagggtagtcccgtccggtcccctgcggtgcaagtccggccggcgggcgggctgactgcctggcgtcggtagggggcgacggcgatctatatctgtcgatgggctactggtgggaccgcgtcgtgctgccggtgcggcgggcctggctcggcgtcgcgtcccgcttcggggttcgccagaccggtacggcgcgagggcgaggctcggcgttcgtcggcggctcccgtacaatctcccgtctgcgctgcgctgcgctgcgctgcgctgcgctgactgaccccgtcgctggttgctgcttgttgcagggctgtggaggctgcggcaggaggtgagcacgtgc

SEQ ID NO: 759 - DNA, 8838 bp, Zea mays
  Intron number 5 from transcript GRMZM2G322139_T01 (locus G RMZM2G322139) derived from phytozome v7.0 (chr-ID 5; pos 2 05680761 to 205689598 reverse strand)
taccacaatatcaagtcattcggtaaggaaggtgggtcagagcataaacatctagagctttacttttacgatgatgatcccagtctcgagcatcggtaccgtaagtgtcgtgaagagcagcttcagaaagacaaagaggttattaaacagatagttggcatactccatggaaacccgtactccgagcaccttaggagcatgggccatgttgagaaccttgatgactatcatatcgcattgaaccttgaccagactttgaaccagaagacatataacacgcctctcacttcggaggtggctgctgtatggatcgaggggagcgaacggcgaggccagttcagcaagagtgttatgctacatgggaaggataggtcaagccacggcattcgctcataccatggatgctacgatgcactatcgtatccactgttcttccctagaggtgaacttggatggcatgcaaatatcccaaaggttggtgtatccatggatgaagtggatgcataccgtgcgacacatagggcaaacaattcaaacgatgaagatgcaggttagttgtttctttgtactttaggatttttgcacattattaactattctttcaacatcactcacttttcaatccttgcgtatgcagaatctcctacccatttatgtgtgtccgtacgtgactactactgctacaaattccagattcgtcccggtgtattcaatccaatacttcatggaaagcggcttttccagcagttcgctgtcgacacgtacatcaagattgagagctctcgtttagattttatacgtaagaatcaagatcgtttaagggcagacctataccagggcttggtggatagcatgctagacggagatatcagagcagaaaaggtcgggaagcgaattgtgctgtctacgtcgtttattggcggtcctcgtgacatgaaacgtcggtatatggatgctatggctctggtgcggaagtttggtaaaccggacatctttcttaccatgacatgtaaccccaactgggatgagataaggagggagcttctccctggccaaacaccgcaagatcgtcctgatcttgtagtgcgtgtctttcatgcgaagctacaggagttaaagcataggctgactaaacatgatattctcggtaaggtccgggcctacgtctacgtcgtggagtttcaaaagcggggtttgccacatgcccattttctactcatcatgcagaggaagtacaagctaatgtgccctgagcagtatgaccttttgatctcagccgagatcccacacaacaagtaccctgaactacgaaagatggttatcaaacatatgatgcatggtccgtgtgggtcgctaaaccctaactgcccatgcactaagggccatgcatcatgcaagaatcattacccccggcctttcagtgacacaaccttgcaagggaaggactcatacccgatttacagacgtcgtgatgatgggcgtaaggaaaaggttcgagggtgcgaattggacaatagatgggttgtcccttacaacccttacctccttcgtctcttcaactgtcacatcaatgttgaggcgtgtgggagcatcaaggctgttaaatacctgttcaagtacatatacaaaggccatgatcgcgcgtctgttgttatgagagatgcgagcaaggtagatgatgatgtagatgagatcaagcaatacagagatgcaaggtgggtgactcctccagaagcgttatggaggatatacggctttgagcttagtcaaaactctccacctgtgatgcaactgcaactccattttccaaacatgcacatggtggcgtttcacgaacggcaaatggtcgagcaagtcgtcaatcgtccaggtgctgataggtcaatgctcacggcatattttgaagcgaataggatacatgagggggctcgtggcattctgtatcgtgacttccctgagtggtacacttggcagagtggtaagggcaaagtatggcaacagaggaagcgtgatacgggtggacaagtcggtagaatagtctctgctcatcccgctgagggggagcgctactatctccgtgttctcctaaaccatgtgacttgcgccacctcctatgtagatctaaggacagtagatggtgtcacgctaccaacttttcgtgaggcagcagagagaaggggactgcttgagtcggacaacacactggatgagtgtctcactgaacgtgctcttttccagatgccatcggcgctgcgacgactttttgccacaatactggtgtattgtgagccaagcgacgtggcggtactctggcaaagacacctagatgctatgtctgaggactatcaacacaggagtcagagtaaaactcatgttgagcagatggtattgattgacattaggaacatgctgcagtcaatgggaaaggacataaagacattccctcttcctcctatcatcgacacgtatgacgatgctattggtactgctaaggaggtttacgaggaggaaagtatcgaaccgacagtgggagatgtggctctcaaagactctcttaacaaggaacagggggccgcctacgataagattctatctgccgttgacactgatcagggcggattgttctttgtggatggacctggtggcaccgggaagacttatctatacagagtgctgctcgcgacgctacgcagccagggcaagattgcagtggcaacagctacatctggcgttgcggcttccataatgcctggaggaagaaccgcccattcacgcttcaaaatacctctcactattgacgatggcgctgtatgtagcttcacgaagcagagtggaaccgcagagttgctacggaaagcatctctcattatctgggacgaggcttctatgaccaagagacaagctgtggaggcactggacaatagcatgcgcgatataatgggtcggcccgaactaccattcggtggtaaaaccattgtcttcggtggggattttagacaagtcttgcctgttgttcgtaaagggtcaagggctcaagtggtcacttcttcgctacggatgtcttacctatgggagtccatgtcccacttaaagcttgttagcaatatgagggcaaaaaatgacccttggtttgcggagtatttgctgcgcctaggcaatggaactgaggacacaaatagtgacggtgatatatgtcttcctgacgaggtatgtgtgccttatagtgggagtgacagcgatcttgacaacctaatagacttcgttttcccaaatctcaacgaaaatatgtctgattcgacctacatcacttcaagggcgatactgtcaacacggaatgactgggtggatatgataaatgctaagatgatcgaacgttttcaaggggagcatatggtgtaccatagtttcgatagcgccatggatgatccacataactactacccacctgagttcctaaacacattgacgcctaatgggctgccaccacatgttttgaagctcaagattggatgcccagttatattgcttcggaatatagaccctgccaatggactttgcaatggcaccaggctggtcgttcgtggtttccaaagaaatagcattgacgcagaaattgtgctgggccaacacgctggaaaacggattttcttgccgcgtatacctctatgtccctccgatgaagagatgttccctttccagttcaaaagaaagcagtttactgtacgccttagctttgcaatgatggttaacaaagcacagggtcagactattcccaatgttggagtgtacttgcccgaaccggttttctctcatggccaactatatgttgctctatctagagcgacagctcgatcaaacataaagatccttgccatcccagccgtcgatgtgaagaagaggtcgaggaagggcgtaaaaaagaaccccacaatagattgtgggacatgcaccaagaacatcgtctacaaggaggtcctaacaaactagacccatggtaagggctacgtgttcagctaacaaactaataggatgtcacacccggatttcgggggtccaaaacccgggcgcgaacataaacaccaggtgtgctgggaccaagtctcacacatatgatgcatagtggcacaggatcgaatgtcacatctttactatataacaggagttctgtacaaaaataattaaataattacatcatatgaggaaacgatccagcaacccaaagttgactgggagacgacggcctagatctctcacgaacacatcacagcatcctccaagcgcctcatcctgtggtacctgttcttgacctgtgtgggggggtgtgagacagcaagagtgagctcacatacgttcatcgctcaacaagttgtggggaataatgtgcatgaactcgccaaaggtgggagctcacgtgaagtgtaaggcttaccaaagaggatggttagagctgagcattgcttttaaagttggtcaaaattttattagcggttactaagtataagtaaataccaacccaattaagtagtagaacagaagtaacaacatcacctgcgatgcaatgcatatgacaaattgagtttaagttccataatttaatcatcagagagtcctgagctgctcatgaccgtgagctcggctagtataccagttttacactctgcagaggtggtaccctttacccacaagtcatgttacccatctgccaagagatcgcgacttcccatacacctctaccgaggaggcgaggcagggtaacactacgaggcctttacaaagttccactagcttcagaaaacccgctacagtttatgggaagttccaatgcaggaatcccttgcaggaccgccatcgcagcaaaatcctcccgagggcctccctacagtgaccactcccctactgcccttgcccctttcgggtaaggtagtcctccactagctttcctaattaatcagccaagggcgtccataaacccttgtggtggcacatgtttctcaagttaagctctatgttccaattaacatttaatgatcttgtcatgaacacaaatagaataacaacataattggaacatagatgtaatgaaatattaacccaaaaccatataaagcagtagcagaactacccaagtgattcaggggtaaacaaggtattcaggatgaacaaactagggtgacctattgggtcccatcaaaattaacctatgcagatcattatgattaatcagaacatgagtaggtaaaaagaagtgatcaagggcacaacttgcctgtgacttgggattccaggtgacaggatgaacttcagatcctcgtaacctcactgctagtcgtagcaatacaaacaaacatgtataggcaaaattaacatcacaccaaacataagaataaactacataataataatctacacgttgctacgagatcgcgggatcgagaactactaagatcggagtcatggttgaggagttatgatttctcgaaggttttatgtatttaataaaagattaagtactagataaattttaatgagactttcatgtcaaaacagaggcactaatggttagacaataatattacaaaaatttaggaactggaatggaccaatttggagttcatatgcattttctatgaattatacaaattctatgaattgttttcacattaaaaactcattttctatatctttttcctgatttcccaagttcctggactacgcctcaaataccagaaagagcagggttcccggcgcaagaaaccagagacccagcgcacagtggagtgggatggcgggttgattctgcgaaaacttggggtctctttagaaaaatgtacccgcgaaggggtatcgtggtatgtgagccgcacgatctaaatcggacgcgcgggattagatggagttccatatgaaccggtattaaactacggccgtccgattaaagatcgatggtcagggttttatgaagtgagatctaataggggtcgaacagatcgcatccaacggtccgaattggctcggaacaatgcctcacgctggatcaaatctgaaccattcgtccagatccgagggtcacacactcatcttctagatctaatcctggccacacgtctacaatccaacggcactgatgccatccagccgaaccggtatccctagatctaattgaggccgtccatgcgatgatctacggcgtgggctactatccccaatcccggtcacggtacccggcggcgcccaggtccgacggtggagaccatgccggagttacggtcaacaggagcctcgatctcgaatcccccacatacacccgtgattaacaaagagcaaggagagacgaacacaataagccacataccaacggtggagagtgtcggcgcgagtggcccgacggtgaatggcggttcggccggaggagcaagtctgcggcgagctattcgtcgggttaaggtgacgcccacgcccgattgccagcccgcgcaggatccccggtcgctggtgaacgtccttgacccctccctggttcctgagccgcaccaatcgatggaataggcaggcggcggcggaccgagttccgcccacggtgcccaacaattccgcggcggcctgaatcgtaatccgggacggtgagagcacggtccccatccctgatcaccggcgaacttcccgcgagtatccccgttggtgaacacgcagtgaaatcaccggtccacgacaccatgcgacattgcggcggtggacggtcgatgacgcacaatcccggcgccatagaagctccctctctactggcgaactcgacaggatctcacagctgggcgcgaggcaatacggccgtgggtgagtcctttttatccccaggtgaccgggtccgacttgctcggaaggagttccgccatacgcggatcgaagacgttggcggccagggaacgagctgggaacacgggcccacattgcggcgacccggagaatgaccagagcgcgcccccggagtctgaccaaagggccccacacggtgatggcaggcgcgtaatttaggggaaggggctgacctgtgggtcctgtctgcagagaggttaggcgcgcacggattcatcagtttgggccacggcgggggaaaggtttaatgggccaaaaacgtctttccaagcccatcaagttctctttttcttttctttttctgattccctctttctctattttcaaatccaattttgaattcaagtttaaattcaaactttatggctcatcatttacactatatttgtgaagttaaaagtaataagtttaaggatatttatattatttatatttttgtatcattcctcttcctcttattttcaaaaccctattgccaaatttagggttttaattccacttctagtaattattatattattatgattaacattattatttaatgcacaaacatataaattccaacatgatgcattttttatcatttgtttggattaatctctaaattttgtgtatgtttttttatgatgcaaatgaggcacataaaataaggaaatcactatatgttccttgtatacaattttgagtattacataggatgatgttcatcttctgtttgattggtctggtgtattatcaagtcatgtttacacgctacaattgttaatgttatagctacacaatttgatattaccagaaaacgcttggaaaatttgatgatttgaaagctggagtactaggacccataactagacatggcttgggggtcggggtagtgactatatcatttgcagtccaagtttaaacatcctgattttattgatattttggttaaatttgggcatttggcttgtctgaataagtcttttgatgcattttgattgagattaaaatgacatttgtatgtactccccgttacttattgagacacttttgtattttaacattcatgactgatgagttgaaaatgattagtttattgccctcaatacatgctgcatgcgagtttggttagttttgcagatgttgaaatagcaaattttgtctattcaagtgtcatgttcattatacttatttcttagactttgtattgttgcctgctctttgctcatgctccagctaatttcagtgtttgatgctactcatagtactaaactgtacatagtctcattcgattttcagttaaattaacatgttaatttggtaccatgattttaaatatgttcattttctcttggtgcttttaaatatgttaattctgactcgctccttgcataactgtagagtattcagctactatggtggtgtactgaagattacttctctactaaaaggtaggagtcagtcagctgctggtcacccattctgagaactgtgtggccactggattcttgtcttgtccttttaaccattcttctttaatggaatggctcacagctctcctgcatattcaagttaacaattacacatctcgtatttttaagcaacagttcacatcatgtattcgccctcactttgaacagttgattaaccctaaaccctcttatgtacgctcttagaacttcaagttgctaatttcttaactaatgaacatacttgagagcagttttctgccaccctctcagaagctcaggcttcatgtttcaaatccatcatgttttgttttatttgtttcattgggatttgagcttctcacaacctcattgtatatataactcttcgctgttcagtgaaatgtacatcattacatatagcttatcatttctctaactaacatctgtgagtcttttttaatggattatatctcattagcttccttttttggcatattcagctgctgttgctcagctcaaaaacttgaactgtttg

SEQ ID NO: 760 - DNA, 19151 bp, Zea mays
  Intron number 1 from transcript GRMZM2G515390_T01 (locus G RMZM2G515390) derived from phytozome v7.0 (chr-ID 9; pos 1 54909932 to 154929082 reverse strand)
attgttgtttattatcgtcggcgtctcggaccccgggggaccctcgaccaggccgaccagtgaatttaacgctgtgtgtccctgcccagatgggttggcgcaagatggaacacaagaggggcaatgtattatcccacgccggggggtgcttgtagtagaggttacaagcgtcacgagagagagagagagggcctgttcgtttgcccgttcccccgcgcgacctccgaccctcccgcaggaagggcctggacctcccttttatagatgtaaggagagggtccagatgtacaatggggggtgtagcaatgcgctaacgtgtccggcagtggagtgcctgagccctgtgtgcatgccaacgtggctgtcggagaagcgcttgagccttgtgtacgagataacgtggccgtcggaggagcgcctgagccctgtagaagcacagctggcggtgcggctgggatcctgctgacgtctccttgcttccgtagggggctgagaaccacctacgtcatggacgcacgcggggaaccatcattacccgtttaccggggcgagccagatggtacgtcggtcttgttcccttgtagcctgagctagctaggggtagggtaatgatgtatcccctgtggcgcggtcggtccaagcccaaggtcgggcgaggcggagacttctcctgaggccgaggccgaggtcgggcgaggacgcgattcctcctgaggccgaggctgaggtcgagccatggggtctggcgaggcggagaccccctcctaagaccgaggcctaaggttgggtgaggtggagcttcttgttgcgcctgaggctgaactcggctgttgtcagccttaccctggtgggtggcacaacagtcggagcggggcgagcggcactgttttcctgtcaggtcggtcagtgaaagggcgaagtgaccgctgtcacttcgaccttgccgactgagacgcgcgtgtcaggataaggtgccaggcgatcgccgcattgaatgcgtctgcgatacggtcggttggtgaggcgatttggccaaggttgcttcacaacgaagcctgcccgagctgggcttcgagcgaaccgagggtgcgcccactgcctgtggaggccctcgggcgaggcgtgaattcgtctgggactacagttccggcccgaggctgggctcgggcgagatcaaggactgtctcgacttttattatatgccccttcgtcgcgtttccgcaaggaggaagggggggaagcgccatgttgccctcagagggcgccgaacatggtgtttccagtgagttgctaacgggtgatccgagtggatgcccgtgccccgttcgataagggtcggctaggggcccagaggcgcactccaaaagtacctgcaggtgatttgccggacccggacccattcaataaggtccgagggctcgatgcctcccactggtgggattccgttacaaaatcgttcctgctggtcttggaaatgtcctagggtacctcaggagcgtagcccgagcctcggccatatagcggacgtacccagagtcatccctcactctgcgtgctctagggcgggtgtcgaacccttccgaggggccagccttcgaacccctgatcagtaatgggctcggagcccgagtgctctggggcggctgtcgaacccttccgaggggccagccttcgaacccctaatcagtaggagggctcgggggcccgcttccttcgccgagaaggattctttttgaaatattccctttctcggtccctgtagcaagagagagaaagaggaagaggaaaaggatacgaatttaaatagtgtggcgcaccttttttgacgcggtcattatggcggaggcgaaacgacgcccgcttcgcctgccaaaggtgtcgcttgccctgccgaggagttaatgcaatgggactggcgattcgcggggtggtcgttgcgcgtgcgcgagccgttcgaggagcggaacacgggcgtgttgtcttcttgccgtgggagagggctctcatgccgcttcaggaggggacgcgagcctgcaggcgatctgaccgctgctttcgcctgtctgttgctgcaattactactggcccacttttggccatatcaaccgtcgcgcctcctcccgcggctgactgacccgtgatcgctgcactcaattggcattgttgggtcacgcgcagggctgcctcgagtcacgacactcgttcctcagtcgagaagacgcgacatttggcacaagcggcggtgcggtttccttgcacgcagtgaccgtcacgtcggttgcatgacatgcgggcccaggccttcacgctggcccaccggatgcgaatgaagccgaaagggtatacaaccgtggtgcggttgcacgcctcctacatggcggcccgccctttcgcccgctggcttcggcgaggatggaggaacgcttataaccgtggggcggttacgtgcttcacgagtggcgatttggcttcttctattttgggtcagctcgcatgacgtgtgggacccagcccccgtgtcgtagggggaggaccctggggcacgtcagtggagacttcgcctgtgacgcttgaggatgcgagtggggagagacgcctttaaaaaggggtcgacctcccgggcagtagccatgccttcgcacttcccttatgcatcgcgcccttccaccttccgtgcccccagatggggcgcatccgtgttgccctcctcttgcagttgtcgtgggggttggcgctcttcagccatcgctcggcttcaaggattttcatcatgcagctcgactgcattccctcaccaatggtcatccatagggatgatcaccagccttgttcaagagggcgcgccgagttggggcctgcccccgtgtgggccggcgacccgcttcttcctccagcattcgggggagaaggacatcctccagctctgcggaggaggcgtcctccagccatgcgggggaaggtgaactgctgctgcctggctagggtgcagcattctgtcctccatccgggcgacggtcgtgccgtgcgcaggtggctgctgtcaccggcctcaccgagggggcgaactccgacaacgcgggtccggttggccgcaagcgtcgtcagctgcagcgtgcctggcatgctggctcagctggctctggcgccgcccgcgaggacttgagtggggatctgccggtgcaagctggggcgaccgccattcatcggtgtggcgctggcgcgcaggtggccgttgtcgtcggtgctaaggtggtggcagccagaggaggttgtctccgccgacgagaccgtcggcggcgcctgcggttggacctccggctctttggctttgatagcttgtcctcgcccctcgtgtggggacgtgggcgagggccttttcgcagcagcgtttgccctgaggtcatcgctgctgctgttgagccgcccgaggcgaaggtcgttgtcgctgctgctggagcagttgtcggcgagccacctagagttcgcaggccctctagtgtggaggttgttcataccgcgggagtggaaccggagtctcgtttgtaatggtaccctgaacatgggtgtttgttcattgtggccactgaggcctgaacatttgggcattttagcgtaatgtcgtgtttttcctcatttcgagcgctaggacatgtttcaaggatgttcatcatccgggctggggaggagggcgcgccgagttggggcctacccccgcgtgggccggtgacccgcttcttcctccagcattcgggggagaaggacatcctccagctctgcggaggaggcgtcctccagccatgcgggggaaggtgaactactgctgcctggccagggtgtagcattccatcctccatctaggcgacggttgtgccgtgcgcaggtggctgctgtcaccggcctcgccgagggggcgaactccgacaacgcgggtccggttggccgcaagcgtcgtcagccgcagcgtgcctggcatgctggctcagctggctctggcgccgcccgcgaggacttgagtggggatctgccggtgcaggctggggcggccaccattcgtcggcgtggcgctggcgcgcagatggccactgtcgtcggtgctgaggtggtggcagccagaggaggttgtctccgccgacgagaccgtcggcggcgccgggcggtcggacctccggctctttggctttgatagcttgtcctcgcccctcgtgtggggacgtgggcgagggccttttcacagcagtgtttgccctgaggtcatcgctgctgctgttgagccgcccgaggcggaggtcgttgtcgctgctactagagcagttgccggcgagccacctggagtttgttatcccgcaggccctctggtgtggaggttgttcatacccacgggagtggaaccggagtctcgtttgtaatggtaccctgaacatgggtgtttgttcattgtggccgctgaggcctgaacatttgggcattttagcgtaatgccgtgttttcctcatttcgagcgctaggacatgcctgtcggctagcggaaccacttaaccgagcatgagttgcttttcgcggaaggtgacgagtgaggtatccgtatcccggaggcgtaagagtccctcggctcagtcggccttgccgtttaaaacctcctttgcttggttttagaacctttggccgctctgcgatgagctgaagctggaggcagcggtgtcagcgtggacggaggcggtgtcggctcgaaaaagaggcttcgttggcccaggagcaggtggcttcccaggccgaggaggtgcagcagcggcggctggagcttggccaggtcatccgcgagcgggaccaatcctgggtcaagccgccgaggccgtgagccaggctgaggtcctcgggggacagctggctgaggcgacggagcggctagccggggtgtctgctcgggccagaacccttgcggagagcctggccatgagggtccgagcgtggtgctggcgtcctgcttcgaggtggagatccttccgcccgtgtcgtcgtctgaggctgggccagattccgccaagggtggaaacgacaccgagggtgctgctgctccctctgccgatgtctgaacctgcaggaacagtttgtctgaagtatgcgtatgtttttcgcggccgctgaggcctaaacattttgttgtcgtgttataaagttgtgttttatttccttttgtttcgagtatcaggacttgttcgtcggtagcagaatcacttgtccgagcgagagttacttttcgcggaaggtgatgagtgagttattcgtatcccgaaggcgtaggagtccctcggctcggtcggccttgccacttacgtgcactcttactcgtttgcaggattctgttatcggtatagtcgagaaggcacgaaagtcgttttctacccgagcgtttaggacttgttcgattgcagaaccgcctaaccgagcgtgagttacttttcgcggaaggtgatgagtgaggtatccgtatcccggaggcgtaggagtccctcggctcggtcggccttgccgtttacgtgtactcttgctcgtttttagggttccgttatcgatacagtcgaaagttattttggtagaaaacttttccgaggaaaattttgacgtagagggggttcccccttctagcccccgagggagggtcgggctttgacgaggcaaggctgatccttccttgacggttagactttatttgtgtatgtaaagaaaacgaggtacttgaacgacttgaaacattttaagggtagaagcgacgtagctgttggatgttccaagcgttgctgtagacctcgccttgatcgttggccagcttgtatgttctgagcttcaaaatcttggcgatgatgaatggcccttcccaaggaggggtaagcttgtggcgccctcgggcgtcttgccgcagccgaagtaccaagtctcccacctggaagcctcggggccgaacccttcgggcgtggtagcgtcgcagagactgctgataccgcgccgagtggagtaaggccacgtcccaagcttcttcgagctggtccagtgaatcttctcggctggtctggttgcttcggtcgtcgtacgcctttgtcctcggggagacatattctaagtctatgggtaggacagcctcggccccatagactagaaagaacggcaagaaacctgtggctcggctcggcgtcgtcctcagactccagaccaccgagggtagctctttcatccaccgcttgccaaacttgttgaggtcgttgtagatcctcggtttaagtccctgcaaaatcataccgttggcacgctccacctgcccattcgtcatggggtgagctatggcggcccagtccacacggatgtggtggtcctcgcagaagtccaggaacttcttcccagtgaacagcatgccattgtcggtgatgatggagttcgggacccccaaagcgatggatgatgttcgtgaagaacgctgaacgccactgcctgctcggacctaatgctggttaagggtcggacctcgatccacttggagaatttgttgatggcgaccagtaggtgcgagaagcccccgggtgccttctgcaagggaccaacgaggtccataccccacacaacaaatggttaggtgatgaatattgtctgcatggcctgagcgggcaggtgtgtctgtcttgcgtagaattgacatccttagcaggagcgtacaatcctagtggcgttggccaccgcggtcggccagtagaaaccttgtcggaaagtgtttccgacgagggcccgaggtgttgcatggtgaccgcaagcccccgagtgtatctcttgcaacagctcttgtccttcggcgatggatatgcatcgttggagaatgtctgaggggctgcggtggtagagctccttttcatcacccactaaaacgaacaacttggcgcgccgagccagtcgccgagcttcgaccttgtcgaggggtagctctcctcagaggagatattccaggaacggggtctgccagttcggatttggcgtgaccccattccgcttcccctcgacgcgcagggcttcaccctcggcgcccgagggtacctcgggctgggccgaggtctcgtcgggctcgagcgcgtcgtcgagtttgacagatggttgatgtatatccctgacagatcatcgagtttgaccatcgtccgccccgaggctattttagccagctcatccgcagtctcgttgtatcgtcgagcaacatggttgagttccagcccgtggaacttctcctccaagcgccgaacttcgttgcaataggcctccatctttcgatcgcggtagtgggagttcttcatgacttggtcgatgacgagctgcgagtcaccccgagcgtcgaggcaccgaacccctagctcgatagcgatgcgcagcccattgaccaaggcttcgtactcagccacgttgtttgacgtcgggaaatggaggcgaatcacgtagtgcacatgtttcccgaggggtgagatgaaaagcaagccagcgtcggctcctgttttcatcagcgacccatcgaagtacatggtccaaagctcggcttggattggagctctcggcagttaggtgtcgacccattcaaccaggaagtctgccagggcttgagattttatggccttccgaggagcgaatgaaattgtttcgcccatgagttccactgcccactttgctatcctacccgaggcctctcggcactggatgatctcccccagggggaagtgaaagtcgcctagagggggggtgaatagggcgaaactgaaatttacaaacttaaacacaaactacaagctgggttagcgttagaaatataatcgagtccgagagagagggtgcaaaacaactcgcaagcgaataaagagtgtgacacgcggatttgttttaccgaggttcggttcttgcaaacctactccccgttgaggtggtcacgaagaccgagtctctttcaaccctttccctccctcaaacggtcacttagaccgagtgagcttctcttctcaatcaattggaacacgaagttcccacaaggaccaccacacgattggtgtctcttgcctcaattacaagtgagtttgatctcaaaaaagaatgagaaagaagaatcaatcctagcgcaagagctcaaatgaacacgacaaatcactctctctaatcactaaatctttgtgtggagttgggagaggatttgatcacttgggtgtgtctagaattgaatgctagagctcttgtaagtagttggaaggtggaaaacttggatgacttgaatgtgggggtggttggggtatttatagccccaaccaccaaactagctgtttggtggaggcagctgtcgcatggcgcaccggacagtccggtgcgccagccacgtcaccaggtcgttgggttccgaccgttggagctttgacatgtgggcccgtctggctgtccggtggcgcaccggacaggccctgtaggctgtccggtgtgccacccgcgcgtgctctgtcctctgcgttgcagtcgaccgttgcgcgcgaagtagccgttgctccgctggctcaccggacagtccggtgtgcaccggacatgtccggtgtgcaccggacatgtccggtgaattatagcggagcacattcccgaagctggcgagttcagagtcgctctcctctagagcaccggacactgtccggtggtgcaccggacagtctagtgaattatagcgaagcgcctctgagaattaacccttttcttggtctttttattggcttattgtgaacctttggcacctgtagaacttatagactagagcaaactagttagtccaattatttgtattgggcaattcaaccaccaatatcatttaggaaataggtgtaagcctaattccctttcaatctccccctttttggtgattgatgccaacacaaaccaaagcaagtatagaagtgcataattgaactagtttgcgtaattgtaagtgcaaaggttacttagaattgagtcaatataaatactcataggatatgcatggattgtttctttctttaacattttggaccacgcttgcaccacatgttttgtttttgtaaattcttttgtacattcttttcaaagtccttttgcaaatagtcaaaggtaaatgaataaggttttgagaagcattttcaagatttgaaatttcctccccctgtttcaaatgcttttcctttgactaaacaaaactcccccttaatgaaattctcctcttagtgttcaagagggttttgatgttaattttgaagagggtataccaatttgaatttatatcacacataagataccaatttgaaaatacttctttaaaaccaaattgaaagactaaaattttgaaattggtggtggtgcggtccttttgctttgggctcatgctctctccccctttggcataaatcgccaaaaacggaatcattagagcccttttgaactactttctcccctttggcaaataaaacgtgagtaaagattataccaaaagatggagagttgtccggagggacggcgaaggatgagttacggagtggaagcctttgtcttcgccgaagactccaattccctttcaatacacctatgacttgttttgaaattctcttgaaaacacattagtcatagcacatgaaagagatatgatcaaaggtatattaatgagctatgtatgcaagacatcaaaagaaattcctagaatcaaggatatttagctcatgcctaagtttgttaaaggtttgttcatcaagtggcttggtaaagatatcggctaattgatctttagtgttaatatatgcaatctcgatatctcccttttgttggtgatcccttagaaaatgataccgaatggctatgtgtttagtgcggctatgctcgacaggattatccgccatgcggattgcactctcattatcacatagaagaggaactttggttaatttgtaaccgtagtccctaagggtttgcctcatccaaagtagttgcgcgcaacaatggcctgcggcaatgtactcggcttcggcggtagaaagagctacggaattttgcttctttgaagcccaagacaccaaggatcttcccaagaactcgcaagtccccgatgtgctctttctattaattttacaccctgcccaatcggcatccgaataaccaattaaatcaaatgtggatcccctaggataccaaagcccaaacttaggagtataaactaaatatctcaagattcgttttacggccgtaaggtgagcttccttagggtcggcttggaatcttgcacacatgcatacggaaagcataatgtccggtcgagatgcacataaatatagtaaagagcctatcatcgaccggtataccttttgatctacgggtttaccttccgtgtcgaggtcgagatgcccattggttcctatgggtgtcttgatgggcttggcatccttcatcccaaacttgtttagaatgtcttgagtatacttcgtttggctaatgaaggtgccctcttggagttgcttcacttgaaatcctaagaaatacttcaactcccccatcatagacatcttgaatttttgtgtcatgatcctactaaactcttcacatgtagattcgttagtagacccaaatataatatcatcaacataaatttggcatacaaacaaatcatttttcaagtgtttttggtaaagagtgtaggatcgacctttccgactttgaagccattagtgataagaaaatctcttaggcattcataccatgctcttggggcttgcttgagcctataaagcgccttagagagtttgtaaacatggttaggatactcaccatcttcaaagccgggaggttgctcaacatagacctcttccttgattggtccattgaggaaagcacttttcacgtccatttgataaagcttaaagccatggttagtagcataggctaataatatacgaattgactcaagcctagctatgggtgcataggtttcaccgaaatccaaaccttcaacttgggagtatcctttggccacaagttgggctttgttccttgtcaccacaccatgctcgtcttgcttgttgcggaaaacccacttggttcctacaacattttgattaggacgtggaaccaaatgccatacctcattcctagtgaagttgttgagctcctcttgcatcgccaccacccaatccgaatctttaagtgcttcctctaccctgtgtggctcaatataggaaacaaaagagtaatgctcacaaaaatgtgcaacacgagatctagtggttacccctttatgaatgtcgccgagaatggtgtcgacggggtgatctcgttggattgcttggtggactcttgggtgtggcggccttgcttcttcatcctccttgtcttgatcatttacatctcccccttgatcattgtcgtcatcttgaggtggctcatcttgttgatcttctccttcatcaacttgagccttatcctcattttgagttggtggagatgcttgcgtggaggtggatggttgatcttgtgcatttggaggctcttcggattccttaggacacacatccccaatggacatgttccttagagcgatgcatggagcctcttcatcacctatctcatcaagatcaacttgctctacttgagagccgttagtctcatctaacacaacgtcacaagaaacttcaacttgtccagtggacttgttaaagactctatatgcccttgtgtttgaatcatatcctagtaaaaagccttctacagtcttaggagcaaatttagattttctacctcttttaacaagtataaaacatttgctaccaaagactctaaaatatgaaatattgggctttttgccggttaggagttcgtatgatgtcttcttgaggatttggtgtagatacaaccggttgatggcgtagcaggcggtgttgaccgcctcggcccaaaaccgatccgaaatcttgtactcatcaagcatggttcttgccatgtccaatagagttctattcttcctctccactacaccattttgttgtggggtgtagggagaagagaactcatgcttgatgccctcctcctcaaggaagccttcaatttgagagttcttgaactccgtcccgttgtcgcttctaattttcttgatccttaagccgaactcattttgagcccgtctcaagaatccctttaatgtctcttgggtatgagttttttcctgcaaaaagaatacccaagtgaagcgagaatagtcatccataataactagacagtacttactcccgccgatgcttatgtaagctatcaggccaaatagatccatgtgtaggagctcgagtggcctgtcagtcgtcatgatgttcttatgtggatgatgaacaccaacttgcttccctgcttggcatgcgctacaaatcctgtctttctcaaaatgaacatttgttaatcctaaaatgtgctctccctttagaagtttatgaagattcttcatcccaacatgggctagtcggcggtgctagagccaacccatgttagtcttagcaattaagcagatgtcgagttcagctctatcaaaatctaccaagtatagatgaccctctaacactcccttaaatgctattgaatcatcacttcttctaaagatagtgacacctatatcagtaaaaagacagttgtagcccatttgacataattgagatacagaaagcaaattgtaatctaaagaatctacaagaaaaacattggaaatggaatggtcaggtgaaatagcaattttacccaatcctttgaccaaaccttggtttccatccccgaatgtgatagctcgttggggatcttggtttctctcgtaggaggagaacatctttttctcccctgtcatgtggtttgtgcacccgctgtcgatgatccaacttgagcccccggatgcataaacctacaaaacaagtttagcgaagcacctctgagaattcctgaaggtgttgagttcagcttggagttccctggtgcaccggacactgtccgggtggcacaccggacggtccggtgcgccagaccagggagcacttcggttatcccttgctctctttgttgaacccttttcttggtctttttattggcttattgtgaaaccttttggcacctgtagaacttatagactagagcaaactagttagtccaattatttgtgttgggcaattcaaccaccaaaatcatttaggaaataggtgtaagcctaattccctttcaggaaggatgacaccatagtaaccggatgagactcgaagtagtgtcgcaattttcgccgtgtcagaattactgcgtacaatagcttctgaatttgtgggtagcggaccttggtctcggatagcacttcgctgatgaagtagaccggcctctagacgagcagtgcatgtccttcttctcgtctctcgactacgatcgcgacgctgaccacctgagtggttgcggctacgtagatcaagagggcttctccagcagcggggggcaccaagatgggcgcattggtaaggagtgccttaaggtttccgagggcttcctcggccttggggtccaagtgaagcgctcgacctttcttaagaggcggtacaagggcaatcctttctcgccgaggcacgagatgaagcagctcagggccgcaaggcatcccatgaccctttgtactcctttaatctttgataggcctcatgttggtgatggccgtgattttctccgggttagcctcgatgccccgctcggagacgatgaaccccaggagcatgccttgggggactccgaagacacacttctcgggattgagtttcacgcctttcgctctcagacacttgaatgtcgtttcaaggtcagagaggaggtcgggggctttcctcgtcttgacaacgatgtcatcgacgtaagcctcgaccgtctggccgatgtgctctccgaacacgtggttcatgcacctttggtatgtcgcacctgcattcctcaagccaaatggcatagtagtataacaatacatgccaaaaggtgtgatgaaagaagtcgcgagctggtcggactctttcatcttgatttgatgataacctgaataggcgtcgaggaatgacagggtttcgcacccagcagtggagtccacaatttgatcgatgcgaggcagagggtagggaaccttcggacatgttttattctacccggtgtagtcgacgcacatcctccatttcccacctttctttttcacaagcacagggttagctaaccattcgggatggaatacctctttgatgaaccctgcagccattagcttgtggatctcctcgcctatggctctgcacttttcttcgtcgaaacggcgcaggtgttgcttcacgggtcgggcttcggctcggatgtctagggagtgctcggcgacatccctcggtatgttgggcatgtccgagggactccacgcaaaaatcttggcgtttgcgcggagaaagtcaacgaacgctgcttcctatttggggtcgagctcggagccgatccggaccttcttgtcggcgtcgttgctggggtcgagagggatggacttaaccgcctcggccggttcgaagttgccggcgtggcgcttcgcatcaggcacctccttagagaggcactctaggtcggcgatgagggcctcggactcggcgagggcctcagcgtactccacgcattccacgtcgcattcgtacgcgtggcggtacgtggagccgacggtgatgaccccgttggggcctggcatcttgagcttgaggtacgtgtagttggggacggccatgaacttggcgtagcacggtctccccagcaccgcgttgtaggtccctcggaacccgaccacctcgaacgtgagggtttctctgcagaagttggagggagtcccgaaacagacgggaaaatcgagttgcccaaggggctggacacgctttccggggacgatcccgtgaaagggcgccgcaccggcccgtatcgtggacaaatcgatctcgaagagcccgagggtcacgacgtatatgatattgaggttgctgcttccgtccatgaggaccttggtgagcctagcgttgccgataacaggatcgacaacgagcgggtaccttccttggctcgacacgcattcggggtggtcgccttggtcgaaggtgatgggcttgtcggaccagtctaggtagactggcgccgccaccttcaccgagcagacctcccggcgctcctgcttgcggtgccgagccgaggctttcgccacttgcccaccatagatcataaagcagccgtggacctcgaggaactcctcttccttgtcgccctctttcttgttgttgtcttggccttttccatctcccgccaggggcccggccttatggaagtagcgtcgaagcatgacgcattccccaagggtgtgcttgacgggaccctggtggtaggggcacgactccttgagcagcttgtcgaacaggttggcccctccgggaggcttccgagggttcctgtgctcggcagcagtgataagatcatcgtcagcggcgttgagctttgcttgcgacttcttcttggccttcttcttcgtgccccgctgggcggacgcctcggggacatcttcctgctgccttccctgaggctgcttgtccttccagaagatggcctcgaccgcctcctgaccagaggtgaacttggtggtgatgtcgatcaattcgctcgccttggtaggagtcttgcaccccagttttctcactaggtcgcggcaagtggtgccggcgaggaacaccccgataacatccgagtcggtgatgttggcagctcggtgcgctgcttcgaaaaccgtcggatgtactcgcgcagggattcccctggttgctggcggcagcttcggagatcccatgagttcccagggcgcacgtatgtgccctggaaatttctagtgaatgccttggccaggtcgtcctagttggagatctgcgcaggaggcagatgctccagccaggcccgggtggcgtcggagaggaacagggggaggttgcggatgatgaggttgtcgtcggccgtccctaccagctggcaggccaaccggtagtccgcaagccacaactccggcctcgtttcccccgagtacttggtgatggtagtcgagggccagaaccgggtcgggaacggtgcccatcgtatggcccggctgaaggcttgcggacctggtggttcgagcgagggacttcgatcctcctcactgtcgtagcatcctccgcgcctggggtggtagcctcggcgcaccttctcgtcgaggcgggctcgacggtcgcggcgatggtgctcgttgccgaggcgatctggggctacgggcatcccgtcccgcgtgcgcccggtgtggaccgaggcctcccgcatgagtcgggaagtcgttgcgcgataatccgaggggcgcccttgccttcaggaggcagagctctcggcccgtcggatcgcggcatcctccaggagattcttgagttctccctggatacgccgcccctcggtggtggatggctccggcattgctaggagtagtactgccgctgcagctagattctggccgaccccgctggaggccgagggcagccttgccctggcatcgtcaacgatacagcgctggacgtcctgggcccgacaacgcgcttctccggcgagtgctcggcctgcccactcctgctcgatgttttgctggagctgcacaagttgccctgctttctcgtcgagcttggcctgcatctcgcggatttgctcgagctgtgtgtcctgaccccccgcagggactgggaccacagctagctcccgcaggatgtcaacgcgaggcgcaggcccagggggatcgtcatcctccggcataccaaggtggttgccttcgtcgtgaccccctagatcgacgtggaaacattcgcgacttgggccacaaccctcgtcgtcaaggttgtggccatcatcagagcaaccggagaggcagtagtcacatgcgatcatgaagtatcgcacggcactgggattactgagtccggagaaatcccaaccggagtcgggaccgtcctcttcctcggaacccgggggcccataggttgagacggccgtcagtcggtcccaggttgaccacatatggtaccccggaaggttagggtatgcctttatgaaagcgctcaccgaagcagggtcgcttggtggatcgaaactgaatctaaaaggcacagggtggaaaacggacggtacctcttgatcgatggacggtggcgaagtcgcgtcggggacggaatgcaccatcatctcaggtacgaggttgacgtccagcaagtccttcgcgagagtgctggtgtcatcagtccgcttggggttggcacgatgcggggaagcgacgcccgtcgttgtctcatgcgcgaggacaacgcccgacatgtcccctgctggggtgctggtgtcgtcgactcgctctggagcgacaaccaacgaggtgctgcctcctgcctggccacggttgccccgtctcctcctcctgcggcaaggagggtgtcgaggcaaacctggatgcagctcttccgccacggggggaagacatcgtcgagttcgccgccgccgggcgagctgacagcagtcgctgtcgcgctgaggggggaggagtaccatgtcgtagctgccgtcaagggacatgaactcgagactcccgaagcggagcagcgtcccgggctgaagaggttgttgaagactacccatctggaaatcaatgggaagatgttcgttaacacgcagcaggcccctacctggcgcgccaactatcggcgtctcggaccccgggggaccctcgaccgggccgaccagtgaatttgacgttgcgtgtccctgcccaggtgggttggcgcaagatggaacacaagaggggcaatgtattatcccacgccggggggtgctcgtagtaggggttacaagcgtcgcgcgagagagagagggcctgttcatttgcccgttcctccgcgcgacctctgaccctcccgcaggaagggtctggacctcccttttatagatgtaaggagagggtccagatgtacaatggggggtgtagcaatgtgctaacgtgtccggcagtggagtgcctgagccctgtgtgtatgccaacgtggctgccggagaagcgcttgagccttatgtacgagataacgtggccgtcggaggagcgcctgagccctgtagaagcacagctggtggtgcggctgggatcctgctgacgtctccttgcttccgtagggggctgagaaccacctacgtcatggacgcacgcgaggaaccatcattacccatttaccggggcgagccagatgggacgtcggtcttgttccctcgtagcctgagctagctagggatagggtaatgatgtatcccctgtggcgcggtcggtccgagcccaaggtcgggcgaggcggagacttctcccgaggccgaggccggggtcgggcgaggacgtgatttctcctgaggccaaggctgaggccgagccatggggtcgggcgaggcggagaccccctcctgaggccgaggcctaaggtcgggcgaggtggagcttcctgttgcgcccaaggctgaactcggttgttgtcagccttaccctggtgggtggcacggcagtcggagcggggcgagcgacgctgttttcctgtcaggtcggtcagtgaaagggcgaagtgaccgcggtcacttcgaccttgctgactgagacgcgcgtgtcaggataaggtgccaggcgatcgccgcattgaatgcgtctgcgatacggtcggttggtgaggcaatttggccaaggttgcttcacaacgaagcctgcccgagctaggcttcgggcgagccgagggtgcgcccactgcctgtggaggccctcgggcgaggcgtgaattcgtctgggactacagttctggcccgaggctaggctcgggcgagatcgcgtcccgtgggtagacgaaaccttgacttgaaccgcgcccatcagtctttgttgtttgtgctgatggtgcttaccagccatgattaggagtgttgggagtacccctaattacggtacccgacaattatctttttgcttttttgcctatcaaagtcaaagttgcagaatatgattgagattc

SEQ ID NO: 761 - DNA, 5288 bp, Zea mays
  Intron number 1 from transcript GRMZM2G140590_T01 (locus G RMZM2G140590) derived from phytozome v7.0 (chr-ID 8; pos 1 15015630 to 115020917)
tacgtcggatcttcgcgtcacccgggtcgaatcaggtggcgttccttggaatttggaaagagctggatcttggatgcgtttgtggtaggaaatgacccttaatttcttgtgaagtggcccgctgatgcgtgcaaagccgggatttgggtgggtagtgttacagaatgagcgaagctagctgttgtggccgtattttaactgtttatgttattggatttagatatgatagagctgaagttaatctctcctatttcgtttatcaaacggcatttagcatttgtggaattagtatttatgttggggtatatgatgaagtgatgttagcttaccttgttcgaggagtttaatatgtggaagagaggacgactatcagagttctatgcacctttcttcatgaaggggagagctttgtgcatcctttgttcataaagtagctgggataatatcccttaaactaaaaaaggaccataaccatcgccttggaagtcatagagtagtagagcttaggctcataaaaaatatgttctttcacagataagaactgacaaatatttgttgagtaaatttcattgaaccaccacatagatgatacaagtgggtacccaatgctattttagttcatctctccccaccaaaattagttattacatgtcatgctgttttagttcacttcagaaagttttgatcaccccagtgaacccagcaagtggaccttgcatccctaaccccagatccttgtcttaactgggaagactgaagccaaatttatttcaagtcagctcgtttcttgttttgtaaaacacgcacgaacatactctgtggacaatggggtgggtgggtatgttatatgtttatcttctattaatgtaaatacacaattctcctgtgtattcacagaaaaagaaaagaaaaccagactcatgtcttgccaagcgaaactaccactggttttggcccccttccacaaactaccactattctcctcctacattatcctgagcagtgagcatctgagccaactcggcagtgtcacatagtgcaaaacagagtaaaacaaagtagtggtaaaatgtgacaatgacaagtgggcccaggtgctgaggatactgtaggaggcatagctttatgagaagcgcccaaagtagtgtggttctgtgaaatggccttcagaagttatgtgacagttaggacagaaatgtggtagttttgggaaatttactctgatttgtttgatgatgattattgagcacatatctgcctgccatatcccctagattttgccctgcactctataatcatgtgatattgattagcatcagtagcttcggttttatcttttctttgtttgttatgtatttcaccagtagatttaagtatccctttatttatttatttttcttgaaagcgcaggagaactgcgcgataatatattaaagaagaggggcagatacaagaacaaactgggggcccctacggcggccaataacaggcatacagaaacccatccatgactaaaaaactaacaagaactaccacaatgctagctaactagcagggaggcccagaatgggggcggtgagcaaagacaactttgcacaagccatcttccaaaggtcaacctccaacccaactcttctaattgcgtcagcaatactggggctcttactgtcaaatacacagccattgcgctgcttccataaggtccaaactcccagaatgactagagaattgaggccatcccttgcaattccagagtccttagtgcataacgttctccaccattcaaggaaggcactatcctcagattggggggcaagaagctgaaggttcacttgaagaagcagtttgaaccaaaattctcgagcaaaaacacatccaatcaacatatggtccaaggtttcttgatcctggtcacataatggacatctctccggatggtccatgcctcttttctgcagcctataattatatgctgtccaaaccttcctgtgtgcgaccaaccacataaaaaacttggtttttggaggagcccaagttttccatattctatgaaaaggctcaaactcagaagatcccataaagaaacccctatatgcttcctttgaggagaactttccgtttgaagctaggcggaaaaaaaatgcttgtcttcaacttgaggtcttagaacaattgagtcaattaaatcccacaagatgagaaattcattgataattccaacagaaagagctccctgaatgtcagaaatccagctctgattagagatagcatccaccactgttctcttgttaacccttctcttaggaaaagtatccctttatttatcacttaattcttccagtttaaaaaatcagctgtattaggattttaggtagtcaaatttctttaacttagcccatcaatacatgcacagttacataagttgacaacacatgattgattttattagattttttgtagaccaaggcatttagccctgcttattttgaaagcatcacataagttttgctggggataccagtttacaagaactgcggagcccagttaaaactcacctccactaaaagccaacaccaggccctacccaaccagagaaacactaacaaaacaggtaggttgctacaacgaaaaacaaaaaggaggaaaccacagcaagagagaaattctgaatagcaaaatgaaaagaaggaacagctaagccacagatgctttgcctttagcctcctttttcttcatgtcttttggcaaccagacgctcctagttgtttgacaccatctttccgtctaggcacatttcactatcttgaaagtccatcctttatcttcaacaggaattcctccatcttgtctctgtcttccttcttcgtcgtcatctgccactggtttagaaaaccaagacattgaagccacttgtttaggagatttaagcatttttttggagaaaactagaccatttcttgttttccacaacacccaatccacaccaactactatcacccacaaggacttgttcctatctccaccatctttgttcaggcacagctcctggaatttatcaacgatggtggtattttcggccagcccaagctgtcctgacccagcaccaggccaccatcgctataaggcatctgaacagcagatggtccacttgatttttactagatagcatataacttccactatttcgaatgatatatcactacaaaaatcacaagtaaaagtgtcacattggagactgtcactttcttaaatgacttacatttggaatcagaaggagtactatgtttttagattaaagtccatatcagtgggaatgggatggtcaaactttgctctgagagactagatattcacattttaatcacgtgaaaaaacaaaatatatacactgttgcattatttggtgggcttagacactattgtacatcagtgggatatggaatgtgcatattagaattgttatagtttgttagttgcgtagttaatacatgtatgttttcagttatatatattagacctttataagaaacacaactctgtatatttgcaagtatggaacgtggccgacaatattattttacaccaggaggtgccttagcagcacaggtggcgccttagtctggttcctgttctagtaaggctgcatacaatgcattcttctttgtgtccatcaagtttgtgccttggaggagaatttggagatcctcggcaaccctggggtgtaaattttttttgtgtcttgctgtcaaaaagtggtctggatggctaatcaaaattgtacaaacaatattgtacaaacatagtttaacgcatcctgctgctagcttattgtgtgatcaagctgaagagaccatcctgcatattttagtttcttgtattttcgctcggcaggtctggaccttggtattacagaagcttggacttgtggcactagcacctgattctgatgtaacaagtttccccagctggtggtgtggtgctatcaagaagatacctaaggacgtgaggaaatgatttaacacttaaattatcctggtagcttggaaaatatggaagcatcgaaatgcatgtgttagctcaaacgtgcaaatggttttacaggcggtgggtactgagagaatcctttggtgctctccaggagcttctgctctttaggagctgctcccccccccccccttcagattaggtttgagttttcctggttgtggttatttgtattttttttaggtgtgggtgtgtgagtctcaaggttttcctgggagaaggttccatgccctctccccctggtgttctttcttccatcttaatgaaatgacatgcagctcttctgcatggttcgagaaaaaaattactgtaaggtatctctatctaatatcagaagcaatatggtttcttctagaaaccttcttgaactgtgcacatgaacagccatgttgtcccctgtctttccgttatcatccatgacgcttggaactagagttgtttatgtgcaaagttcagaatctatcttttgtatgccttctatgatccagtaagaatcaaaacacaattcacattctatcaatgcttactggtcaaacagtccatgtaccaaacggcaaacctcttactcatacatgcatgcagatgcaggcggcgtgttcgagcccaacacaccacatcattagagcatttgttttacaaaagaggctgccatggcatttttttatgaaagaagagatctgtgaggggaaaggataagctgtgctgtgtgcttgagcacatgagtctcatacgttattaggctgggagtgggagcgctggttgaggttaaagtgtgctggaccaggaagtggtggcccaagttgacctttattcattttattgtattacttttattgttctctttaaaacatgtaatttatgtatagcccaataaagatgtgcatcaaccagttgcttggaccctgggtcatcggcctcataaacttgggttgggtttgcataccaagtcctaaattgtcattaaatgatatattctattttctaaatgttgacagtaagatcgttactcttagcaacacatgggtatgtttgctagtaaagataggtgctaagtgctctagatcaacttattccgaaatacttgatgcaccgaatttcttttagttttcatttactgctttaacttcgcattttcggttgtagttcatcttgattatgttgaaccctttaacccggatgtgacctaactctagactaacttctgctttagataaatcaaaaccacagggtggactagactctaag

SEQ ID NO: 762 - DNA, 3501 bp, Zea mays
  Intron number 2 from transcript GRMZM2G049155_T02 (locus G RMZM2G049155) derived from phytozome v7.0 (chr-ID 7; pos 7 4121414 to 74124914 reverse strand)
gactacgggccctctgacagcagcggtgagtgcgggggagctcgtgctcgtgtccgcctccttttagggtttggggttctactgctatggttttgcttgcttcatctccttgttagcgaatgccaattacttgtctgtgaaggtgggtgggctacattgtcgcttcctcggtgtgattggatggatttgggagctagggtttgagcttgcctgacatgaagagggctttagggttagagttatgcgaaattcacctgttttggaaaataaccaaacatcgtgggaacttgggtgttgtggtgaattcttgctcaggaatattggtctctgtattagtgaattgagtttctcatggtcggcagatttgggggtttatgtataattttcagtttttgggattacttaaacacaagctgccaaataaaactgcaagatttccttcatatggagtgaatttcgctgtttcaacctcatttatcattttcttataaacattgaattgttctggacagctagagaattcctcctcccattcactgtagagccactgtatgttattgtagcaaggagccttttgcttcccgaggcgaaaagttaactagaaagaggagtcgcggaaccacggtttgtagctacaccagcttcgtgctagtgttctacagtggcgtatccagagctgccaggagctgcaccaaacggcccttaaggtttactacctgggtttgaaaaatgacaatttttaggtgcatttagcatttgtctttggattagcagccaaagcatgtttgcataatctttagatgtataacaacttaaggattagggtcataaatgtcatatcctgagcttagagcctgattctttagctttcatgttctggaaagaatgataagtacctatcataatgtcatctccaaatagccagagtaataaagggattgcagataaaatgaagtacctgaggttgccaatctggtaactgatgatgtcttgttatattgcttattgctctatattgtgggaatttgtttgtgattatcactattatgctttatcttagcatatcctataaacaagaatttaagatttctggaaggaatgccacaaatggatttttaatagttacatcaatgtattgactgaggcattgcgaatagttctttttttacggcagtttacattccaacactgcccaagtgatttgatgcaagtacttcgtaggggccaaccaactgaatttcgatgacctatcttgttcctcgtctttgtttgattcttgatttatttaacaaaatctatccagctgtttagcctatttattgttgtgagctgtgtccaatctgtcacataagctgaagtatgctgttaaaaatatggtgctttttaatttcttaagctttttgtaggccttgacttttggtagaaattgcaccattttgctatattggagatttcttcacttctttatttgtttaatggaataagtccgcataactctctgacctttagaggcagtgttattaaactatgtttaaatgacgtttaaactacgtttaaatgtcaaaacgctaattggaggttgaaaccacgttttggcgttctaaactgtaaaacacagtgtttcatgtgttttagaccattagctatttttgggcctagtctgttagttacttttaggtccaatctggctcatgggtgaagttttggtaagccactaacctatctgttttggtatttaacttcatgttattgtctgaaattatgatatattggtatttttcctatgttgtttaaacatttaactcaaaacttcacctatgagcgtttcaacgttttatcgttataataaccttgtttagagggtggtctacttcatctcttcacctttaaaactggttgtttaactcagctttataaaaccaaacaaataaccctctgggcagttttagttagcggttttaatgacgtgacactaatttaagtggcaccggttttgtctttttagttatgtcatcttatagtatccaaaatttatataaatttacacaaaaatcggcaattagatattatattcgttctaatttttctgaaattttagaagtaacagattaattactaaaaataaaaactacataaaaagaacttaatatttttttgtctccgattcatttttatcttcaaaggttaaaaatttactatagctaaacaatactattactaaactactataatttttgttgatattattaaggaaggtaagtgatctttcttctaattactaactaaatcgattgtacatttgtttttttataaaaacttactaaacagtaataaaatgacctcaattttttacataaaccttatcctagctaaattaacatacacaaatgtttttattttttagagaacttcgaatctagacccataatttacataatttttctcaactttatatgagtctagatttaaagttgccataaaattttgaaaatatttgtatatgttaatttggctaaaagaaggtctgtgtaaaaattagagatcattttattactgtttttaggtgtttgtaaaaacaaatgtaaatttaatttagttagtaattataaagaaaaccacttaacttgtttaataaaatcaataaattttttattagtttagcaatagtattatttagctctagtacaatttttagtctcataagacaagaagtgaatcagggacaaaaatattaatatcttattatatagtttttgatttttagtaattaagccgctacttataaaattatagaaaaaatagagcaagtataatatctaattatcaatctttgtgtaaaattatataaaatttggatactagtggaaggtagaattgaaaaagataaaactggtgccacttaaatcaatgtcatgttataaaaaacgccaactaaaaatatctaggtggttatttgtctgattttataaagttgagggggttaaaagttaaaacaaccgggtttgaaggtgagggggtgaagtaaaccacactattcctttgttttattgatcgcagtgagtctcagtccttggatattgcactagtcccgattcatgaaaaacttcatttgctttgttgtaactgttacaatttgatctagttttgggaactgggataaactgataaggttgaatggtttggtgtgtaaatattatacagtatgacttctggtgcagatttgccaatgtgtttagggaagtgtgaaccacttcaatttgtttccacagaattagtttgtgatgtgaattcaaaagtagttgctctctagaactgataggtattcttgttatgaacactatataactgttatttctaaatcatcaaagtatatttgtcttgttcgcaagatcagtttaaaatgtgatctatttgtgtattctgttagcaccatggatttttttgaagctgctgttgtcagtaaatgttgcgtcctcaattctttgttggttgcaggaactg

SEQ ID NO: 763 - DNA, 11164 bp, Zea mays
  Intron number 3 from transcript GRMZM2G093022_T01 (locus G RMZM2G093022) derived from phytozome v7.0 (chr-ID 10; pos 98221197 to 98232360)
tggtaaaagtatacacattcatcttggtctttttgttttccttctgagagcactactcatggaagacatgccattgttagcagtcttgactgcgccatgcaggcagtccctacaggctggcgccatctctgtccctatcagccacataaggacagccatctgctgattggttctgattaggacagctagagatatgtagagatatgaggggatcctgattgttatgtttctatagctagagaccctgattggttatgtttctatagctagagatgtgaggagatcatgattggttctgtttccataaaccacacagatctcctccctatatatatgtaacctttaaccctcatatcatcaatcaatattcagcagttcatctgctttcatggtatcacgagtctaggttcatttctactcaccttccgctgtctagcgcgctcacccgacgctgctacggctgctgctcctgcgcgccgtccatggctagccaccagcccccttctcccagagtcgacgacgctgctgcggcagaggctgctctgcgcgcgcaggaggagagggctgctcgtcttcaaactcgcgagctcgcccttgcgcgtgcccgcgatgctgaacgcgaggcggctgaggccaccaaggagcgcgacgcggtcgccgcccgcatccgcgacgctctcgcccgggccgcccaggcccgcgccgctgctgatcctttggacgaggaggtcaacaacgacgacgcctccaccattcgtgacgacgctcctgacgctcgcacgcgtgaagctcttctccttcatgaagccgctgcgctcatcaatctgcacgctcaggcggttgcagttcagaacatcagggctatcattcccgtcctcctcgacgtgtcgtccaccctctacacccggtggcgcgacgccttcctgctcgccgtcggcaagtactccctggaaggccacgttctcaccgacgactacgcacccttctctccagattgggtgcggatggattgcgtcgtcaagtcttggatcgtcggcaccatcaccaccgagctagccgacgccgttctcattcgcgacgtctccgcccgcgccgcgtggctcgccatagaatcccagttcctcgggaaccgggagactcgagctctcttcctcgacgcggagtttcgcaacttccgccaaggcgatctctccatcaccgactactgtcgcaagttcaaagggatggccgatgccctcgatgatcttggtgagcccgttcccgaccgcactctcgtcctcaacgtcatccgcggcctcaacgaacgtttcagcagcatcggtcttcatcttcgacgcggacgacctcttcctaccttcttggaggtacgaaacgatcttctcctcgaggaacttaccttggcacatcactcctcgacatcggccaccgctctgctcgcctccggaccacctaaggcgtcgccgaacaactccaagccgaagcagcagccgcaccagcagtcacggggcaaacgtgctgggaagaagggcgggcgttcgcagccaaacgacgcagctcccggtggcttcttctccggcccctctgttggtggacagtggccgtcccctgtccgtggacagtggccgtccccccacaatccgtggtccgggtccatccacatgtggcccggcccgcgggctccaggcgctccttcgactcctcgccacgatgctcagcagcagccacccccgctgccccagtccctactcgccggtgcccaggggcagtggtctgggatccagcagccacttccaccatggcctgggagccagcaaccgccgccattgactacccagcagcagtggcaagctccaccgcctggcttctacagctcgggcgctcctctcccttcctgggatcagcaggcgctcctctccgacttcagcaccatgacactgcagccccctcagcagcgtgagtggtacttcgactcgggcgccaccactcacatgtcctctgatgctggtactctctcccagtccactcctacgcagcttccttgctctattattgtcggcaatggtcattccattcctgttatttctgctggtcatgctgctctttccaattcccttcgtcttaacaatgttcttgttgcacctaatctcattaagaatcttatttctgtgcgccagttcacttctgacaataattgctcagttgaatttgacccttttggctgctctgtgaaggatcttctctctcggaaagagatcgtccgctgtgacagctccggtcctctctacccgctgcggctttcagcatccacctttcatgctgctgtttcaccatcgctctggcatcaacgtcttgggcatccaggtcgcgaagtcatgtccaaactagcacacatttcggggatttcttgtaataagaatgctactactgatactttgtgtcatgcatgtcagttaggtcgtcatacttgtcttccttttagtgtgtcatcatcccgtgccactaaaattttccagttaattcactgtgacctatggacttctcctgtgttgagtatttctggtttcaaatattatctggttatacttgatgattactcacattacctatggactttccccctacgccttaagtctgacacatttgccactcttactcatttcttctcctatgtgcatactcagtttggcgtccccattcaaggtgttcagtgcgataacggtcgtgagtttgacaactctagtacccgcgctttcttcctcaccaatggtgtccatctccggatgtcatgcccctatacttcgcctcagaacggcaaagccgaacgcatcattcgcaccattaatgacgttgttcgctcccttctttttcaggccagcattcccccgtcttactgggctgaggcactcaacaccactactcgtcttctcaacattttgccaaccaagacacttcgtttttccacccctcaccaagccctcttcggtacagctccagtctatgaccatcttcgtgtctttggttgcaaatgctatcctaacttgttagccacttccccccacaaacttgctcctcgttctgttttgtgtgtcttccttggttattctgatcatcacaaaggatatcgatgcctcgatattcactccaacaagatcatcatatctcgacacgtagtctttgatgagacttcttttccctttgccgaacagtcatccacacccactgccgaggatttcgagtttctcttagattctcaccctgccgtgcctgctcctattggatcagcacgtatctgtctccttcctgcaggtataacagccacgtgcggcccctgtagcagcagtcagcagtccgtgctccaacgaccagctgctgcccctgcctaccgccgcacctacacctgatcctggctccgcccggacaaacgacgctgcacctgcagtcgttgccgaccgcgccccggatacccagccgggtcccggccctcgatgcttcgacggattcgtctacactcgtcgttctgcgccagctccgactgctgatgctactccttcaccgcaggcgcccgctgcaacaacgcccgttgctgcacccgctgcaccgacgcctgttgctgcttcttcgccttcagcagccgcatctcagctcccacccggcgctgttcctgttcccccagtcgtcaaccatcaccgcatgactactcgagcaaaactggggtttcgacagccagctctatttcacgcagcacaactctcacctgtgccacggacctatcgagctgctcttgctgatcctcactggcgccaggccatggaagaggagttctcggctctcttggggaacaacacttgggatcttgttcctcgtcctccggctgccaatattgtctccggcaagtgggttttcaagcacaagttccatgctgatggttctcttgagaggtacaaggctcgttgggttcttcgaggtttctcacagcgtcctggcattgattttgacgagaccttcagtccggttgtgaagcctgctacagtgcgcactgtgttgactcttgcactgtctcgcaactggcctgttcatcagctcgacgtcaagaatgcatttcttcatggcactctgtcagaaacagtatattgctcccagccttctggttttacagattcagctcaccccgacttcgtatgccggttgaatcgttctttatatggtctcaaacaggcgccccgcgcctggtacagccggtttgcctcgtttctgctctcacttggttttgtggaggctaaatctgacacatctctgtttgtctactgtcgcggcactgacttggtgtatctcctgctctatgttgatgacattgtgctcacagcctcatccacagccctcctacggcgcatcattggtgtgactaacctgattaggcgagataatcacccccacgggtactgtagcatatatataggcatataggcaatatgggccttatgggccttaacaccccctgtcaaactcaaggcggaagtggaggatttgaagcattgagtttgattagatgaaactgatgttgtgccctagtttgtgcttttgtgaagaaatccgcaagctgtaattctgagggcacatattgaagatcaatggtcttctgatgacaatgagatctagtgaatgagacatcaacaccaatgtgttttgtgagttcacgcttcactggatcatgacaaatttgtatagctccagtgttgtcacagcgaagaagtgtaggcgagtcacaagaaacgcctagatcagccaagagccaacgaatccagataatctcagcagtagtagtagccagggctcgaagttctgcttcagtactagatctagatactgcggcttgcttcttggatttccaagcaacaggggatgatccaagaagaatacagtaaccagtggtggaacgacgatctgtaggatcactggcccaggtagcatcagagtaagcatgaagctgaagtggggagtttgagtcataaaataaacattgtgtttttgtcccccttaaatatctaagcacacgaagtaagtgcccgtaatgaactgatgtaggagcagagacaaactgactcaagatgtgaaccgcatgagcaatatctggcctagtgacagtaagataaactaagctgccaacaagatgtctatatcgagatggatcctctaacggtgtcccatcagtcggacgaagagataagtgaagatccataggcgtggcaacagtgcgagtatcagtaagaccagaacgatcaagaaggtcttgtatgtacttggcctgagaaagataagtaccattttgagtctgcaaaacctcaatacccaagaaataactgagggcccccaagtcagacatttgaaattccttactcagatacgccttcacatgagcaatatggtctggatcatctcctgtaatcaacatgtcatcaacatatagtaatagcaacgtgcgtcctcgtgaagaaacatgaatgaacaatgcaggatcatgatcactggaatagaaaccacaagccttgatgacagaaacaaatctctcaaaccaagcacgaggggcttgtttgagaccatacaaggctcgacggagacgacatacatgccctgatggaacctctatcccaggaggtggatgcatatagactacctcatgtagatcaccatgaagaaaagcatttttgacatccatctgagagatagtccaagaagatgaggctgcaacagcaagtaaagctcggacagtagtcagatgggccacaggtgcaaaagtctcatcatagtcaataccctgggtctgttgaaaacctctagccacaagacgagctttatatcgctcaatagacccatcagatttggttttaaccttgaagacccatttgcacgtgataggtacaacatcagcaggtaacggaacaacatcccatgtacatgtgcgatgaagagcatttaattcatcagtcatagcaagctgccactcaggtataccagaagcctctttataagatgatggttcagcaatgactgcaccagcacagggaaacccataacgttctggagctgcaatattgccacggtcacgaagatgatacccctgattaaaaacaacatgagagtcatcattgttagtacaagtatcagtaacagggtcatcatcaggactggccgtgggagtagagcgaggacgacgaatgtaagtctgagtgacaggtggtttggaagcgtaagactgagatggtgtggaagtagaaggtggtgtgatggaaataagaacatctggggtagaaacagtaggtggtgatattgatgaagtttcagaaatgggaggaaggctcatgaaggaggtagactctgtggaataaaaagaagaatgagtggaagagttgtaaaagaagggtcggttttcattaaagctcacatctcgagaaatacgcatgcgacgagaagatgcatcataacaccgataacctttatgttcagggctgtatccaagaaaaacacactcaacagattgagcagtcaatttagtacgttcacgaggtgataataggacataacacgtacatccaaaaactcgaaggtggtcatatcgtggaggagttccgaaaagaacttcaccaggtgttttgccagagagtttggatgacggttgtctattgattaggtaaaccgcagtagaaactgcttcaccccaaaagtgtgaagggacaaaagaagatatcaacaaagtgcgagcagtttctataatgtgacggtgtttgcgttcagccacaccgttctgtgcatgagcaccagggcaagaaagctgagcaagagtaccctctgaagtcaaaaactggcgaaaattatcagataaatattcaccaccagaatcagaacgaaaggttttaatatgagtggaaaattgagtgtgaatcatgcgagcaaaggttttataaatagaaatcagctcagagcggcgtttcatgaaataaatccaagtgtagcgagaatgatcatcaatgaagatgacatagtatttatatccaccttttgacacaaaaggtgcaggaccccaaatatcagagtgaaccaaatcaaagggttcaacagaatgagaatcactagtaaaatatggaagttgtatttgttttccaagatgacaacccttacaatgaaaatcagactcaaccgaagtatgacctaagcaacctgactttattagagtagacaatctagatccacacaaatgacctagacgatgatgccactgggcaaaagacgcaacagaagcaagggtagctggaagcacatgcgctggagatgtagccaaggaaggaagtcgcaaagagtccaagatgtagaggcgaggagcggctttacggcgacggccagtcccaatcacttcccctgtgcgaaggtcctgtacaaaacaagatgagtcatcaaacccgacaaagcaattatgatccgtaatttgacctactgaaagaaggtccatagatagctcaggaacaaagaaaatattgggtactgtaaagtgtggatcagaaagagagcccttatgagtaatgtggcatacagtaccatcagctgtctgcactgaagcaccatctgtgaccggtgtagtagaagccaactttgattgatcaaatgtgacatgaaaggaggctcctgaatcaagtacccaggccgactctgaagtacaagcggacgaagtggcagcaacagcaactgagcctctagtagatggtcctggaccacgaccacgagcagcacgtcgtgcacggaaatcagtcaacttctcaggaaacttgacaaaacaaagctcagatcgatgattggtcttgccacaatgatcacaaggcttaaaaaatgttcttaggtttctgggcagcagccaacacactgtgaggattaccgccagtagaggacagagaattaagacgagtctcttcagcaagtaaatcagacaacgccttagccatagtgagagtgtcagagccctgaagtaaacgagcacgaagggaatcaaactcagcccgaacacccataacaaatctgtaagtgaagaacttctcaataaacttatgagccggacatggatcagtagtacaagcaggcaccattgatgtcaaagcactcatcagacgatcaaaggctgagtagtactcatcaatactcatatcattttgctcaataacatgtgtctgctgcatgagggtatgtaataaagcaccactgtcctgaacaaaacgctctttcaaatgagaccagatggctttagcagttttgaatttagataaactcataatcatagacggtttgacgctgttcaccatagcagccatcactttaccatcattaagctgccatgttttgatatcagcagcattgcgacgatcatcagcaagaacgggtgccgcatcagtcaaatgaaagagtaatccatgtccccgaagtgcagtctcaacacagaaagcccactccggataattttgaccatcaagagtgatattgaccacaatagcatttgtcgtcatattgaattgaatcaaaatcaaggagaataggaaacctgagaccaaagccctgggagcagcgacgtcgcagatccacggtcggtgcagatttccggtgggagcagcggatctgcagccctgcgtgcaacgacagcagacggggatccgcggaacttgtcacaggcagtagaacggcgcaggcagagatagaaatctgcccctggcgcactgcccctggcagcagagggagccctgcccctggcgcactgcccctggcagcagagggagccctgcccacggacacccctggcgcggacagccctggcggcgggagccctgcccacggacacccctggcgcagacagccctggcggcggcggacacccctggcgcggacagccaggcggcggatccaggcggcagatccaggcggcggacggcgctgagatggggaagatccgccctggcggcggcggatggcgcactgcccggcggcggacggcgctgagatggggaagatccgccctggcggcggcggatggcgcactgcccctggcggcgaacaggaagctgccggatctcctggcggcggatcgaggacggggacagcgatggcggacaggatgctggccgcgattggcagcacagcgacggcgcgacggcgcccaaaaaagtggatcagggccggatttagactaaaccctaaccctaacctcctctgataccatgtgactaacctgattaggcgagataatcacccccacgggtactgtagcatatatataggcatataggcaatatgggccttatgggccttaacaattggaactcttcagcaggagttttccatgaaggatctcggcgagcttcatcactttttggggatgcaggttcagcgcactccgagtggcatgttcctctctcagcggcagtacatggttgacattctgactcgcgctggcatggccgaatgcaagccttgctccactcctgtcgatgtaaatcccaagctctcaggcacagatggtactccagtcactgatcctacggattttcgcagtttggcaggggctctccagtacctgactttcactcgaccagatattgcttatgctgttcagcaggtctgccttcatatgcatgatccccgcgagccccacctcgctgctctgaaacggattcttcattatgtttgtggcactctccacctcggattgttacttcgcccctctgcgcaaactgagttggtggtctactctgatgctgattgggctggttgtccagatacacgcaagtctacctcgggctacgatgtgttcctaggagacagtcttatctcctggtcttccaagcgacagaacactgtctcccgctccagtgccgaggctgaatatcgtgctgtcgctaacgctgttgccgaagctacctggttgcgccggcttcttctagagctgcatgctcctctgcagcgcgctgcattggtttactgtgacaacatcagcactgtctacatgtcctctaatccggttcagcatcagcgcacgaagcacattgagattgatcttcactttgtccgcgagcggggttgctcttggtactattcgtgttcttcacgtccctaccacttcccagtacgccgacatcttcaccaaaggcctgccatcttcattgttcactgagttccggtccagtctgaacgtccaggctttcgacgctccgactgcgggggggtgttagcagtcttgactgcgccatgcaggcagtccctacaggctggcgccatctctgtccctatcagccacataaggacagccatctgctgattggttctgattaggacagctagagatatgtagagatatgaggggatcctgattgttatgtttctatagctagagaccctgattggttatgtttctatagctagagatgtgaggagatcatgattggttctgtttccataaaccacacagatctcctccctatatatatgtaacctttaaccctcatatcatcaatcaatattcagcagttcatctgctttcagccatcactattgaaaagcacatgttaataagactgatgccatagctggagaaatgcttcccagcatattgatacataaattgattttgcagtggaatataaccttgtatctgataaaaatttacttctgcatgattattattgagttcttcactgggattcaggtccattttttggaagctgctgggtgttttatttatttatttttatattgtaaatgtttgcacatgtaaaagtaattattttgttcttttatttgaaggcattctcctactctgctttgcccatcagagatacagaacaatttcaaagaataaggataaaaaccatgactctagatggaacataaactgagaaattagcaatggcaatatttcaagttagatcttccatgtaacaagtaatgctagaaacttcaatctaaagccaggaaaagtagaaccaccaccataacatggagccaaaattgagcaactcttcgctttttaagctaggctggctatttaacttaaaattatgttgcagaattgtatcaactctccctaattttatgttatattatatttggcaggaaaatctgagttatcaataatcct

SEQ ID NO: 764 - DNA, 2129 bp, Zea mays
  Intron number 2 from transcript GRMZM5G852454_T01 (locus G RMZM5G852454) derived from phytozome v7.0 (chr-ID 3; pos 1 91891162 to 191893290)
tgaccccacccgacaacggtagtagaaggatgcaggcgcgcgggactggcctatgggccctgcatggtggtgatcagacggcgggcacgtgggtggctgagaggctgaccccgaggtcccacaggtcagcgtgatgacgaatgtgggctagcagtgtagagttgaagatgggccgaggaggatttggcccaggcgggtgtgggtgagtcttttcttttttttcttttcattttcttttctgttttcttatttcttttctattttctaattaagattcgaatgaggtttgaatttcaaattcaaacaaaatgcacacccaaaaatccatcatgatgcaatatatctatatattttatgttaattaatttattcattggtttggtagatgtttgaaatatgaaatacattttcattattctttttaggaaaatatcatttttgaatgtggaatgagaattaaaagttaattcagaaataaatattcattatctacttatttttagaagaaagttttgtatactttctaccaagggttacttgaatatttgaaaatgtttatagtttatggggagaacatatcaatagagtgtcctattatttatcacaaactgaatttcagtttctattttatttaaacaaacattgttttaatattactatttatttttagaaagggggaattccaaagcatatttattcatcagagacactttactttgatttattttactaatctcaaaaccatgattttgggtgttacaaaaactgaaaactaaatactatccttgtgtcagggaagttgaaaaccgctttcagaacctatttttatgatctacaacatcattgccaatagctgtcctgttcgttgaaatatttcttattgttcagtttttagagctgtaatattcactccatgtttccatatatcaattatcacactgattttttatgtttgctattctatgggcttaaatattattctgtgcaatcgggtaaaccagagtcttaaaatgccatatattgcattcctttatggcttgctacaaagcaagctaacaccatgtgctcttctcacaacctttgagcataacatggaagtcccatactaaccataaactagcttccatttactagtatctggacattagttgaaatgtatcacagcatgagttatgtgtttaccactattctgtaccgcttttgttttgagaaagtgctgctacaaatccagtagcctaagtttcggtcactgttaagaaggggtatttttgctattagttatgtattgtcactaattgttggtctttattgtcttccatgaattttatgttgcttcttcacccttttctgaagaacataaattcttacatctattttttttctcgaacacgcaggagagctgcgtatcatttcattaaaagaaggatgataattacaatgacctaacacaccactcacacatacacacacaaacaacactagtaataaccaccttttaaccggggttgaacacaaaagctaggtccgaaagacgggtcaaattcttacatctattatttttatttttctatatttgtcttgctaatacgtgatatgttgacctttgctggaatatagtggattttctctacttggttttattgcattctggttatccttccaatattttgcctaatgcttcaaaacttaaattagtgctcagagcatggtattaggtcaccttttagtccctagacctttccttctgcactctagttccaccatatttccacgacccttgaaccagttagtctatgtgaagtgcgaataatcttatttccgcatgccagctaccgtttccagtagttttgtttgctttttctgtatttgaggttataaattgttgagcagctcagtttgtaatgcacactgcttggatgccctatttcttgagttgatctcttgctcattttgcaggtatattctagtttaccctcaaggatgcgatgtctccaatcacttgtcattgtttctttgcgttgctaatcatgaggaacttctcccaggttttatactactatgttacctatcctttcttttgccctccacatatcttttcgcctcctaatcatggtcttgatgatttcagg

SEQ ID NO: 765 - DNA, 1071 bp, Zea mays; identical to SEQ ID NO: 494
  Intron number 4 from transcript GRMZM5G825685_T03 (locus G RMZM5G825685) derived from phytozome v7.0 (chr-ID 6; pos 7 8487621 to 78488691 reverse strand)

SEQ ID NO: 766 - DNA, 14219 bp, Zea mays
  Intron number 3 from transcript GRMZM2G326116_T01 (locus G RMZM2G326116) derived from phytozome v7.0 (chr-ID 3; pos 1 35090673 to 135104891)
tcaaaggtaaaactttgtacaatacttgttttctcctctgtccataattccttttgtatttaatctgacatatgtgtacactgtgtacacatatctctctctagctctaactaatgtttctttaattgatcacaaatatatattatttgctttctcatacgtggagtgtacacgtatataacacggcatgtttccactaaattatttgaaatacaacttcaccatactatcaacgtgtttggtttaaggaataaggtagtacatcatctactcctcactttttcctcactttcttatttggtcggtataatagaataagttgatccatcaccatttcattcctcatagactagtaattagtaataatatgaggaatgagtttattctaccaaatttatataatggtctatagaatcgaatgagttgatccatcaccatttcattcctcatagactagtaattagtaataatatgacgaatgagttcatttcaacaaatttatagaatgaactcaagatgtaccacctgatctagaatgaattgattcttcataccaaacaccccctatatgtacatgattttcctatttaatttgaatgtgaatcaataccatgcatgtcccttgtaaaacataccgtatcttaaatcagaggtgaccttgaggttttaggggtctaagacaagatttaaaatagtgacccttctaattatttttgatatataaatattaacaatataaatagtcaaggtacatctaaaaatatgttatatcaagcaacaagtaaatgaaaagatacatattatggtattaccttaaaagttttttctaacatgtttagatggaaagtcattgatgatggtgtcaatatcaatcttatccattaatatcttctcagtgcacaaaatagccaaactatttaacttttctagagacatttcggacctcaaataattattcaacaacttcatctttgaaaagcttcttcctgctggtgtcacatttgttgagttagcagcatccagtctgtaatcgtgtcaatgtttattagcatgtaggtgtgcattagttagcttgtttatggcttaataatatttgtaatagtgcgtagaatcatgggcatgcaggagattgcactctgcgcgccatgaccgcgtcaaatgccacttccccgtcatgcagtgtcggtcgtgcatgtcgcacgacgagcctagaaaagctcgatcgtgcagctgctcagcatggcgggggaagcggatcttaggccatttatattgacaagtaatgcacagaaaaggttgcgtgatttgcaacagaaattctccgttgtctggttcccagtttcagccgtggtgatcgcgttctggcgccgcgccaccagttcatccgttcgccgtgagtgtttgcgagctcgtctggtcgctgtgagtgttcatgttctatcaatctggtatcagagccggtgaagtagaagcgagttctttcgtgccggctaccgatgaacaccatgagcgacgcgacagcttccagcggcagcgtatgatggaataagtcatgtggtcagcagcagttgcagttttgactgctgcaggacagcagcaattgcagcaggacaacatgcagcagtctttttgactgcgcaggacagcagtagcagcagtcttttgactgcgcagcagcaacaaccttttgactgctgcaggacagcagcagttgcagcaggacagcatgcagctgcagtcttttgactgcgcaggacagcagtagcagcacagcagaggacagcagtagcagcacagcagttttgactgcactttagtatctaaaggacaacacctgtgtgctgcagcgtgtagtgtagtgtgtagtgcagtgtagtgcagcccctagggctataaatatgtgtccccaacccctctaagggtatggcattgtgtagtgtttgaagaaataaacagaaaattgccccaactcatagtgtcatcctctgatgagagttagagtccctctacttacaattggtatcagagccaaactatcctgcagcctaaacatctcgtgctcatctccttcccgtgcctctccccacactcagtcggtagcaagagctccaactgttccttcctcccctgctcagacgagcagcctttcgtctgagacagcctcttccacacgcagcgacccctcactagcccaccatgtccctacgctcggccacttcgagtgcgcggcgccagcaggaggccgaggtcgccgcggcacaagaacgcgagcgagcagcagcagcggctgcagcgacagcggcgagggcagcacggttggcggcggcggaactggcagcggcgagagcggaagtagaagcagcggaggcggcggatgctgcacgtgcggcggcaacagagctcgaggttctgcgcggcagtagagctggcagctctgcttctgtcgacgacaacaccgacgacgagctcaggctggcgagggaagcagcgcgagagcaggcggcacagtgggcagccgcgcatccccatgggggcgcgcgtggcggcagcccggataggcgccgacacgctgacggcgctccaggcgggggcgcacgcggcggcagcccagacgggcgtagacgcgccggcggtgctcccggcggcggcgaccgagtcgacggagatcgcggcctctacaggcggcgcggttctccctccccggatcggtaccatggtcgccgcatggcccaggccattgtcagggacatcggtcccggcggtgggtggcctaccctcaccaagaccaactacgtcgagtgggccgcggtgatgagggtacggctccaggttcgccacatgtgggaagcagttcgttacgacgacgtcgactaccacgaggatcggcgggcgctggatgccctcattgctgcagtcctgcccgagatgcagttttcgctttcccagaagcggactgccaaggaggcctgggacgccatcgctgcgacccgcatcggcagcgatcgtgcccgcaagaccacactgcaggcacttcgcaaggagtgggagaacctggccttcaagccaggtgaggatgttgatgactttgctctccgcctcaacactctgttgcagaagatggtgcagttcggcgatgacacctacgatgaggagagagctgttgagaagctcttccgttgcatccccgagaagtacaggcagattgctcgctcgatcgagtctctgctagacctctccacgatgacgatcgaagaggcgattggtcgcctcaaggtggtcgacggcgacgaaccacaggctctctctgggcctatcactatcggcgggaagctacatctcactcgggagcagtgggaggcctgccagggtgacaagaagggggagtcctcctcctcgacacgaggccgcaaacgcggcaagccgcgcaagccgcgtggaggcgcccaggccggggcgcgaggacatgctgagggtggtgcacgtggaggtgcccaaggcggcgccgtcggcaacaagaagccggcacgagacgacagctgccacaactgcggcaagcttggccactgggccagggattgtcggcagccacgacgtggccaggccaacgtcgcacaggcggaggcggaggaggaggccctgctcctggcacatgcaagcatcgagccatctccagcggcaccggccgcagcggcactcctccaccttgatgagtcgaaagcacgcgctttcctcggcgacggctccaacaaggacatgatcgaaggatggtgcctcgacaccggcgccactcatcacatgaccggccgacgggagttcttcaccgagcttgactctagcgtccgaggctccgtcaagtttggggacgcctccggcgtagagatcaagggcgccggctcagtcgtcttcaccgccgcgtctggtgagcacaggctgctcaccggagtctactacatccccgcgttgaggaactctatcatcagcttgggacagatggatgagaacggttcgcgcgtggaggttgagcacggagtcatgaggatctgggatccctctcgtcgccttcttgccaaggtacgcaggagtgcaaatcgactttacatcctcaatgtgaaggtggcacaaccttgctgccttgctgctcgtcgagacgacggggcatggcagtggcacgagcgcttcgggcaccttaacttcgaggccctgaagcggctcagtgccaaggagatggtacgaggcctgccgtgccttgaccatgtggagcaattctgcgatgtctgcgtgttgacaaagcagagacgactcccctttccccagcagtcgagcttccgagccaaggagaggctcgagctcatgcatggggacttgtgtggcccggtgacaccagccacaccaggaggacgacgctacttcttgctgctcgtcgacgatctctcccgctatatgtgggtgatgatccttggcagcaagggagaggctgcgaacgccatcaggcgtgtgcaggtcgctgcggaggcggagtgcggccgcaagctgcgcgtgctgcgcaccgacaacggcggcgaattcacggcggctgagttcgcgtcgtactgcgcggatgagggcgttcaacgccactactctgcgccgtacagcccgcagcagaacggcgtcgtcgagcagcgcaaccagacggttgtggggatggctcgggctctcctcaagcagagaggaatgccagctgtcttctggggagaggcggtggtgacagcggtttacatcctcaaccgctcgcccaccaaggctctcaacgggatgacaccgtacgaggcttggcatgggcgcaagccggcggtctctcacctacgggtcttcggctgcctcgcgttcaccaaggagcttggccacatcagcaagctcgacgataggagcaccccgggggtgttcattggctacgcggagggctcgaaggcctaccgcatccttgacccaagaacacagcgtgtgcgcacggcgcgcgacgtagtgttcgacgaagggcgaggatgggcgtgggacaaggcggtggacgacggcacgactccgacgtacgacttcaccatcgagtacgtccactttgagggaactgggggagtaggcaactcttctctgagcaggtctaccccagcccccaagtctccaccgactccagcgccacactctccagctcctgctacaacgagctcttcaccaccacgcactccagccacgactccggctacagcgagctcttcgccaccacgtactccagcaccgacggtaccctctccgggaacgtcctctccgacaccagctcgtgtcgagcacgacccagtggagctcgtgacccctctgtcccgcgacgaggagcgcgtcgacgcgtgctacgacggcgagccgttgcggtatcgaagggtggagggccttctcatcgacccatcggtgccaggccctgcatctcgcattctggcaggagagttgcatcttgcatgcgacgatggtgagcctcggtctttcgcggaggccgagaaacatgcggcttggcgtgccgcgatgcagtcggagatggacgcggttgagacgaaccgcacttgggagctcgctgatctccctcatggtcatcgcgcgatcacccttaagtgggtgttcaaactgaagagggatgaagccggcgccatcgtcaagcataaggctcgcttggtggcacgcggtttcttgcagcaggaggggatcgacttcgacgatgccttcgcccctgtagcacggatggaatccgtgcgactcctcctcgcgttggcagccctgaagggctggcatgttcatcacatggatgtcaagtcggcgtttcttaacggcgacttaaaggaggaggtctacgtacaccagccgccaggttttgcgatccctggcaaggagggcaaggtgttgcgtctgcgcaaggctctctacggcttgcgacaggcaccaagggcgtggaatgccaagctggattccacgctcaagaggatgggcttcatgccaagcccgcacgaggcggccatctatcggcggggcaatggaggaagtgccctgctggtgggtgtctacgtcgacgacttggtgatcaccggcgccaaggatgcagaggtggcagcgttcaaggaagagatgaaggccaccttccaaatgagtgacctggggcatctctccttctacctggggattgaggtgcaccagggagactccgggatcacacttcgccagaccgcctatgccaagcgcattgttgagctggctgggctcaccgactgcaacccagctctcactccgatggaggagaggctgaagctgagtcgcgacagcacgacggaggaggtggatgctacacagtaccggcgtcttgtggggagccttcgctacctcgtccacacacggtcggacttgtcatattccgtcggctatgttagtcggttcctacagcgaccgacgacggagcatgagcaggctgtgaagaggatcatccgctatgttgcggggactctcgaccacggtctctactacccgaggtgccctggggaggcacaccttgtcgggtacagcgatagcgaccacgccggcgacatcgacaccagcaagagcacaagcgggatcctcttcttcctcggcaagtgccccatcagctggcagtcggtcaagcagcaggtggtggccatgtccagctgcgaggccgagtacatagcggcgtccactgcttcgactcaggcgctctggctggctcgcctgctcggtgatctcctcgggagagacactggagcggtggaactcagggtggacagccagtccgctctggcattggccaagaaccccgtgttccatgaacggagcaagcacatccggctgagatatcacttcatccgagactgcttggcagaagggagcatcaaggcgcgttacatcaacaccaaggatcagcttgcagacctgctcaccaagccccttgggaagatcaagtttgttgagctttgctccaggtccgggatggcccaactttcccacaagacgacgcacaagacttagggggagaatgatggaataagtcatgtggtcagcaacagttgcagttttgactgctgcagggcagcagcagttgcagcaggacaacatgcagcagtctttttgactgcgcaggacagcagtagcagcagtcttttgactgcgcagcagcaacaaccttttgactgctgcaggacagcagcagttgcagcaggacagcatgcagctgcagtcttttgactgcgcaggacagcagtagcagcacagcagaggacagcagtagcagcacagcagttttgactgcactttagtatctaaaggacagcacctgtgtgctgcagcgtgtagtgtagtgtgtagtgcagtgtagtgcagcccctagggctataaatatgtgtccccaacccctctaagggtatggcattgtgtagtgtttgaagaaataaacagaaaattgccccaactcatagtgtcatcctctgatgagagttagagtccctctacttacagcgtaagggaggggtcgttgatgtggccgatgctcacacgcgacaactacttcgagtgggcgatgcttatgcaatgtaactacgaagctttggatatctggggtgtgatcgatcctggcgacaatcgaaagcgggtacaagatcgtcaggcgatgagcgccttgctacgttccgtgccgaaagagatgtggcaatctcttggtgggcggaagactataaaggaggcgtgggaggcggtgaagatgatgcgaatcggtgccgatcgggtaaaggaagttaatgcccaaagacttctccaagaatttgagaacatcaagtttaaagatggagaaacagttgaagatttcgggatgcgcctaaccaatctcgtcgggaatcttcgagttctcggagagcaagtagaagacgcccgagtggtgaagaaattctctgtgtggtgccctctcgttttactcaggtagtagtctccatcgagatgttttgtgatatgaaacagctcaccgtggatgaactcgtggggcgactacgcgcggcagaggatcgactggaagacaaggtcgaacagatcgtcgacaaagctgaccgacttctactttccgaggaggaatggctggagagaaacaaacatcgcctacgctccaacaacagcaaggagggaggtggtcatccaggcggtgtcttcaagaacaaggtgacggcgcgtcctgacggcgagtcctcggagtcatgaaaattgacttccgagggaacgccacggcgaaagggtcggtgccgcaactgtggcatatacggccactgggcaatcgactgcaaacgtcccaagaagggcaagaagaaggaggcacctccaccggaggcgaatctgacaaccggggtcgtcgaacaaaatggtgcattgatgctggcgacgtgcgacatcgcacattcgtcagttccgcaagttcacctgaccgaagacattgttccagtcacagcacctgatggagtttgggtgctggatactggagcgagcaaccacatgaccggaaccagatcgctgctaacacagcttgatcagggagttcggggttcagtcagtattggtgatggctctcgggtgaaaatccaaggtatgggctctgtagtgatgcaagatcacagctctggtcataaggtacttactgatgtttactatattcctgagatgaaaagtaacatagtaagtttgggacaactagaggaaaaaggttttacttatgaagggggcaatgggagactgtgtgtgtatgatcaagaacacaatctgcttatttctgctcctagaacagcgaataggttgtatattgcaaaatttggtatgtcttcacctgtcagtttatttgcaaaatctgaagaaaagtcttggcaatggcatgcaagatatggacatctaaatttcagggctctgaatgatttaggcagtaaaaacatggttgaaggcatcccaggtatcaagaaggtagagcaggtgtgtgatggttgtgttctgggtaaacaacatagaaaaccattcccacaggtgtcgagttttagagcccaaacaggattagaactggtccatgctgacttatgtggaaaaattactccaagaaccatagggggtgcattctactttctgttggtggtagatgaccatagcagatacatgtgggtagagatgattagcacaaaagatcaagcattggaatattttaaaaaagtaaaacagagagctgaagtggagtctggcaaaaagctgaaggctctaaggacagacagaggtggaaaattcacttccaatcttttctcagtgttctgcaatgagtttggaattaagcactacaccaccacaccatattccccacaacagaatggggtggtggaaagaagaaaccagactgttgtcgaaatggcaagatgcttactgaaatcaatgtcagttccttcaagtttttggggtgaagcagtgaggactgcagtatatctactaaacagatctcctacaaaagctctgaagaatataactccttttgaagcatggcatgggaagaaacctagagtgcatcatctgaaggtgtttggctgtgtggcacatgtgaaacttctctgtcctgggaacagcaaactctctgacagatcaagtaagatggtcttcattgggtatgaatcagggaccaaagggtttagattctttgatccaactaacaagaagctagtggtcagcagggatgctatatttgaagagaataaaagctgggactgggaaaattcactgggaattacaaacaagcaaataactaacacttttgaggttgagtatgagttgtctgacagatcaacgacagtagttgggaatgaagatattgcagcaccttcagagcaatcacctggaggactgaattctggtgaccaaaacagtcaagaaattcagaatgataatgtggcttccccacatactccaatgtcgagtacagcatcagctccaggtctgcagatttctccattacaacagtcacaaagttcagggttaggacagcacaagttcagaactctgactgacgtctacaactcaatagaagaaatgcttgattttgaatacagtggtgtctgtatgcttgctgcagatgagccatcaagtgtagaacaggcacttgagcaaggttgctggagaaaagctatggaggaagaactgaactcaattcttagtaaccaaacctgggaacctgctgagttaccaaaagatcacaaggccataggcttgaagtgggtatttaaagtcaagaaggatccagcaggcaacattgtgaaacacaaggccagactagtagcaaaagggtatgcacaaatccagggggtggactatgatgaagtttttgctccaatggctagattggaaacagtcagagtgttaatagctttggcagctcaaagggagtgggagatacaccacatggatgtgaagtctgcttttctaaatggagaactaatagaggaggtttatgtaaatcaaccaccaggtttcaccagctcagacactgaaaagagtgctcaagttgaaaaaggccctgtatggcctcaaacaggcccccagagcctggaatagcaggcttgatatgtaacttaccaagctgggattcagaaggagcacagaagaacatgcagtgtatagaaaggggattggtggatcactgctgctatgagtatatgtagatgatctcataatttgtgggcctaacacaagagatatctctgtgttcaagcagcagatgaagaaaagtttcagtatgaatgatctgggactcctgagttattatcttggtattgaggtaaagcaaaaaccaggagaaatcaaaatctgccagagtgcttatgctaagaagatacttgagatttgtggaatgaagggatgcaaccctgcagacacacctatggagcaacatatgaagttgttgccggggaaacctgatcaaaccattgatgctaccaagttcagaagtattgtgggcagtctgagatatctagttaatacaaggcctgatcttgctttttcagtgggaatggtgagcaggtttatggagaatccaaatgcagaacattggagtgctatcaaacgattatcagatttgtagctggcacattccagtatggctgtaagtatgtcaagggagctgaaaatgatcttctaggtttttcagatagtgatcatgctggggatcttgagaagagaaagagcaccacaggtgttgttttctttctaggcaaaaacattatcacctggtcatctcaaaagcagagggtagtatcattgtcctcttgtgaatcagaatatatagcagcagccacgacagcctgtcagggagtgtggctgagcagacttataggggatctgttgggcactgaagtgaagaaattcaacctccgaattgacaacagttctgctcaagagctgagtaaaaatccagtttatcatgagaggagtaagaaaattgatacaagatatcactacatcagggagtgtgttagcgatgggagactggaaatcagtcatgtgagttctgaagaacagctggccgatatactgacaaaaccactcggaaggatccgttttgcagagctaaggaggcagctaggcatcatcagaattgaagattgacaagattaagggggtgaatgttgagttagcagcatccagtctgtaatcgtgtcaatgtttatcagcatgtaggtgtgcattagttagcttgtttatggcttaatcatatttgtaatagtgcgtagaatcatgggcatgcaggagattgcactctgcgcgccatgaccgcgtcaagggccacttccccgtcatgcagtgccggccgtgcatgtcgcacgacgagcctagaaaagctcgatcgtgcagctgctcagcatggcaggggaagcgggtctcatgccatttatatttacaagtaatgcacagaaaaggttgcgtgatttgcaacagaaattctccgttgtctggttcccagtttcagccgtggtgatcgcgttctggcgccgcgccaccagttcatccgttcgctgtgagtgtttgcgagctcgtctgatcgctgtgagtgttcgtgttctatcaacattaacatgtaaggcaaataagatttgataagcaatagaaaatattaggataacaatctacatctctggcatgctaaaaatctccatggtagatattggtttatctgataaagtcaaccacatagaactaagtttgaaacgagatttatttgaattgacatcacatgagtcatcaaacgataaagtgcttgcaaatttggtacaatggtctcttaattcatcaacctcaagtgacttcaagtattgagctcatcaaaaacccaaatataactttgaatgactagagttctttgaatctatttttaatgaactaattggaatattaaccatcatcaaaaagtaattgatttcaaaagccatctaagcttcaaggtttgcttcctcactgctagtttcattatagtttttcttcctagtagcgtgacgctttactggaaatgatgattgtgaaccaagttttgatgcaatctcttttgcagtagtattcaaagaaacatattatgtcttctaatgctcttttaaggtaccatcaatgcacatggatggtgactgcaacttcttgctcacgttgcttacaacaaataaaatgtcataccaaataatcataccaagtataaactcaaaggtaccaagcacttcaagtagatttttgcatcactcctatccttggcttaagtatccttatctttactcaactgaagcaaagctgatctaatcttaggagcttgaaatccaattgcttcaacacttttgatctaattctcccaacaagtgttgctccatgacttcacagttaagctttcaacatggtcaatcaaaacatcctatcttttggtagaactagaaaataatgcatatatctgttgcacaatcccaaaaagtgaaatagctttgacacaagatttagccatatctcaaagagtaagattaagtctatggcaagcacatgacatatacgaaaacgaaactcttggatttatatcaagtaatcgtctttgcactcacttgatctttcatttcacattagagccattatcttaaccttgacccctgacatattctatatttagactaaaggaattaatggtatcaatcaatgtaatgaaaaccccctcaccaaatgtgtcatctaccttaatgaaacctagaaaatactcctcaactttaccactagacatattaacacattgaaccaaaaactcatgttcttgatgactcatgtttagggtatagacgtatagtccaagacaatagaaaaatgtttgggctctttaacagttttgatgatagatttggtaatattggaagccaaaagagaaacaactcattctaaattttatgactaagataatgatagtgagatcattgtttttaatatgtctaaggtgatcttgcattaccaaatcaaatttataaattatttcaacacaatataagaaattaccattctgataactataaagtttctcactagatcctctaaaagcaaaattacggttaccaagaaatttaacaacatcgagtattctagataagacatgcctaatatgttctttatcctttgtgatttggtgcttaaattctttatcaattgtttcatgcttactgagtctagctctcagctcattccaagagttcatgatgataatatagtccatactaacctcatgttctttgagcctatcattgatatgtttccaatctctaaaaccattatgacccaataaactcttacagtttttggaattgaaaatcttacaataaaagaaaaacactatcaacatgttttgaataaactatgaattttctaccatgaacttctccattgctcatcatttagagtaatggatatatgaaaaatgcctcccattatcatccaaaaggaaatacactattttcttctataggccccttctctactaatacattctttgaattgttatcaagattattccaattctttgtatcatagatatccttagtaaaacttggttgttcatcaacattagcatttttactaggagatgaattaaatataggctcatgaccaccatgcagctatattctgtg

SEQ ID NO: 767 - DNA, 17924 bp, Zea mays
  Intron number 1 from transcript GRMZM2G093325_T01 (locus G RMZM2G093325) derived from phytozome v7.0 (chr-ID 6; pos 1 40708500 to 140726423 reverse strand)
cgacgacttcttctcgcctccggccccgcgctacggtaaagccgcctcctctgtctgtgtacctgtctttgctgctacaagtacctttagcaattagcactgctgactcggtgtgtgtgtgtgtgtgtgtgtgtcgtggcgttcggacggagcagagagcgagcgggaggacgccgcgggcaggagggcgggccgagggcttgaggtggcggcgtggggcatcgacaggtggtggagggcgcacggtgggccgccggagaccccgaggtacgcggagaaggcgccgcggagggtggccgccgccgccagggtgagcccccgccccatccagcagccgcgctgaaggaccagatccgttcatccaccgacggcgacggctgctcagtcagtgtcacatcttggcacggggggaaaaataggcacgaaaaaaaaagagttccctttcttgaatcgatgcagtttgctttggtgttcgtctcgcgcagtttctggatctgggctccgcttcagctcgagatcgactgggatgggaagatcctctgctgcgttgtcttgtctgtgctcatccgtgtgtactgtgtaaatatgaagatgtaataacaaaaacacgcattttagctttcagtttcgggctttgacaggcgcaatcatccatccatgttcccttgcctgatctaatccgccgcctccttggttcggagaacgcgcgacgaagcaatattttcagcgtcatctttgtgccgtcaatgttttgaaggagctagtacaacgaatttgatgcgatctttttagtttcttcctttcctcggatctcagttacagtagtaccaatggtacagcgcctcctgcatacaaccatttcataatctagagcatgtacattgaacattgtcgtctatggtaaattaagcaactgatccgtgatagaccaagagcatactgtatacatacatgtactcttcagaatgacatgtgcattagtgactgtcaaggatgtaaagggatgcaggataacatcttcagatttcagaatgggagcgcacgattttttttttcaaagacatgtttctgcccacaccggagcaatcatgtacgtgattaagaccatgtttacctctagattatataatccagcttaaataagttaagagattaaaagacaacatagtgaattatgtaatctatttatttaaattaataatgtataatctggtcaataggtgcacttaaattgattatataattttggaatgaatcaaatagggtctaaggttatccgcattcatactactctaaattactactctaaaaagaatattatatcctcgtcagcaagattctctgctctatactataatcctccgtaatcatatttactctatatattaactctataccaattaccgcatattgtattatttctttccctctcttctatcccacccaactacctcattgttgttgctgtggataaggtatataaagttatggtttctaaagttttaggtgtttaaacaataaaaatatattatatgttgattaaaataaatcatgtgagaaaagatattattattcaatttcagttttaggttatatctaaatcacatttttagtcaacttaaaatgccacattatggttaatcatgtaggcaatattagtacgaagctacacaacaggaacatattaaattgaagttatatcggagaaaatgtagattttctaagttctaaagattgtttttatactaaaatttcaattttggaattaactttgcaattattaagcactgagggacggcatgtgctattccattaaaactttgggtcggttttataaaaatttgggtatgtttgcaatggtctttgaataagagtgaagcacgggttgatatttgacttttccaggggctcttaatgaaaatgcagtggtgaaggggtatgggctgattaggggcgtccgattgaccgctaaggagtcgcattagatcgccaacgtaatgaaccggtaagtatcaggaaccgtcggtttgaagatctaggatcaagggttttccgtcgctagtgccacacgatcgttgatcgacgaccagagttaaaagcctgaaatgttttctccatatccatttagggccttccaatccctatcggatgaacgaagcgacccaccccgcttctcaccacttcgactagcccagacacggcgacacgctagtcacaatgttccctctctctctctcccatggtggttgagtaaggatggctcgaggtcaagcgctagctcgatggagtaggagggtcatggtgattcgggtcttatacccaggttcgggtgaaaacaacccacctggaaaccacgacgaccatggatggcttcaggatgctttctgttggcgaaatctgtggggaagaaacgcctcgacaccccgaccccacatgacagggatccaaggcgagcaccaaggcaaggcgggtgacctgcaagcgctcgagaggccgatctgcgggacccacgtgtaagtgacctcggaaggatagaaggagaggggaagccaacggtgctatgggcccacccaccagcacctgagtgcgaccgcgagcggagtgcgccgggatgggccgcgttggtgatgcagtttgggccgagcaatggggataccggccaaaagcagttttccccattttcttttatcttttctattcgttttcctttgttttctatttcaaattttcaatttcacattggattcaaatttcaagctcaattataaatgcacaataaaataaatctcagtatgatatgcaagttatgttttattttttggttactttatttatttatttaggtagtgtttcctatatgaaatgcgcgcatacatacattacttatgctaggtgcttattattcttgaacgtataccacaatttaaaattcattcaaaaattaatatttattgtttagttcttttaagagaagttaatatatattttttaccatgaattatttcgaatcaaatattcttaaagagggttttacttatataattataaagggaataataaatagattgaaagtctttcttttaattattgttccaacttttagttttaagtttcggatctaggttttgaatatcatactcttaccattaatatttgtttactttcaaagagatataatttataacaaaaaggaatctattgaatgacattttggctcaacctttttgtcgaaaaactcttacaaatcctaaaataggattttgggtgttacaaaaatcaactgaaaagatgacacactacgcgggaaggatcccgaagaatgcacaagaatgctttccatgcgcgtatatcgcaaagggattaatagaattccaaggatgtgtcccacactgaaggaccaatgaggcgatcagaggcggtgaatggcatccaataaaattttgcttctaaaattgaatttgagcacttcacttcaatcgaatgaagaatgtgctcaaaccaaaatcatatcaccaaactagtgatctcatgattttgaaatgttcctaatacacatataagactagaaaaataaatagatcgcaaatcgaacaccgaaaagtccgaatcggtccaaaaccgtgtcgtgaacaagtgctgatttcagcaggagaaaattctgttttcggatgcgaaactgagccaaatgaactccaattgaaatgaaattttgcacacaactagaaaaatatgttttcaaggtctccacaaatttttagctcaattgtacttgtgaatcaattgcagatctaaagatacaaacataattgggtttttgtttgttttttctagaacgaactcaaaatgagatcagctaagagcacaaccacaaactgcaccaataaggcataataagtgatcctaggagtatatctcacccacaaacaaatcccaacagcacccgggcacaaaagaactcgaaggttctccagatttgccggaagctcttgatgattagagacatctcctcattgtcgagcttggaggcatcaattgggagtctacttggtgtagactcttcattcttttcttccattgctttgaatgcaacgggttgcacctcgggtgtggaggtggcgtcttgctccaagttgacaatatgtttggagtctttgatcataagttcaaagctcacaaacttgccaatcacttcctcgggagacatctgtttatatctaagatccccacgaattaattgaacttgagtggtattacgaaaaacgagggatattagaataaccttgaccatttcatggtcatcccatttggtgctcccgaggttgcgcacttgattgaccatagtcttgagccggttgtacatcacttgtggctcttctcctttgttgaggacgaatcgaccgagttctccctcgatcctctcgcgcttggtgatcttggtcacctcgtccccttcgtgcgcggttttgaggacgtcccaaatctctttggcatttttcaacccttgcaccttattatactcctatcgacacaaggaggcgaggagtatagaagttgcttgggaattaaaatgcctaatttgggcggcctcgtccgagtcatagtcctcgtcgcccacttgtggtgcctgcactccaaactcaacaatatcccatatgctctcgtggagtgaggttagatggtgcctcattttatcctccacatgcaataatcttcacatcaaaatatggtggtttgcctagaggtaccaaaagtaatggagcacgctttggaatgcgaggatagtgtagaggcatattactatgcttcttacgctcgtggcgcttcgaagttgtcaactcggcgccggaagtagaaggtgatgaagagtcggtcttgtagtagatcacattcttcatttcccttttcttcttgtcacccttcctatgtgacttgatggaggaagaggattcctccttatacttgtcgcctgactcccttgatagagtccttcccgagcctatggccttgtcgccagtcacgatctcccccttggcgtgatctccagacatcacttcgagtttcttagactcttaatgaagcactggctctgataccaattgaaagtcgcctagagggggggtgaataggcgaaacatgaaatttataaacttaaacacacactaaggcaggggttagcattagaattaaattcgagtgaggaagattgtgtctcttgctatgagttgcccaattaatgcagatgacgtttgggagcaaactcaaatcaatattagcaaggacactttagagagaggaaggagggcaaataaatcaagcgaagatcaatgcgagtgaacacggtgatttgttttaccgaagttcggttccaaagaatttagtccctgttgaggaggccacaaaggccgggtatatttcaaccctttccctctctcaaacgggcacttagaccggatgagctttctccttaatcacttgggtcagacccctcaaggaccaccacacacttaggtgtctcttgctagctttgcaaagcacttataagaataagaatggggaaggagaaaacaatctaagcaacaagagcaacaaatgaacacaaaactctctctcaagtcactaagtggttgaattgattttgagacttcgaagatttgatctttggaatgtgtcttggagtgagtgctattgctcttgtattgaataggaacttcagaaaacttggatgccattgaaggaggtggttgggggtatttatagcctccaaccacctcctagccgttggctatttttgttggcgatgggcacaccggacagttcggtggcgcaccagacaggtattgttcactgtccagtgcgcgccacgtcagcacacccgttggggtttggagcagtcgacgttgaagttgtttgtcctgtagttgcaccggacatgttcgatgtgctctgacttctgttgtgcactgttcattgtggcagtcgaccgttggcgccaggttaccgttgctccgttggctcaccggacagtccggtgaattatagcggagcgagccctagagaaacttgagagtgagttgttcgagtgctgcttggcctggtgcatcagacactgttcggtgtgccaaaggcagcacactctcaagtcctttgctccaaattaatttaagtccccaactgaatttctttcttggtttgggttgaactttatgcacctgagataaatgacatcttggcaaactaattagtccacgtggttgtgatggacgtcaaccaccaaaattgattataggaaatgattaagcccatttccctttcagtaacatactgatttatgttagcttgtttttgacatcccaaaggatttaaaaacaagcgtccaccactaccttcgtccttagatcattatctcagagagataacgccctaaggacgaaggctcttattgtttaacattgggttgccttgtttttgattccatacaacaatcaaaaacaagtgaccaacattggcgtccaccttcggtgaacttacttccacgacaataagcacgacaagccatcaagcttcgtcaatagggttgatgaagctcatattttcaatcacaggtggttcaagctccgaaccaaccaacaagaaacaaaagaaggaagcccaatgaaggctacaacatgttggagtgctgggaccctacgttaaattcaaatggtctcatgtttcaatcaccttctcccaagaggatcttcaactcaaggactatccacataatgatgttatggttatatattgtgtcataaagggtttttttggttcacaatgttctagtagatgcaggcagtgcgtcagatattatttttgctaaagcctttagacaaatgcaagagccagaagacaagatacaagatgcaatgcaccccctatgtggctttggaggggaacaaataacaacactcagaaaaatatcattgccaattacctttggctacatacacaacacaaaaactgaggaagttgtatttgacatagtagatatggaatacccctataatgcaattattggaagaggaacactgaatgccttcgaagttgtgttgcatcctacatatttgtgtatgaaaataccatcgaaccaaggttcaatctctgtatatggaagtcaagaagctgcaagaagagccgaaggaagttggacagactcccaaggccattcacaacatagatgaagttgaagttcaccaacatcagaagcacataagggataaagcagctttggtagatcagccaaaaactatactcctctatgaagacataaccgatcaaaaaagtgctttttggatcacaattgaccgaagagcaagaaagaaatctaaatttttttgttcaacaataaagatgtctttgcttggtcagccaatgatttatgtggagtcaacagaagtatcattgaacactctctcaatgtagatcccactattagaccaaaaactaaagcttcagaaaatgtcagaagataaagtcgtatgtgcaaaaaataaagtcaaaagactccttaatgctagagtaatcaaggaagtcacttatccaaaatggcttgccaacactgtaatggtgaagaaagcaaatggaaaataaagaatgtacattgacttcacagatctcaacatggcatatccaaaggatgaatttcccttgccaaagatagactccctcatagatgcagttgctacttcggaacttatgagtctactagactgctgctcagaatatcaccagatctggatgaaaaaggaagatgagcctaaaataagcttcgttaccccaagtggtacctattgttatctccggatgtctgaggggctcaaaaatgctggaggaagcttcagcagaatgccatcaaaagtgctgagtactcaaattggcaggaatgttctgacctatgttgatgacattatagtcaaaagtacgaagcaagaagaccacatcgcagacttacaagaaacatttgctaacttaataaaaacatatcttaagtcaaatccagaaaaatgcatcttccgggtgaagaagggaaaattccttggctgcgttgtatcaactatgggaatcgaagctaacccaaacaagatagaagcaatagttcggatggaaccaccgaagtccagaaagggtgcccagaggctggtaggtaggcttgcatcactaaataggttcatctcaaggtccgcaaaaagaaatctgacattttttgaagtattaaagtcagccgaaatatttcaaaggggacaagctcagcatagggatggcaacggggatttctctgtcggggaatagctcctcatccccgtcctcgcggggagaaaaattccccgtccccgtcctcacgaacgctcacgggggagctttttctcccatcctcccatccccgtccccgtcggggaatttatacccgtggggaaccctgtggggaatctgtccccgctagaaatacaatatttaaagataaatttaaattgattgtatcaaattaatacaaatttgacaaacaagattgaaaattacaagagacatctactttagagtttagtttgttattttataacatgccatgcactaagtttttactataattttaacaagtaaattgactaacttggataaaaaaagtttcgtgggacgagtacacggggaacggggacgtgggatggttccccgtccccgcgaacccgacgaggattaaatttcccccatttagatccccgtggggactaaattagtctcatactcgtcccctaatagaggaattccccgcggggaatcggggatcgagaccccattaccatctctagctcagcaaaaggcctttgaagatctaaaataatatcttatacatttgacatctctgtctccaccttcgctaggggctacacttctatatatatatctgtctctcattctgctgttagtgcaacattggcccaagaaaagttagagggcaaaatgaagaagccggtttatgtaaattgaggtggctccaaacgtaccagtttatgtctcaatttatagaaaatggattttcagtttcttaaaaaccaagaagctgacctcttctagctaaaagataaaaatcagtttcttagaaattgggttactttcagtataagtatacttctgggcgggactacgattttagacatgcctctagccctgtacatgggttacccgtctcatcccatcacaaggacttgtttcgatattctagcattcaacctaattagtatgtattaagataagttaggacccgtttggcaaagctccagctcctgcttcattagctccagatcctgatccttctgaggagttgatcctcctgattctcctagagaatcagaatcatttttaaaaccgtttggcaagtaaactgattcttatctgctgagagttggtggtctatggcgattgtccgttttaccctttgcagttcaactttgttacaaaccaataagcaggatgcatatacgggaaaaaattatgaaacattaacatataaaatattcccatcatagtagtgcataaaatggtctcaaatgtttaatccacaaattgcataaaactagcacgacacaatatccaaaatatgacacgaaccaccttttctaatcacctcgacttccaaagtaccttcgatacatcatcgctgaacctattcgtgttcctactactcgaccctgtggtggatgtatctgatgcattctgagggacatgttgcctataacgggatgaaatagtagggatataatctgggtctcgatcacatctctgaaaatcctcatccaatgcactattctcacggatgaaattgtgaagacacattgcagcagcaacaatcattttttgtttgtccataggataagttggcatcttaagaagaattctccatttcatcttccataaaccaaatgtgcgttcaacaacattccgtagacttgagtgtaaatgattgaagagctcttgctcaccattaggtggaggaccatttctccattccggaacatgataccgttgtcctttgtacggggccaagtacccatccctatttggatatccaacatcaacaacatagtacttttctgtaacatacaattatacttgagttagaaccttgaaaaatatgtggacaaaaagtagaacaattttttgacatttgtttacctagaggggggtgtggaaataaatcttcatcagcttcaagcgcatggtacaacacagtagtatcatgcatggagccaggttgtccaatagatgcatatataaagcgcatatcaaaatcaacaactcccatcacattttgagtaggtttaccagaccttcccatgaacctgatgaagtctttctttggaggcgttgcatttatatgagtgacatcaattgctccaatacaacccttaaagtgaggccacattctttgatcattggtaattcttatgcactgtatggaaattagggtcctttggttgtatgtacctttttgacattgctaccatgcaattcaggacatcactgaattttctgctaattgtttcattagagtgcttgaaatccttttggacggcagcgaatgaccaagcatgaccacaatcctaaagattccatagagctcatatggatggaagaggatagaccaaagtctcttaccaactcatcatgcaaattgtataatagagctggttccatcctaaacacgttgtagcattcttttggattgttcaatgcttccatgacccaagcaatacccaagcaattaattctaaagtcacaacaaataattgaaaacgcttgtgcagctgcagcatgatgtgactaattagatgactaggacaaaccattgagcaacttgtgcatggtgctagtgctgtacacctgctgcaccgcgagatggtgctagtggtgtaaacagatgcgacagggattgcagttcatacctcggcacccgtgtctcttgcagtctcgctgtagccccaccgcgtgatcgttttgctggtgatcttgccgcctatggtcctggctgtcgtgtctgtcgtggctatggtagggctgacgcggtgggaccggaggctagcgccggcgccggtggaccccccggtggccaccctatgcggtggaagggctggaggacagcgaaagtgccagagagtagcgaaaccttagccgccgctctctgtccttcagcgacaggcagagggtcaagggacagaggacggggcgccgtggagggtgcgggaggggcttattatgtttttgtccaatggcaattgcggttaatttcgatcaaactttaaggggagatccatatttggttggttgaggagctgttttaagagagggtggggccgattttttagatcccacctttctttaaaaaacgactcccaatctttcggctccacacgagaatcagtttaaaaaatacccgtttggcacggttcctccagatcctcgcttagaatcaggagctggagctgtgccaaacgaacccttagtgtgtaaattaaaactaatttatactctaatctatcttaatatatatggattagagtagcaccccgtttagatcattggaattgaattccattctaataatagtaatttagacatatatcaattaagctaattcagttttatgcaaaatatattttgtatactattattagcaagatgtcgggagatattttatgtgctacattttttactatagagggagtgagacgaaaaagtgtcatgtaagttacagagtagaaacaaattctaataatgcataaagtcatttcccaccttccaccgcatgaatttgagatagacttatatctgaactttgaaagtggtggaatgttaaattccaaactaaataagttactttattgaatgaattccaatttctctaaaatgaagggatccaaacgccccgtaagtggtatgggtttgggtaagacaaccgatcccagtgcggccgagcacggagtacgtcagaaaccggcaggaagcaggaaacgggaggcaggcatgtcgtcgtccaaggacgctcctctcagccctcgatcccaggtacgcctcctctcctccctctcatgatcccactcccaatttctctccatcctcgatctgaccggtaaacctccccgctccggcagctggcgctcagttgcttcgaggagctcctcgactgcgccgtggcggacgtcgcgtcggagtgccaccgcatcgcgcgcctcggcctggaccgcagcgtcgacggcgaggaggaggagctccgcgtctgggcggcacgtgcggcggccgccgccgctggaggtgaccaccaccaccctggaggaggcggggccgccgaggagggtgggagcaagggcggggtcgacgtgttcggccagacgcaccccgccatcgccgccgatgtcgtcgagtgtatgaactgcggtcgccctgtcgtcgccggccgcttcgccccgcacctcgagaagtgcatgggcaaggtaaatcactaatgggtaatggggtgtttggttcgagtaatgagctattctatcatcttctcactcttcactatttttgtttgatttgtggaatagaatgagttgattcatcaccacctcattccttataattagttagttagtactaatatgaggaatggagtcatcccaccaaatttgagtaatgaactcaagatgcaccacctcaatatagatgaagtgattcctcaaaccaaacaccctataaatcatccaccacccttgccgctcccgtcccttcggatctcgcttacctcatatttattttagtcctttttgctcctagcattcctatgtttaggccgtcgaactgagtccgaaagagggggcgaattggacttttcaaggaattaaatggattgtgctgctgctgtgtcgtctggtttaggctatctgtgtgatctgtgatgccactatctagttcactggttcgtgagaacacttgttgtgatgttccaagatcagaacaaatgctcttaacccttgcatctgtgaggtgtgagctgaggtcagtgccccaaaaaataaataagcatgcagttagttcaattttgcaaatgctgtaaagcaaaatagtaggtaaaatagcaactacattggtctcttgatcttacaagatcagttgagttcagcttaatgacctctgttcttttttcattttaaccctgaacctggattcgactcaagcctattatctgtaaggtcatccaccttggcttctttctagtgttatgcccatgcaggataccttttctttttggaaatcctatgttgtgcacatgcaaggtggctacatagttgctagtagtttgcaactttgcatcccctctaccatcacctaaatttcagagctaaaattatagcatttagtacatgatttcaatccatttaaattcaatgtatttaaattggacacttataccttttgagtcaaaagatgtgataagtagaattatttctacatttaaactgattaatggttggttgctcactaatttttatttgtcatttaagacagttacatagtctccattagttttaataaatattttgcagtgaaaactgttaaaaaattaatgatacaatttttatttatggatttactagtatcattttcatgtactaaattctaaaatatgtgcgtattgccgtattcttggttaaaatttttaggtttgactgcaccttctaatgtaacttctatttagaacaaagagcagaatttagtctttgtggaattatcattacaaaccggtttttatgccatgtaggaaaaatcactacccccaatatctaagaaatgttatagctacatcataatcattcttgcagaccatgatcaggctgtagactcaattctagaatgttatgttaatgtggtgtggatccaattaaaatatttcaaaactccattctttttcctaaatttctgtaaagttctgggttgatctggaagaaagagataaaccctttataccactactttgaatgccaatcacttatctaccttcaattcaatctttgctttgctagccaagatcccttacagatggtgatcagctgttaagtaatagtgctgaaaatgctactttggcttttgatagccttatgcctacatttggcattggctaggttgttgacacaaaatagaaggattgttttttccacaaaagtttgtgaagacctgtcgtttcatgccatttgttaacagccatttggactagtttgccagttgccgtggtctgcaatactaatatgacactcggacttacgccattgaaaagacaaacactcatgtctttccaaatttcttaggtcactataacgataagggagttgagctcttgtctgatttccttttgcacctacttgattgcacgacatccagcagcttgagaaatgggcaaatggctggcgttgggctgtgatgagatggaaatcaaacccggactctgaaagatcaaggacgacacttgctaggcaatgacgcaggggactggaatgtgttggattgattcttgagcttggtcacaatgaggcaggcatctgtgtggtgtggcaatggaaaccttcacttagcgacccaagctgcagtccagtagtggttgttaatggaaagccaaatgcagaactcacactgtaaaggagtctaacttttccaaattctcttgatctcttccatggagcgaaaaggattatcctgaggaagaaggtgttgtagtctgattttctaaaattaagtcccgaccttgaaagcctccattgacgttgatcctttatgccttactgcaggttcaagccatccaccaaatcccagataaataggtgttctctcaggagaggaacagtgagcacccctttgatattaccagcagaacttccattatctaaagcctgaggcactgtgcaccatttgatggttcttttgtggatctttttatgagacttggggctaattcagatattgctctgccatctagggtggattgatcattaccaacaattaattccatggccaaattgaataaagcttggacattgcacatcatttgaatgggcaaacctgcccatggtcatgaagcatccattttctccaaccaaagccaccttatgtgaagagaccagccgtagacctcaaggttatgaataccaagagtccaagatctgtatatttgggttggctgattcacttattcccaaaagaaaaacaattgccaccatttgcagtccatagaaaaccctccatctcttgtcgatggttctaattaccaatttggggagatcgattgcaatcaagagataggtggggacaacagtaagcagcacccaacacggttcatgagagatgctttccgctttggagggttatccgccacttcacgatcgaagtatgcaactcagcttttagatggttttctgatgttcattggaagaccaagttaagtgcatgggggcttgcaccttctcacaagctagtctgctatcctctttcttgcactggagacgtgtttttgaaagcaaggtgatcaccccacgcctattacatatactgattaagcaattcaatggaattagtaggtttctctaaagggcagacccagtgtcggagactcctacatgagtggggtctaggtaagggataaaccgagacaagccctttcccgtaaatacggagagactgctttgaatctggcttggtgactcagtgagacaactctcaccacagtaccaggcatgcccttctgatttagtaggtttctgtgcttagctaaaattatgatcaatgtcacatatatccgtggtcagaagtttgggcacctgattcaattttgttcatggtaattcagggttcactattcgtctctgctcgatgggtgagtcttgtagtcaagctctcttctgcctttgccgtctagcccgacgaaagctttgcacgcctctgttaccttttggattatgtactacgtacttgattttaggtgcaaatctacattatgacatgacaatggataaagcaatccaataggctaattgaactcatggtgttggaatgagatgacaaatttatcaagcagttggtttgagttggcattcatgatgaagggtgatatgaattttcacggtaagttcttaacgtatttttatgttggccccagatggaaacaaccacattcctctagcatgatcaactataagggcaagatcttaagaaatccttaagaccatccatgcagaatttgagcacgataataggttgaggattcatgatcttgtccagctttgaatggggctcatggttaacatatatccagttcccaactatcgaggtgaacttttatcctttgctgcccaaccagtcaatttgcctcttgtttggattaattttgggcagctcttcattttggatttacatttacagtggttgggctaatttatttttcttttctgtagacttgggttgactacatcctggtttcccttgtcttggccttctttggcaaagttcatttaatctatagtttacttgttggagaacggagtattggaaatagcttattgtagatgcagcatgtctgtcatgttaacgattgccttattgtcccatcatttgtgtcaactatacccactttagtaggaactttttctctcgagacgcagaactctgtatcattatattagaagagaacaaaacacagggaaagctcccttacaaaagaaccacacaaaatccacaccaacaaccaaaatcctagatataaaaaaacaacaaacatgcccttttcagcaagactgatcaagatcacaaaaaatacacaggacggtcaaccttcctcctgcacaagggccaaaagaaagttaacaccttgtgctccggctaaacccccaaaatgtaattcctctaaagctagcaacacagctcgggccgcagtaggggaaacccctctagaaacacacctattgcgatgtttccagacagtccaagcccctaaaataacaagggaatcaaagccattttgattaagatcaaccaccccactggagattctatcccaccattcttccatttgttgacagaggtgctgcagaccaaccctttgcaggagggagaaccagaattctcgagcaaacacgcatggcagcaacaggtggttaatgtttcttcatcctggtcacaatgggggcaagtagtaggatgctaaaggccacgtcttgcaagtcgatcaacagtccatgtccaacatctgtttgtagcaaccaaccacatgaagaaatgtcactttccaggtgcccaagattttcaaatcctctctcaaagatagaaggcaattttcccctgaaagaatgctgcataaggcgattttggcgaatagatgccatcgctagagaatcgccagatgaaagaatcttccacgtctgatacccaagaatgatacgtaagggcctcaagagctgtccttatgttggtacgtcttttgggtactataactatcactcgaggtgcaatatcagccacactccgaccatggatccacttatcagaccagaagagggtgcgagcacaattaccaacttcagctactactgcggtactgccattgagaagaaagcctgaactttcttatgaatctgaagttgaaacacctcccatggtcgggcaggatcactcttatgtagccacaaccatctcatcctaaacgcccgacaaagattttggatattggaacttggaactagtattttttgcataaagaaactacattttttttgtccatcagatccatttgttgtaaggctctggttcactgacacctctgatcatttgctatttcagggacggagagcccgaacgaaaattacaaggagcag

SEQ ID NO: 768 - DNA, 847 bp, Zea mays
  Intron number 1 from transcript GRMZM2G106424_T01 (locus G RMZM2G106424) derived from phytozome v7.0 (chr-ID 4; pos 2 09798000 to 209798846)
aagggtgactaccacaggtataccactatcgctagcagatctcgctttttattctgcctatccgcatctagagtctagactacgcgatctatttatggagtggcccaggaggggggtttattggtggatgtacgcgcgatctttatgtgcgacgtgacagagttgatgggtttttgaggatctttacgttactagtggggctggagtcattatttattgcctgttatttgtagggcagcacgatctgattttggtgactttgtatatggaccttgggagttgttttgaagagtcaaaactaaagatctatgtgcagtagtttcttgtggggtgtgattgggcctgagttcttggtgttgattaggtctagatttaatgcgtatcattttttatttgattttttgcggttcgttcgtttgctatttgtggcggaaagtcaaaggacaaaaaagggaaaggggcattgtgatatctgtgacgtttttagtgaggttgtttctccttttatttaggattaagattaattgtgtacatgctactatacttttgcaaaattagacggttagtttattttgatgacttatagtggcatgaaaatggactagtttctaactttttcaaaattggagtggcatatttctaattaaccctattatttatggtgcacattgaggttgctttctatgaatttgtctatatgatgcatggtactgcgcagtctagattgaaggatatgaatttgtgttccatggattctgtaccccgtactgcacgtatatgttggtatctgatttctcatgatgattttgtaggtaccttgctgagttcaagtcaggtgcagagagga

SEQ ID NO: 769 - DNA, 12283 bp, Zea mays
  Intron number 6 from transcript GRMZM2G077863_T01 (locus G RMZM2G077863) derived from phytozome v7.0 (chr-ID 2; pos 9 5450344 to 95462626)
gcagaaactttacctaaggtaatactcaatgttgagacgttatttgttttttgtacatatgttatttattgcatttatttcttgactgtgtatgcaagtgtaataaatataatttacagaagtttctatccttatagccatttttcttaatcgtatacatcattaaattccaaaggatagatgttttgtttatgttaaaattcaatcttgaaagaaaactgagtccatcaaatgttgtgtttgtgttgtttcccactaatcttaagggcgtacccagtgccgtaggcttcccgcactgtgcggggtctgggcaagggtatctttaagcgccaagccttacccgcataatatgcagaggctggggctcgaacccgggaccttccggttacaagacggtaggctctaccgctgcaccaggcccgcccttcttcccactaatcttaagattgtgctaattttctttcaatgaaatctacctttgttttttttcatctgtagtttatagatcttcaatttgtttgtttcgttggtttcccatggcggcttgcaaaatgttggctttatagtatggctgataggaggtttaatggggttaagatgaattttgtgcatgaatgccatccatatatttgtgaagactcaaccatgaatgtatcgataaatttgggaggtgaactgtcatgacctgtcagggcccaagggggcggcgacaaggagcagcagtaaggagcgcatgtcgaaggatatgaagattagttgagattatctagaagattagttaagattatctaggaaggttatcagttagtagtttgttgagagtttttaggagagttttaaggagataaggatctctagatatataggggcggctagccggccagccgacctatttatgtaatcaatggatgagaaataaagtaagcaagaattagaagggagaaacgctcctcttgctcgaccatgggcagatgcctcggccggcctccctagtgccccctaacctagtcgtcgctctctaatccacggagacacaccctgtgaacaataaccgtgactgtagcaccgcagcgtcattggcagggcagtacaacgccgcctccaccaccagctcccaaccatcgatccccctctccaatcactcaccgatctgcaaccataacatttggtatcggatagcttgggtttcgatccaatcccatggcttctgctgccaatttcgcggcgtcgtcttgacaattggcgtccccatctccatgggctgcgccgcatgccaccttcgtcacgttgtcctggcaaccagcatccccatctccatgggctttgtcgcatgcaacctttgtcacatcgtcttggcaatcggcgaccccatctccatgggcatcaccacctgccaattttgtcaccacatcctggacgccgacgtacccatctccaggggcagcgccaaattttgtcacatcatcttcgctgacggcttctccccatgggcaacgccactaggggaagccatgactcagccatcaccatcttcattgatggtggacttgtggctctcactcttagtggttgagcaggggctgctgcaaatcaaagcagcaatgcaacatgagcggcagctggcgtcgtccgcaaggctctagacgtcggcaactgtggtcctacaggctgttgcttgtggcttgcttgcacgacggagagtgtgggagatgcgctggcagacgctcgaggcagccttagtggtgattaacctcgacacacggggacacgacctcgccctgtcgggcggccatcagcagccgcgctggcccgctgtctccaagtgcaagcttggtgcgtgtcctgcgggcggtgaacttcaactttatggcagcgacagtaaggaaggcgctcccctcgtcgtcggcaagggtgcactgcttagcgccaccacattccgctagcggttggtcattgttgcgacctactctaggtggccatccatgtgctccccttttgtctagaactccagatggcgtccatgggatctaggtggttgcacatgtgcaagtccaatgcgtggagggtgtccgccttatcttatggggtcaaaaaaattcaggttcggaataataaaataagccgagatgaaaaaagcttgtcttctaggtttttggttttgggtcaagtagagccggtctttgggcacccgttatgctgcagctcgaggacgagctacttgtccaggagaggtgtagtgtcaggacctgtcagggcccaagggggcagtgacaaggagcagcagcaaggagcgcaggtcaaaggataagaagattagttgagattatctaggaagattattagttactccatccgtcccaaaatataaggcgtaaccattttttgtttttgtcccacaatataaggtgtactctatgcacatgtacatcgatgcagtggtatagagagaattaaatgcatttcttggtttttgaaccagaggtggttacgccttatatactgggatggagggagtagtagtttgctaaaaatttcattgctagtttatttgttggtgatcagttggctcttacccatgaccagaaacatgagcttctcttcgatttctatgataatcttcttggatgagctgggcaaaggcagttttctcttgatttgggagccttccatagtaatgcaattgatctcaactcccttgagcccccgtttctgaaatggaagttcaacaaactattgcttgtctgccggcagataaggctctggggcctgacgggttcacatgctgtttttataagtcgtgttggcgcatattaaatctgatcctatgttagctcttctcttcagcaaggaaatccccagaagttgtggccgctcaattcttcttatttgactcttatccccaagaatttggatgcttcttcccctggtgattacaggcccataaggccataagcttgatccatagttttgctaagttagtcaccaaggttttggccaaaagacttgctcctcacctggccaagcttatctgggccaatcaatgtgctttgataaagggacggtcgattcatgacaactatatgttggtgtacaattctatcaaagccctccaaaaaagaagatggccaacattttcctcaagttagatatctctaaagcttttgattcaatctcctgggcctttttgattgaggtttttgttcatttgggtttcggtcttggatgatgcaatttgatctcaaatcttctagcaacctcctccacttaggtgctccttaatggttccctgggcgatttcattacacaccgtaaggggctgcgtcagggcgactccctcttgcctttgctttacatcttggttattgatgttctaagcagtctctttggtaaggctgaaagtatgggtcttctacattctctgggcagcagcaatgttaagaatagaatctctatttatgccgatgacgtggtgctgtttattaaacctgaggtggaagatttgagttgtaccaagaccattttagattgttttggtgaagcttcgggattgagagtcaatatgcaaaagaattctgctattcctataagttgtagtgctgatgtgaagcaagtcatctctaattccctttagtgaacaattgggtcattcccttgcaaatatcttgggctccccatctccaaccagaagctgagaaggtctcacctcttggattgggtggaaaagattgctgataggcttcccaactggaaggctaatctccttaaccttgctggaagaacaaccctggtgaaatctgttttatctaccattccggtttacctgttaattgctctgaatgttccaaattgggtgattaaagccattgataaagtccggagggctttcctttggaaagggatgaaggaggttaatggaggtagtagctgtttggtggcttggataaggtgactagacctcttagccttggaggcctttgtgtcccgaatcttcgctatatgggatgggctttacaacttagatggctttggtttaaaaaagcagacccctctagaccctggaacagattgaagtttcctgtcccgaagcaagttcgtgatttcttttcaatctcagtggtgaccttggttggtaatgggcagaacacgattttctggaaagatcgatggctcaatgggggcactattgctgatatggctccagaggtggttgttgccgttgctcctaaggtggcatgctctaaaacatttgctcaatgcctccctaacagaggctgggttagtgacatcaagccggtgctctccatatctggtatctaacaatatctcctttgggatttattggagaatgtgtacctcactaatgaagaagatcaacatctttggaggcacaattcaaatgggaccttttcttccaattattgttatcgtgcctttttcagggggtctatcacttttgaacccttgaaaagactttggaagtcttgggccccacagaaatacaagtttttcctttggttagcattgagaaacaaatgctggacaactgataatctagggaaaagaggactgccgcacccggatagttgccccttgtgcgactaggagagtgaaacggtgcagcacaacctcactagctgtgtcttcgcccgacaattctagtttcacctcttttcttctctagggatgggtcacctctcccataggactgaagatgattcgttagaggaatggtgcaggaggaccaactcactagcatcagtgtaaggaaagaacaacaaaatgggatcaatagtgccatcattttcggtgcctgtcatggccgggcgttacggccggacatacaataggcgtcgccgagatatgcgacgcgcagcggaacgcgcggcgcgcacagcaggcgcgcgagatgaggaaagtccggaagaggaaggtccggcagggggctaagataagggaatagccttccatgaataaatccttcctattatggagatagctttctataaataaaaccttcctagtattagtagttctttcctgttatgagatcctaaattagtgggctgatggccttatatatgatgtaaccgcacttgaaataagcaagcaagaaataccccttcctattctcctctcttctctcaagcctgcggttggggagttctcaccccaccggagaagacggacgactacgagctgcgtagccgaggtccagccagtcaggggttcaacgcccttgacaacttggtatcgggatcccggtgttcctcgcctacttgttccacgacgtcatcaccaagctccgccaccttctgcgctgcgcctgccatggaggatgacctcaagaccaccgtgaagcaactcgccagggccgtccaactcctccaagccaccgccgaggccaacgccaaggcaatccacgcgctgtcctccgatccatcgttgtccgcaggccaccgccacccaaccggcgagcaccacaacgatcggccgccccggttccaaaagatggacttcccgcgtttcaatggcaagtctgatccgctcatcttcatcaaccgttgtgagtcctatttccatcaacaacgtaccatggcagaggagaaggtttggatggcctcctacaacctcgaagatgtggcccagctgtggtacatccagctgcaggaggacgagggcacaccacgctggggccgtttcaaggacctcctcaacttgcggtttgggctgcccctccgctcggcgctgttgtttgaactcgccgagtgctggcgttcggggaccgtgaaggaatattcgaatcgtttccaggccctccttcctcgcgtgggccggcttgacgaggcctagcgcgtccagctgtacactggcggtctgcttccgccgttgagccacgcagtccgcatccacaacccggagacgcttgtgatggcaatgagcttggcgcgccaggtcgagttgatggagaccgacaggtaggcgctggctccaactcgccctggccagcgcggtcttctcccgaacctggcgccgcgcccagcgctggccgcgcctcttccaccgctcgcgctcccggtgccaccggtgggcgtctccacgggccgtggcgcgggcaaccagcggcggctgaccccggaggagcaggctgagcattgtcgcctggggctctgttttaattgtgatgaaaaatattcccgtggccacaacagattctgcaggcgcatcttcttcgttgacggggtggagatcgacaacaccgacgacgctacggccggggctgacaacgaggcaccttgcttctccttgcaagtggccggggtggccatggcggacaccatgcagatcacggtggtgcttggggccacatcactcgtcgcactcctcgattccggcagcacgcacaacttcatctccgaagaggcggcacgacgctctggcttgccgctacgccagcggccctgtctcacggccatggtcgccaatggcgagcggatcacctgcgagggcatcatccgcgacgcgcccctcctcatcgatggtgccctgtttccggcagacctctttgttatgccgctagctgggtacgacgtcgtccttggcaccaagtggctcggcgcgcggggacccatcgtctgggacctcgctcgccggcgcatgtcgttccagcacgagggccacacaatctgctggcaaggcatgccgtcgtcaactgctccgcggatccaggcaaccgtgaccgtggccgcggacgccctcctagacgagctattgggtgccttcgacgacatcttcgctgagccaaccgatctacctctagcccggggttgcgaccaccgcatcatcctcaagcccgatgctgccccggtggcggtgcggccgtacaggtacccggtcgcccacaagaatgaactcgagcggcagtgtgccgccatgattgagtagggcatcgtccgccgcagcgactcaccgttctcctcgtcggtcctcctcgtcaagaaatcggacgggtcgtggggcttttgcgtggattaccgcgccctgaatgcgctcaccgtcaaggacgctgtcagagaggaaattctccggccgggtggcggaacgcacccgccctaaatcctaagatgaggaggggcctaagcgttttgcctgtctactaagcgatgaatgagcacaagaacaaacaagggtttagagtggttcgggccgccggagcgtaataccctactccactgtgtgatgtattgagcttgagagcttgtatgaacttgtgagcctgagctgggtctaagtgtgtctgagtccgtcttgtaacaccgtgtgccctcccttttatagctcaaggggggcacgtacaagggtactgagccccgacatgcgggcccagggacataacgaatgtaatacttggagcaactgatcctggtcgccagtgcaatctccttgtgccctgatatccgcggtctgcgtagcattggcgtgcagcggaaacttccctggtcacgtacgagtgatgatgagcacattgtatgccgcggcacggttgtactacctgccaccggaatggacaggcacgccgcctgcaggatggcctggttgctgcccgccagcggagtggatagggctcatttaatgctgaggcggcacatcacctgccagcggagtggacagggctcattcaatgctgaggcggcacatcgcctgccagtggagtggacaggcggcgcgccttgtccgcattaaatgcaaaggccgcgcggcccagaggccttacgtctggcttcgcccgcttgcttacgtcacgggcagtaggccacgtggcagcatcggggagtgggagcgcacgcggtatggttcggacacgtgtcagcaccggacccccgcctggtcttgattaaggcgtgggtattctttgccttggaatcccgggaccctactgtgagtggcccggacccctcctccctgaggggtccgggacccgtcccaggggtctggtttgtacctgtggaggtcctgaacctcgcccggaggtccgggctgtgcatccaggggtccgacactttcccgtgagggtccggacctactgttgccaccttggagtatatcgtctcctctggctacgtggcggccccggagccgcccacgtggaggggtcgggtgctgttcaccgcgcgactagagataaccgcgcgggcaccgtgtcttcatactgtagcaggggtacccctgattcagggtaccgacagacgcctttcccattccggtggtcgacgagctactcgacgagctccacgacgcgcgcttctttaccaagcttgacttacggtcgggttaccatcaagtgcggatgcgggctgaggatgtgcacaagaccgcgttccgtactcatgatggcctgtacgagttcctggtgatggcgttcggcctctgcaacgccccggccacatcccaggcgctcatgaacgatgttctccggccgttcctccgtcggttcatcctcgtgttctttgatgacattctaatttacagcaagacgttggccgaccacctgtgccacctccgtgctgtcttttccgagctttggcaccaccaactcttcgtcaaacgcaccaagtgcgctttcggcgccacctcagtcgcgtacctcggccatgtcatctccaagccaggtgtcgccatggatccggccaaggtgcaggccatccatgagtggccagttccacgtttggctcgggcggtccgcggcttcctcggcttggcaggatactatcgcaaattcgtccacaatttcgggaccatcgccaagcccctaactacccttgttaagagggacgatttcgagtggtccgaagcggcagcaacggctttcgacgccctcaaggcggcgatctcctccgcctcgatcctcgccgtgctggacttcgcaaagccattcatcgtcgattgtgacgcctcgtcacacggcttcggcgcggtcctcgtctaggagggccacccggtggcgttcttcagcaggccggtagcgccacgacaccgcgccctcgccgcctacgaacgcgagctcatcggcctggtccaagccgttcgcaattggcggccgtacctctaggggcgtcgcttcctcgtcaaaaccgatcactacaacttgaagttcctgctcgatcagcgcctcgcgacgatccctcagcatcattgggtgggcaaacttctgggcttcgacttcaccgtcgaatacaagcccagggaggcgaacgtggtggccgacgcgctctcccgccgcgacacaccggaggaaaagaccgtcttggtcctgtcgggaccacgtttcgacttcatcacgcgtcttcggcaagcacaactcaccgacccggccctcgtcggcatccgcgatgaagtgcgcgcgggctctcgtggggccccatgggcggtggtcgacgacatggtgcagtatgtcggccgcctctacatcacgcctgcgtctcctctcctacacgagatcccgagggctgtgcacgaagagggccatgaaggggtacaacgcactctccaccgactccggcgtgatttccattctcctaacatgaagcaggtggtacaagactttgttcgcgaatgtgtcacgtgccagcgctacaagtcggagcacctgcagctggccgaccttctccctctgccagtaccacagggtgtgtggtcggacatcgccatcgacttcatcgaggcacttccgcgcgtgaggggcaagtcggtcatcctcatcgtggtcgatcggttcagcaaatgtgcccacttcatcccgctcgcccacccgtactccgtcgagtccgtcgcccaagctttctacgccgacatcgtccgtcttcatggagtgccgcagtccattgtgtcagatcgcgacccgatcttcacgtcgacattttggcgcgagctcatgcgcttggtgggcaccaagttacacatgacgacgaccttccacccgtagtcagatgggcagtccgaggcggccaacagagtcatcatgtaccttcgctgcctcacgggcgattgtccgcgtcactggctgcagtggctcccatgggcggagatcgtcttcaatacggcgtaccaaagttcgcttcgggataccccgttccaggtcgtctacaggcgcgacccaccaaccatccggtcctatgagccgggcgacacacgggtggcgactgttgccaagaacatggaggaacgccaggaatttctcgcccatatccgcgctcgtctcgagcaagcttaggcggtttagaaacaacactacgacaaggctcatcgtgaggtttcctacaaggttgatgattgggtgttgctccgacttcgccagcgaccggttgcgtcgctgccccacgccaccaccggcaagctcaagcagcgctacttcgggccctaccgcatcaccgtgctaatcaacgaggtggctgtccgcctcgctcttccacctcaggctcgcatgcacgacgtgtttcatgtaggtctcctgaagaagttccatggcgctccaccagaggctccatcgccccttccactagtccaccacagcgccattatttcagagccggaacgcgctgtccatcagcgcgccgctcgtggcgtccagcagatcctggtacagtggacgggacaatcccctgcatcggccacctgggaagatatcgagccattccgcgccaagtatcccgcacttcagctcgaggacgagatgcctctcgaggaggggagagatgtcatggccgggcgttacagccgcacatacactaggcgtcaccgagatatgcgacgcgcagcggaacgcgcggcacgcacagcaggcgcgcgagatgaggaaggtccggaagaggaaggtccgacaggggtctaagataagggaatagccttccatgaataaatccttcctattatggagatagctttctataaataaaaccttcctagtattagtagttctttcctgttatgagatcctaaattagtggcctcatggccttatatatgctgtaaccgcacttggaataagcaagcaagaaataccccttcctattctcctcacttctctcaagcctgcggttggggagttctcaccccaccggagaagacggacgactacgagctgcgtagtcgaggttcggccagtcagggtttcaacgcccttgacagtgcctggtgcctatggctgcagaggaatagaactgtttttgatggggatcttccctccatccagaaggtacaacaacagttcaatgatgaacttgcttgctggatcatggctagcgcgaaaggtttgggtcagcttgggctagattgcttcatgagaagtgtcggatcgagcccttttgctctcatgtaatccttttcctttcttctcttttgtttgtttgtttttcttctctcttttttcttttattttgtttgggttgtgaccccgttgtatggttttttctctctctctctatctaatacaaagatgcacaactctcctgcgcgttcgagaaaaagagtttttaggagagttttaagaagataaggatctctagttagataggggcggcgagctggccagcctacctatttatgtaatcaatggattggaaataaagtaagcaagaattagaaatgagaaaccctcctcttgctcggtcgtgggcagaggccctggtcggcctccctagcgcctcctaaccctagccgttgctctctaacccgcgcagacccaccctgcgaacagtaaccctaaaccatgaactgtagccgcgaccgtagcgcatcggcgtcattgacgggtactgttcacgcgtgaacagcgcgccgcctctaccagcaggtcctaaccatcgaccccctttccaatccctcaccgatctgcaaccataacacgaacaatttcacttttttggtttgcgaaattagttattttgctggcaatgcagagtagcttgattatttggtcttgcgcgaagagaacattgtttttgtgaaccctatacatttcattgtttcaaggtaatgcaagtttctgcaattacgattgcccagatcttgttcttgtttaaacgtaattctatttattgtacttcaaatctagaaactgttgctaaacctccaacatagctgtaatctcggacaccatttactttccatgctttaccagcagacacctagccagaacctggtaccatggtgaaatgattctgttctgatcctgcagtgacgttttgatcctgcagtgacggtctgcatctgacacaggaaggaaacgcag

SEQ ID NO: 770 - DNA, 23664 bp, Zea mays
  Intron number 7 from transcript GRMZM2G083182_T01 (locus G RMZM2G083182) derived from phytozome v7.0 (chr-ID 1; pos 2 44912610 to 244936273)
accccacaatccaatccatcaggaactacgagaaggtcagccaaattctgtcaaaaatgtatcaagttcaaactagctactcatggagtgagtgcaattgtgttctcactttaatttcaatgcatacatatttagtttgagcagcatcattcttgtccaactaccataacaaggtatctttagaagtattccaataactcaacctcttatttgctatggaatagggattatatttgggtgtatgctaacgggtaacagttcacccagatcctcctccacttgactatgtctctgatgaaccaaacaattagatagtctctgtgtgctgacctctaaatgtttcaatgcagcattaccatcaactcgaatgagcgattctaagtctgggcagtgaccgcagttgaccatctactctgctaggcagtccatacatgtgttcgtctgtaagtgcaatcaaccccaagtgagggttttggtgatttaatgacaaaacaaataagggtactaacagtttttgttctcagtgtatgattagaaagaaacaggaacttaaggaagcaccaaggacttcatgcaacagacgtataaaatttatgtaaaatcttgtgttgcatgatgtaattcttccttttttttccgcacaggtaaaggtgtttgctatagctcaagtcaccaaattcaaaagctatttttgaaaaccaaaaatcactttaacattacttggttgaccatggttagggttgagaaacctagagtgttcttgctgaaaagcagctgaacttcttcaactgcagctgagctttccagctgaacttaacttcagctgtgatgagcttcttcagctgcagctgagcttttcagctgagctggacttcagctgagttgaactttcaactccagctgaacttcaacttcagctgtggacctctttgaccatacccagctgaacttgcccccgggcagctgagctggggttttctctccaaaactctctggtctagaccagctgaactggtcctggggggcagctcaactggtctctgaccctctgacttctgatctgcagtctgccagtcagactggcagtcaggtcgccaggggtgtcagggggcggttcaacctccctagggggcgattcaaccggtcctgacctgtctgacccgcctgcaggtcagtctgccagtcagtgtggcagtcagactggcagatagtctgctgacctgtcagggggcggttcaaccggttttctgcgtggtttctggtcaaacggctagtttttgagccgtgactataaatagaaccctctctctctcttcttcaatacggctggacacttactcatttattgctcacctaacttgagacaaagcactcatctctccatctctctcacacttaaatcttcctcaagattcaaccttgttggaggagctcttgggtgtgaggtttgtgcttgtgctcacgatttggtttttctctcccatctcttttacaaagacttgagcttgtgcaaacccctcttgtgctttcttggtgttcttgaaaccctaggtttcaagatcttttgaggttgcttgggagtctccaaatttgtggacgaccccaagaagtttgtatcacccgctctttgagctaagataagaagagattgccttgacctttgtggtcggttttggaggattagggttgaaaaagacccgaccctttgtgggctcctcaacggggagtaggacacctttgtggtgtggccgaacctcggattaaatcttgtgtcttgtgttcttgcttgttttaacttgagatatttttacttgcaagattgacataaagatttttccgtagagtttatctagaagtgaaatagcctttacatattcatcttttcatcctaacttagctatatcttacttctcacaagaactcgcgaaatacttttttgagtagattttagtctaaagtttataaaacagttggattggttcagagtggttcaacttgcgcacgtagctattgaaccggcctgcaccagtcgtactgtgtatttaacaatctttcgaagtttgttgtgaaaattttcagattagcctattcaccccccctctaggctactttcaattggtatcagaacttcgtacctcgttttacgcttaaccgcgtgaggaaacgatcatgtctactcaacgggaccatgtggatcctctcctcgaggaaatccccatcacatcttccggtgaggaagtggaccccaaggtcctcgacctcgccatgaaaattgccgagaagatgttcctcaaaatgaaagaggaagatgctaagaaaaaggccgaagaagaagaatcaagaagaaaggccgaagaagataaaggtaaaggaaaatttgattacaatgacgatctagtggatcttttggtgtcgaaggtgttgagcaaggtaagtctcaacaccgagggatcatctaccaaaagcaaaggtaacgaatttagtaaagttcaattcgattactctagaaattttatccccaacttctcttccgccccacttggaaagttaccaactcttagtgagttgaactatgacgagtgggccgacaagatgaagtcgcatttaatcggtgtgcatcctagttatcggggaccataattaggggtacccccaagactcctaatcttagcaggtaacccccatcagcacaaagctgcaaaggcctgatgggtgcgattaagtcaaggctcggtccactcaagggacacgacctcgcctcgcccgagcccagtctcgggcaagggcagccgaccccggaggattcacgtctcgcccgaagaccccctcaagtgacaaacacaccttcggctcgcccgaggcccagtcttcgccaagaagcaaccttggccagatcgccacgccaaccgaccgtatcgcaggagcatttaatgcaaaggtggcctgacaccttatcctgacgcgcgcccctcagtcgacagagccgaagtgaccgcagtcacttcgccgctccactgaccggcctgacaagaggacagcgccgcctgcgtcgctccgactgctgtgccgctcgacagagtgaggcggacagcagccaagtccggcctcgggcgccataggaagctccgcctcacccgaccccagggctcggacccggcctcggcctcggaagacgacgaactccgcctcgcccgaccccagggctcggactcggcctcgtccctggaagacgacgaactccgcctcgcccgaccccagggctcggacttggcctcgatcccggaagacgacgaactccgcctcgcccgaccccagggctcggactcggcctcggctccggaagacgacgaactccgcctcgcccgaccccagggctcggactcagccctggcctcagccgacggtctccgcctcgcccgacccggggctcagactcgacatcgacctcggaagacagactcgacctcgacctcggaggagcctccgcctcgcctgacccagggctcggaccgaccacgtcacaggggggggccatcattaccctacccctagctagctcaggctatggggaacaagaccggcgtcccatctggctcgccccggtaaacaaataatgatggcaccccgcgtgctccatgacgatgtcggctctcagccccttacggaagcaaggagacgtcagcaaggactcgacagccccaacaactgtccttccgcaaggctccaacgctcctccgacggccacgacatcacatgaatagggtgccaaaacctctagcccgggacggagctctgtttcgggaatcttgagttcatgtccctcgacggcagctacgacatgatactccttcctccgccgcgcgacagcgacaatggcggccgacaacccgcccgccggcggcggaatcgacgacgtcttccccacgtggcggaagaacaacattcgggtttgtcccgtcgcctcccccgccaacggaggaggaggcggggcaaccaaggccaagcaggaggcggcacctcgtcggctgtcgagcaaatcgacggcgccggtgccccaacgggggacacgtcgggcgtcgacctcacgtctgagacgaagatgagcgttgtttccccgcaacacgccaactccaagaggacggacgacgccagcacgctcgcaaagggcttgctgggcgtcaccctcgtacccgagacgacggtgcagtctgcccctgacgtgacttcgtcaccgcccgtcgaccaggaggtactgaccgattcccatctcgtgccttttagatccagctacgacccaccaagcgaccccgctttggtggatgctttaataaaggcatgttcaaaccctccggggtatcgtatgcggtcaccctgggaccggctgacggccgtctcgacctatggaccctcgggttccgaggaagatgacaagcccgacttttgttgggatttctccggactcggtaaccctagtgccatgcgggacttcatgaccgcatgcgactactgcctttccgactgttccgacggtagccgcagcttcggcgaagaggactgcggcccaagtcgtgaatgtttccacgtcgatctagggggtcccggcgaaggcaaccatcttggtataccggaaaacagtgatccccctaggcctgcgcctcgcgttgacatccttcgggagctagctgtggtcccagtccctacgggggtcaggacgcacaactcgagcaaatccgcgagatgcaggccaggctcgacgagggagcaggaacacttgagtcgttccgccgggacatcgggcaggaatgggcaggccaagctccggccggagaagcgcgtcatgtaccctaggacatccagcaccgcattgccgacgacatcagggcaaggccgccaccagcttctagtggggtcggccagaacctggctgcggcagcgatactactccgcgcggtgccggaaccatcaaccacccaagggcgacgtatccagggagagctcaagaatctcctggaagacgccgcggtccgacgggccgaaagctctgcctcccgaaggcagggatacccctcggagcatcgcgccgcgacttcccgattcatgcgggaagcctcggtccacaccgggcgcacgcgcaacacagcgcctgcggccccgggtcgcctcggcaacgagcaccaccaccgcaaccatcgaacccacctcgacgagagggtgcgccgaggctaccaccccaggcgtgggggacgctacgacagcggggaggatctgagtccctcgcccgaaccacccggtccgcaggctttcagccgggccatacgacgggcgccgttcccgacccggttccgaaccccgactactatcacgaagtactcgggggagacgaggccggaactgtggctcgcggactaccggctggcctgccacctgggtggaacggacgatgacaacctcatcatccgcaacctccccctgttcctctccgacaccgctcgagcctggctagagcacctgcctccggggcagatctccaactaggacgacctggtctaatccttcgccggtaacttccagggcacgtacgtgcgccctgggaactcctgggatctccgaagctgccgccagcagccgggagagtctctccgggactacatccggcgattctcgaagcagcgcaccgagctgcccaacgtcaccgactcggatgtcatcggcgcgttcctcgccggcaccacctgccgcgacctagtgagcaagctgggtcgcaagacccccaccagggcgagtgagctgatggacatcgccaccaagttcgcctctggccacgaggcggttgaggccatcttccggaaggacaagcagccccagggccgcccgccggaagatgtccccgaggcgtctactcagcgcggcaccaagaagaagggcaagaagaagtcgcaagcgaaacgcgaagccgccgacgcggaccttgtcgccgctgctgagtacaagaaccctcggaaacctcccggaggcgccaacctcttcgacaaaatgcccaaggagccgtgcccctatcatcaggggcccgtcaagcacacccttgaggagtgcgtcatgcttcggcaccactttcacaaggctgggccacctgcggaaggtggcagggcccacaacaacgacaagagggaggatcacaaggcagaggagttccccgaggtccacgactgcttcatgatctacggtgggcaagtggcgaacgcctcggctcggcaccgcaagcaagagcgttgggaggtctgttcggtaaaggtggcggcgccagtctatatagactggtccgacaagcccatcaccttcgaccagggcgaccaccccgaccgcgtgccgagcccggggaaatacccgctcgttgtcgaccccgtcatcggcaacgtcaggctcaccaaggtcctcatggacggaggcagcagcctcaacatcatctacgccgagaccctcgggctcctacggatcgatctatcctcggtccgggcgggcgcggcgcctttccacgggatcatccccgggaaacgcgtccagcccctcggacaactcgacctacccgtctactttgggactccctccaactttcgaaggtaaaccctcacgttcgaggtggtcgggttccaaggaacctaccacgcagtgctggggaggccatgctacaccaagttcatggtcgtccccaactacacctacctcaaactcaagatgccgggctccaacggggtcatcaccgtcggccccatgtaccgacacgcgtacgaatgcgacgtggagtgcgtggagtacaccgaggccctcgccgaatccgaggccctcatcgccgacctggagagcctctccaaggaggcgccagacgtgaagcgccatgccggcaacttcgagccagcggagacggttaagtccgtccctctcgatcccagcaacgacgcctccaagcagatccggatcggctccaagctcgaccccaaatagggagcagtgctcgtcgacttcctccgtgcaaacgccgacgttttcgcgtggagtccctcggacttgcccggcataccgagggatgtcgccgagcactcgctcgatatccgagctggagcccgacccgtgaagcagcctctgcgccgattcgacgaagaaaagcgcagagccataggcgaggagatccacaagctgatggctgcagggttcatcaaagaggtattccatcccgaatggcttgccaaccctgtgcttgtgaggaagaaaggagggaaatggcggatgtgtgtagactacactggtctaaacaaagcatgtccgaaggttccctaccctcttcctcgcatcaatcaaatcgtggattccactgctgggtgcgaaaccctgtctttcctcgatgcctactcagggtatcaccaaatcaggatgaaagagtccgaccagctcgcgacttctttcatcacaccttttggcatgtactgctacgttactatgtcatttggtctgaggaatgcgggtgcgacgtaccaaaggtgcatgaaccacgtgttcggcgaacacattggtcgaacagtcgaggcttacgtcgatgacatcgtagtcaagacgaggaaagcctccgacctcctttccgaccttgaaacgacattccggtgtctcaaggcgaaaggcataaaactcaaccccgagaagtgtgtcttcagagtaccccgaggcatgctcttggggttcatcgtctccgagcggggcatcgaggccaacccggagaaaatcgcggccatcaccagcatggtgcccatcaaggacttgaaaggcgtacagagggtcatgggatgccttgcggctccgagccgcttcatctcgcgcctcagcgaaagaggcctacctttgtaccgcctcttaaggaaggccgagtgcttcacatggacccctgaggccgaggaaaccctcggaaacctgaaggcgctcctcccgaacgcgcccatcttggtgcccccgctgccggagaagccctcttgacctacgtcgccgctaccactcaggtggtcagcgccgcgatcatggttgagagacgagaagaggggcatgcattgcccgtccagaggccagtctacttcatcagtgagttactgtccgagaccaagatccgctacccacaaattcagaagctgctgtacacggtgatcctaacgcggcggaagttgcgacactacttcgagtctcattcggtgattgtggtgtcatccttccccctgggggagatcatccagtgccgagaggcctcgggtaggattgcaaagtgggcggtggaaatcatgggcgagacaatctcgttcgcccctcggaaggccatcaagtcccaagtcttggcggactttgtggttgaatgggtcgacacccagcttccagcagctccgatccaaccggaactctggaccatgtttttcgacgggtcgctgatgaaaacaggggcaggcgcgggcctgctctttatctcgcccctcgggaagcacctacgctacgtgctacgcctccacttcccggcgtccaacaatgtggccgagtacgaggctctggtcaacgggttgcgcatcgccatcgagctaggggtccgacgcctcgatgctcgtggtgactcgcagctcgtcattgatcaagtcatgaagaactcccactgccgcgacccaaagatggaagcctactgcgatgaggttcggcgcctggaggacaagttctacgggctcgagctcaaccacatcgcccgacaatacaacgagactacggacgagctggctaagatagcctcggggcgaacaatggttcccccggacgtcttctcccgagacctacatcaaccctcagtcaagaccgacgacacgctcgagcccaagaaggcctcggcccagcccgaggcaccctcggcccccgagggtgaggcactgcgcgtcgaggaagagcggagcggggtcacgcctaatcgaaactggcagaccccgtacctgcaatatctccaccgaggagagctatccctcgaccgagccgaagctcggcgattggcgcggcgcgccaagtcgttcgtcttgctgggggacgggaaggagctctaccaccgcagcccctcaggcatcctccagcgatgcatatccatcgccgaaggccagcagctcttacaagaaatacactcgggggcttgcggtcatcacgcagcgcctcgagcccttgtcggaaacaccttccgataaggtttctactggccgaccgcggtggtcgacgccaccagaattgtccgcacctgccaagggtgtcaattctacgcaaggcagacccacctgcccgctcaggctctacagacaatacccatcacctggtcgtttgctgtgtggggactggacctcgtcggtcccttgcagaaggcacccgggggctacacgcacctactggtcgccatcgacaaattctccaagtggatcgaggtccagcccctaaacagcatcaagtccgaacaggcggtggcgttcttcaccaacatcatccatcgctttggggtcccgaactccatcataaccgacaacggcacccagttcacaggcaaaaagttcctggacttctgcgaggatcatcacatccgggtggactgggccgccgttgctcaccccatgacgaatgggcaagtagagcgtgccaacagcatgattctgcaaggactcaagccacggatctacaacgacctcaacaagttcggcaagcaatggatgaaggagctcccctcggtggtctggagtctgaggacaacgccgagccgagccactggcttcacaccgttctttctagtctatggggccgaggccatcttgcccacagacttagaatacggttccccgagggcgagggcctacgacgaccaaagcaatcgagctaaccgagaagactcactagaccagctggaagaggctcgggacatggccttactacactcggcgcggtatcagcagtccttgcgacgctaccacgcccgaggggttcggtcccaagacctccaggtgggcgacttggtgcttcggctgcgacaagacgcccgagggcggcacaagctcacgcgtccctgggaagggccgttcgtcatcgctaaggttctgaagcccgggacatacaagctggccaacagtcaaggcgaggtctacagcaacgcttggaacatccgacagctacgtcgcttctacccttaagatgctttcaagttgttcatacacctcgttcacacacaaagtctaaccatcaaggaagggtcagccttgcctcggcaaagcccgaccctccctcgggggctagaaggggggaaccccctatgcgtcaaaattttcctcgaaaaaagtcttccatcaaaaagtctttcgcgtctcccggctatatcagtaacaggaccccaagaaacgaataagggtgcatgtaagtggcaaggccaactgagccgagggactcctacgcctctgggatacggatacctcactcgtcgcctaccacaaaaaatgactcttacttgggcaagctaccctgctactgacgaacgggtccggatacgcaaaacggaaggaaaagaaacacaaccttatattacgataataaagtgttcgggcctcggcggccgcaaaagacacatatgcattcaaagaaaactgctctagcagaatcaggcgtcgcccggagaaggagtcgcgccctcggcttcgtctccaccctcggcaagatccgctgtaacacccctagtgttactgtaactaaaacttgagcatggcatcataagcattggcattgcatatgtttgatacacttagaatgcattcactaggtaaaaatttcaaacaagttgtgtgttatagcattttgcaaatatgaccctggatagggaacttaaccctaaatagggattaaaggggtaaaacctaacccaagttgagaaaacctaaaagctttaggagaaatagtataaaatgttcccaaaaatgaatttgaatcacatttatacccctgggatactagaaaccctaattggaaccctagaaaaccctaaatccaaaccctaggggcttatgtgcaaaattagtccacttttggactaaagtgcaaaaaccaagttaaataagtatattaagtcatttgggtcactcatatgtggatttacaagccaaaccctaagttttggcctcatttgcaaaaaggaccctagttgaggttttatactaagtctgaaaaacagtgttatgggctcaacttttgagccttgtaacttttaaatcatagggtttttgccctaggtcaccacatcaacattgtagcccaatcataggaggacaactttgcttaaggatgtgagcttagttgttaagagtaaattggagataattcagctgaaaatctggctgtcaggctggttccactctgaaagttagatgttcagtgtaacagagccatctttgggtgtgaattcaaccatgatctagtgatcaaatgagctcagtcactatagccgaaatataggtggtataaagctctccaactttgctgcagagtttgggttgtgttaccacaggaatctgggagaaaatcaagctccaacttggtctgtcagacaagctttttactgaatctggcgcactgttcaccgtcttcagaaatatcgcgccgtggataagggtcagcccctcaccggcgataagaacaccaccgcagcgtggatggtcgtcggtggccgtggtaaatatcctcggcatagtggcagaaggtcactaaggtggcaggctccggttaaacggcgacccccgtgccatcaccggaatccgccgcgcggaaagcttgccagcacatctgaaatccacacttcttctccaactccggtcgacggcctataaattgagctcggactctgcttcttctccacattacgcacctcagtgcttaagcaattgactcaattccgccagagaacttgcggagccccaaattccctcctcctccgttcttgcttcgccgcaagggactccatcgtggtcagcgcgcttcgggtcagtgtttatcaaattgcttcttgttctagttttcctttgatctcctattgctctccatgccaatcaattgaaattcggccgaagcccatcaccggaatgcacccttgctctgtaaaacgccgccgtgacccaccctcaccgacgacctgctcttcggctcgtattctgcccaaaccaaagtgtgtgcataactcctggtgaacccgtgaacccttcctcagcctcaattcggtcgtcctcgccgtcgtttgatcggaacgcgttcgcccctgtaaccatccgctcggtcgccgtggactgctcgattcaatgcccccttgatgaaattgatttaggggaagtgtttgatagaagtttaattatgtccctgtcgcacgggagctccagccatggcgtcagccggccggaattggctcgccggggtgcggcgagggctgttcctcgtcgtggaccttagtctgcaaagggatggaaggtggaggtcctctttgtaaaccgtcagtgactcatctcaatagtgcgttgaccttgcttcgggatattcaaaaggacagggatctcaatgcaaagttggcgcgggcgcaggcgcaagcgcgcttctgctcattattgggccgcctgtatcgaatttggcccaacactattcaccagtttttccttttctttttattccagagctaaaacaattatagaaaatggtagaaaaatcctaaaattgtgaaaccaattttcctagacttcttattttccctagaatttaataaaaatagttttatgatttttagaggaaataaggaattttaaggcattttaaatagtttaaagtcttagttctggatttttagaaaatagataataatcccaaaattgctcaaactttttacataagctctatacattatttagaagccttgggtaaatttgggttgatttggaccttgtttgatacttagaacctaaaacccccctgccctttgaattcctttactgactccggaaaccctaagttctcgaagttccgtgaaggaaagttatattcaagatttagataataaatctttattaactttgcactctcatgagcattacatggcattcattcttatatatatacctatatggttatatttagaaaacgaagaaaagattgaagtgaccgaagagaagacaccaccacctttggaatctcaggcagggacttggctctacttcgacatctgcgagtccgagcccgactcacctactaatgaaggcaagccccggtgcatttgccaccttccttgatgtttttaaaatctttctcacttgattgctgcattaggtgataggagttgaatgattaaacaattcctgcattaccttccttgaacttgattaccttccttgaaaccctgtttttacaaaaaggtttttatatgcttagtattgctctagaaaaacaaaaggatttgttttacaaaagatgtttggcaaagtgggagggttgttttcaaaaataaaaattgatggtggatccatcatggccgtgatgggttcaacatcggaaaagatgtacctctgccaggtaccaagtttttgggttgaaaatattaagctgagaccgggcgggtgacttgcacgagaagagagtctcggtgtagtgtctctgtctgagtcgattaaggaccttgtcgatgtaggcttgatgatcgaggaccctttaactggtcacatgcctcgtcatgggtaagccttgcctcgggcagactaaggccagaataagataacacgaaatgggcgtggagcggtggagagagtagtgtgtaccctccatggcaagaggctggacggtggtgtatctgtgctctcggtttgcgtgaacctgatctggtcttaagaaacccggtggcgggttgacatatgcaagggttaagtgctacatatgtcgtgtgattggagatcctcagctgagtataatcaattcggatcaccgtaccttcgcggttatgaagacttggtcactgccctacacgtagcaatccagtgaagatgaaggaagaattaagaacttggctagttcaggataagtgtttgaactaggttagagagaactctagagataggtaagattacttaacttgacaaataaaactggatttttaaggatccactttagtaagcatttctgcaaaacagagtctttgattattgagaagccttaccttgactcccttaaaccagcatacccttgagaatcttttctttagtcgggtaagacttgctgagtaattccatactcagggtttatcccttcgttgtttttaggtgaggaagcaacaaatttttgttgcttttgttccaaggtggttccccatgaggaaaagcaagagtgaagatgcgggaggacatggtcctccatatagaacttttgtttaaaaacttatcgggaggagtttttgcctccctcggttttgtaataatactactctgcactcgtttatatttctggtctgtaataaacaacttgagcttactttctaaataaatgtaagttatgtaatcgcttccgcatttcttcatctccgatgttctgtaatgtctgcaagatgggtgaaacgttcctggaaagggaagaaagaagataccgaacttgtcaagtagttcaggggcacctacagggttgtctaaggtccgttggacaaggacaactgtaggtgggcctaattacttgggaggttccatcacagctggtatcggagcgtagcccttctttgcagatattatgaggcatcttcaaaaggattttctaaaaatcttacctagaaactctcttcttttcttacctaagtattctgaagagtttatcttaaagaccaggtagtaagagtgcaacatatagaaggtgtgaatcaactaaggttgattcggtaattacacatgcatcatgctaagaactatactaaataaagttttcccccttagagaaatgatgtcgcgcaccagaaagaccgcgcgcaaatctgctagacccattggcataccccgccattaacttgccccaagacctgaagaaagtagcagtggtagcaacgatcctatcggggatctggaagcacaagtcgaactgcttcaatcagaactccgtcacaggaatgatctatgggtcgcggatgcagccatccactacttgcaagaccaactcacaaaacgagatctagcgctcgattggacggttaactctcgtccactcacctgggctaagggagccaaagctcgagcccgcgtggaggagcttagctcatccatgtataacttgcaggtctgttataatacactacatgaataagttcatgtgttgtattcacaactgcacccgaacgtccctgcggatcctgtcaggatggaagccggaccttctcatgtagcgggagaagcacttgatggtgaactggacctttttaggccccctccctctatgaagttggttgacgaatggtcttctacgcccgacagtaaagctaccaaaagtgaaaagaagtggcttaccaagtgcctgtaacattggccggataggacttttctgctaatatgattgttccaaaaggccaagacatagatgtcatcttaggcatgaactggttagcccacataaagcaattctcaaccttgatccgagaaccatcaggttgagtatggccaatagagagttggtgacttgattgcctaaacccaagattgggctatattcgtatttagtgaaccgtgatccgactcaaagttgaattttccgttatcactccatgaccatacccatacaagtaaatgcctagataatttccttgtcgaacctacaatgtacctggacttcaaacaaggatctcaagtcatgcctccttttagcaccactctcctgttcagctgatgcaggttgaggtctccattgtatttggcctctccttgcggatcgccatgttgttttattaacccaacctaggaaagacatgtccgaccattttctttaatttgatgcctttggtttcttcatatctatcgaaggcataccaacttaatccttgaccttgtgatctctatgatgggcatagaaatatgcttggggctgaattaacagtctcccatcatacttctttcatcaagtttagattatggccatgccttgggccatgatctatttggctctctacttgtaaccatttttacaggtggagcaattctttgtatatagtcacccttgctcaatccattggtgtcgcgtgagatttcttgttggttatgtctggtaatggttttattgtaacaccctgaatttggggtataaaaatttctttgctcgtattcacaaattcaggtgttacttctctcttcacatcttccccaacctcctccttctcttttctatagaagaagagtggttatttttttatttattgtaaatgtaattataatctagtgggttaaaccctaagggaacaatggtttttgcatcaagttagaaagcatttgtttttttgtttgatgaatggtttgcttgatctttcatctaatcatttatttgcacataatgtcaaactgaaataaatagagaagagaaagaaaagaaaagaaaagaaaaggagaaatagaattcagcccacctctcctccctggcccaactcggccggcccagccgccccccttccctctctcccctcccccccgctcggcccaccgcgtcgcggcccagctcgcagcgccgcgccagccttccccctcgtgggcccgcgcgcgtcgtgcggcccagctcgctcgcgcctgcgcggcccagcccccgcgccagccgccagcccagccgcgcgcgccagcccagctagcatcgtgccccagcccagcgccgcgcgaagcagcccagccgcgcgccccagcccaagccgcacgtccaggcgcgcgtagcgcgcacgcgaccgcgcccagcgcgtggagggcgcccaccgctgccgctgcccagcctgggcccgcgcgttagagaaccagcgcacactgtacatcttccccaagcgattcttgcgcagttttctcgcccacgacgtctccaaaatcgaacagcccacgattcttgcgcagtttctcgcccaccaccgcttctcctcgcctcggtctcgctcttcgcctcgccagcgccgccaccgtcgtcggactcgcgcgcgcagcgcctcacggtacttcgccgaggtgagctcgcccccattctctctctcttcccccgccgtgtaaattcaccatgtctctgcagtccctcgtcggcgcctagcgcagcgacaaccgcggcacctccggccagcgcgcagcccaactcccttgcgcgcggctggactccctgtcgtcgcggcccgcagcgcgcagcaagcccggtgccccggcgtgcagaccccgcgcgccctcgccctgctccttcgcgcagccgcgccgacgtagcagcagcatcccacttcgccggcgaatcatgccccactccgttacgaccgagtcactgcgcgctcgctgcgcgcccagccgctaaacgtgcctagtgcagcccctgcgcgcaaccctcgccgtgcctcgctactgctgcttagcgcgtcgcgtactcgtcaagtttcacgcgcgcggtttcgcacgtgatcacgggtattgtgcgcgccgccgttgttgtttgcatagtcctcgcgctgtttcgcgcgggtcgcgcgcgcaatctgcgcacattaattaatcacttcgctataatcgtttgtacgcgttagtcaattagttctcgtattaatcatcgattaattgataattcattttatctaaaatatcccacacaagtaatttatgttaactaagtcgaacctagaaaaaatatagtttttttcgcgtttaagcgtaatacaagttgtccgttcgtcacgtcattatttagccacagattgttaactatttgatgtgtcgtgcgtcgcgcgcactgttgtgtgcaatgtttcgcgcacacgcagcacgtcgtcagggtcccgacaacgttcgtctatccctatacgacgttcgtctacccctagacggcccccgtctacgtttgtctacccctcgtctaaacctcatgcgcgttcgtgtcgttcgccaccgcccgcgcgtcgcgcaataaatcgtcgcgtgctgttcgcgcgcgttgcgcgtgctgttcgcacgtgtcgtcgtgcgttctacgcacgttaataattcgcctcacctagaatagctcgcgctaattaaatagatatttaaaacaacggtttctcgagtagcaaattaaatcgggactaagtagtgattttacttagcatacgatttatatctgtcaatatgattaagccgaattaaatattttaattcatattcgcttagtgtaaacgtgatatccctcgaccgtagcgtcagtcgtctcggttccgttctcgcgtagtcgtagatgcgaattctatgtcgcgtgcatattcatttggtctatattgttgtatggtgtactgttttctaccatttcaagaatgttggatgtatgtttgcactcgcgtagatatcgggccgttcgtggagtctgagggaattgcaggagaagaccctgagcagcagcagcttggtgaaggcaagtgtcctctgtcccattatgtcctatttattttataatacactgtcccgcatactatgaacaacctaaggatttactagctttctatttaccttgtccttgatttaccttttgggttactatggttaactacatgctagcgctttactctaatcaacgaacatgatgagaattacttgatgatacgatgcttttattttggatacgatggtgatatacttgtggcattttaggggactcgagccgtttcccgagtacctctccgtaaggacctgttcgttgagagaccatccgggataacagtgcaaccatgagggtgaaatgggatgcccttagctaattaattagaggaactagaggtgtagttgcttcgccgtcgtgccgtcaatggggtccaggcacagtgcttgctctgccgaggctgagtgccgaggttctttcgttttgcttttgttagtcactctcctgcggggaggggtactttgtttatcaaactggagaaacctaacgggtggctatgacctctagggaatctttgtaaaagctacgtagtgataccctgtcggaccacctaggaagtgatcaatggggattagctctccccgggcagaaaggggatcgcgactcatgggtaaagtgtgcgacctcggcagagggtagtgaaactgatatatcagccgtgctcacggttaagagcagccttgggatcctctttgattagagatacagatggttcaagatacaatggttctactaatgtttttggttcgatgatgatcatgatgttttctcgatgagggaatggctcatgggatggttatgtgataaaacttgacttctacaaataataaatacctgaccaactaaaagcaactgctgagcctaaccccacataaaagctggtccacttcagccaaacggggcatttgctgagtacgttgatgtgtactcatccttgctttaccacaaaacaccagcttgtccacattgcaaccattgctcaggagaagatgaagtcgtggaaggagacttccaggagttccaagactacggcgagttttaggtgtgggttggcggcaacccccagtcagctgcctctgaaggccttatctttactgcgtttcgcttagcactttgatttatcagttaagttgatgactatgtggatgtctctgactctgtgatgtaataagttaatactcttttatgttattattcgagcactatgcgatgatgttcatttatgtaatcgctgtgtacgtgagttctgatcctggcacgtacatagttcgcattcggttggccttctgaaaccgggtgtgacagttatgactaaaatcggtgacaccgccctgaaacagagggcctcctgtgggtgcacacacatggttgcgctacttggcacgcgctagtatcacagttagtagtcataatctattataagactatattgatatgttatctctacacaaattataatcaccccatgagattcattatcgatgttagttttgtaatggtgtcgtggttaaggacttatagtactgcggcgaaactgagagcctcctgtaaatgtgcacacaggattttgctgcttggcgcatgtcggtatcaagccctctagtcatgatccattatggagttacactgatgtgttatcttccattgacctttcccttgaaacaatttctatgttgtttgtgaaagagatcaaacaacatttgtcatttccgttggatcaaaagggcataccacttccatgtgtggtcttatttcttttgatcttggtagtgactacccacacaagttccctttgcatcctttgtgtaaaggtgaagccttggagctttttagtgtaagaaaacaactgattagctctcaaaatagagatctgtttcccctgttgttgaaatgcaggagtttgttcattcgctctcttatttaatccatgtattccctaaccaagtggataattcatctcgcatgaggaaatggatgaacaacttgatcaaatagatttctacccaactacatgctcaactgttaagaagagtgaactcttaacccttggcttaccaatggtattgagaggatttgcttaatgtcaaaagtagttcaacaagttggttttgactaacttgtaactgcacaaggaacgaaggctgagtttagagatcgttttatcgagttgtctaaactcactttggttcaacccaccataaagaaagtacttaccaaaaatcaaattaagtcgaccagtaaccacctaattatcgctctagtcgcgcctcgactgcctcacgcgtgcttttcctgcatgtgtgatcatgccgattcacgactagtgctggataaaatggactggttgcaaagtccgcatttatagatccctccgctggtgattttcctgaatctatatcacctttcgtggacttggattccctggctaacacgagttgaccgtgatgttattcgacattcacacccgtctcgtgtgctatgaacttgctgtaaccacttgttggtagacctctttctgtgtgttttaccaagatggtacatctgattctgtttgggtaaagttgcataattgccacccgcccaacagactcagatagtacagtgtcatcagaagaagcaaattgcacatatggaaccttatgtgttcttctggctgacattgtctttattggtggacgaaaatgaagattgaaattgcacgttatgtggctagatgtgacacttgtaaacgtgtcaaggccatacacatgaagactgctggtccattacaatctttgccaatcccaacatggaaatgggaagacattagtatggacttctttgtgggattacccaggactacaaaagggtatgattctatctgggttataattgatcggctcacgaaaattgctcattttctaccagtcaagacagatcacccggttactgtctatacccaattgtacattgctcgtattcttagtctgcatggtgttccaaagaccatagtgtcggatcgtggacctcaattcgtatccaaactttgggaaaaacttcataaatccctgggtactaaattgctccacagttcgacctatcgtcctcaaaccagtaggcagactgagagagtaaatcagatactagaagatatgttgcgggcatatgttctagaatttccacaaaaatgggatgaatgtttgtcgttagtggagttctcatataataatagctatcaagaaaacatcaagatggcaccctttgaagctttatatggacgacgatgtcgtactccgctaaattggtctgaacccggtaaaaggtacttcttcaggcctgaaagagactgaagaaaaagttcgaagaatgattcataatttgaagaaagctcaagctcgttaaaagagttatgcagaccggcgacgacaacccttatgctttctcgtaggagattatgtctacttgaaagtttcaccaatgaagggtgtatcgcgtttcgggattaaaggaaagcttgcaccccggtatattggtccattccctatacttgagcaatgtggaccagtagcataccgactccaactacccgaaacattatctgttgtacataatgtgttccacgtgtcacaattgaagaagtgtcttcgggttcctgatcgaaccgttgaagtgacagatgttgtccttgaaccggacttgacatattctgagcaccctattcgagtcttggaccaaaaggacagggttacccggagaaaaactctcaagttctacaagatacagtggaaccggcattccgaagatgaggctacatgggaaactcaagactttttagataagaatttcccaggctttttagcctcttataatttgtaaagcatgtgtagacgtagtaataaaggagtaaattcccacaccaccccctgccttgtaccagaaataaggaaataaaaatgtgacacaattccttttccattacttaccctaggccttttaatctcgggacgagattcttttatggggggaaggatgtaacacccctggtgttactataactaaaacttgagcatggcatcataagcattggcattgcatatgtttgatacacttagaatgcattcactaggtaaaaatttcaaacaagttgtgtgttatagcattttgcaaataggaccctggatagggaacttaaccctaaatagggattaaaggggtaaaacctaacccaagttgagaaaacctaaaagctttaggagaaatagtataaaatgttcccaaaaatgaatttgaatcacatttatacccctgggatactagaaaccctaattggaaccctggaaaaccctaaatccaaaccctaggggcttatgtgcaaaattagtccacttttggactaaagtgcaaaaaccaagttaaataagtatcttaagtcatttgggtcactcatatgtggatttacaagccaaaccctaagttttggcctcatttgcaaaaaggaccctagtagaggttttatactaagtctgaaaacagtgttatgggctcaacttttgagccttgtaacttttaaatcatagggtttttgccctaggtcaccacatcaacattgtagcccaatcataggaggacagctttgcttaaggatgtgagcttagttgttaagagtaaattggagataattcagctcaaaatctggctgtcaggctagttccactctgaaagttagatgttcagtgtaacagagccatctttgggtgtgaattcaaccatgatctagtgatcaaatgagctcagtcactatagtcgaaatataggtggtatatagctctccaactttgctgcagagtttgggttgtgttaccataggaatctgggagaaaatcaagctccaacttggtctgtcagacaagctttttactgaatctggcgcactgttcatcgtcttcagaaatatcgcgccgtggataagggtcagcccctcgc

SEQ ID NO: 771 - DNA, 8150 bp, Zea mays
  Intron number 8 from transcript GRMZM2G452529_T01 (locus G RMZM2G452529) derived from phytozome v7.0 (chr-ID 3; pos 1 95887639 to 195895788)
agcattactcattgggagagtgggtgccgcattgggtgaggattttttttgctcaatttattcattttgatattatttattgtcctctaagatggcgtcattgcaatgttctcaatcataaaggttcctcaccataattgcagtatggtattttgaaacctatactagctcgtattgcacttagacattttgcatggcttttgattgttatccctaatcaatcgttccaagagaaacggagttttccttccagattatttttctgtgcattgctgtagaaaaggctgattcttaatatatattgaacttgaaaaaatgggatgaaaatatgtactaactctgcaataccttttttgatatagcacattgtagaacatactagtacatttgtttttttttctcgaaaacgcaggagaactgcgtgataatatattaaagaagaggaagggtccgaaaggtccaaaacggttacagttacagttacaaaaaaggggggccctatggtggccaatagcaggcatacataaacccatccatggctaaacacgattaaaacaactaccacaaagcagcggcacacgcacaactagctaactagcagggaggcctgggatggggcagtgagcaaggacatctttgcaccagccatctcccataaatcaacctccaacccaactcttctaatagcatcaacaatattggggctcttattgtcaaaaagacaacgattgtgatgcttccataaggtccaaacttccagaatgacaagagaattaaggccatcccttgcgattccaaagacctgggtgctcaactctctccaccactccaggaaacaccatcatcatattggggggctaatgctgaaggttcacttgaaaaagcagcttgaaccaaaattctcgagcaaaaacacatccaattaacttatggtccaaagtttcatgatcctgatcacataatggatacctctccgaatggtccatacctcttttttgcagcctatctattgtccaaaccttcctgtgtgcaaccagccacataaaaaacttagtgtttggtggagcccaagttttccatattctaaaaaaaaactcgacctgcgggggtaagacagccccgagcattgtattaagacagccccgagcattgtattaagaagaagaccttctcacgcaggtcgagaaaacccccgaacccctgccccacccatacacagcggcatcgaagcccatgtgagaacgatcatgaccggggctgagccttagacctgtgctttggcgtgggacaaacgaggggatttttttaaccacagcctgaaattcgctcccacggggagtcgaacccaggacctgaggagtgctactgtcaagggcggtattgcccaaggtaggaggacctcggctacgtagatcgtagccttgacccgtggttgccggcagggttatgcccccacgccgagctacccgtcgacaggagttctcctggtcgccggtttagagaagagaggaagagacttgataggtaattcttgattgattccctagtgccaccatacatggctatatatagccggcggcttacaccaatggagaaggttctccttgattgaagatctaatcaaaataggaaggatactaatcagctagctactttctctcctagccaatctccttctatgtttgctgcatgcacaatcaatcaggcggtcgccttctatgtttgctgcatgcgcaatcaatcagatggcttctttccatcctagccactcacctgctgcgcatgtgcctttgctgcctgcctagctcggcgcacatcgcgggctctcctacgcctggcgtatgtgtggccgtacatgacatctctccgctcctcaagaagcagctcgtcctcgagctgaaaggttgggaatttgtcggtgaaagtgtccatgtcctcccaagtcgcagatgcaggcgactgatctttccactgcaccagcacctggcgtacaccgcggttgagccgggttcggatggccctagctggctccaaggtgactgccccatggtgaagtgggggtagtggcggtgtaacctgcggtggtgtgccgtgatactttttgaggacgcccacatgaaacacgtcgtggatgcgagcgcgggctggaagctcgaggcggacaacgacctcgttgatgagttccagcacacggtagggcctatagaaccggggcttcagcttgccggtggagtcagtggcgagggaggcaggggagcggtgtcggagatggagcagcacccattcacccacctggtacgtgacaacgcggtgtccctggtcataatacttcttctggacagcctgtgcctgttccagccgatggcggacatcagcgaggaactcttcacgctcctccatggttctagccactgccgcaacacgtgtgtcccccggttcataggaccggatggacggaggctcacgcccgtagacgatcttgaaaggcgtgtcgcggagagagctctggtaggcggtgttgaagacgtactccgcccatgggagccattggagccactggcgaggccgattgctcgttaggcaccgcaggtacatgatgattaccctgttcgccgactcggactgaccgtctgactgagggtggaaagccgacgtcatgtggagactggtccccatcaaccgcatgatctccttccagaacttggaggtgaacacgacgtcgcggtccgacaccaaggactgcggcaccccatgaaggcgtacaatctctgcgaagaatgcctgagccacggactctgctgagtaggggtgtgccagtggaataaagtggcagtacttgctgaatctgtccaccaccgtcaagatgacggacttgccgcgcactcggggcagggcttcgacgaagtccagcgccacatctgtccagactccctgcggaattggtaggggaaggaggagtccggccgggtgtaggtgctctgacttgtggcgctggcaggtagggcactcccggacataatcttggaccacctgcttcatgttagggaaatggaagtcacgtcgaaggcggtgtagcgtgcgctggaccccttcgtggccctcggcatgcacaactgcgagcagttcacggagcagcggtgaagaagggggtaggtagagccggcccgcgtactggaccatcctgtcaaccacctcccacggcgcgcgcttggtgccggcctgcacttcgccacgaatggcagtgagtgctggatcggtgagctgtgcctgacgaagacggtccaggacgtcgaaatgcggtgccgagagggccagcagcgccccataattcggcgtgtcgcggcgggagagggcatccgccaccacattggttgaccccggcttatattcgacggagaaatcgaagcccaggagcttgccgacccaatgatgctgcggaagcgtcgcgagccgctggtccagcaggtacttgaggctgtagtggttggttttgacgaggaaccggcgtccccaaaggtacggcctccagtgtcgaaccgctaggacgaggccgatgagctcacgttcgtaagccgccagcgcttgatgacggggtgagacagcctggctgaagaacgcgatggggtggcccccctggaccatcaccgcgccgaaaccgtgggacgatgcgtcgcactcaacgacgaatggcttggagaagtccggcatggtgaggacgggggccgaggtgatcgcgtccttgagggcgacaaacgcctccgcggctcctgcgctccaagagaatccatccttcttcaacaaggccgtcaatggcgctgccacggtaccgtagtggtggacgaacttccggtaatagcccatcagtccgaggaaaccccgtaccgcccgtgcggatcgcggcgtgggccagtcccggatggcctggactttggccggatccatggcgacgcccgcctcggagatgacgtggccaaggtagccgaccttcgtcgcgccgaacgcacacttggtgcgttttaggaacagctggtggcgttggagctcctcgaggacggcgcgtaggtgtcgaaggtgttctccccagctcttactgtagatcaaaatgtcgtcaaagaacacaagaacaaaccaacgaagaaacggtcgcagcacgtcattcatcaaagcctggaacgtcgctggggcgttgcacagcccgaacggcatcaccaggaactcgtagaggtcgtcgtgggtgcggaaggccgtcatgtggacgtcccccgggcgcatccggacctggtggtaggtcgagcttggtgaagaacttcgcgccgtggagttcgtccagcaactcgtccaccaccggaatcggaaacgcatccttgacggtgagcgcgttcagcgccctgtagtcgacgcagaaccgccaggagccgtccggcttcttgacgagaagtactggtgaggagaacgccgagtcgctgcgtcggacaatgccttgctcgatcatggcggcgcactgccgctcgagatcgtctttgtgtgccgccgggtatcggtacgggcggaccgccacaggcagcgctcccggtttgaggatgatgcggtggtcacgggagcgcttgggtggaagaccgcgtggctcggtgaagacgtggctgagggagtgaaggagggcgtcgaggaggggctcctgggctggctggagctgtagtgtcggcgtcggtggcgccgtgactgcgcggacggccggcttgtccgaggatgcgaggccggtccagcagacagcgtgtccctcgcgctggaactgcatagtccgcgcggcgacgtcccagacgatgggccctagggttcccaaccactgcgtgccgaggacgaggtcgaaacctgccaagggcatgacgaagaggtcgacgtggaacgtgtcgccctgcaccctgatcgacgcgtcgcggatgacccccgggcaagtgacgcgctcgccgttagccacggtggcggtgagccttgggcgcggttggatgtgcatcccggagcggtacgctgcacgctcgccgatgaagttgtgcgtggatcccgtgtcgaggagggcgaccagcacggcggtcccgaggaacgctcggacctgtagcgtgtcgaaggttggcactccggccacggcatgtagggagtagatggggccctcctccgctgggacagcatcgcccgcggcgtcgactgccatctccagttcaatgccttcaacgtagaagaggcggcgacaggtgcgattgtggccgcgggagtactgctcatcgcagttgaagcacaacccgagccgacggcgttcctgctgttcttccacggagagacgacgacccggttgccgctcgcgtgcggctggcgcagcacccgccggtggtgctggtagcgcaaggagtggggcgcctgctgaggtttaatggcggccggtagagcgcgatgcgccggcttggccggggctgccgccatcttgtcgagctccatcagctccacttgccgagcgaggctcatggccgcggtcagcgtctccgggttgtgaagccggacggcgtggctgaggggtggaagcagacctcctgtgaagagctggactcgctgggcttcgtcgagccgcccagcgcggaagaggaggctctggaagcggttggagtattcctccaccgtcccagtgcgtcggcactccgtcagctcgaagaggggcgccgagcgcagcgctggtccgaatcgcagatcaatgagatctttgaaacgtccccacgacggcgtgccttcgtcctcctgaagttgcatgaaccattcctgggcgacgtcttcgaggttgtatgacgccatcccgacgcgctcctcggccatggtacgctgctgacgaaaatatgactcacatttgttgaggaagaggcgcgggtcagacttcccgtcaaaacggggaaaatcccacttctggaacctggggggccgatccggttcacgaggaggctccatgcgattgccgccaccaacgccagatgacgaggatgccttgtccttcaaggaagccatctcgatcttcatctccttgatctccatcttgagctccgaatgccaggatttcatcatctccatgaggtcggccatggagggctccgacatggtgttggagtgaccggtggaagtggtggaggctgagggcgagggtggggttgagggctgtttagtggctgcggtggtggaagttgatggttgtgaagaagacgaggatcgtcggcttcgtgataccaggttgtcaagggcggtattgcccaaggtaggaggacctcggctacgtagatcgtagccttgacccgtggttgccggcagggttatgcccccacgccgagctacccgtcgacaggagaagttctcctggtcgccggtttagagaagagaggaagagacttgataggtaattcttgattgattcccaagtgccaccatacatggctatatatagccggcggcttacacaaatggagaaggttctccttgattgaagatctaatcaaaataggaaggatactaatcagctagctactttctctcctagccaatctccttctatgtttgctgcatgcacaatcaatcaggtggtcgccttctatgtttgctgcatgcgcaatcaatcagatggcttctttccatcctagccactcacctgctgtgcatgtgtctttgctgcctgcccagctcggcgcacatcgcgggctctcctacgcctggcgtatgtgtggccgtacatgacagctactcagaccacctaaccaactcagctagaggccctttcgcaagttttccatattctatggaaaggctcaaattcaatagatccaataaagaaacccatataagctttcttcgaggagaacttccattcataggtaggcagaaaaaaatgcttgtcttcaacttgaggtcttagttgaaccgagttaattaaatcccacaagatgaggtactcattaataactccgacagaaagagccccctgaatatcagaaatccaactctggtttgaaggagcatccctcagtcctcactgttctcttgttaaccattctcttaggaataatcctaaattgccgaggggccaagcccgcaattctgtgccccaactctatcggacaagaaaagtgttgtagcaccattaccaagctcagtttgcaaagccaatgagaagaaaactttcactttctcaggtacttggatagatagaggcccatgggcgagttggctcagttttagccagccatagccaccacattctaagcgaccaaacaagttcttttatgctggaaatgcctataccacccagctcacgaggcctacaaacatttccccatgccacatgatagtgttcaccttttgcatctcttctacctctccaaagaaaacctcgacgaatcttatcaatggctggaagatccacaaccatggccaagtaaatgaccatccctgtgagaacatattggacgtgcactttccgaccagcttcttccatccagagagttgatttgcaatcttatcaataatgaattgaacatgatctttttatagctttttaatagcaagtggtatacccagataacagcaagggaaagcagccaactcacaaggcagtatattctgcagcacaacaaggtcttgatctacacactgctcttctggacattcgtacgtaatcccgaagcctctccaaaaagctgaagaatatccaaaataatattgatatccatggctgccgctcgaaggaagatcacatcatcagcatagagttgagacctggtgctgcagtgcacgtggagcaaggggctgcagcagtccatcctgttcggccttattaatcaagaagcccaaagtatccaattatcgatgaccaagatgaacagaaaaggagacaaaggatctctctgtcggaggccacgacgatgaagaatagactgtcataggcaaactgatgtggtacattaaatataaaaaaatgtgatatatatatatatatatatatatatatatatatcacatttttttatatttaatgtaccacatcatcattggttttgcattatctttctagagtttctagatgtttgattttgtactctgtttgaatacatcgtttcttaacagttccc

SEQ ID NO: 772 - DNA, 5979 bp, Zea mays
  Intron number 11 from transcript GRMZM2G137348_T01 (locus GRMZM2G137348) derived from phytozome v7.0 (chr-ID 8; pos 83053493 to 83059471)
gagattgtgcgggaagtaagtcttaatatactgaatattgtccatgataatgttgttagattgatatctcgtcatcttattactgtataccactctttttttcagaatgtagggcttactagaattttgaaaaaaagcactgtatgcttttaccataaattagttaaaatatagggcacatatcaggtgcaatagtacctattggtgtaaccatgcaatcaagacacagggatgaaggtgggagaacctttttaccaatatctagggggaggttggggtttgtttttaaaaaggatattttaaaaaggttctcccacctcaatcttgtgtcttggtcgcatggttgcaccaatgcgtacaattgaacttgatatgtctcctaaaatatatctatgctttgcttacatgttcagtggacaaaaagatgaaccaatagatttgtactctatcccaaaaaggatgcaattctagaatagtgctaagtcaaatgatttgaagttcgaccaaatttatgtataagagcgatgctaatattatcacactaagaatcattagaaccatcatgaaattgaatgttgtgttatatctatttggagtcatacatatgacaatattttctataaaactacaccaaaatttagttaagtttgatctgatttagaattgtcctttttgggatgaaggtagtatttcacctgccttttagggtgcgtttggttcgtttcacagtggagcctggccgctccaaagaggctagccagggcctggctcccaagatacagaaatgaaacccgtttctccacaacctggatcgtggcgagatgctgcatcccgcagtgcaggtgagcatagacatacaggcaaccaaacatcgccctcagcccgctagatacagagacaaccaaccaaaaaagcgtacgctgtatctcaccagcctggccggcccatatgcagcctaccaaacgcgcccttagcgtatgtttgggttagagacatagtgggatgggacggacccaacccaacttttagagacggtattgaccttgttatgtgtttgttttagaggatggaaccatctctgatctacatttggttgagggatactaggaagtgggatgaaccatctgttgtgtggggcccatcatttaatcttttgtttttcttcctttgtcaccatagcttttcttcctctgccaccatggatttctgccattcagtacatgccgaccagtacccgttcaccccctccctacccgccggaggtcgctttgcctgcacgcgtgccaaggcttgcctctcccaactcgctgttggatgtcatctaagctgtgctcatgctggagcttcccttggtcctagctgttgctcaccactagaacccgccttgccctcgcatgcccttggagcttgtcttagccctgcatggcaccggaggtcgagcccaaaaccagagatctggttgtgacaaagctgcttgtgttgagttgagtcccgcataaagcggtgtcaagctttgccggcctcgccggagctcgtgatctcctcttctctccttcactcttgcccgctcataccctttcaccccctctgtccctttgggtgtgtttggttgcgggaagctgggatagcccgggacaaccatgtcccctagcgtcccctctcgtccgtccaattctgacagacaattggggacgtcactaggatggtgttgttccaacgcttgaccctaaacctaacattcttatctaagggattgtcccatcccttcccgtcctgtcattgcaaccaaacattaatttcgtgttacatagttgttccacatattgagggaatattccctagcggggatgattccatcctatgattcagatccaaatactatggaattggggatgacccatccccacccccaccatgaggccccaatcaaacatagttagtaacatactgttggagttgcggcttctaagaaggtatgagtggtgaggagaagggcgaggctctggaccatggcgtttgggcgccattgtcctagggttagggctgctggctggaaggggtgcggcactgttcacgagatgaacagtagacacaggaaaagggggaagccgagcaagatgatttgcttgcttaatctttcattgattgaaggggtatatttatagggctgagatagcaaccatccttatctaatatcttaacaaaccaatcattatctatctaaacaaactccttatccctatccatctaaacaaactaactgatacttatccatctaaacaaactaactgattttattagggttgctaggctgtcggtcataacatctctcccggcctccaaaaagagctcgtcctcgagctggaaggtaggattatgggggtgggggatcttccgccgcagccaccccgttgtcgtcggcggtcacctcaaggtagaagaggcgtttggcagtgatggcctcgtacaaatgactcatcgcagttgtcacacagccactggcggcgtcgctccgtcatctctgctggggtgaggcgcttgaatgtcggtgctgccagggtggaggcagcagccgctggcccggctggtgatgccggcgtcgaggatggcgtagcctatcatggttattaaaacgtcgtttaaatgacgattaagcgtcgtttaaacgctaaaacgtgattagcggctaaaacgtccgcacgttttacaaaaaaacgcgtataacatccgttctggacgtttaaacgatgtttacacgtcggaacgtccgttctggacgtattctctgttatttggacgttctacgcgcctatacactagtgggcctttacccagccgccatcacgcgctccagctatcacgcctagacagactacatcgcgcgctccaggcctccagccgccatcgcgccaggagccgccatcgcgccagacgccgtcggccgccctccaggctctaggtatgccgccaagccccctcctccctccctccaagacccaggtatgccgtcgcccgtcggccgcccgccagatccagtgtgaatgtgtcataaactgcttacttgcttagtatatgggaagcaggtcaatgtctactgtgtgttcataaactgcttagtataaccagtgtgataatcaccaccactcctaatcccttggctgctgatgttcatattgaataatcaccaccactgaccactcctaatcccttggctgctgatgttcataatcccactcatattgaataatcaccaccactcctaagtcctaatcccttggctactgatgttcataaactgcttagcttagtataaccagtgtgataactgaataatcctttgtgttgtggattctatatttgaaattatatgtcaagtctgaaaagacgtttcaacgttcgtttaaacgtttaaactttgaaaagttggttcataacgttttaacgttttaccgttttaataaccatgtagccaatatacgtgtagagggcggaggcacgcgactgtccgagccttgctggcggtgctcgtatgctcgagcgagggccatggcctgttgcaggatgtgcacagttcgacgtccactcggagatgccatggtagtcccgcggtgaatagttgggcctgttggtgcggcagcggcacgggctctgtgtggcacaggagagctaggaatcgatcctggtagtccaccgtggagcggaacgacaggcgtgccacctcgcccaacgtgttcgtgcgcagaggaggcccaaaacgctgctggcacaacgtcttgaagtgtggccagtgtagtgtgggcttgtcgcgccgtagcatgacagaccacagctgtgtagcgctcgtgagatagtacgtggccatccagactttatccacctccggcgtcccttgattgtagaagaagctctcacagcggaacaaccaaccaacatgatcctctttgccgtcgaatgtgggaaagggaaggttgtggtggtgctggttgggagggttttgctgctgtgggtaagcggtatggtggggttcggaaaatcctgggatgggtgatggggagtgtgggaagggtatctgatggatgggtatgggcatggtagatgtgggtggcagcaaggctgaggttggcggtggaaggttggttgaggtggatcggagtggagcggctgtggtggtgatcggcggtgatggtatgggtggcgcggcggggtttgacagaggaggtattccgccataacctgacatgccatatgggatggaagtagggctggtggacgctgggggcggtggtgttggcggcctactgatcatttgagtgatcgcggtggtgagatcggcaagggccttcgtcatggtgtcgatcttttgctctagcgctgcgttggcggaattggtcgcggcagcagatgcgacatcgctggtgttgtcgtcgttgcctggcatctccgataccagattgttggagttgcggcttctaagaaggtatgagtggtgaggagaagggcgaggctctggaccacggtgtttgggcgccgttgtcctagggttgggctgctggctggaaggggcacgataccgttcccgcggtgaacagtagacacaggaaaagggggaagccgagcaagatgatttgattgcttaatctttcattgattgaaagggtacatttatagggctgagatagcagccatccttatctaatatgttaacaaatcaaatccttatctatctaaacaaactccttatccctatccatctaaacaaactaactgattttattagggctgctaggctgtcggtcataacacataccttgatagattattctaattataatgcaccttattataatgatattggtgtgtttctgggaagaaatgattagtttagtggcggagccaccaggtatgtcgtatatgccacgtcataccctgtgtgctacccccaaacacacacacgtgtgtgcgtgggggcgcgtgcgtgtgacaaaacacgaagaaatttaccaaagcatgtttgtgttattacgggatacaaaaggctcatgacgcgtagatacgattcactgtccgcacgacaaagctagttagtctagacgcctagtacggtaatatatgtacatacaccatgatattttctttccagtttttctaatccaatccaacctattcaattggatttagagggcgagagcaagagggaaaatgttatagttttttctaatctaatctactcgactggaatcaaagggagagaacaaggaagaggaaagataaaacacactgtctgatgactcgaagcattgatgatgtcatggtgaacctaataccatccattctgtcctggagccatatcggattttgcatctcttttatcagaaagaaacatctcttgctactactttcaatgggtattttctacgttggatttagtaaaacccaaattaagaaataatataggagcttgttgtgttttgatgattgtttaaccatttttattctttgaagttgataaaaatgatatatccaagacatttatgttcttcgaaagagtctaataaaatagtcaggaaaataacactatataattattgaataaatttattgaattatgaatttttttgaacgacatacccttagataaaatcctagatacgccactagattagctattatatgtccagttatcataaagaggggatcatataatctgtgaattaatgtgaagctgactgccttgaataggaacgaacggaaaacagcagctagtctagccttgaatagggagcgaatggaaaacaactatccacgtgcctgattcgttaggtttcaaactccagcctaccctaacttgcttgggataaaaggcgttgttgttgtttgttattttgttgtaagttaggtcactggctgacaataccgtgacttcacaatatttttaatttcgccacgctgctttaacatatgttttattcgtctcaggag

SEQ ID NO: 773 - DNA, 859 bp, Zea mays
  Intron number 15 from transcript GRMZM2G319169_T02 (locus GRMZM2G319169) derived from phytozome v7.0 (chr-ID 3; pos 12809499 to 12810357)
taagtctctggttgagtgatctaaaatttgaaaaggtctgacctgaatccttaaaagaatgactacattgctctcatctattaaagtatgtccatgcggtttggaggaaatatataacttaacttttgtatatcaaatgtacatctttgtttcaaggaaaatatatatttttaaaaagatttctttttattcgccatgtatgaaaactacgcataattatacgttgaattatatatttaagaacctaagttagtatatgaatataagacaaattcaggactgatggctcccacatgaatagggttaggagaagaaataaccgaggcaaatcttacacctgtattttgtagagaggctgcgtagaacctaggaccttttgtttagtagaaatgcttgtcaccactgtgccatgcatgtcctatgttagtatatgaatgtgtatcattattttctgacctaggaataaatgccaaacttgaaatacgaagcaactatgagctgtacttctaagcattttagcaatcttctaatgcttctccctgacacttaatgtggttgcattttactgctgcagtgggtaaactgatgctttacttgcaaagaatctctactaacgcatactcatttatctatttacattagttcattggatttgatgcaaaggttattgtatataccctgaaaaatgttatcacaactgcataagacagttgtagacattagtttgtgtggctattaagttgactagttacattttttttaaatatggtcagtatcacttttgattttgttgggctagagaagaaattcatatattttttctattgacctttgtcattttgttatctacagtctggtg

SEQ ID NO: 774 - DNA, 15186 bp, Zea mays
  Intron number 8 from transcript GRMZM2G065839_T01 (locus G RMZM2G065839) derived from phytozome v7.0 (chr-ID 2; pos 7 9851675 to 79866860 reverse strand)
ttggctcaatcattgttggcaatttactgggggtatgctactcattgtatatttgtgcttcattcttcttacatgtggcttatagttctgttttataaatgaatacttgatgttaattcaaagttgactgttgtatttgcttgtgtgttaaattactttggtgtctcaaccatataaccctgaccaattgtgaaacaaatttagtgaatattttttatgctttagtgttgaagcaaaaaaaaaaccacgtctttcacaatttggaccatctctaattgccacactgaaccttgttagattccatataatagaaagtgggccatgacttccctgctctgggtttgcacaccaggggtgtgccattgtcaagttgtgctaatgcagcctatgcatgtggcagttaggtgatttatacttaatgtttgaagtggttgtttgtttcttgagttatgaaagagataaaattgtgatttgtttagagcataatcaaacaaatgtttggatcttgagtgctgaggaacaaaattggttaaactttctttagtgtccaaccatgtaaagccttaattagggatatcatcaaggaggatatgatgggtgctttgcttgctgtgcaatgtgggcatgtctccaaactcaaactcctcaacacgacttttatcaccctcctgcctaagaaggtggatgccttgctggtcaaggattacaggccaataagccttgttcacagctttgctaagttggtaaccaaagtgctagcagctcggttggcaccccacctgccaagtatggtctctatcaaccaaagtgcctttatcaaaggaaggagtatacaagacaatttcctactggtgcagcaacttaccagatccttacaccacacaaaagagcctcacatcctgctgaagttggatatttccaaggcctttgactcaatatcctggccattcttgcttgacatgttacaacacttgggttttggtcgaatctggtgcaaccttattagtctgctgctttgcacttcctctacacggacccttgtcaatggcgagcctggggaatacattctgcatcataggggtcttcggcaaggcgatcctttgtcccccatgctgtttatccttgtcatggaggctttgaatgctatggtcagttatgctttcaaggaacatatcctgcagccgattgcaaatcaacatgccaaacattgtatctccttctatgctgatgatgttgttttgttcatgcggccctctcatcaggatatctcagcaattatcagcattttagacatctttggtcatgctactgggctaaaaacgaacatctccaaaagttctgttacacccattcaatgtggagcgaatgagctgaccaccatttctgccttattaccatgtgctacaaaattttttccctgcacttacttggggattcctctatcaatccgtaggcttgctaactcttatctcttgccgcttgttgataaagttgctgataaacttctaggatggaaagccaatcttctcagccgggctggtcctcttgtcatggttaagacaatgctgtcttctgtccctatctatcttatgcttgcattagaactccctaaatgggtttttaaggcaatcgataagaggagacgaggctttctttggaaggggcaaggtgatgcaaatggaggtaactgtctcgtgtcctgggaagctgtccagcggcctctcaagtatggtggtctgggtattctcaacctggagatgtttggttgggccttacgtgccaggtggctttggttacagaagactgacacgtcaaggccatgggctggtctccctatccgagtgcaccgtaatgcaaaggccctcgttgatgtggctactaccttagtggtaggcagtggtgaatctgtgaagttctggtctgatcgttggctccttggtaaaactgtggctgaacactgtccaacccttatccaagtgatttctagaagggctttaaagcgaagaacagtagccgaggggctcacaaatcgtcaatgggtgtcagatattcggggaggattgtctgtaacggtcctagtggagtatctgcagctatggaacttggttgatggggtagttcttcaacttgacatcgcagaccaacacatctggcgcctctctgctaatggtacttattgtagcaaatcggcctatgatgctctctttgttggctctatcccttttggcccttggcgacgtgtctggaagacctgggcccccttaagatgcaaattctttgtatggttggcaatcaaaaacagggtttggacatctgatcgactagcaaaaagaggtctgccccatccagttgtttgccctctgtgtgatcaggccgaggaaaccatccagcatattcttgtctcctgcgtgttcgctcggcagatatggacgtccatactacacaatttaggtctcctagccattgtacctcagcatggatgcactcgtttctcaaattggtggtgccaaagtatcaagaaagtggagaagagtctaagaaaaggtcttaattccttgatcattttggtcacttgggagatttggaagcaccgtaatgcttgtgtttttagggggggttgtgccctgcacccagcgagttcagagtgctgtgattgaggagggcaacgtttggtgtttggctggtgcatcagctctgcaggacctcctgctgcgccagcttcctaggggaccctagcaattttcctgttggtggtcgttttttggtcgggttgttgctatgtgtgtgcgtggtgcgtagtgttaatgtcaggggggtctcggcctaggggcctttgtatttaggggttgacaagtcttgtctctcctatgttctttttttcttcttaatataatgacacgcagctctcctgcgtttgttaaaaaaaagagtctatgagacaatactagtataacaagaacgtcttgctggaagcagattacaaattttatgaagaaagttcatgttcttcatttaaatgtattcgtattagaaattattgaatatccaactttggccaaatgtgacttgcacaaaatttatctttctgcaaagtcctagcaatttacttatggtagataaattttattcgtcaccctaggtgatgatcacctaccctggaacgacaatcaatcattctagggtcggggatcatcatctagggtaacaattagcgctgagccctgggcttccaacaggtagcaggaagccccagccgcttcctgcaccctgcccaaccagccgcatgtgttagagtacccgtctagggttttggagttagcccattgtaattaccgtcacacccttgtgtaatggaccaggcccaacatctgtttatatatacccgtctagggttttggggttagccccttgtaattaccgtcacacccttgtgtaatgggccaaacccaacatctattgatatatacccgtctagggttttggggttagccccttgtaattatcgtcacactcttgtgtaatgggccaggcccaacatctattgatatatgtaccagtaccaaccctagttagggttagggtttttagtccaatagcatgcatgcgggcacaatctccccacgaccccaccagccacatgcatgcggttattatttttatggtagatccgaaaatataggcgcatgcatgttgttactatttttatgtagatccaaaaattatggcaggtcgtgtgagtttctattgcatgcacacaaattttgaatgacattttcgttcccactgcatgcgcgtaaaaattggatgacaggcatcgtgcaaagcataaattcttatagaaggttgcataaatacctacatcacacatcataattgtaagtgaattggaagcgtgtattcattgatatgatagagacagtacatgtacatgtatatataggggagcaaggtgagaggtaaaaggaagccttctacaccaaaggaaagatcctagactagtatcagatcctcaatcagagggattgagatcctcccctaattctctctatctatatctgtgtctagactttcatataggccgaccgacagttatgccaggcgacaggccctgctgcactttctaacacccctcgtagtgttagcgttcgtggagcgaacgttaagactggttcgaaattcagtgaagactgctaatgtcaagcctttagtgaagatgtcagcaaactgggaagtcgtcggtacatgtagcacgcgaacaacaccgagggcaaccttctcttggacgaagtgaagatcaatttccacatgcttggtacactgatgctgaacatgatttgaggacatataaacaacgttgatgttgtcacaatataccaatgatgtcttgggtagaggaacatgcagctctgccaacaactgacacggccaggagacttcaacaaatgcattggcaacgacgccatactcagcttcggcgctggagcgcgagtctgtgttctggcgcttggaggaccaagagacgagattagcaccgagaaagacagcataactagaagtagacctccgagtgtctggacaaccagcccaatcagcatcagagtaaaccacaagttccaactgcgaagaggggcttaggtgaagacccaaccgaagagtgcctctgacgtagtgcaggatacacttaagagctaccaaatgtggttcccgaggatcgtgcatgtggagacagacttgttgaacgacatatgcaatatctggatgagttaagatgaggtactgtaatgctcctgcaagactgcgaaactccgtgggatctgagacagggtcaccatcaactgaaagtttggggttgatatcaataggggttgtatagggcttgcagtcacgcataccagctcgctcaagtatctcaatcatatactggcgctgagaaagaaaaatgccagaagcagaatgctgaacatgcataccaagaaaatgatgaagaggaccaagatcttttagtgaaaattcctgttggagagtagtaatagtgcgtcgtagaagagacatggacgaggcagtcaatacaatgtcatccacataaagaaggtaaaccatatctgcacccttgtgatagacgaacaacgaagtgtcagacttggcctcaacaaatccaagctgaatcaggtgggatgcgaatctgctgtaccaagcacgaggagcctgtttaaggccataaagtgaccggttgagatggcacacataatcaggatgagtggagtcttcaaaatcggtgggctgaacacagtaaacagtctctgacaaggtcccctaatggaaagcattgttgacatcaagttggtgaatcagccagctatgcgagagagccaaggaaagaacagtccgaactgtagctggcttgaccactggactaaaagtttctaaaaaatcaataccagggcgctgagtgaatccccgtagaacccatcttgccttgtagcgctcaagagaaccatcaactttgaacttatgtttgaagacccacttgcaagtcacaacattgcgatgcggcgggcgaggcaaaagatcccatgtgtggttaccaataagagcagaatattcttgttccatggcggagcgccaattaggatcagcaagggctgctcgatatgtcctcagaatgggggacaatgcagaggcttcaaatagagctagaaacctaagaccactcttgccatgggtcgtcattctgtggtggttgaccaccggatcgacaggaacgacaccaacaggaatgaggggtgcaggagcggtcgtcagagggggcgctggagcagtagcagtaggcgggcgataggagtacacctgcccgcagaaacgaccagcaggggccgttgttccttggatggcgggggctgcagaaggtcgagcaggtgtcccaggtggcagtgttgctggtgacggggcgcttaggagaccagccatccggacaggagactggagcaccggggctggtggtgggaccaggcgtgatgactggcccatagggccagccagcgccacaggtggctgaggcaccgatgcgtgagccggttgggactcagcctccggtggagcaggtggctcaaccggtgagggcggcagcgccatacgagtacctgaaaaagaagaaacatgtgacaatccgaaaggagctgtaactaggttagagtgatcatcgaggaagtcgaaggccgcaggtgtgggtggattggaatcctcggaaagggaaatgaggtttcatcaaaaaccacatgacgagagatgatgatacggttggactggtgatcaagacataggtagcttttgtggtggggagagtagccaagaaagacacagtgggctgagcgaggagatagtttatgtgcagtggtgtcggaaaggttggggtagcatttgcagccaaaaacacgaaggtgctcataggatgggttttggccgaagagagcaaaatgtggtgtagaaagagcaagggttttggtgggtaatatgttgagaagatatgttgcggtgccaagagccgcaacccaaaaactggggggaacactagactgaatgaggagggtgcgaatgatattgttaatggaacgaataacacgttcagccttgctgttttgagctgaagtgtaggggcaagacatacgcagatggactccacgagaggagaagttgtgggcttggaggttgtcgaattctcgaccattgtcgcactggatgctctggatggtgacaccgaactgcgtacgaacgtaggcaaagaaattggttagggttgagagggtgttggatttgaggtgtaaaggaaatgtccagaaatagtgggagcagtcatccaaaataacaagatagtatttgtggccagacacactggtgatgggtgatgtccagaggtcgcagtgaattaactgaagattacaagtagtgcgagaggaagaggtaggaaatggtagacggacatgtcatccgagctgacaagcatgacatggatgagtactagtatttttgttacaaggaattgcggatgtctgcgctagatgagataaaacggcgtgaccggggtgtccaagccgttgatgccacaatgtagacgcaaggagagcagaagccgcagagggtacagtggaccagagctgttacatctgaagatctcgcgccgagtgggtagatccttcacagaacaaccaaaaagatcaaattcaacagaacaattattatcggtggtaaattgatgaacagagatcaaatccttaacgagggatggggaaaccaaaacattgtgaagggaaagattatagggaagatgggtgatgccagtggaggtgacatgaatgagatgaccattaccaacgataatatgggtaggaagatgctgggaaggagagggatgagatattataccagcatcagatgtcatgtgactggaggcaccaatatcaaaatgccattcttgttggagtggctgctgaagagtgactgtttggaagttggcggcgagggtgtgttgatcccagacaggtgcaggcgaagaagggtcggtgtaggcagggggcgacccatatgccgcagcaggaactgcccactggccaggagccccgacgacgagggcatgtggtggtggaggcgatgcaacaggcagacgaggagccgaaggtggacgttggccaggcctcatgtagatggtcccgtccaagggttgtagtagttgtagttggaggatggtgcagggccaatgatgccgctgttgttgttgccagaggttctaccatcgcgcttgccgcgctgtccggagtaggagccatgaccagtaccgcccctggaatgctgcaggcggggggggggggggggggttgatgtggagagcggtcggcggggcagtagaggtaggaggcttggggccgccgacctcgcctggtgggtgcagcaacaacaacgagggatgctgctggagcggcgttcctcgagggatggctgcccttgctgcccttcaccttggtaatacacagaatttgtggcttctaaacacagcctatattacttcgatccccaagaaagcagaagccatgactgctggagattacaggcccatcagtctcattcacaactttgcaaagctttccacaaagatccttgccaataggcttgctcctcttctcaacaagttggtagaagctaaccaaagtgcttttatcagaggtagatccatccatgacaactatatgctggtccagcactctatcaagtcactacacaggaaaaagtggctagcctttttctgaaattggatttaacaaaggcatttgattctgtatcctgggtttccttcttgaggtgttaacccaccttggctttggtattaggtggaggaatcttatttccaatttgttggccacctcttcgactcaaattctattaaatgggtttccaggtgaccagatcagacatcgcagaggtttaaggcaaggggacctcctctccccaatgctctttgtcctggtgatggatgtcctcagcagccttttcagagtggcagaagagaaggaattgctgtctagtctggaaggtgccattgtgaagactagattatccctatatgcagatgatgtagtcttgtttgtcaagcccagagaggaggagctaaactgtgtcaagctcattcttgactgttttggggaagcttctggcttagtaactaatttgcacaagagttgtgccatcccaataagatgtgaagatgaattgctgcttgaagggtgtaacattctgcaatgctccccttcttccttcccttgcacttatttggggctgcctatttcagataagaagcttaacaagaatatattgatgaattgggttgacaagattgcagatagactgcctaattggaaagctaggctccttaaccttgctggaaggacaacccttgtacgctttgtgctttcagccatcccagtttatctcttcattgccatgaacgtccctaagtgggtgattaataaaattgatagagccagaaaaggatttgtgtggagagggagaaaggaggtgaatggaggaagctgccttgtggcctgggataaagtcacaagacccttaaagcttggagggtttgggattcctaatttacaacatatgcggcccttcaaaccaaatggctatggctacaaaaaatagatcagagcagaccttggcatggcttgaatatccccattcagcagcatgtcaaagacctttttgcagcctctctaatttctcatgtgggaaatggctctaatacctttttctggacagataaatggctaaatggatgctccatcagagatcttgctccagaagtggtgtccaaggttgataaacaagctcttacctttatgacggtggaacaggcccttgaaaacaggcaatggatagctaatatcaaaccccccgttctttggttggaattcaacaatttcttctcttatgggatgctttaggtgaggtgcaactttctcaggaggaagaccaccatgtttggagacatgaggcatcagggctatttacttctaaatcctgttacaatgtcttattcttcggctctgctgtttttgagccttgggagagattatggaagacctgggctcctcctaaatgtaagtttttcctttggttggcgataaggaaaagtgttggacaactgacaggttacagaagagggggatgccacacccagatgtatgcccaatgtgtgatcaagcctaagagacaattcagcacctccttactgcgtgcatttgcccgacaattttggcacacagtccttgttgctcttggcttggagcacctcactccggcagctgatgaggagtcttttgcagactggtggggaaaggtgagcctaagggttatcaagactaggaaaaaggggcttaactctttgatcatcctgggagcttggtgcctatggcttcagagaaacagagcagtgtttcatgggagtctccatccttgcccaggattttagatgtttctcagatgagtgtgttagctgggcaattgcaggagctaaggagattgagagccttggcttagttgcagccctgggcgaggtcgggtcaagttacggtaccagtttgtaattaccttcgggtttatgtagggtccttgggagattttgctcagcaacatctcctttttgtaaggtttttattcctctctaatatataagatgcgcagttctcctgcgcgttcgataaaaaaaaagttcctcgagggtaagatcatcacgtacctgcaaaaaagtggggagaggagaggtgcgacgaaggtgaagaccgagctcttgaaagcgttcgttgaggccgcggatgatgttgaggacaagagtcccgttggagaccggctcgctaaggtcacaaagatcctcgacaagctttttgtagtggcggcagtactcagcagtagaaagatcgccctaagtgaaggagcgtaaagcttggtcggcgtagaggacgcgtgtcgtgcgattcccgaggaactgggactcgatggcgaggcacatgacgcgagcagtggcgccacgctcggagatcgtgtcggcgaggttgtcggtgatggtgccgttgatccaagtccgaacaacgtcattcatgcgaacccagtcgggtgagtggtggacgtcatctgaaagcacatggcactccagagagaatttggtgagggtgaggaggaaggactcacgccaccgagagtagaagctagagttgacgtcggggaggagtggtacaagggcgcggatgttctgcacgacaatggcctgggcgtgcaggttgagaagagtggccgcttcgtgttggaggaggacgacagagagctgagcagtggagtcaacaggagtgccgtcggtgagatgatgtcgtcgacttgaggaggaggtagggttgccgctgcacgttcgttggcagcacgggcgagggccgcacgaatccgggcatcgacagcatcacgctcgctctgagcgagggcggcttcctgctctacagcggcgtcgcgagccaaagtcgcctcacgggaagccagggccgcacgctcagagtcagtagaagcgtcggtgtcatgggtggatggagggttgacgatgacgagagagattggctggaggtcggtcatggggaaggagcagcgccataggaaggggagggaggcgcactggggtggagggcaggaatcaaggcctaggcatctgataccatgtaagtgaattggaagcatgtattcattgatatgatagagacaatatacacgtacatgtatatataggggaggaaggtgagaggtaaaaggaagccttctacaccaaaggaaagatcctaaactagtataagatcctcaatcagagggattgagatcctcccctaattctctctatctatatttgtgtctagacttccatataggccggtcggcagttatgctaggcgacaggccctactgcactttctaacaataattgatgaagtcctaatatgggcccaagcaacataaacacataaattagggacgatttttgtggcacgtacatatcgtaaacaattcatataaatagcgtaaacaattcatagatgtagcataaaaacctagggatgaaaacggttgaaaacgatcgaaaaaacatctaaattggttttgttttcatattttttgatgggacgaaaacgaaaaccaacggtcgaaatacgagaccgggattttcggttatgcgaaaacgatcgaaaatgataaactctattcgaaaagacaaatattttgtagtttccactaatacataataaaatggcatattgtctatttttaagatattaaaatacacaaataacccttcatcatttgtagtatttaaagtaattacaacgtttgttttttctcttcattcacttgaacacaacaaaagtctgtaacttgcataaattatacgctaaatgtatctcatattatatagaaacggtaaaaaacggtaccatcatgacttggaaacggaaaatatgaaaacgatcggaaaactagccaaatcgttttcgtaccgtttctaatcggttcccgaacgattcgaaaacgaacgtgaaaaaacagtattcgaagcaggcatagttgttaaagcggcaaggcgaggtaaggcgaccggcccccttttaccttttaagcgataaggcgtaaggcgtaaggcgaggcaacgccttagtaatatgcaaaaataggcaataaaaattgaatatataggaatataatctcaaatagttagggataatagtattatagtagcaaataggagtacaagttcaacataaatcaacataatagactagtccaactgaagtaatagatagtagtagataacaccctcatctctcaatagccatcatcaaactcatcatgaaatgtagaaggattctcttcatcatcttccacctagttcgcctcatcactatcactcacatttatacccagatttagagaactaaaattgagttaactaactaagaacactggcagttaactgaaactgagttaattgaaacagagagagcagagagggagagaacagagaaagcagagaggggagataacagagagcagagagggaagggaagatagcgcactgggggagagcagagagggaacaaagcacactgagggaggacatccatccaaggcgtccacaaagcgtcgctaaggctatattcaaggcgctaaggcgacgccttattgtctaaggtggacgccttgcccctaaaccttgccttaccgcttaagcgacaccttaacaactatggaagcgggacggtacgggattttcccgtctcgttttcattcctataaaatccctggccagcgcgtcccccaccagacacgcatgcaatttttaatttttatggcaggtgctgtttccgattcaaaaattgttgtgcatgcgaaaaatttgcacgctggacgctatgcgggtgcaacccaggtttgagcgtagaattctcaagttttagcgtaaattatgtcagatatagcgtaaatgttgttacaatagtcaacaagatttttttatgatagttatggacaccataaatcacacacacgatttgggatagttgccgtaaaacacattcagaagtatcgtaaattggcgtaaaacacatcaagaagtgtcgtaaattggagtaaaacacaacaaaaagtgatttgaggtaattgtagcgtaaaacgcaacaagaaatgttgtaaaaatcatttgaaaattacataagtcacgattctcatagaggcacttgtttagtgcacattaagccaaaatataagtctaaccatctactggaggatgatacattctatctaaactagcagaaaatgcttccgtgtgcatcaaatatatcttttccttccatgagtcgaagttcttttcctactattggcccatgtgttgaggttcttttcctcccatgttccaatctgcaaagagcaaaaaaacaccaggttcttttcctcctattggctaggatttttgtgatcagctttgcgaagctatgcacaaggctgataggcctgaaatccttcaccatttcagccccatcattctttggaatcatggttatataggcagaattaaggcgcccaaaattatcaaacttcctgccccaaatagcggagattgcagccatcatatcagcttttaaaataggccagcataccttgtaaaaacgaccagtaaaaccatcagtccataggcccaggggccttgtcagcagggaggcttttaatgatatcctccacttcttgctcagaaaaggcggcatcaagctcagacatctcaaaagtaggcatccccagggcttcaagatcaatcaccctatctcgatcaacacatttccaataaggttggtgtagaagcgatccacacaagcagccttttcatcatggcttgttagggtatggtccccattcaccggtctagacacaaaattcttcctcttgcgatgtcgagcatgaaggtgaaacaattttgtattagcatctccctcctttagccaggaaattctagatctaagcctagccatggtgcacttgagagaggatagcagtataacttgctttttaagccggtttttgagccatatctcagcctggatgagcactctaatatcctgagccatttcaagcctgtggaggacttccttggtcaaagcaagctgagaatgcatatgaccaaccttctttttgctccaagcctgtaaccttttggtggtctctttgagcttcctttctacagttttaaaggggcaaaggaccggtatcacaacattccacccagattgaacaacctcctgaaatccttccagcttgcagtaaacattaagtcatcccaagaaacattaagtcattttcagaaagtgttaagttattctttgttattcaatcattctttgaggttttctcagacatttctttgttatattaagtcattctagcgtccagacaacatttaagtcgttctaggtaacattaaatcattctaaagtctaggtaaaatcattcaagcatctaggcaactttaagtcattccaataaacattaagtcatttcaggtgaggtggctcggctcacgttaaatgattggctcggctcttgcttggggaggagctcgatcgccggagcgcgcgcacgggaggcggctcgcctagtcggctcggggtcgcgggcgggcgcgttgggccggggacgtgcgcaggggcagctctatcccgggagcgtgcacacgggagtcagctcgcccggccggctcagggtcataggcgggcgcgcggggcttgctgagtcaggtccaggtgttggacccatggtctatcacccttggtgataaatagatcttcccgcgatatatatatatatatcgcgggagcgtgcgcacgggagtcggctcagggtcacaggcgggcgagcggggcttgctgagtcaggtccaggtgatggacccctggtctatcaccctaggtgatcaatagatcttccctatatatatattctgtcattgttgggacttcagcatgtttgctgactattttctgtctgtcttgttggaaggcagttgttcaatagatttgctctccgtgtaggttgctatttttctcattcagaggaataggc

SEQ ID NO: 775 - DNA, 3944 bp, Zea mays
  Intron number 4 from transcript GRMZM2G123499_T01 (locus G RMZM2G123499) derived from phytozome v7.0 (chr-ID 3; pos 1 767820 to 1771763 reverse strand)
acaataaagcttttgattttgtttcggtatgtatttccacctactcattagtttcttgtcctgcaattatttacaactagaaattcacttaggatattctaacatttcttgatgtatagtatctaaattcaatgatttgtaagctagtaatatgtttatataaattgggcgccgctcaaggttctttgaaataagtaggcttttgaatcggatgcatttctcattgaaatttcaaacttgcttcacaaacccctaggcttttggaagtagatggctcatggctgtgtggagtgtggacgcagagagagcctatataggattgcgtggaccttggacattggcagagggaacaaagtctgattgtttaggggaaaagatgcctgatacttgatacacattggttgggtacatgatttctgtggtgttatgaaatgcgggtaatgattgagacgtaaactgtagtaggaaactaacaaggaataatgtcagttatctgcatcatcacctgtaaacctgagttgattaaaatccatatgtggtcaacccagttgaaaagtagtccaactaaagggaggcacctatccaatctaaaccactaccttgtgtggaacatccaattcaatccagtctattgccatgtcaatccaacccagtccaatcatccaaatagttcctgtgagcggttgagcgctagatgatctgccatgacggaaactgacacaacacggactgcggatgctagataatcgtccttgtggcaacctgataccgctaggagtatgatataaagttgtatagttcactagctagttattttgtatgctaggaaaatctgaaagcaaaaatctgaactagcagggtccatatatcacaaacacaatatggatgtctgaagtatactttcttgccattctcactgaatacacactacttgaatcttcagcgcgcccacactaaatagcatttaaatgtaaaataaaactctcccaagtcccaagttcacaagcaggtagcacgtcgacctgacaaaagtacacaacataaacctaaaaccaaaactcccctagctaagcagcttaaggatgatactaaataacaagatgaagaaaagctgctgcattatatccagattcgagttggtatcaggacaaagctaagtatcagtcatgaattgctgttacaaaatatccatatacctgaaaagaagacatatacaagaaaaggtgtatattatcagagaagttgcaaaatatgacttgtgtgttggtatcaggacaagggtaagtatcagtcatgaatagaggtgacaatggactctaaattttacactataaaatgtaaggatcacatcagattaggatcgggctttatttctattcatttttgaactaaaaataatttaggtccctagcaaattatgaagaaacatttggatcccgatctattacgtcatgaatggatgctgcaaaatattcatatatgtgaaaagaagacatacgagaaaaggtgatattatcagagtaaagttgcaaaacatataagttgtgtgttgcactgctacttcagttttcacttctaagtcctttttttggcttactcattcagtttatttatatctctgttcatgtgaaatctagcatatatgctttaaaggaagattttttgtgttaaaaaagcctttgactaaataatataaaaggtttccagagaatatttatataactagaggagaccaatgtatagttctgaatttctgatgctaccaagagaaggttcagaaattgccatgcttcgtgtagtattcagggttcaccaatctggatgcaacacaaaagcctgtggccaccgatatccgattaatcgcaataaatcggtaggaaaccgaccgaaatcaaaatcaactcagttttgaattcaaaatggctcgtaactgattaatcggtcgataagaccgattaatcggcttctgacatgataaaccggcagcacagatgcagaaatcgaaccatacgttttttggcaaataaagcacattaatgtcccataatttgaacagcagatgacccaaatattatcacaagtccaataataatatttagcagttcaaatacattacatgacattgtttcatagtttagaaacaacatcgaagatacaaatacaccctccgtcgaagatcattcccacggttgtgcattccactgatcctgtgaagatgaacatgccctgctcatcagttcccgagtcacttcaccaaccggataattcacatacggaagaagggtgtgaagatgaaccttgtctttcattgctagaatcaggggtccaatacacttgttgtaggccgtggtgtcccatcccgtgaatgtggtcctacgctcccgaggtgtgtcgtgatcttgattttatgtagcgtcttccagtgaacatggcacagacaccctcttgggaggagccaccacatgtcttatacgtgccatcgctccccttccactgcttcttgtaagatgttgcttgaaacgtgtagcaccccccttccactgtttcttgcaataattgcacttgaatccatgatatatattgtccatgtgtttctaaaccggatcgatgcaatttgacatcaatgaaaatagcaataatattaactattattacaagtagcagcaccaatgctaaaaagatttgaagttaaaagaaagaaaatcctcaaaacctaaccactagagccccctcgatttatctctatctgagatcgattaatcggctagcaggggcagctaatcggccaaattgcttgatttacctattttttatttttccaaaagttgtttgatttttagtttgaaatccgttgcatgttttcaaaattggtttcagtggaaagtcttaaaatagtccatagtatttatagaaaaattggcatcaatttttttgttcaaactttacagaatatctcaaattcaaatgggtaaatcggtggtacgagtacaaccttaccgaccaccactgattaccgatttatcggccggttagccggattaatcgaacggtttcgtgatccttggttgtattagaaatcgcaacaatgtagttcaacgtttatttagtatcgtttacgaaatactgatgccatccttcaggagatatgaaagggctggtctgaattccctattctagcttgtttataaaatattgttcttattaaatacaaactagcaaaatctggaaatccaacaacatcaagtagatctacatgcaggatcacccatccctagacaggatagacaggaagtttaatttcttcaatccgggattctcccatccccagacaagaagttcaatgtcttcaatcctcgaacagggcactgaaaaatgcatgctttgttgataatgtactatcatcaggcatacatttgcatacaaccaatggatttctctgaatccttgcttccctaggcagtcagtaaattcgctgaactacaaaacagcacatacaaacccaactcacacctctgttcgtaacttacatgtggggggggggggggtagggacgtagggtaaccaaattcacacaaatcaggcagccctagtactcggagttgctaataataatctgcacatgctgattataaggaaccgcagccctagtactgagttgctagtaataatcttcacattttgttaaatggtaaggttgcttgctagtagaactgttacaattcttgttattccattgcttgcggcgaagtctttgctggaatttcattttattctgcaaatgtaagtaaaatcttattatggaattagtctttgtttgagcgaccttatctatatgttaaatctgcatgactaacgatggtaatcccgcaattattttttgctaaaatcttgactttaccttttcttcaggatcaccttgcagcagcacgtggttcaagaaagtg

SEQ ID NO: 776 - DNA, 1566 bp, Zea mays
  Intron number 1 from transcript GRMZM2G052948_T02 (locus G RMZM2G052948) derived from phytozome v7.0 (chr-ID 4; pos 2 35557261 to 235558826)
atgctgtctaggctgagtcacccaaatattgtaaggttcataggggcatgcaggaaatcagtcgtgtggtgtactattactgagtatgcaaaaggtggctcagttcggcaattcctggcaagaaggtagaacaagtcagtgcctttgcggttggctgtgaaacaggcgttggatgtagctcggggaatgacatatgttttttttgaagtaaaggtactgtaggaaggtcctacagtaatattattaaatcaaaagaactgagtttagggaatgacatatgttcatgcattgggatttattcacagagatctgaagtcagataaccttctgatttcagcagacaagtccattaagattgctgactttggagttgctcgcatcgaagtgaaaactgaagggatgacaccagagacgaacctaccggtggatggcaccgtaagttatagtttccccttactgaagattctcctatgcagaaatttctttgtaccagtgtatcactgcatctgtaatgcctaacatttagtttattttgaaacacaatttgcatagctaacaagttatcagaccttcacactaaaacagtactgtagttcaatattatgttgaatagatgcaaagttcctgaagtgcaggtattcaaaattttcagacactttgatagtcttactgattgtacatccaactttacataattactggaaaactcaagtactcgactgtacatgctatataccagtcttttggattacttaatcgtattattgaatgttccattttatgcatcactgtccaggcttttcattgtattaacaatatattgtttcatattcagtaattcaaatcatgttaatgggactgagttgcatgcttacgcacaaaacagtgtatagactaaggccatgtttggtttctttagtctagggactaaagtttagttaggggactaaaatttagtccctaacatgtttggttctaggggctaaaaatagtaagaatatactaaatgactcataagaagactaaaatgacctttaacattcttctgctattagtacaattgaactaaatgaggggtaaatatggaattaatatggtttagtcccttttagcacatatgtgaaggactaaagactaaatcattttagtcctagtgtttggcaaaaaagggactaaatgggactaaaaactagagactaatctttagtccctctaaccaaacaccccctaactctatagttgttaatatgatggaactactggactattgtgtccagttccaatttttttactaaactattgctgaggttgcacacttgcactttttttgtccacagtggggaagggtgagtgtgtgattataccagtatataacaaaaataattgtatagatgtttcaattttctatacatggtctaatttgtttttggttacaatagaaatcagagacaagtcttcaacttgctattgcctcactagcaaccagttgcttctgtaatttggatttttttttaatgccatgcgcatagtagatgattttggccttctatttttatttgcagggaa

SEQ ID NO: 777 - DNA, 10338 bp, Zea mays
  Intron number 5 from transcript GRMZM2G386317_T01 (locus G RMZM2G386317) derived from phytozome v7.0 (chr-ID 6; pos 1 8278473 to 18288810 reverse strand)
aggtacaggtacctgctctgctctacttactcccctaccaagccatggtgttccactaaattcattacgaacttgcttactgaaacggattgatcgagatagtcatttgttctttgttgcgaataatcgtattatttacgtctgatccattcttctggtccaccacgcgtcttcaattttctctaagcttccttttgttcacatggctttcttggctgatccaccatgcttgcaaattcaagaaccacaaaaatattgatcttctttcacagggtgcaatgtggaccatctaaggcaggtatctaaacatatcaaacaatgataactgtgctatgcaattcagtaattcacagtaaaaaataaggtctggaacaatatttcgctgtcctaaggtgcttcatttttctatagctacacttcgtttacattatgtaacatgttgtgcattttcttccttaatgaagttgtgttacatgaacttcgatttatgccatttgagctttcttgtctgaattttataacagtattgtatcgagatgccagtatgtgcatatttgttcttgacttgtcaggatgtcgttctgatgcgtgtaacaatcagtgccattaccgaatcatacacaatactctgaatgttgggtctatgcttcgtcgccgaaggtcttcaagggagaagcggcttaaaatgtgtgagcaggtatcttcggactcgtatcagaaagggaagagctacaaaggttgacacagcgccgaagctgtgaagcaggaaagcttcggcatgttcgcagaaaagggaaccgacttaaagatgaaaaggccattcagacctcgatagagtgctatagaattatcaccaaatgtaaagggcatgtatgtaattttgtatgggttgtaccccgtgcctataaataggtgaacagtacccccgtactgttcacggggacttggcatttgcttttgcgtcacacttgtattttcatctccttccaagccgaaggtacatttataattcgatattgtctctatttctctatgatgatataaaaaagttaaatgaatgatgttatatgattattcgtgctatcttttatgtttcatatgcttcatctttcattaatgtatactgtgatgatgaaggttcgtccttcatgaccttcgtccggagatcgttatatcctaagggaaataatgcctcaaaggacgaaggactttatcgtttaacattctctgtgttgccttgttcttaactcatagcatttgagaacaagtccccaacattggcgcccacctccggtgaactcacttccactttttgagctgatggcttcgttcaacgaccaagctggagctgcttcggacccgaagctggtgctcccgatcacaggtggctcgtcctcagagccagctaacaagaaacagaagaaggaagcacagagaagggtacagcatgttggggtgcaaggacccttcatcaagtcaagatggtctcacattcctattaccttctcccaagaggaccttcagctcaaagattacccacacaacgatgccatggttatctcttgtgttatcaaaggatttctggtccacaatgtcttggttgacacaggcagtgcagctgacatcatatttgctaaggccttcagacaaatgcaagagccagaagataagattcatgatgctacacatcctctctgtggcttcggaggaagacagattgtagcattgggcaagatcaccatgtcagtgaccttcgggttcatcaacaacactagaattgagcaagttgtgtttgacattgtcgacatggaatacccttacaatgcaattattggtcgtggtactctcaatgccttcgaagcaatccttcatcctgcctatctttgcatgaagataccttcggatcagggacccatcgctatccatggaagtcaggaagctgcaagaagggccgaaggtaattggactgactcaaaagcaatccataacatcgatggagctgaagcttgtgaacagtacaaattcagaagggagaaagcagcttcagcagaccagccgaagcctatgctcttatgtgaggacatagcagagcagaaggtgctgttaggctctcagttatccgaagagcaggagaaaaccttgataaggtttttgttcaataacaaggatgtttttgcatggtcagccaatgatctctgcggagttaatagagatgttatcgagcactcactcaatgtcgatccatccttcagacccagaaagcaaaggcttcggaaaatgtcagatgataaggccgaaggtgctcgcaacgaagtcaaaagactcctcagtgcaggagttatcagagaagtgaagtacccagaatggctggctaacactgttatggtaaaaaaggccaatggcaagtggcgaatgtgcatcgatttttacagatcttaacaaagcttgcccgaaggatgaattcccactaccaaggatagattctttagttgatgcatcagcttcttcagagctcatgagtctgttagactgttattcaggctatcaccaaatttggatgaagcaggaagatgagccgaagactagcttcataactccaagtggcacatattgctatcttcggatgcctgaggggctcaaaaacgctggaggaagtttcagccgaatgactgcgaaggttctccaatctcaaataggcagaaacgtgctaacttatgttgatgacatcattgtcaaaagcacgaagcaggagaatcatattgctgatctgcaggagaccttcgccagtttcaggcaagctggcttaaagttaaatccagaaaaatgcgtcttcggagtgaagaaggggaaatttcttggatgcttggtttcaacaaaggggattgaagctaatccaagtaaaattgaagctatacttcggatggagccaccaactacaaagaagggggctcaaagattgacaggaagattggcatctctcaatagattcatatccagatcagcagagagaaacttaccattcttcgaagtactgaagtcagccgaagtctttcaatggggaccaatccaacagaaggcctttgaagagctaaaacagtatttaatagatctaacaacattgactccaccaatgccaggggctcctttgttattatatgtggcagcttcgcactcagcggtaagtgcagcgcttgtccaggagaagcttgatggtcaagtcaagaggcaggccccaatatattttgtatccgaggttcttagtttgtcaaagaaaaattatacagagctggagaaggtattgtatgttgtcttgatggcctccaggaagcttcggcactatttccaagcttacaacataattgttccttcatcacaacctctgaaggatattatgaggaatcgagaagctactggaaggattggaaaatgggctgcagagctcaatgaattttgtattgaatatgttcatagatcttcgattcagtcacaggcgctggcagactttattgctgattggacgccagggactcaggaggaggaaacgaataaagacaacgaagcctagacaattttttgtgatggatcttggggaaccttcagagcaggagcggctgctgtgttggtttcaccttccaaagtcaaaatttgttatgcggcaaagcttgattttaattgcacaaataacattgctgagtacgaagcattggttctaggtcttcggaagttaaaagcaatgggaatcagaagggccatacttaaaactgattcccaggttgtttcgggtcatattgacaaaagttgtaaggctaaggatccgaagcttgaaaaatatctggatatggttcgaagagtcgaagcttccttcgaagggttttctgtcaagaatatccctcgaggacaaaatgagcatgctgatctgctagctaagtcagcagcacaggggctgcctttaccttcggatgtgttcttcgaaacaataaaagcaccttcggtggaacttcttgaaagagcagttcttaatatatctcctgtttttagcgaagattggagaaccgagatcatctcttaccttcagggtaaatttctttcagatgacgaagcttataacaagaggatagaggcaagagctcgtccatatgtcatgatagaaggggagttgtacaaacatggagtttgtgctccgctgctcaaatgtttatccagaaccgaaggtatagagttaatgaaagaaatacatgcaggcctgtgtggatctcacatcggatctaggccgttacttggaaaagttttccgtcaagggttttactggccgaaggcagcttcggatgcagcagaattggttcaaaagtgcgaaggttgtcagaaatgtgcaagagatcaaaaacaaccttcgtccttaacacaactcatacaacccacttggccattgcaaaggtggggccttgacttgttaggtccgttaccaccggcccaagggaacctgaggtatgttgtagtagctgtggaatatttttctaaatggattgaggcgaagcctttagccacaataacttcggctaccgtccaaaagtttttctggcaaaatattgtttgtcgtttcggggtgccaaaggctatcactgtggacaatggaacacagtttgactccgaagctttcagggatttctgtgaccaaattggtacgaagatccattttgcatcagttaggcacccggagtcaaatggactcgttgaaagagccaacggcattataatgacaggaataatgaagttaatcttcaatcaacccagaggaaaatggccagatcagttaatcaaggtggtgtggagccacaacacgacaacatcaaggtctacaggcttcactccattcaagttgttattcggtgacgaagcaataactccagaggaagctaaaaccggatcaataaggatagtagcttcggcagaatcagattccgaagctgcttattctatagaaaaagatgctttagaagggatcagactgcaagccgtggagaatatcaataaatatcaagctgaaacagttaaatggcgggatagaaaggttcggctaaaaaatattgggccagggcacttggtgcttcggagggtggccaactcggaaacagtgggcaaattgcagttgaaatgggacgggcctttcttagtagcatcttcgtcaagacccggttcatacagattgaaagatatggacggcaatgacattcctagatcttggaatgcggatgagcttcggcgatattatgtataattcgatgtaatttttcatattttttattttttagttcttctttcatggcacccttttcctttccgaagggggagaaaggtttttaatggggccatcacgtgtaattttcttttttagttctataagagcaaaatcccccaaagaatgtaaatgtaaaagctgagaatgcaccatcgagtgccaaaaagaaaaaaagaagctccaaagacgttcctaagggaatgcagagcttacagcgaaaagtcaacgctgattccgccaaaagtaaaggcgaagaagctccaaagacgttcctaagggaatgcagagcttacagcgaaaagtcaacgctgattccgccaaaagtaaaggcgaagaagctccaaagtcgttcctaagggaatgcagagctgaggtgtgattgtttttaagaaaataatggctatgaatatggcttcggatacgtgtttggccattcatttgcacatcacattacatcatagcatttgcattcataaacattcatctaggcatatgtaggataatcatcttcatcgcataaaatggttgcttcggcaagaagagaaaaaagaaaaggaaaatgttgttttctatgaaggagagcttcggaaaaaaggaaaatgttgttttctatgcttcgttgcgtacgaaaagaagggaaggtgttttttcgccttcggctcaaaaaaggaaatttcgtccacatcaaagcatttctcatacatcagtgaaaggttaaggatatattacaaggtatgaacagcatacattaaaaacaagtttttgtttacatttacaaaagttatctcaaaagtttttcaagtactgtctgcagtctactatctaaatctccaaggagcttcggcttcggcgttatttttgatcatcagcttcggcttcgtcatcctacatgaataaggtcgttggaagtcagaatcaagtttacaggaaaaggtaagcacaaggtatgatttcttactggatcaaggtggctacgagcttcgtctccagctttctctcgaccaccttttgtccatatcatttttacaaatcgattcgagatgcttcgggcgagatcagggatgtcatccaggattgatggtgacaaagtaaaatttggcctattgacaattttcccatgatcacagccagccttcatgaaggctgcagcagtccctcgagaagccacccaggcacagaagtcaccatgcccagctatgacttcgtcgagctcgtcaatctccccctcaatgtgttcgaaggtttttggtagatcttcagctgagggggtaaatttttcgctgctagctccaaccgagtaaaaaatctttcttagtcgttgaatgcacttgttgctaaattccaggcatttttcttgaagatgtgtcagtagttttctcaaatccgaattttgctgagcttcggcttcaagttttgcattgagatcttgtttttctcgttcgaactgctcagactggcggagaagcttcgagttcagttctgatatttttgcttcagcttccgccagtaagccttcggctgcctggagctcaaagttctttttcccaaaagcatctgattgctcctttattttgttttccaaatttccgattataatttcatgctttttatcttcaagatcttgctgcatttgcaaggctttgctcaataacatactctacacaaacacaaccttcgtcagacatgtttttgttagaagcaataaaggttaagggacaagtcattcaccttgaagttggagtaaaataaactaccaacgacatgttgtcgtcggtagcggctgatgtctgtttctagcttcgggaatccaatactcttggacagagtactgataactttggcccctgtttggtcccgaatacactctaatttctcgtcatcaacgcctccgaagaggagtgccccaggtttgtatccacaggattgggcatactctttaagctcttctatttcagcttttgttagatgttctccaactaagttttggaacgcgaaggcttcgttttctgaagcttcatcagcaatttcttttcctttctttgacgctgcggtcacagtctcttcggcagcagtggcagcttcttctgtagccatgtctagcagcatttggtcaatatgttcaattgtgatctctaaattcaaatcttcagctgaggtaacttcggcggctgcggcctccgaaggtgcaatttcaatatctgccccctctaaagctgctcgtgttttttgggccgaagctcttggcggcgttttgtcaattacctctgtcacggtaatgattctttgtttccttgccttgattgttttcttcgatttctcgggctccttgtccttctgaaaaaactttgtcagttgaggacccagtggacttagcttcgcaggtaaggattcagtcattaccttcagaatttcctcaacaacagcagcagaaggtgatgcgggagtttcttctgcttcggatatttgttgcttcggagaagaagctttccttttcttcggaattttcttcgttactggctctttttcaccttcatctaaggcttcagttacccttttccttttttggcctccggcacctttgttcagattttcgtagtctgggtattcgaaacccaaggcgtccaacactcgatttagccttcgtttcggacgagtgccgaaggctgcggtcatcaattgatcttcttttttggaataattgccaagtatttcattacacattgcttcaatcgtatctagccactcttggcaaggtgctttaaagtactttttaaacttgaaatagtaaggtaaacgtacgagttcaccttttttcttttccccctgtagcttcggcatttcccattctctcaaactgggaaaaactttgaatgctaaaaactcttgaaccaggtcccttgtgctgatatgctctgcaataattctgaatgcactcattgcttgttgtgttggaccttcgggtgtcatattgcagcgaggtcgggtttctccgaagattaattccagcgggctttgtacaagcttttccttgtcgtcatcaaccttgacatagaaccactctgatttccagcctgctgcccacttgcttcggtagctaattacagggaactttgtagttttccgataggcaaagttatagcaaccaaaattatcgtgtaatccatcttttctagcctttgtttgataatgtagctcgtgaacccggtagaacctgtctgcaaatggttccactgcttggcttcggagtgcccagatataaacaataagcctaacgatagcgttaggggtcagctgatgaaaatagataccgaacctcttcagtacctctccaataatcccatgtagggggaaccttaatccagcctttagaaaacttttaaaaataacaatctcatccttctctggcttcggggtagtctcttctccaccgaagcgcaacaacttcttctgattttcagtaaaaaagcccgcttttaccatcttggacaaatcagccttcgaaacagtagatttcccgaagtccaagtggctcggcttgcttggcatggcaatgcggtaatcatcttcggaatcagtttcctcaatatcttcttcctctgcttcagcgattgcttgttctgcttgttttgcatcatcatgagggatcttttctgaagtcactagacccgatcgttgcatggcttcggagatgggaagagtctccgaagcttcagtttcctccccctcgcgctcaaccctggcggtagagcggactctggccattcaattatgaacttgtgaaactttaaaattttcttcctccgaagcaggtttcaaactggagcttcgttcgtttctaacagacaagcttcggcgatggttaaaaattttggcaggaaaacagtgcaaatagcaatgaatgctgtggtaacttcacacctactcgtctgtttatatagtgctgcaggtaagaaggcgaagcgccagagtttttacaccaggcgcacacccgcttgcgcttgctgcgcggtggaccgcagggacaaacagtaaactctgcaaggtgggaccgctgcgtgctgggaaattaaatcgtttctcggcaacgagctcagggaaggtgttttttggaccttcggctccccgaagcttaagagacttttttcacggatcaagctcgttacgaaaaacgatctagcaccgcgaaaggggctactgttgggtctatgcttcgtcgccgaaggtcttcaagggagaagcggcttaaaatgtgtgagcaggtatcttcggactcgtatcagaaagggaagagctacaaaggttgacacagcaccgaagctgtgaagcaggaaagcttcggcatgttcgcagaaaagggaaccgacttaaagatgaaaaggccattcagacctcgatagagtgctatagaattatcaccaaatgtaaagggcatgtatgtaattttgtatgggttgtaccccgtgcctataaataggtgaacagtacccccgtactgttcacggggacttggcatttgcttttgcgtcacacttgtattttcatctccttccaagccgaaggtacatttataattcgatattgtctctatttctctatgatgatataaaaaagttaaatgaatgatgttatatgattattcgtgctatcttttatgtttcatatgcttcatctttcattaatgtatactgtgatgatgaaggttcgtccttcatgaccttcgtccggagatcgttatatcctaagggaaataatgcctcaaaggacgaaggactttatcgtttaacattctctgtgttgccttgttcttaactcatagcatttgagaacaagtcaccaacactgaaccttgtcagtaatattgaatgttttttctttggtttactagcataatactgcaagcctaccctaacttgcttgggactaaaaggctttgttgttgttgtttactagcataataccattaatcacaaatgttgtccatgcaagattctcccttttgtttatttaattgaaattttcttggggttgttttacaggttcgc

SEQ ID NO: 778 - DNA, 2339 bp, Zea mays
  Intron number 1 from transcript GRMZM2G415791_T01 (locus G RMZM2G415791) derived from phytozome v7.0 (chr-ID 5; pos 9 710252 to 9712590)
aaagccatcgcagtgggaaggtatgaacttatttggaaagtggctcctaaacgcatgggcattataaatttaggctgtagtcaagtgcacctacttcacaaaggacagatccagtgttggcggctccatcataagtgctgagtggggtttggggaagggatacccgaggcaagccgtatgccttatccttgcatttttgcaaagaggctgcgtcgaactcgaacccaggacggtcagtgggaacgcttctcaccattgcgccagcctgtcctcctagtgcacctatttcacagaaatataaaaaatagataaactggattttgctttgtatggtcgataagtgaaaagtataatatatatgattcttgattatgcacattggggggaaggggggtatgtctacagtgcttcatgatgactgtttacagcatatgtgagtgctgttatgttggtctctttccagttatcgggtctagtttcaattgtttgcatttttttgcgacaaaaaggaggtcaaatgtctcaatatattaagatccaattttcttgtaaatgcacttagggagcgagtacttagatatgttgtataatttgtactagtactgcagtgcgctcacattgcaacacattccaatatatatcctttttagctttaacaacaaaatagcgacacttatgtagtatgttgcctatgcttggcatggtaactttttatattgaattaattgcaatcaagaagcactgccaatagagtggtggtagatatgtggtgacctgatgcattttatgcatcattcattatttaatcttgactcaacgtaaaataagctcagcttaacatctattggttctaccataggttcaggttactaacataacagcaggggacaggcacccaaatagtggcacatgcattaatttgcaaccggttgagctcgtctaaagcaagtaatttgtacaatactaaaatagaactttaaaatatgtaactccagagactagtttttttagggtttcatcctgtaaggtcatttgaaagcaaatttaatataataatatacacagtacttgaggtcaagtaacagcggttaacagtattcagacatgcatactcgcaccaaggtggaccagttcatgggcttgcttgtttgttacatttgtgaacttaagtgtgcatgcttccatttcactaagatctgcctcattaaggtacctcatataaaggggttatatttgctattgcaaattaggctgtgtacttatgggttgcatcaatctctcttgcagcaaaacaagccataaccagtcatatgtaaattgcacctgtcaggctgtctcacgggctctgtatcttgtaaagttgtaattgcatgttgtagtcagtataccaatgcatcttgtaagttgtaattgcatcttgtagttagtataccaatggacaaacaatagtcctttaggaatgcaaacctgctggtggtcttttattgaaacacctgtttttgtgacaggtttgcagttgcagcttaactcttctacatatgaactagcccaatggaacttctatcttacggtcttttacacctcagattagtagattctctagtttatgcaatttctacagtttcctaggaattacaccatttgagaatattgtcaattttaaaaacatcattaggcttcacaaggtatctttggtgcactgtgcactttttcctgctcatttactatggaatttgtatgattctgttaaataattgatgaatcagttgatgtgcgcaaaattagacatacttaagtagatacaggaataaactattatccatgtttctgggagaagttgttggacatggcaaaagatagaatcattgtagatcaacatcttgtgggaatgggcacataggcaaacattatttgataatttttagtggctgtttggagatcttgcccatgtgggctcgtcaaactatgtgcacaggaaacctgtgagttctatgcccccccccccccctctttctaccaggcaatctgaacaaactgttgagtaactatgtatctacaaaataaaaaccatctgcacacaattctggtatagctgatgcatagaagtaaatttactacattcaaaattgtaagttgttgtggcttttctagatttatagcttagacagtgtgtatatctagatgcatagcaaaagctatgtgcctagaaaagccaaaacaacttacaatttggaatggagtaccttttggtttagtacttttggagaacactcttttggtcatatttttccctcagcagttacaataattctgtatataggttgaaacaaaagaagtga

SEQ ID NO: 779 - DNA, 14741 bp, Zea mays
  Intron number 10 from transcript GRMZM2G084794_T01 (locus GRMZM2G084794) derived from phytozome v7.0 (chr-ID 3; pos 135416651 to 135431391)
agaccgacgaggacatcaagatcggtactcaagatgaatctattgacactgatttgcctgacacgtacaacaaggtgtacagtaacatgcctgaagaaacacatatgctgaagtctgttcccaactgcggttattgcaatgcgaagaagtttgagtatgagccacctggattttgctgtcgtggtgggaaggttgagctagccccactggagactcctccacaactctggaggttgtgggatagtgcagactctgatgctaggcactttcgtgataacatcaggttttttaatggccatttctctttcacttcgttgtactgttgccttgatagtaagacaactaatgtgagggattctggtatatacacgtttcgggcacaaggcatgatgtatcacaatatcaagtcattcggtagggaaggtggggcggagcataaacaccttgaactttacttttacgatgatgatcccaatctcgagcatcggtaccgtatgtgccgcgaagaacatcaacagaaagacaaagatgttattaaacagatagtttccatactccgtgaaaatccatactctgaacatcttagaagcatgggtcatgttgagaaccttgatgactatcgtatcacattgaaccttgatcaatcgttgaaccagaagacatataacacacctatcacttcagaggtcgctgctgtctggatcgaggggagcgaacggcgaggccagttcagcaagagtgttatgctacatgggaaggataggtcaatccatggtatccgctcataccatggatgctacgatgcactatcgtatccactgttctttcctagaggtgaacttggatggcatgcaaatataccaaaggttggtgtatccatgggcgaagtggatgcataccgtgtgacacatagggcaagtaatgcaaacgatgaagatgcaggttagttgtttctttgtaatttcttacataacacattgttaaagtatcctttcgacatcactaaataatcaatccttgcgtatgcagaatctcctaatcatctatgtgtgtccgtacgtgactattactgctacaaattccagattcgtccaggggtattcaatccaatacttcatggtaaacgtcttttccagcagttcgcagttgacacatacatcaagattgagagctctcgtttagatttcattcgtaagaaccaggatcgtttacgggcagacctataccagggtttggtggatactatgttagatggcgatataagagcagaaaaggttgggaagcgaactgtgctgtcgtcgtcgtttattggcggtcctcgtgacatgagacgtcggtatatggatgctatggctctggtgcggaagtttgggaaactagacatctttcttaccatgacatgtaaccctaactgggatgagataaggagggagcttctccctgggcagacaccacaagatcgttcggatcttgtagtgcgtgtctttcatgcgaagctacaggagttaaagtataggctgactaaacaagatattctcggtaaggttcgtgcttacgtctatgtcgtcgagtttcaaaagaggggtttgccccatgcccattttttactaatcatgcaaaggaagtacaagctcacatgccctgagcagtatgaccttttgatctcagccgagatcccagacaaaaagtaccatgaactacgaaagatggttatcaagcatatgatgcatggtccatgcgggtcgctaaaccctaactgtccatgcactaagggtcgtgcatcgtgcaagaatcattaccctcggcctttcagtgatgcaactttgcaagggaaggattcatatcctgtttacagacgtcgtgacgatgggcgtaaggaaaaggttcgagggtgcgaattggacaatagatgggttgtcccttacaatccttacctccttcgcctcttcaactgtcacatcaatgttgaggcgtgcgggagcatcaaggctgttaaatatttgttcaagtacatatacaaaggccatgatcgtgcgtctgttgttatgagagatgcgagcaagacagatgatgatgtagatgagatcaagcagtacagagatgcaaggtgggtgaccccgccagaagccttatggaggatatacggctttgagcttagtcagaactctccacctgtgatgcagctgcagctccatcttccaaacatgcacatggtggcgtttcatgatcggcaaatggtccagcgagttgtaaaccgtccaggtgctgataggtcaatgctcacaacatattttgaggcaaataggctacacgaagaggcttcgggcatcctatattgtgacttccctgagtggttcacttggcagagtggtaagggcaaagtatggcaacggaggaaacgagatacgggtggacaagtcggtagaatagtctctactcatccagccgagggggagcgctactatctccgtgttctcctaaaccacgtggctggcgccatctcctatgtggatctaaggacagtagatggtgtcacgctaccgacttttcgtgaggcagcagagagaaggggactgcttgagtcggacaacacactggatgagtgtctcactgaatgtgctcttttccagatgccatcggcgctgcgacgactttttgccacaatactggtgtactgtgagccaagtgatgtggcggtactctggcggaaacacctagatgctatgtcagaggactatcaacgtaggagtgagagcaaaactcatgttgagcagatggtattgattgacattaggaacatgctgcagtcaatgggaaaggacataaagacattcccacttcctcctatcattgacacgtatgacgatgctataggtactgctagggaggtttacgaggaggaaagtatcgaaccgacagtggcagatgtggctctcaaagagactcttaacgaggaacagagagccgcctatgataagattatgtctgctgttgacactgatcagggtggattgttctttgtgggtggacctggtggcactggaaagacttatctatacagagtgttgctcgcgacgctacgcagccagaacaagattgcggtggcaacagctacatctggcgttgcggcttccataatgcctggaggaagaactgcccattcacgcttcaagatacctcttactattgatgatggtgttgtatgtagcttcatgaagcagagtggaaccgcagagttgctacggaaagcatctctcattatctgggacgaggcttctatgactaagagacaagctgtggaggcactagacaatagcatgcgcgatgtaatgggtcggcctggattgccattcggtggtaaaaccattgtcttcggtggggatttcagacaagtcttgcctgttgttcgtaaaggttcaagggctcaagtagtcgcttcttctctacgtatgtcttacctatgggagtccatgtcccacttaaagcttgttagcaatatgagggcaaaaaacgacccttggtttgcagagtttttgctacgcataggtggtggaactgaggtcacgaatagagatggtgacatccgtcttcctggcgaggtatgtgtgccttatagtgggagtgacagtgatcttgacaatctaatagactacgtgttcccaaatctcaatgaaaatatatcagattccacctacattacttcacgagtgatactatcaacgcgaaacgattgggtggatatgataaatgttaagatgatcgatcgttttcaaggtgcacatacggtgtaccatagtttcgatagcgccatggatgatccccataactattacccacctgagttcctaaacacactaacgcctaatgggctgcctccgcatgttttgaagctcaagattggatgccatgttatattgcttcggaatatagaccctgtgaatggactttgcaacggtaccaggctggtggttcgtggtttccaaagaaatagcattgacacagaaattgtactgggtcagcatgctggaaaacggattttcctgccacgtatacctctttgtccctttgatgatgagatgttccctttctagttcaaaaggaagcagtttcctatacgtcttagttttgcaatgactgttaacaaagcacagggtcagactattcccaatgttggtgtgtacttgcccgaatcagtgttctctcatggccaattatatgttgctctatctagagcgacagcccgatcgaacataaagatccttgtcatcccagccgtcgatggaaataagaggtcgaggaagggtgtacgaaagaaccccacagtagattgtgggacatacaccaagaacatcgtctacaaggaggtcctaacaaactagcggaaatcttcacaaacaacagaagagtgatttacacaaacaacaacacaacccagacccatagtaagtctgttaaaactcaattgtttttttttgacatgtgcaagtaatttatttgttcagatatttaatggtttgagtttctgttttagttagagatttctagcatggccgacacaagtaaccatggatccctcattgatgaatggttgccgaccctacaccaagcccaaagaactctcatgtcatgctgaatgaaaaattcagctctcgctcaatatctggtctttttagtgaatgaaagtcgcctagagggggggtgaatagggcgaaactgaaatttacaaatataaacacaactacaagccgggttagcgttagtaataaagaaacgagtccacgagagagggcgcaaaacaaatcgcaagcaaatgaagagtgtgacacgcggatttgttttaccgaggttcggttcttgcaaacctactccccgttgaggaggccacaaaggccgggtctctttcaacccttccctctctcaaacggtccctcggaccgagtgagcttctcttctcaaatcaaagccgggaacaaaacttccccgcaagggccaccacacacttggtgcctcttgccttgattacaatggaactttgatcacaagaacaagtgagaaagaaaagaagcaatccaagcgcaagagctcaaaagaacacggcaaatctctctcgctaatcactaaagccttgagtggaattggagaggatttgatctctttggtgtgtctagaattgaatgcctagctcttgtaagtggttgagaagtggaaaacttggatgcaatgaatggtggggtggttggggtatttatagcccaaccaccaaaagtggccgttgggaggctgtctgctcgatggcgcaccggacagtccggtgcacaccggacatgtccggtgcccctgccacgtcatcactgccgttggattctgaccgttggagcttctgacttgtgggcccgcctgggtgtccggtgcacaccggacaggtactgtttgctgtccggtgtgccagtatgggtgcgcctgacttctgcgcgcgctgcgcgcgcatttaatgcgccgcaggtagccgttggtgccgactagccgttgcttcggagttgcaccggacagtccggtgcacaccggacatgtccggtgaattatagcggactagccgttggcttttcccgaagctgccgagttcctgaggccgctcctccttagcgcaccggacactgtccggtgtacaccggacagtccggtgaattatagcgcgagtgcctctggaaatttccgaaggtggcgagttccagttggagtcctctggtgcaccggacactgtccggtggcgcaccggacactgtccggtgtacaccggacagtccggtgcttccagaccagagggccttcggttacctctttgctcctttgttgaatccaaaacttggtctttttattggctgagtgtgaaccttttacacctgtataatctatacacttgggcaaactagttagtccaattgtttgtgttgtacaattcaaccaccaaaattaattagggactaggtgtaagcctaattccctttcaatctccccctttttggtgattgatgccaacacaaaccaaagcaagtatagaagtgcataattgaactagtttgcataatgtaagtgtaaaggttgcttagaatttgagccaatataaatacttacaggatatgcatggattgtttctttcttatataacattttggaccacgcttgcaccacacgttttgtttttgcaaattcttttataaatccttttcaaagttcttttgcaaatagtcaagggtaaatgaataagattttgcaaagcattttcaagatttgaaatgttctccccctgtttcaaatgcttttcctttgactaaacaaaactccccctaaatgagatcttcctcttagtgttcaagagggttttgatatatcattttgaaatactaccttctcccccttttgaacacaataggataccaattgaaaatattcaacacttaagtttttgaaattggtggtggtgcggtccttttgctttgggctcttactttctccccctttggcatgaatcgccaaaaacggaatcattagagccctttaagtactatcctcccctttggtcataaataaatgagttaagattataccaaagatgaagtccggtccttttgctttgggctcttattctctcccccaaagtcgaagtccttttctttgatgctcatgctccccctagaatgaagagtggcttggagcgacggcaaagcatgagttacggagtggaagcctttatctttgccgaagattccaattccctttcaatacacctatgacttggtttaaaatagacttgaaaaacacattagtcatagcatatgaaaagagacatgatcaaaggtatataaaagagctatgtgtgcaatttaacaaaagaagttcctagaatcaagaatatttagctcatgcctaagtttgttaaaattttgttcatcaagaggcttggtaaagatatcggctaattgatctttagtattaatgtatgaaatctcgatatctcccttttgttggtgatccctaagaaaatgataccgaatggctatgtgcttagtgcggctatgctcgacgggattgtcggccattttgattgcactctcattatcacatagcaaagggactttggttaatttgtaaccgtagtcccgcagggtttgcctcatccaaagcaattgcgcgcaacaatgacctgcggcaatgtactcggcttcggcggtggaaagagcgaccgaattttgcttctttgaagcccaagacaccaaggatcttcccaagaactggcaagtccccgatgtgctcttcctattgattttacaccccgcccaatcggcatccgaataaccaatcaaatcaaatgtggatcccctaggataccaaagcccaaacttaggagtataagccaaatatctcaagattcgtttcacggccgtaaggtgagcttccttagggtcggcttggaatcttgcacacatgcatacggaaagcataatatccggtcgagatgcacataaatagagtaaagaacctatcatcgaccggtataccttttgatccacggacttacctcccgtgtcgaggtcgagatgcccattggttcccatgggtgtcttgatgggcttggcatccttcatcccaaacttggttagaatgtcttgagtgtacttcgtttggctaatgaaggtgccctcttggagttgcttcacttggaatcctaagaaatacttcaactcccccatcatagacatctcgaatttctgtgtcatgatcctactaaactcttcacatgtagactcgttagtagacccaaatataatatcatcaacataaatttggcatacaaacaagtcattttcaagagttttagtaaagagtgtaggatcggccttgccgactttgaagccatttgcaataaggaaatctctaaggcattcataccatgctcttggggcttgcttgagcccataaagcgccttagagagcttatagacatggttagggtactcactgtcttcaaagccgggaggttgctcaacatagacctcttccttgattggtccattgaggaaggcacttttcacgtccatttgataaagcttaaagccatggtaagtagcataggctaataatatgcgaattgactcaagcctagctacgggtgcataggtttcaccgaaatccaaaccttcgacttgggagtatcccttggccacaagtcgggctttgttccttgtcaccacaccatgctcatcttgcttgttgcggaagacccatttggttcctacaacattttggttaggacgtggaactaaatgccatacctcattcctagtaaagttgttgagctcctcttgcatcgccaccacccaatccgaatcttggagtgcttcctctaccctgtgtggctcaatagaggaaacaaacgagtaatgttcacaaaaatgggcaacacgagatcgagtagttacccccttatgaatgtcgccgaggatggtgtcgacggggtgatctcgttgaattgcttggtggactcttgggtgtggcggcctttgtttctcttcctccttgtcttcctcatttgcatctcccccttgatcattgccattatcttgaggtggctcatttgcttgatcttttacttcatcaacttgagcctcttcctcattttgagtcggtggagatgcttgcgtggaggaggatggttgatcttgtgttcttggaggctcttcggattccttaggacacacatccccaatggacatgttccttagcgctatgcacggagcctcttcatcacctatctcatcaagatcaacttgctctacttgagagccattagtttcatcaaacacaacgtcacatgagacttcaactagtccagtggacttgttaaagaccctatatgcccttgtgtttgagtcataaccaagtaaaaagccttctacagtcttaggagcaaatttagattttctacctcttttaacaagaataaagcatttgctaccaaagactctaaaatatgaaatattgggctttttaccggttaggagttcgtatgatgtcttcttgaggattcggtgtagatataatcggttgatggcgtagcaagcggtgttgaccgcctcggcccaaaaccgatctgaagtcttgtactcatcaagcatggtcctttccatgtccaatagagttctattcttcctctccactacaccattttgctgtggcgtgtagggagaagagaactcatgcttgatgccctcctcctcaaggaagccttcggtttgagagttcttgaactccgttccgttgtcgcttcttattttcttgatccttaagccgaactcattttgagcccgtctcaagaatccctttaaggtttcttgggtttgagatttttcctgtaaaaagaatacccaagtgaagcgagaataatcatccacaataactagacagtacttactcccgccgatgcttatgtaagcgatcgggccgaatagatccatgtgtaggagctccagtggcctgtcggtcgtcattatgttcttatgcggatgatgagagccaacttgcttccctgcttggcatgcgctacaaatcctgtctttctcaaaatgaacatttgttaatcctaaaatgtgttctccctttagaagcttgtgaagattcttcatcccaacatgggctagtcggcggtgccagagccaacccatgttagtcttagcaattaagcaagtgtcgagttcagctctatcaaaatctaccaagtatagctgaccctctaacactcccttaaatgctattgaatcatcacttcttctaaagacagtgacacctatatcagtgaatagacagttgtagcccatttgacataattgggaaacagaaagcaaattgtaatctagagaatctacaagaaaaacattggaaatagaatggtcaggagatatagcaattttacccaaacctttgaccaaaccttgatttccatccccgaatgtgattgctctttgggaatcttggtttttctcataggaggagaacattttcttctcccctgtcatgtggtttgtgcacccgctgtcgagtatccaacttgagcccccggatgcataaacctacaaaacaagtttagttcttgactttaggtacccaaatggttttgggtcctttggcattagacacaagaactttgggtacccaaacacaagtctttgaccccttgtgcttgcccccaacatatttggcaactaccttgccggatttgttagtcaaaacatacgatgcatcaaaagttttaaatgaaatattatgatcatttgatgcactaggagttttctttctaggcaacttagcatgggttggttgcctagagctagatgtctcacccttatacatgaaagcatgattagggccagagtgagacttcctagaatgaattctcctaattttgctctcgggataaccggcagggtataaaatgtaaccctcgttatcctgaggcatgggagccttgcccttaacaaagttggacaatcttttaggaggggccctaattttgacattgtctcccctttggaaaccaatgccatccttgatgcctgggtgtctcccattataaagcatgctacgagcaaatttaaatttctcattttctaagttgtgctcggcaattttagcatctagttttgctatatgatcattttgttgtttaattaaagccatatgatcatgaatagcattaatatcaacatctctacatctagtacaaatagatacatgctcaacaatagatgtagagggtttgcaagaattaagttcaacaatcttagcatgaagaatatcatttttatctctaagattggaaatggtagcattgcaaacatctagttctttagccttagcaattaaattttcattttctactctaaggctagcaagagaaatgtttatttcttcaatcctagcaagcaaatcatcattattatctctaggattgggaattgaaacattacaaacatgtgaatcaaccttagcatttaaactagcattttcatgtctaaggttgtcaatcatctcatggcaagtgcttagctcactagatagtttttgacatttttctacttctagagcgtaagcatttttaaccttaacatgtttcttgttttctttaattagacagtcctcttgggaatccaaaaggtcatccttttcatgaatagcactaattaattcatttaatttttctttttgttccatgttaagattggcaaaaagggtacgcaagttatcctcctcatcactagcattttcatcactagaggtttcatatttagtggaggatcttgattttaccttcttccttttgccgtcctttgccatgaggcacttgtggccgacgtttgggaagagaagtcccttggtgacggcgatgttggcggcgtcctcgtcgtcggaggagtcgctagagctttcgtcggagtcccactcccgacaaacatgggcatcgccgcccttatttttgtagtatctcttcttctcctttcttctccctttcttgtcgtcgcccctgtcactgtcacttgataatggacatttagcaatgaagtgaccgggcttaccacacttgtagcaaactttcttggagcgggacttgtagtctttccctctcctttgcttgaggatttggcggaagctcttgatgacgagcgccatttcctcattatcaagcttggaggcgtctattggttgtcgacttggggtagactcctccttcttttcttccgtcgccttgaatgcgacgggttgagcttcggatgttgatggatcatcaagctcgttgatcttcctcgagccttcgatcatgcactcaaaacttacaaaatgcccaattacttcctcgggggtcattttagtatatctaggattaccacgaattaattgaacttgagtagggttaaggaaaataagagatcttagaataaccttaaccacttcatggtcatcccactttacgctcccgaggttgcgcacttggttcaccaaggtcttgagccggttgtacatgtgttgtggctcctcccctttgtgaagccagaaccgaccgagctccccctcgatcgtttcccgcttggtgatcttggtgagctcgtctccctcgtgcgccgttttgagcacatcccaaacctccttggcgctcttcaacccttgaactttgttatactcctctctacttaaagaggcgaggagtattgtcgttgcttgagagttgaagtgctcgatttgggccacctcatcctcgtcatagtctttatcccctaccgacggtacctgtgcaccaaactcaacaacatcccatatacttttgtggagtgaggttagatgaaatcgcattaaatcactccacctagcataatcttcaccatcaaaagttggtggtttgcctaatgggacggaaagtagaggtgcatgtttagaaatgcgagaatagtgtaggggggtcttactaaacttcttacgctcttggcgtttagaagttacggagggcgcatcggagtcggaggtcgatgttgatgaagtgtcggtctcgtagtagaccactttcctcatcctcttttgcttgtccccacttcgatgcgacttgtgggaagaagatttttccttcttctctttgtggtgagaagaagatttcttctccttccctttgttggaggagctcttcttcttctccctcctcttggtgcgggactcttccgatgaagtgctcccgtggcttgtagtgggcttttcgccggtctccatctccttcttggcgtgatctcccgacatcacttcgagcggttaggctctaatgaagcaccgtgctttgataccaattgaaagtcgcctagaggggggggtgaatagggcgaaactgaaatttacaaatataaacacaactacaagccgggttagcgttagtaataaagaaacgagtccgcgagagagggcgcaaaacaaatcgcaagcaaatgaagagtgtgacacgcggatttgttttaccgaggttcggttcttgcaaacctactccccgttgaggaggccacaaaggccgggtctctttcaacccttccctctctcaaacggtccctcgaaccgagtgagcttctcttctcaaatcaaagccgggaacaaaacttccccgcaagggccaccacacacttggtgcctcttgccttgattacaatggaactttgatcacaagaacaagtgagaaagaaaagaagcaatccaagcgcaagagctcaaaagaacacggcaaatctctctcgctaatcactaaagccttgagtggaattggagaggatttgatctctttggtgtgtctagaattgaatgcctagctcttgtaagtggttgagaagtggaaaacttggatgcaatgaatggtggggtggttggggtatttatagccccaaccaccaaaagtggccgttgggaggctgtctgctcgatggcgcaccggacagtccggtgcacaccggacatgtccggtgcccctgccacgtcatcactgccgttggattctgaccgttggagcttctgacttgtgggcccgcctgggtgtccggtgcacaccggacaggtactgtttgctgtccggtgtgccagtatgggtgcgcctgacttctgcgcgcgcatttaatgcgccgcaggtagccgttggtgccgactagccgttgcttcggagttgcaccggacagtccggtgcacaccggacatgtccggtgaattatagcggactagccgttggcttttcccgaagctgccgagttcctgaggccgctcctccttagcgcaccggacactgtccggtgtacaccggacagtccggtgaattatagcgcgagtgcctctggaaatttccgaaggtggcgagttccagttggagtcctctggtgcaccggacactgtccggtggcgcaccggacactgtccggtgtacaccggacagtccggtgcttccagaccagagggccttcggttacctctttgctcctttgttgaatccaaaacttggtctttttattggctgagtgtgaaccttttacacctgtataatctatacacttgggcaaactagttagtccaattgtttgtgttgtacaattcaaccaccaaaattaattagggactaggtgtaagcctaattccctttcagtgaacatggaaccaataagccccacgatcaatctgaaaaagcagagaagttgtgaattctgcttttctttacaataaaatggtatgtgatatttccttaattgacttcttgtgctctcaagaaacttatggtgaagaaagaggtaactgaattactattaaattttcttgggtaatgaaagcaatcagctaattgatctgtttagtcccattttttaataggtatgtttgtatatgccttctatgttgattgtatgcttaaccctctttctttccatcccttgtgaccaggaatctctcgacaacattaacctattctcgatcattacagtcatgtcattcttcctgttggcccagtaaccttacttacagaaggtgttaaagttagtccagcagtgttgcagtctgctgtgagcatcctgctgcttatttattcatgataacttacagactagcttgagcataattctatatttatgaatattattatttcttgtgcagggtttgaacttgaaacaggtatacacaaggtcatt

SEQ ID NO: 780 - DNA, 2129 bp, Zea mays
  Intron number 2 from transcript GRMZM2G422317_T01 (locus G RMZM2G422317) derived from phytozome v7.0 (chr-ID 1; pos 2 86845831 to 286847959 reverse strand)
tacattgcagagtcagcttgaacgtgcctacaagtgtaaacttgacatacgttagcaaactgacagttaaaatcagaaagcagccagtttgttctgctgccaataaaagacactgatgaaccatgtctactgttacagcacactactacaaactacattatgattgatattcactgatatcatagagaggtcccaaataagtgattgaactaagctagccgattgtggcattaacaaaccaaaatcgaagtacatgtacaatgaatagaatatgctgaaagatgtagtaaaaaaacaacaatctgaatcacataagagaaaaactgagttttagtccttcaggcaacagatggttgatattttttctgtcaacagatgttttttcagtaaccatacacttccaatggggaagggtcccatgctctcctgaatcacacaggtccttctattttcctgacaaatgatagttgtgtatttaactatttatcaataacaaatgctttctctggcttctatactgatggtgcttgcattgtgatatcatataattctaatgagttgaatccaacaaataaaggttaacacttccatgccaatacatactgatgtggaacatcctgctacagtgttactgaatattgaagcaatggctcatgattattgactagctagtaatgatttacaataggcacagggctgcagggtgtaggtcgtgctcatttagctattgtggaagtcaatatctcagagattcaatttacaatcccaagttctaagatgcttgctctgttattgaataatggaggacaagcgtacatagtcccaagtgctatgatgcctgctcttttattggctctataatgcttggccaaaatgtaccaatatgcttggctaaattatgaaattaagtggagctcagtgacttaattaaggacagagatgaacagatatgcttggctaaaatgcacatacccagaattgactaaataatatgtcaaacaaacatgtttccctttggtagcttctgacaatcgttagcatctaaagaacaaaaaataaaggcatcacagctttacttattcggtaagacctttctctttcttaatataaattatacgcagctctgctgcgtgtttcgagaaaaaaaaacttattcggtaaacaatataaaagggatgacacaactgcaaggctcctatatcaggaaaacatgcaatgatgcaaataaatgcaaggttcctaagtaggcagcttgttcctaagctcgtaggggtaaatattcatagttcgtatccattgatttgcatcttcacttcgaggttccaaatcaaacgagaaatatggcgcctattgtaaacaattattgaagaccatgttgatgtcaaaaacaacaagacaatttacaattccaacttcccaatgctatgatgtttgccttttattagctgtataagaaagataataaaagctagatgtagtagtatgcttggcaaaacacacatattcagagtttaactattaatatctttcatgtcaatcagacatgccttccctttggtaacttgtgacaaccgttagcattaataaagaacaaaaaaggcattacagaccaggctctttttttttggaaaacggtgcataaggaacgaaacaactggaagataccttcatcatgaaagcatgcaagtgaagcacggattctatgcaggcagcttgttcttaagctcgtagaggttaatatttgcagttcgttaacatttgtttgcatatatgcttcgagatgcaaatcagacgagaaatttgggacctatcgtgcacaactatagaacagtcggcatataaggtagaattcagtatttcagtcaaccaatcatcaactaacgacattggcagtacccaaaaaatgcagacgccagctattgaacaattacagatcgagccaaactaaatcggatgggtctcacctccatcccacggcgtgtcatccggcctgcagaatcgcaacaaacaccaagagaaaaagcacagtcagcattaaaacccaccaaaagtatcgcggcctcacgcctcactagatccttaggctagctaacctaacatcacagaaataggcgggctgatacccgaat

SEQ ID NO: 781 - DNA, 33061 bp, Zea mays
  Intron number 1 from transcript GRMZM5G827042_T01 (locus G RMZM5G827042) derived from phytozome v7.0 (chr-ID 9; pos 1 10403093 to 110436153 reverse strand)
cctctcaacgtgttgtcaggtccagtggtgttcaggtaaccactgaaaatctacaccttctttcactgcaactctaatgttcaacatctattgcatctcttttcattatagctctatggactacatgatttatggtaaaccataggttcaaatggagaacacctagagaacaaatttgcagctgaaattacttataacgagttttactccatactcatctattgaaagggaaatagggtcaaaccttttcctaaatgattttggtggttgaattgcccaacacaaattgttggactaactagtttgaaaaagaatttccaaaacatttgcaaaacaaaacaagtggtgcaaacatggtccaaaatgttaaaagaaataaagcaatccatgcatatcctatgaatgtataaattggtttaattccaagtaacctttgcacttaccttatgcaaactagttcaattctgcacttatatatttgctttggtttgtgttggcatcaatcaccaaaaagggagagattgaaagggaaaatagggtcaaaccttttcctaaatgattttggtggttgaattgcccaacacaaattattggactaactagtttgctctagattatatgttctacaggtgctaaaggtccatctacaactattctaagtcgactgtccggaataccatagattattgcggacatgagaagctttttggaaaaacagactaagcgcggaccgtccgggcctttgcagtggaccgtccgcgacaccaggatgaccctcggacagaaccaatgcaaaaatccaagtctacactacggaccgtccggaggaaatgcaagcaccgtccgagaccacgcgcagaccgtccggcctcaggcgcggaccgtccggtaggtgaggaaccaaaaaacccgaaggtgacgggttcggtaaaatgaattatagcgtcctcgcggaccgtccggggtgcacgaccgaaccgtccacgactgcctttatctgacatcttacgacgcattaaatgcaaaataaccgttgatatagccgttactgctgaccgttgcgttttcagccattgatgtgcaggggcggaccgtccggaccaagggcgcggaccgtccgcggttggtagaattggagcaacgactaggaagtggttggtggctataaatacaaccccaaccacctccattcaacacacccaagcattccaatcctctacattcaatacaagagctagccatccattcaaagacacaatcaaagcttcaaatctctccaagttccacaattaagacaagtgacctttagtgattagtgacttgagagagagagagagtgatccatgtgttatttgtcgctcttgtcgcttggtgtttgcaatcgtgctttcttctcttcccattcttattctcaagtgacttgtaatcaaagcaagagacaccaagtgtgtggtggtccttgtgaggggtctaagtgacccgttgattaaggagaaagctcacttggcctaagtgactgtttgagagagggaaagggttgaaagagacccgctttgtgaccacctcaacggggagtagttttgcaagaaccgaacctcggtaaaacaaatcaccgtatcacacttctcatttgcttatgatttgtttttgccctctctttcggactcgactttatttctaacgctaaccccggcttgtagttgtgcttaaactttataaatttcagatttgcctattcacccccccctctaggcgactttaaattggtatcagagcccgatacttcattagagcctaaccgctcgaagtgatgtcgagagatcaagccaggaaggagatggtgaccggcgagaagcccgctacaagccacgggaaggctccatcgggagagtctggcaacaaaatgaagggatccccttcacacaacaagtcgcatcgtagcggcgagaagaaaaagaaaatgaagaaggtggtctactacgagaccaattcttcatcaccttctacatccggctctgacgcgccgtccatcacttctaagcgccatgagcgcaagaagtttagtaagatccccctacgctaccctcgcatttctaaacacactcctttactttccgtcccactaggcaaaccaccggtttttgacagtgaagattattgtatgtggagtgataaaatgaggcaccatctaacctcactccacgctagtatttgggacattgttgagtttggagcacaagaaccatccgtgggggatgaaggctatgactcagacgaggtagcccaaatccggcatttcaactcccaagccactactatactcctcgcctctctaagtcgaaaggagtataataaggtgcaagggttgaagagtgccaaagaaatttgggacgtgctcacgaccgcgcacgaaggagatgaggtgaccaagatcaccaagcgggaaacgatcgagggggagctcggtcgatttatgctcaaccaaggagaggagccacaagccatgtacaaatggctcaagaccttggtgaaccaagtgcgcaacctcgggagcacaaaatgggatgaccatgaaatggtcaaggttattcttagatcactcgtttttcttaaacctactcaagttcaattaattcgtggtcatcctagatataaactaatgtctcccgaggaagtgataggaaagtttgtgagctttgagttgatgatcaaaggctccaaacaaatcatcgagcgaggcgccacctccacacccgaggtgcaacccgtcacattcaaagcgacggaggagaagaaagaagagtctacgtcaagtaggctccccatcgacgcctccaagctcgacaatgaggagagatggctttaatcatcaaaagctttcgccaaatcctcaagcaaaggaagaagagattctacaagtcccgtttcaagaaagtttgctacaagtgtggtaagcccggtcatttcattgctaaatgtccattatcaagtgatagtgacaggggcgacgacaagaagggaagaatgaaggagaagaagaagtactacaagaagaagggcggcgatgcccatgtttgttgggagtgggactccgatgagagctccaccgactcctcctccgacgaggtcgccgccaacatcgccgtcaacaagggtcttctcttccccaacgtcgaccacaagtgcctcatggcaaaggacggcaaaaagaagaaggtaaaatctagagcttccactaaatatgcaacatctagtgatgaggctagctctagtgatgatgaggatgatttgctcaccctttttgctaacttaaacatgcaacaaaaagaaaaaatgaatgaattgattagtgctattcatgagaaggatgaactcttggatagccaagaggacttccttattaaagaaaataagaagcatgttaaagttaaaaatgcttatgctcaggagatagaaaaatgtgaaaaattaactagtgagctaagcacttgccatgacactatttccaatcttagatttgagaatgataaattcattgctaaggttgagaaattaaatgttagtgatgattctcttgtcaaccttaaaaatgataatgatagtttgattagattgacaagttgaatgaatcactctctagtcttaaaattgagaatgaaaaattaattgttaagcctaaagatttaaatatttgcaatatttctatttccaatcttaagaatgagaatgctattttacatgctaagattgatgaattaaatgtttgcaaaccctctacatctaccattgaacatgttactatttgcactagatgtagagatattaatgttgatgctattcatgatcacctagctttaatgaaacaacaaaatgatcacatagctcaacttagtgctaagattaatgagcatgacttagaaaatgaaaaatttaaatttgctagaagcatgctctatagtgggagacgcccaggcattaaggatggcattggcttccaacagggagacaatgtcaagcttaatgcccctaagaaactgtctaactttgttaagggcaaagctcaatggctcaggataacgagggttacattttatatcctgctggttatcccgagcataagattaggagaattcactctaggaagtctcactctggctctcatcatgcttttatgtataagagtgaggcatctagttctaggcaatccactcatgttaaattgcctaaaaagaaaactcctattgcatcaaatgagcctaatatttcatttaagacttttgatgcatcatatgttttaactaacaaatcaggcaaaatagttgccaaatatgttgggggcaaacacaaggggtcaaagacttgtgtttgggtacccaaggtgcttgtttctaatgtcaaaggtcccaagaccgtttgggtacctaaaaacaaggcctaaatttgttttgtaggtttatgcatctgggggatcaagttggataattgatagcgggtgcacaaaccacatgactggggagaaaaggatgttctcctcctatgagaaaaaccacgatccccaaagagctatcacattcggggatggaaatcaaggtttggtcaaaggacttggtaaaattgctatatcacctgaccattcaatttccaatgttttcttgtagattctctagattataacttgctttcagtttatcaattatgtaaaatgggctacaattgtctttttacggatataggtgttactgtctttagaagaagtgatgattcagtagcatttaagggagtattagagggtcagctatacttagttgattttaataaagctgaactcgatacttgcttaattgctaagactaacatgggttggctctggcaccgccgactagcccatgttgggatgaagaatcttcataagcttctaaagggagagcacattttaggactaacaaatgctcattttgagaaagacaggatttgtagcgcatgtcaagcaggaaagaaagttggtgttcatcatccacacaagaacatcatgacgactgacaggccgcttgagctacttcacatggatctatttggcccgatagcttacataagcatcagcgggagtaagtactgtctagttattgtggatgattattcttgcttcacttgggtattctttttataggaaaaatctcaaacccaagagaccttaaagggattcttgagacgggctcaaaatgagttcggcttaaggatcaaaaagactagaagcgacaatgggacgaagttcaagaactctcaaattgaaggctttcttgaggacgagggcatcaagcatgagttctcttctccctacacacctcaacaaaatggtgtagtggagaggaagaatagaactctacttgacatggcgaggtccatgcttgatgagtacaagacttcggatcagttttcggcggaagtagtcaacaccgcttgctacgccatcaaccgactctaccttcaccgaatcctcaagaagacatcctatgaactcctcaccggtaaaaagcccaatgtttcatattttagagtctttggtagcaaatgctttattcttgttaaaagaggtagaaaatctaaatttgctcctaaggctgtagaagactttttacttggttatgactcaaacacaagggcatatagagtctttaacaagtccactagactagttgaagtttcttgtgacattgtgtttgatgagactaacggctctcaagtagatcaagttgatcttgatgagctagatgatgaagaggcttcatgcgtcacgctaaggaacatgtccattggggatgtgtgtcctaaggaatctgtcggggaccataattaggggtacccccaagactcctaatctcagctggtaacccccatcagcacaaagttgcaaaggcctgatgggtgcgattaagtcaaggctcggtccactcaaggaacacgatctcgcctcgcccgagcccagcctcgagcaaggacagccgacgccggaggattcacttctcgcccgagggccccctcaagcaacggacacacctttggctcgcccgaggcccagtcttcgctgagaagcaaccttggccagatcgccacaccgaccgaccgtatcgcaggagcatttaatgcaaggatggcctgacaccttatcctgacgtgcacccttcagtcgacagagccgaagtgaccgcagtcacttcgtcgctccactgaccggcctgacaagaagacagcgccgcctgcgtcgctccgactgctgtgccactcgatagagtgaggctgacaacagccaagtccggcctcgggcgccataggaagctccgcctcgcccgaccctagggcttggcccccgtctcggcctcggacgacgaactctgcctcgcccgaccccagggctcggactcagcctcggctccggaagacgacgaactccgcctcgcccgaccccagggctcggactcggtctcggctccggaagacgacgaactccgcctcgcccgaccccggggctcggactcagccttggcctcagacgatggtctccgcctcgcccgacccggggctcggactcgacctcgacctcggaagacagactcgacctcaacctcggaggagcctccgcctcgcccaacctagggctcggaccgaccacgtcacagggggccatcattaccctacccctagctagctcaggctacggggaacaagacaggcgtcccatctggctcgccccggtaaacaaataatgatggcgccccgcgtgctccatgacgacggcggctctcagccccttacggaagcaaggagacgtcagcaaagactcgacagccccgacagctgtccttccgcaaggctccagcgctcctccgacggccacgacatcacatgaacagggtgccaaaacctctccggctgccacaacggcatgtacttagagcgctagctcctctctgctagacacgttagcacactgctacatctcctattgtacacctgggccctctccttacgcctataaaaggaagatccagggctctcgtacgagaaggttggccgcgcgagagaacgggacggcgcgtataagcctctcgctccctcccacgcggacgcttgtaaccccctactgcaagcacacctgacctgggcgcaggacaacacgaaggccgcgggtttcccccttttgcccgtctctttctttccccccttcgtgctctgtctcgcgccgacccatctgggctgggacatgcagcgacaatttactcgtcggtccagggaccccccgggatcaaaacgccgacagttggtgcgccaggtaggggcctgctacgtgttgacgaacagcttcccgtcaagctccagatgggtagtctccagcaacctttccagcccgggacggtgctctgtttcgggagtcttgagttcatgtccctcgacggcagctacgacatgatactccttcctccgccgcgcgacagcgacaatggaggccgacaacccgcccgccggcggcagaatcaacgacgtcttccccatgtggcggaagaacaacattcgggtttgtcccgtcgcctcccccaccaacggaggaggaggcagggcaaccaaggccaagcaggaggcagcacctcgtcggctgtcgagcgagtcgacggcgccggcgccccaacgggggacacgtcgggcgtcgaccttgcgtctgagacgaagacgagcaccgtttccccgcaacacgccaactccgagcaaacgaacgacgccagcatgctcgcaagggacttgctgggcgtcaccctcgtacctgagacgacggtgcagtctgcccctgacgcgacttcgtcaccgcccgtcgaccaagaggtaccgaccgattcccatctcgtgccttttggattcagcctcgacccaccaagcgacttcgcttcggtggaagccttcatagaggcatgtccaaaccctccggggtacggtatgcggtcaccctgggaccggctgacagccgtctcgacctacggaccctcgggttccgaggaagatgacgagcccgacttttgttgggatttctccggactcggtaaccccagtgccatgcgggacttcatgcgactactgcctttccgattgttccgacggtagccgcagcttcggcgacgaggactgcggcccaagtcgtgaatgtttccacgtcgatctagggggtcccggcgaaggcaaccatcttggtataccagaaaacggtgatccccctaggcatgcgcctcgcattgacatccttcgggagctagctgtggtcccagtccctgcgaggggttaggactcacagctcgagcaaatccgcgagaggcaggccaggctcgacgagggagcaggaacacttgagtcgttccggtggaacatcgggcaggaatgggcagaccaagctccggccggagaagcgcgtcatctgccccagggcatccagctccgcattgccgacgacgtcagggcaaggccgccaccggcttccagtggggtcggccagaacctggctgcagcagcaatacttctccgcacgaagccggagccatcaaccaccgaggggccacggtccgacgggccgaaagctctgcctcccgaaggcagggatacccctcggagcatcgcgccgcgacttcccgattcatgcgggaagcctcggtccacaccgggcgcacgcgcgacacagcgcctgcggccccgggttgcctcggcaacgagcaccaccaccgcaaccgtcgaacccacatcaacgagagggtgtgccgaggctaccaccccaggtgtgggggatgctacgacagtggggaggatcggagtccctcgcccgaaccacccggttcgcaggctttcagccgggccatacaacaggcgccgttcccgatccggttccgaaccccgactactgtcacaaagtactcgggggagacgaggctggaactgtggctcgcggactaccgactggcctgccagctgggtggaacggacgatgacaacctcatcatccgcaacctccccctgttcctctccgacaccgctcgagcctggctggagcatctgcctctgggggtagatctccaactgggacgacctggtccaagccttcagcggcaacttccagggcacgtacgtgcgccctgggaactcctgggatctccgaagctgccgccagcagccaggagagtctctccgagactacatccggcaattctcgaagcagcgcaccgagctgcccaacatcaccgattcggatgtcatcggtgcgttcctcgctggcaccacctgccgcgacctggtgagcaagctgggtcgcaagacccccaccagggcgagcgagctgatggacattgccaccaagttcgcctctggccaggaggcggttgaggccaccttccggaaggacaagcagccccagggccgccagccagaagatgtccccgaggcgtccacttagcgcggcaccaagaagaaaggcaagaagaagtcgcaagcgaaacgcgacaccgccgacgcggaccttgtcgccgccgctgagtacaagaaccctcggaaacctcctggaggtgccaatctcttcgacaagatgctcaaggagccgtgcacctatcaccaggggcccgtcaagcacaccctcgaggagtgcgtcatgcttcggcgccactttcacaaggccgggccacatgcggaaggtggcagggcccacaacaacgacaagaaggaggatcacaaggcagaggagttccccgaggtccacgactgcttcatgatctacggtgggccaatggtgaatgcatcggctcggcaccgcaaacaagagcgtcgggaggtctgctcggtaaaggtggcgacgccagtctacctagacttgtccgacaagcccatcaccttagaccagggcgaccaccccgaccgcgtgccgagcccggggaaatatccgctcgttgtcgaccccgtcatcagcaacgtcaggctcaccaaggtcctcatggacggaggcagcagcctcaacatcatctacgccgagaccctcgggctcctgcggatcgatctgccctcggtcagggcaggcgcgacgccttttcatgggatcatccccggaaaacgcgtccaacccctcggacaactcgatctgcccgtctgcttcgggactccctccaacttcagaagggaaaccctcacgttcgaggtggtcgggttccgaggaacctaccacgcagtgctgggggaggccatgctatgccaagctcatggtcgtccccaactacacctaccttaagctcaagatgccgggccccgacggggtcatcaccgtcggccccacgtaccgacacgtgtacgaatgcgacatggaatgcgtggagtacgccgaggccctcgccgaatccgaggccctcatcaccgacatggagagcctctccaaggaggcgccagatgtgaagcgccatgccggcaacttcgagccagcagagacggttaagtccgtccctctcgaccccagcaacgacacctccaagcagatacggatcggctccgagcttgaccccaaataggaagcagtgctcgtcgactttctccgcgcgaacgctgaagtctttgcgtggagtccctcggacatgcctagcataccgagggatgtcgccgagcactcgctggatatccgagctggagcccaacccgtggagcagcctctgcgccgattcgacgaagaaaagcgcagagccataggcgaggagatccacaagctgatggctgcagggttcatcaaagaggtattccatcccgaatggcttgccaaccctgtaattgtgagaaagaaagggggaaatggcggatgtgtgtaggctacactggtctaaacaaagcatgtccgaaggttccctaccctctgcctcgcaacgatcaaatcgtggattccactgctgggtgcgaaaccctgtctttccttgatgcctactcagggtatcaccaaatcaggatgaaagagtccgaccagctcgcgacttctttcatcacacctttcgacatgtactgctatgttactatgccgtttggtttgatgaatgcgggcgcgacataccaaaggtgcatgaaccacgtgttcggccaacacattggtcgaacggtcgaggcttacgtcgatgacatcatagtcaagatgaggaaagcctccgacctcctttccgaccttgaaacgacattccggtgtctcaaggcgaaaggcgtaaaactcaatcccgagaagtgcgtcttcggagtcccccgaggcatgctcttggggttcatcgtctccgagcggggcatcgaggccaacccggaaaagatcgcggccatcaccaacatggggcccatcaaagacttgaaaggcgtacagagggtcatgggatgccttgcggctctgagccgtttcatctcgcgcctcggcgaaagaggcctacctttgtaccgcctcttaagaaaggtcgagtgcttcacttggacccccgaggccgaggaagccctcgagaacctgaaggcgctcctcacgaatgcgcccatcttggtgccccccgctgccggagaagccctcttgatctacgtcgccgctaccactcaggtggtcagcgccgcgattgtggttgagagacaagaggaagggcatgcattgcccatccagaggccgatctacttcatcagtgaggtaatgtccgagaccaagatccgctacccacaaatttagaagctgctgtacgcggtgattctgacacggcggaagttgcgacactacttcgagtctcatccggtgactgtggtgtcatccttccccctgagggagatcatccagtgccgagaggcctcgggtaggattgcaaagtgggcggtggaaatcatgggcgagacaatctcgttcgcccctcggaaggcaatcaagtcccaagtcttggtggactttgtggctgaatgggtcgacacccagcttccggcagctctgatccaaccggaactttggaccatgtttttcgacgggtcgctgatgaaaacaggggcaggtgcgggcctgctcttcatctcgcccctcgggaagcacatccgctacgtgctgcgcctccatttcccggcgtccaacaacgtggctgagtacgaggctctggtcaacgggttgcgcatcgccatcgagctaggggtccgacgcctcaacgctcgcggtgactcgtagcttgtcatcgaccaagtcatgaagaactcccattgtcgcgacccgaagatggaagcctactgtgacgaggttcggcgcctggaggacaagttctacgggctcgagctcaaccacatcgctcgacgatacaacgagactgcggacgagctggctaagatagcctcgggacggacaacggttcccccgggcgtcttctcccgagacctacatcaaccctcagtcaagaccgacgacacgcccgagcccgagaaggcctcgacccagcccgaggcaccctcggcccccgagggtgaggcactgcgcgtcgaggaagagcagaatggggtcccgcctaatcgagattggcagaccccatacctgcaatatctccaccgaggagagctgcccctcgaccgagccgaagctcggcaactggcgcggcgcgccaagtcgttcttcttactgagggacgggaaggagctctaccaccgcagcccctcgggcatcctccagcgatgcatatccatcgccgaaggccaggagctcttacaagaaatacactcgggggcttgcggtcaccacacagcgcctcgagcccttgttggaaatgctttccgacaaggtttctactggccgaccgcggtggccgacgccactagaattgtccgcacctgccaagggtgtcaattctatgcaaggcagacccacctacccgctcaggctctgcagacaatacccatcacctggtcgtttgctgtgtggggtctggacctcgtcggtcccttgcggaaggcacccgggggctacacgcacctgctggtcgccatcgacaaattctccaagtggatcgaagtccgacccctaaacagcatcaggtccgaacaggcggtggcgttcttcaccaacatcatccatcgctttggggtcccgaactccatcatcaccgacaacggcacccagttcaccgacagaaagttcctggacttgcgaggatcaccacatccgggtggactgggccgccgtggctcaccccatgacgaatgggcaagtagagcgtgccaacggcatgattctgcaagcactcaagccgaggatctacaacgacctcaacaagttcggcaagcgatggatgaaggagctcccctcggtggtctggagtctgaggacaacgccgagtcgggccacgggcttcacaccgttctttctagtcaatggggccgaggccatcttgcccacagacttagaatacggttccccgagggcgagggcctacgacgaccaaagcaatcgaacaaaccgagaagactcactggaccagctggaagaggctcgggacatggccttactacactcggcacggtatcagcagtccctgcgacgctaccacgcccgaggggttcagtcccgaaacctccaggtgggcaacttggtgcttcggctgcgacaagacacccgaggacggcacaagctcacgcctccctgggaagggccgttcgtcattgccaaggttctgaagcccgggacatacaagctggccaacagtcaaggcgaggtctagagcaacgcttggaacatccgacagctacgtcgcttctacccttaagatgctttcaagtcgttcgtacacctcgttcacatacaaagtctaaccatcaaggaagggtcagccttgccttggcaaagcccgaccctccctcgggggctagaaggggggaacccccctctgcgtcaaaattttcctcggaaaaggtctttctgtcagaacgtctttcgtgcttttcgactacttcgaaagtgggatcctgaaaacgacggagtacacgtaagcagccaaggccgaccgagccgagggactcctacgcctccgggatacggatacctcactcatcaccttctgcgataagtaactcacgctcggataagcgattccgctgaccgaacaagtcttaatgctcagaaatctttctgcccaaacgatttttcgggccttctcgactatatcgataatagaatcctacggacgagtaagagtacacgtaagcggcaaggccgactgagccgagggactcctacgcctccgggatacggatacctcactcatcaccttccgtgaaaagtaactctcgctcggacaaacaattctgttaccgacaaataagtccagatactcgagacaagaggaaaagaaacgcagctttacaacacgatgacagtatgtttgggcctcggcggccgcagaaaacatacgcacactacaagatgaaccgatcctgcaggctcagacatcgacggagtgggagcagcagcaccctcggcgtcaactccaccttcggcgaagtccgaccgagcctcggacggcaacacggtcggagggtctccactccgaaggacgacgtcagcaccacgcccgggccatcgccgccggggtctcctccaggaatccggcccgagcagacggctcggccggccgccccaaagcctcagccagctgccctccgaggacaccagcccggctcgtagcctcggcaactcgactccggcgtcggtcccgccagtggacggccctgccaggctccggcctacgaagtcttcttttcgagccaactctgcctctgtccatgctaacaccgctgcctccggcttcggctcatcgaagagcggccgagggttcctttaactaagcaagagaagcctcgggcggcaaggccgaccgagccgagggactcctacgcctctgggatacggatacctcactcgtcaccttcacacgaggcaactcacgcttggtgaagcggttcagttagccaacaggcgagtcctagtgctcgaaatgaggaaaaaacacggcttcatgccaaaaatacatacatgttcaggccccgacaaccacaatgaacaagacaccagcactcaaggtgccattacaaacggaacttcggttccacccccgcacgtacgaacaaccccccacgctggagggcctgcggggcaacgaaaccccaggcggctcaccgacgcccgaacagcagcagcgacaacgacctctgctccgagcggccgaacagcagcagcgatgacctcagggcggatgctgctgccataaggccctcgcccatgtccccactcgaggggcgaggacaagaagaaggccgtagagttggaggtcagtccgcaggtggcaccgactatctcgtcggcggagaaacctcttccggctgcctcggcagaaggtggcaccggaagcggcgccgaagccgctcgggccggagagccagacacgcggcagctgccagcgccacgaacggcgaacgcccttccccccgatcactgagggaaggagcgggccgctgcccgcgcggagacaggccccaactcggcgcactcccctccccaacactgatgatgaacatccttgaagctgagggaggggtagaggccgcagcccggcttgcttctccccaccctggaactggtggtcaccgtcttgggtgaccgacggcgaggggatgcggccgggctgcctgatgaaaatccttgaagccgaacgatggctgaaaggtaccaacttctgcgaagttgcgttccaccaacgacgacaaggcggaagaaccgtgggcgcccctcatccgagggctcggaaggtggaaagacgcgatgcatgaggggagcgcgaagacatggttgcctttcatgggggtcaccctccttttaaaggcaactctccccacttgcgtcctcagccgtcacgggctgagtcttctccaacacgctccaaggtcctccccctacgacatgggggctgggtcccacgcgtcatgcaagctggcccagggcagaagaagccaaaccaccacgcgcggtgcgcgtaactgcccagcggttacgagcattcctccactttcgcccagaccagcgggtgaaagggcggaccaccatgcaggcggcatgcaaccgcaccaagggggcgcaccctttcgacttcgacgcgtccagcatggaggcccaggaccacacgtcatgtaaccggcgtgccggttactacgtacgagaaactgcaccgccacttgcgccagtaccgtgcctcctcgactacggaaccagtgccgcgactcgaggcgaccctgcgcacgacccaacagcgccaaccgagcacatcggtcacgggtcagtcagccgcgggagaaggcgtgacggttgatacggccagaaatgggccggcagtaatggcggtggcaggcgagcggaagcagcggtcaagtcgtcagcgagctcatgtcccctcctgggacagcgagagaaccctctcccacggcgtgaagacgatgcgcccgtgttccgttcctcgaacggctcgcgcacgcacaacggccgcgccgcgagccactcgtcccatcgcattaactctgcggcaggacaggcggcaccttcggcaggcgaagcaggcgacgcttcacctccgccataatgaccgcgtcaaaaaaaggtgcaccacgtcattcgatttcgtatccttttccacttcctctttctctctcttgcctcagggatcgggaaaggggatactccgaaagggatccttctccgcgaaggaagcgggccccgagcccccctactgatagaggttcgaaggctagcccctcggaagggttcaacagccgcctcagagcactcgggctccgcgcccactactggtcagaggttcgaaggccggcccctcggaagggttcaacggccgcctcaggccactcgggctccgcgcccactactgatcaggggttcgtaggctggcccctgaagggttcgacaaccgcctcagacgcagagcgagggatgaccctgggtacgttcgatacataaccaaggctcgggctacgctcccgaggtaccctaggacatttctgagaccaacaggaacgatcttgtaacgaaatcccaccagagggaggcatcgagccctcggatcccgtcaaaaggggaccgagtccggcaaatcacccgcaggtacttttggagcgcgcctccgggccactagccgacccctaacgaatggggcacaggcgtccactcggattacccgttagcaactcactggagacaccatgttcggcgccctccgagggcaacatggcgctttcccccctcctccttgtggaaaggcgacgcaggggcgtatgtaaaaaagtcgagtctgtccttgaccgtcctctcgctctgtgcggaggctcgggggctgctctcgcaaacctggctctggccaaaccgttgacagcgtcaacataccaacccgagaacttgggactcgactatgcacccgggctacggcaagttcgcatgagggaacaaccagactggccgaagcatcacgaaacgcgctaagacctcgaaggagtcaaatcaatcctccgaggccttgggggctacaccaggcgggtgcgctcgcgcgcacccatcggaacgaaacgtaaccgagaaaggtcggtccccttgcaaaaaagtgtgacaaaagcctccaagcgagtatcaacactcccttcgaggctcgggggctactgtcggggaccataattaggggtacccccaagactcctaatctcagctggtaacccccatcagcacaaagctgcaaaggcctgatgggtgcgattaagtcaaggctcggtccactcaagggacacgatctcgcctcgcccgagcccagcctcgagcaagggcagccgaccccggaggattcacttctcgcccgagggccccctcaagcaacggacacaccttcggctcgcccgaggcccagtcttcgctgagaagcaaccttggccagatcgccacaacgaccgatcgtatcgcaggagcatttaatgcaaggatggcctgacaccttatcctgacgcgcgcccttcaatcgatagagccgaagtgaccgcagtcacttcgccgctccactgaccggcctgacaagaagacagcgccgcctgcgtcgctccgactgctgtgccactcgatagagtgaggctgacagcagccaagtccggcctcgggcgccataggaagctccgcctcgcccgaccctagggcttggcccccgtctcggcctcgaacgacaaactccgcctcgcccgacctccgggctcggactcagcctcggctccggaagacgacgaactccgcctcgcccgaccccagggctcggacttggcctcggctccggaagacgacgaactccgcctcgcccaaccctggggctcggactcagccttgccctcagacgatggtctccgcctcgcctgacccggggctcggactcgacctcgacctcggaagacagactcgacctcaacctcggaggagcctccgcctcgcccaacctagggctcggaccgaccacgtcacagggggggccatcattaccctacccctagctagctcaggctaaggggaacaagactggcgtcccatctggctcgccccggtaaacaaataatgatggcgcctcgcgtgctccatgacgacggtggctctcagccccttacggaagcaaggagacatcagcaaagactcgacagcccctacagctgtccttccgcaaggctccagcgctcctccgacggccacgacatcacatgaacagggtgccaaaacctctccggctgccacgacggcatgtacttagggcgctagctcctctctgctagacacgttagtgtaggattacggggaggctacgctagcgcaaaacaaaattttcaaccccataataccaagaactactacggttataggtcatggaattaccactagacgcgtagagcagcggaagacgtctcgatgtagacaaacgcgtcgagcagtgccgtgcagtcgttggcgtccttcatgtcctcgcacggttcatcctagtgctccagatgcagcacctccgaggtatccacacgtacagggaggaagcgccgcgtaccgaactgctaggttcacgacggcggcttggcgagggcgagaggtgagcggcggctgctcgcttgctggtggcaaattaggttttggcctaaccgcgcccccgcccctcattatataggcgttatggtgggcttttgacaccgaggcccatcattaaccctaaagcccagtctaatttcggatctaatccgagttaggcttccttccccttaagtgtgtgaccctataggttcacgtacaaatagacatggcccgagtactcttacttggcccaataattgacagcggcctctagcaagacatgtcaactcctatgcgcacgtaaagatcatatcagacaaaccattgcaacattacgtacatgctgttccctttgtctcacgatatttagtctggctctaagctgacctctctttctcgatactgtgaattggaatcctttcaatggttaactcttaaccctagcacggccatgcatttcttgatccaatcactcgaggggcctagagatatctctctcacaaagagagggacaaattccatcttgactgaccatgcctcacagcatgcttcctgacaaacccaaaaccacctttataactacccagtttcggaatagcgtttgatagtccctaagtaagtcaattcacatcttgaaaacatgcgacaatctcaggtctaaggatacaatattcatgttgcaaaaagagaactatattacaatatctcacgttgggtcggtccagcctcatgtcatacatgcgcccacattattagtttaacatctccatgttcatgacttgtgaaatgtagtcatcaactaatacatatgctagtcattgactctgactagggacatcatttagaataaccatataagtaaagaatctcgcaaacaattcacataattgctaatcaatacaaggtgccttccatggatattcaattaagcaatatatatatatatcatggatacaaagaaatatgctcatctctatgattatctctagggcatatttctaacagtctcccacttgcactagagttaatctagaagatatctaatacccatagatctcatgtgtgcctcatgcttaggttgtggaagaggttttgtcaaaggaccagcaacattcaaatccgtatgtattttgcatatctttatctcaccccgcctaatgaattcccgtatgaggtgaaacttccgcagtacgtgtttgtttttctggtggttccttggctccttagcttgcgcaatagccccattgttgtcacagtagaggttcaatggactagaagcattaggaaacacaccaagctcgatgaggaacttccttatccaaacaccttccttcgcagattcagaagctgcaatgtactcggcttctgttgtagaatcagtcacagtctcctgtttgaaactcttccaactaacaacaccaccatttattgtgaacacaaaacctgattgcgattttaactcgtctgggtcagtttggaagctagcatcggtgtaaccagttacaacgagctcctccttacccccatataccaggaacatatctttagtccttcttaagtacttaagaatgccttttaccgctgtccagtgatcctcacctggatcagcctggtacctactcgtagcacttatagcgtatgaaacatctgggcgtgtacttatcatggcatacatgattgatccaattgctgaggcgtatggtaccttactcatgcgctcccgctcattagccgccgcaggacattgcatctggctaaggtgtttaccatgtgacataggtatgaaccctttcttggactgttccatgttgaaccgtttcaaaaccttgtcaatgtacgtatcttgacttaatcctataagcctcttcgacctatctctatagatccttatgcccaaaatatatgctgcttcccctaagtccttcatagaaaaactctttttcagtgaagccttgacggactccagcataggaatgtcattcccaatcaataatatgtcatccacatacaagatcagaaatacaaacagctctcccactttccttcttgtaaacacaagcttcttcttcattctgatgaaaaccaagccctttgatcacttcatcaaaacgaatgttccaactccgagatgcttgcttcaacccataaatggatttctgaagtttgcatatctttccagcattgatcggatcgacaaaaccctcgggctgtatcatatacacgtcctcatctaggtttccattaaggaaagctgttttgacatccatctgccaaatctcataatcgaaatatgcggcaatagctagaatgatccgaatagatttaagcatcgctactggcgagaatgtctcgtcatagtcaactccttgaacttgtcgaaaaccctttgcaacaagtcgagccttatagatgtgaacatttccatccatgtctttcttcttcttatagatccatttgcattctatgggtctaacaccatcaggcgggtcaaccaagttccaaacttgattttctcccatggaatctatctcagatctcatggcgacatgccatttctcggaatctgggtccatcatcgcttctgaatatgttgcaggttcgtcgttgtctaacaacaacacttccccattgcccaacaatagcacttctcctcgtgcctcgtgaagccttgctgaccttcgtggttgtggtggtgattctcttgccatagacgtctcaacttgttctgctacattagcatcacttgttgaatcttgtcccactggctcatcctgaacttcttcaagatacaccttttgtttacttttctctcttttgagaaactctttctctaagaacacaccgttccgggcgacaaacactttgccctctgaccggtggtaaaagtaatatcctaaagtttcctttggatatcccacgaacatgcacttgtccgattttggagtgagtttatctgactgaagtcgcttgacgtaaacctcacaaccccaaatcttcagaaaagacaaactgggagtcttcccagtccacatctcatatggtgtcttaactacggacttagacgataccctatttagtgtgaaagctgctatttctagagcgtatccccaaaacgacaaaggtaggtccgactggctcatcattgatcgaaccatatccaataaagtccgattacgtcgctcagacacgccattcctctgaggcgttccaggcggcgtaagctgtggaacaattccacaactcttttgatgattgctaaactcatgactcaaatattcacctccacgatctgatcgcagtgctttaattttcttgccatgctgattttctacttcattctgaaactctttgaacttttctaaggattcagacttgtgtttcattaagtagacatacccatatctactaaaatcatcagtgaaggttatgaagtattggaatcctcccctagctgtcgtactcattggtccgcacacatcagtatgtatgagttccaataaatctaatgtcctctccggtaaacccgtgaaaggcgccttggtcatcttaccaagtaggcaagcttcacatgtctcgtatgattcaaaatcaaacgaagttaaaagcccatcagaatgaagcttcttcatgcgattctcacttatatgacccaaacgacagtgccacatgtaggtaggacttaaatcattaggctgaggccttttagcactaatattacagataggtgcatcatcaagatttaaaatgaataacccattcataatggatgcaaaagccacaaacatgccattcttagagatcacacaaccattgttttcactcgcaaatgaataaccatccttcatcaaacatgaaggagacataatgtttcgactcatactaggaactagataacaattatttaactccaaaataaatcctgatgggaggtggagttgcatcgtcccgacggtcaacgcagcaactcttgcattattgcctacctggaaatcaacttctcctcttttcacgcttctacttcttatcattccctgcatcgaattgcaaatatgggcaaccgatccggtatcaaatacccaagaattaatataagaatcagtaagaaaaatttctgtaatgtgaatagcaagtgtacctgctgcggctgtacccttaccgccgcgatccttaatagaggccaagtactgcttgcaattccttttccagtgaccaagttctttgcaataaaagcactctgcatctgcagctggtccagccttgggcttttgatttggcttggatactgtatcctttgccttgcccttcttcttttgagatttacccttcttcttaaagttgggtttgttttggaccgccatcacatggctgctgctgccagcgcttttctttatgtccccctctgctgttttcagcatgccacatagttcattgaggcccctctctgccccatgcatatggtagttcgtgatgaagtttccatagctgggcggaagagatgccaaaatgaagtcagtggccaactcttggcttattgggaagcctagcttctccaacctctgactgtaaccaaccattttgattacgtgtggcccaactgctgcgccttctgctagcttgcattccagaaaggctttggacacattgaacctttcagtcctagcctgagtttggaacatatccttgagcgccacgatcatatcgtgcacctcatggtttgtctcaaactgcatctgtagctcaggctccatgcaggcaagcattaggcaactcacttcaagattagcatccattgctttcttgtaagcggttttagctgcagcagttgcattttcaccaggatcctctggcagtggggtgtctagaacgtcttcctttttttcagccctgagaacaattctcaggttacgaatccaatccgtatagtttgttccatttaacttatccttttcaagaattgatcgcaaagtaaatgttggtgtgctaggtgccatttatctacaacaaaataatgcaaaatactaagacaaaaatatccatgacagagtaaatcatattaaacatttaatagtctactcccactaaaatcaatatccctcgattgatacttagtgattcagaacccacaactaacaagtctactagtgagctttagcatcaccgctagaagacaaggtagatcggtaagcaactccttgctaatcatatcatatatatgacttctgttgttgggtgacatctctatgtctcggctcccaaccttatgccccaaagtccttaaccattaagctgactttgtttaagttaaccaaccctttctgcagttcgtatccgatacaaacctatctagtcaaggaaaactggtggcaccctaatttcatagacccaccaccaattgtacaagacttatgatagtgcaaggtttggagaggcatttaagtttaaacatttatgagggatcctcctacttatatcatcgcacgcaaggacatatatgcaatatgaacaagtagaacattaagaatggcattcacacaacagttgtgattcggtatggcttgctgtcacatggtgatccccatctccaataatctgtccatcacgatgatctccatctccatgatataggtatgccatcctttaggtgatgagtccttcaagacctatctaatgtatgctggtaaacaaattacatatacgctttggatcatcacatgttgacacgcaggtcattacattaaaattggacaatacatttggctccagccgtattgccctggtcacgacacgcaggtcatgaataattcattaatatgcatcatatacacacaatagccatactgatcacaagatgtcctgcaaaaacaggttagacaaacacgtttctatatgttcgccactacagcagatagccacggcggtcccgcgggtctcagggcagcgccctaaaaacctcacaggattccatgcatcgtatgtatggaaattccactggaaatctcatgcggttgatcaaatcaacccaaatccgagactttcgacccgaagaagattacactcatgacgtcgatctgttacgtcaatctgctggttgtgtacgcagttagccccgatggtgattccagccggtaggggcaagtcgcgcacataacagagaaggacgaactaatcttttcagtcatatccgatgtaatctacttcaaccctttataaccaattgatctaatcaaaccgtgcatcaagtagatccatctcatgaacctagccagacctaaaactacgcagaacctgctttgataccagtgtaggattacggggaggctatgctagcgcaaaacaaaattttcaaccccataataccaagaactactgcggttataggtcatggaattaccactagacgcgcaaagcagcggaagacgtctcgatgtagacgaacgcgtcgagcagtaccgtgcagtcgtcggcgtccttcacgtcctcgcacggttcgtcctagtgctccagatgcagcacctccgaggtatccacacgtacagggaggaagcgccgcgtaccaaactgctaggttcgcgacggcggcttggcgagggcgagaggtgagcggcggctgctcgtttgctggtggcaaattaggttttggcctaaccgtgcccccgcccctcattatataggcgttatggtgggcttctgacaccgaggcccatcattaaccctaaagctcagtctaatttcggatctaatccgagttaggcttccttccccttaagtgtgtgaccctataggttcacgtacaaatagacatggcccgagtactcttacttggcctaataattgatagcggcctctagcaagacatgtcaactcctatgcgcacgtaaagatcatatcagacgaaccattgcaacattacgtacatgctgttccctttgtctcacgatatttggtctggctctaagctgacctctctttctcgatactgtgaattggaatcctttcaatggttaactcttaaccttagcacggccatgcatttcttgatccaatcactcgaggggcccagagatatctctctcacaaagagagggacaaattccatcttgactgaccatgcctcacagcatgcttcctgacaaacccaaaaccacctttataactacccagttacggaatagcgtttgatagtccctaagtaagtcaattcacatcttgaaaacatgcgacaatctcaggtctaaggatacaatattcatgttgcaaaaagagaactatattacaatatctcacgttgggtcggtccagcctcatgtcatacatgcgcccacattattagtttaacatctccatgttcatgacttgtgaaatgtagtcatcaactaatacatatgctagtcatcgactctgactagggacatcatttagaataaccatataagtaaagaatctcacaaacaattcacataattgctaatcaatacaaggtgccttccatggatattcaattaagcaatatatatatcatggatacaaagaaatatgctcatctctatgattatctctagggcatatttctaacagttagcacactgctacatctcctattgtacacctgggccctctccttacgacaataaaaggaaggtccagggctctcgtacgagaaggttggtcgcgtgggagaacgggacggcgcgtataagcctctcgctccctcccacgtggacgcttgtaaccccctactacaagcgcacccgacctgggcgcaggacaacacgaaagccgcgggtttcccccttttgcctgtctccttctttccccccttcgtgctccgtctcgcgccgacccatctgggctgggacacgcgacgacaatttactcgtcggtccagggaccccccggggtcgaaacgccgacagaatccgaagagcctctacaagcacaagatcaaccatcttcttcaaatcaagcatctgcaccaactcaagatgatgagaatgaggatcaagaagatgagccatctcaagaggaggacaatgatcaagggggagatgccaatgatcaagacaaggaagatgatgagggtccaagaccgccacacccaagagtccaccaagcaatacaacaagatcaccctatgaacactatcctcggcgatattcaaaagggagtaaccactcgatctcatgttgctcatttttgtgaacattactcctttgtgtgttctattgagccatacagggtggaagacacattaagggattcggattgggtgttggcaatgcaagaggaactcaacaacttcacaaggaatgaggtatggcatttagttccatgtcctaaccaaaatgttataggaaccaaatgcgtcttccgcaacaagcaagatgagcatggtgtggtgacaaggaacaaagcctgacttgtggccaagggatattcacaagtcgaaggtttggatttcggtgaaacctatgcacccgtagctaggcttgagtcaatttgtatattacttgcctatgctacttaccatggcttcaagctttatcaaatggatgtgaagagtgccttccttaatggaccaatcaaggaagaggtctatgttgagcaacctcccagctttgaagatagtgagtaccctaaccatgtctataaactctctaaggcgctttatgggctcaaccaagccccaagagcatggtatgaatgcctaagagattttcttatcgctaatggcttcaaagtcagaaaagccgatcctactctctttactaaaacaattgcaaatgatttgtttgtatgccaaatttatgttgatgatattatatttgggtccactaataaatctacttgtgagtagtttagtaggatcatgattcaaaaattcgagatgtctatgatgggggagttgaagtatttcttaggatttcaagtgaagcaactccaagagggcaccttcattagccaaacaaagtacactcaagacatactcaccaagtttggaatgaaggatgccaagcccatcaagacacccattggaaccaatgggcacctcgacctcgacacgggaggtaaatccataaatcaaaaggtataccagccgatgataggatctttactctatttatgagcatctcgaccggatattatgctttccgtatgcatgtgtgcaagattccaagccgatcctaaggaagttcaccttagggacgtaaaacgaatcttgagatatttagttcatacacctaagtttggtctttggtaccccaggggatccacttttgatttaataggttattcagatgctgattgggcagggtgtaaaattgataaaaagagcacatcagggacttgtcagttcttgggaagatccctggtgtcttgggcttcaaagaaacaaaactcagtagctctttcaaccgcggaagccgagtacattgccgcagggcattgttgcgcgcaattgctttggatgaggcaaacccttagggactatggttacaaattaaccaaagttcctctcctatgtgataatgagagtgcaatccgcatggtggataatcccgttgagcacaaccgcactaagcacatagccattcggtatcacttcttgagggatcaccaacaaagggaggatatcgagattgcttatgttagctccaaagaacaattagccaatatctttaccaaaccactagatgagaaaacctttaccaaacttaggcgtgagctaaacattcttgattctaggaattttgattgataccttgcacacatagctcattcatatacttttgatcatatctcttttctttgctatgactaatgtggtcttcaagtgtatctcatgctaagtcatagattgaaagggaaatggagtcttcgacgaagacaaggcttccactccatcatattattcatccttcgccgtcactccgcatcactctccaactttggtataatccttcactcatatattatttgctaaaaggggagagaagtttgaaaagggcttatattttactcacaggtatccgtttttggcgattcatgccaaagggggagaaagtattagcccaaagcgaaaggaccgcaccaccaccaatttcaaaaatgtagtctttttcaatttgtataaaagaagtttttcaattggtatcttatttttgatataatttcaaattggtataacctctttcaaaattaatatctaaaactctcttaaacactaagaggagaatttcattgagggggagttttgtttagtcaaaagaaaagcatttgaaatagggggagaaaatttcaaatcttgaaaatgcttctcgaaatcttattcatatacctttgactatttgcaaaagactttgaaaaagaatttccaaaacatttgcaaaacaaaacaagtggtgcaaacgtggtccaaaatgttaaaagaaataaagcaatccatgcatatcctatgaatgtataaattggtttaagtccaagtaacctttgcacttaccttatgcaaactagttcaattctccacttatatatttgctttggtttgtgttggcatcaatcaccaaaaagggggagattgaaagggaaatagggtcaaaccttttcctaaatgattttggtggttgaattgcccaacacaaattattggactaactagtttgctctagattatatgttctacatgtgctaaaggttcatctacaactattctaagtcgactgtccggaataccgtagattattccggacatgagaagctttttggaaaaacaaactaagcgcggaccgtccaggcctttgcggcggaccgtccgcgacaccaggatgaccctcggacagaaccaatgcaaaaatccaagtctacactacggatcgtccgaaggaaatgcaagcaccgtccgagaccacgcgcggaccgtccggcctcaggcacggaccatccggtaggtgaggaaccaaaaaccccgaaggtgacgggttcggtaaaatgaattatagcgtcctcgcgggccgtccggggtgcacgaccggaccgtccgcaactgcctttatctgacatctgacgaagcattaaatgcaaaataaccgttgatatagccgttactgctgaccgttgtgttttcagccattgatgtgcaggggcggaccgtccggaccaagtgcgcggaccgtccgcggttggcagaattggagcaacgactaggaagtggttggtgactataaatacaaccccaaccacctccattcaacacacccaagcattccaatcctctacattcaatacaagagctagccatccattcaaagatacaattaaagcttcaaatctctccaagttccacaattaagacaagtgatcattagtgattagtgacttgagagagagtgatccctgtgttatttgtcgctcttgtcacttggtgtttgcaatcgtgctttcttctcttcccattcttattctcaagtgacttgtaatcaaagcaagagacaccaagtgtgtggtggtccttgtgaggggtctaagtgacccgttgattaaggagaaagctcactcagtctaagtgaccgtttgagagtggaaaagggctgaaagtgacccagtctttgtgaccacctcaacagggagtaggtttgcaagaaccgaacctctgtaaaacaaatcaccgtatcacacttctcatttgcttgtgatttgttttcgccctctctttcggactcgactttatttctaacgctaatcccggcttgtagttgtgcttaaactttataaatttcagatttgcctattcaccccccctctaggagactttcatctatcccctggattctccatttcaccagaggagtttccttttgaccactcggaaaggtcctatttggatcttttgctcccaaaatttgctgactgttaaacacatccttattgatatttgggtgtgttttgaagctaagcccaggcatatcttggctttcaatctacaaaccatatgttagagaattcaattcaaactaattcatacgatgatagactgctgtacaatgaatttgattattggtaattaaacaataacataagataaataaaggtgaatgacatactaatataaaataatggtctttcaatgggggaaagagcagtagaggaattattttagttggatggtgagcacaaatggtaatgttcttaactaaacagaatgcaatatcagcataggttcacatgatgatgaaaataaaataatgcaaagttctatactattatgaatttctatagttaaaacttttcatcacatatgtaaaaagatatagaaaaaacatttacaaatgtagaatgctagaatttaggaaatggtgttacctacaaatggatgaacccatcagcaagcaaaagttgcaggcttacccagcaccaggcacatgcattagaaccgggggagcagggatatctggatggaaggcaccatgcatagctggatcaccaaacacatcataaataggatcatcgggattttcaccagacccatcacgtgttggtgaatcaacattcctgtcgaacctatgattgccacgctcatccctcatccgactctctattggtggtctttgtcttccatttcccctctaaacattgatcagtacaaatagttagacaatataatttgcaagtaaacacaaacttagtgatggagcttactggagcaggttgctgcatgataggtgtacaaccatgtgcctttgggtcactgcattcgagataaaaatctcataattatcttgcaatttttaaacctggctaacttaatagttaaacgaatgggattgaagaaacatacttcatatagttctcaaactaaatatcctatctcacttttgaagttagatcaaccaccaagtttgcatgcttcagtttaagatgcttctggacaacctcagcggcatggaaatgttttgtgcagccctttagtagctccatcaatcttctcctttcctttcaacatttctaatggatcctgatcttgaattctgtcttgccagaatgaatcaagtttattctcccatttagcaccatttgagctagccccattatatgtccttgcatcagctttcacatgccttaggcctttaggttcatttgcctcagacataccataataatccacaccatggatacgccataaataagtaacaagagtatccagcaactcagtaccctcaagacccttcacagtagatgatccttgtactataacaattggccccactgaaccatgtaacttattcctgtctgacttttcatggtcactacttgagagaacgttgttttcaatacccttcttagaatcaagtttacggatgagagcttgagcttgctcaatgtcaatttgaattcgacgaacctcggaactaactgggtgagccttggaagcagcataatatgaatcatcagaaccctttccatgttttccctttttaccatccccttccacagcatctagatttttactgctattatttcctgatttgctcactgccgaactcgtcaaacctggaccgctatgcagtacaaaaaagtgtaataattaatacacactcttaatcaatgcacgtgttattgggtccattatgttttcttgttccaaatttcctcgaattaattatgtggatattttattctagttgataatgcagttcatgtgcatgttagcatatagttctctgtgggtcttattatttagttggcattatgttatttagatcaatagtattatgagaaatcttatttacattctactaaatataatgctctgataaaatacattggtagtacatgatgttattttagtgtcacttttcagagtcaagttcagtcatctacctctgttaaaatatc

SEQ ID NO: 782 - DNA, 5400 bp, Zea mays
  Intron number 1 from transcript GRMZM2G099522_T01 (locus G RMZM2G099522) derived from phytozome v7.0 (chr-ID 1; pos 2 6674886 to 26680285 reverse strand)
cgcggccgcctctttgagttctccagctcctcgtacgacgcacgcgcgctccggccagccttgtcctgccctgcatgcatctgatctatgtgtagcccgcaacacgcatcccccccccaaatgaacgatattaatatatactaaaggggagcacctgcactttgggtcttttttttgtttattttcctcattctcgttttcactttaagaacacgttttttattgttagatttgctctcttaatttatggcttgtaagtctcgcaattgctcatagatcttgttctttggaaagatctcttctccttttagtcatggatggatgctgtctttctgttcgtccttgtttagtttggaatttatggtcgccctctttggacaatttgctctcttccttcttggtctgtgctgattcgttttccttcttggctgctcatcatttatttgacagctactcttacgtatctcgtttggtccccgtgggccaggtaaccaagatctgggcacatgaacctagatcttcctctattaattgtgtcctattacttatgtatatacatcaccaaaacacgatatcacgaccatcctttgttcaccaaaagaattagtagcatatatatcctcgcttttgttgcttacagctcatcacctaacaaaacaagggaacatatccggtgcatattagacttttgtccacatatggtgtacatgaactaacaaagttcacaaaaaatctttaaaaattcatacatattcttttcatcatactccaattatattcaaaattttaagtttaaatccgttatactttagctataataaaaaagagaacattttagctgattttcaaatttaaacttgttgaaatttatcttttttattacagttgaagtataacgaatttaaacttgaaattttgtatataattagagtaaaatggaaagaatatgtatgattttttcagatttttttgtaaactttgttagtttatgtgcactatatgtgcaccaaagtctaatatgcaccggatagtttccacaaaacaaacttttttcttcagcacaactatgtctataattgctaaatatgcatacagttcttccatttaccaaggtagatctcgtgaacttgtcgtatagtagacctgtacctcaaacaagatttgagtttttcaacttgttctcttgcaataagaagcaagagtaaaaaaaaacatcagtgcattatttactaccttcttccttccctttttagcattgttgccagactgacagtgttgccacattccatatccagttatccaatcccaagttttatttttacttcatatttcatctcctttatttttgtcaactcattttatcttccaaacaagctgatgtgcttagctcaccggttcagtcactagagctgtaggttcagtcactggagctgtatgaagccctcagctgctgatctatatgctactgtttcattcgttactgttccatagagggtacatgggcggaacggtagctgatgctcgagacctcgaaatgctatctcgcatctttcttgagtcccgtgcagagtcatatcaagcagctcagcatatacagcatgcaatattacgaaggttcaacgtcatgctttcatccatgtgcgtaagctagctgcatgaacagatgtgcaggagcatttcatttcatagttttttttcctgaagaagatttgtctatcatatcagtgttttatcgaagttgtagaaagtagcatatatatctcgtcttcctctatttgtcttttcgatcttatgcattcaagatttttctcagttttctgttcaatatcgtttctctggttttctctgccattttcacagattttcatcctttttagtgactccataggtggagaatgtatggttgtatccctgcctataggtgattcgttagtaatatatattttttcatccagtaaaaaattcttgatgttttaagcaagatgcagtcaaactcttgaaagaatgtccatcaataagttagaacgacatttgtagtctaaaatgtaaaagtaacagaaatttgcttgaaaagaaaattcataatcataaacttatatgtataaccatgtttgaataaaaatataataacgaccaactacttttggctggacgaactactatacatgcatgtgtatatactctctaatcacaaataaaatgtttatggtcaaacttcaattttacaacctttgactatcgaaggttttactagctagatcaaatcatgaaatagtttgtgaatatttattttgaattttactttcatgatactatataagtttactagatttttctaatacattttaatatataacatttatggtcaaagttatattttatagaccatataggaaatgtcgtcattcaaacaatcaagcgttttcaacattatgtatttaagtgcatgtagggagtttgatcaattcggttgtagaagtgttgacataagtaataaaacaatgcataaaaggaaaaaacataacataataatttacctattaataccggtgtgacatggaaatatgtatatatgtacaactttatccacacaagatagtaatatatagtatatagagagctttgtaccatcaatacatcttcatattttattgtaattctcctatgattgttaaattattgtgtggagctagccacaaagcatagttaatatgtgtataaaaatattatatgcaaccactatagatagggctgataatgggctataaattttgcactataagattgaaggatcgaagcgggttaggatcgagctctatttctagtcatttttgagctataatttatttagggccttgacattttgtggagaactatttggatcacaatccattaccacccctaactatagatgataggaattcaaaaagatctttgaaaaatcatgctttacgttgtaagatgtaatttataaatttagataatagagtaagcatgcatatttgtacaactattgtaattaattgtttaaggcaatgttgtggttataggccatgtggtggcatatattatgtcaacaatggagcttgaccaaacaaggggagcagtctatataattgaggagtaaacactaaaatatcactatttagacaatggggatcacattgagaaagggtggctatgggctagctagtttggtcttaaccaagatcctcccctgtaattaggtgtgtggtgctgactaactgacatcctagtggcactaattattagagttctttgtttcaactttgtttttcacatgttagaaaatacaattatccaaaatctctttaactatatgtttttaatgtggacgacccacaaccttagagcgtcatgcattagaatatacaaaaggaactccaaactaactaatggattctagtacacccgccatattatatttgatattgcatggtcttccacatctgaaaggtgacttaattatttaaacacgggactacatggacataagcataaatgttgtattactatgattagagtaataaacaaccaaataatttgttttattctaagaatcatctaaaaatatttattctagtttccaacaaaaacaaataaattggtttccaaagtaaagtatattgttttgtttttgctagcatcctcaattcctcaggtatgtttttgctacataaattatattacgattgaggtctcaagaattttgagaagatactttagcatatctaagactttaaaatagatggcagctatcgatctatatgactgtttgaagaagaaaaagttcatatagttatattaactaatcatgctatggatcgggttacattaccttatttacttccactcaatattaaatatacaatttgtaaacacaagacaatccatcggttaggtgtttaattgaaacaccacaaatctaatgggtaaattaaatgcattttgtctaaatatgcattatagattcatggatagatttagcagacatgaaatcttgacataaatctcatggaagagttattagtctccggagtttctagacctagtagttttctaaaattacaatagagctcaatagtacagatatttacctttggattcattcatggataaaaggctgctaacacgtagtggagttctctggtgagtttcagtccaatatatgtaggttctttagtggagattgtagtcattttcttagatatttttatgaactatataccattattccattaccatggtctttcacaagtaaattcgttataatatttgtgtggcatacaatacatcatttgtgcttttacattcagtatttaagtattttatgctatgatactaaaagttcaattcactggtagtctggtactaaaccttcaattcacaatacaacgaaacgtcattgccagtttgccactcatggcctatggccctatgctataacatcggttgctgtgctgcacttgcaagtacgtaggagtatatgaaccctcaacttagttcctatatttgcgtttccactaccagtctaccatgcaagcagcgtttccactaccatgcaatgatgcaatgcctctctctctctcaccccttggttaatggtgctatatcagccctatgacatgctaacatgcacaagatcacacattttctgttttagtttcacacccaaatttggaccatgatggccccccgggagatatatggtctctcttttttgtcctgtaaaggggtgcaacctatttttctatagctgtcaatggcataaatagataaaaggattatctatgaacatagacacatgatgagaagattaaagagaagggaaaaaaggtgaatggacgaagcccttgtagtttgtaaatcagtctaagttgcaaacactctctctgcatgcgttacatagttgcatttagcacccccggcccagcatctctcactctgctgcaatctcacaagtcacacccaagagtggcacaaaaaggaacgagtttccaaatatataataactaactatatatttcaattattgtgcaagggtatttgcaacttagactcaaacctaggatttatcatatataagcgtacatttacattacacacgggaggtgtgaatggactgaactatgaaactataagcctattccctattcttgtatcgtgtggtgtcaaacacgccatgtcttctaaagagcaaatgctacttacaatttacaacatatagtacaatatggcattatttcttagaaatggtgcaacaattaatcgttttatgaatgacagtggccggccttgaaatcaaagaatgtttgtttgtgctactagctgtcgtttttcaaatgctgtcattgatcacttttgccttgtgccaacagc

SEQ ID NO: 783 - DNA, 13843 bp, Zea mays
  Intron number 14 from transcript GRMZM2G109221_T01 (locus GRMZM2G109221) derived from phytozome v7.0 (chr-ID 1; pos 63008951 to 63022793 reverse strand)
gctgctttctgactggactatcattctattttaaggtaacatgagcattttagctcgtgaatttaccatatggtttaatgtctgagcttaacaagcaaatggtataaatatttatggaaaatatgattaatcactgaacttttaaaacatgctctactttggctctgcctattgtttcattctgttagagtacccgtttagggttttggggttagccctttataattacactaggtgagtgcccgtgcgttgcaacggaaccgtataataacacgataacaatatatattatagatatgtgccgctccaggcgtttcgacaagcataacaggtctagcttctagcgtctaggtggatgtgtcgagcagaccaatatgttgagaggtttacacattaaaggatcagcaataggttgtccacttaatgtaacacgaagtgttgcaaagtacttgagaatttcagatcggataaatggcactttgctaaaacaacgtgagctcgagcacgcagctcaagcccaccatgaccaagaatcatgggaaggctctggtagacaagactcagtgccttctttgcatggcttgatccaagagccagccacaactcagcgagagtaagtgtagctgaggcttcaagcagatccaagttgaatgatttgcagaatgattggttggccaacgcataaggaagcccaaggaccgcattgtcagatttctgggagaatcagaataaaaaaaagtgttagcttactctgtacagaattgtagtatttacgaggttctttgcaaaataaaaaagatgattacttactttatgtatttcagcaagttcccatcaagacagtacgctttatagcatacttattttcgacacaaggcaaatgacagccggggctaaggaaatcctgaaacatgtagcagaaacgtcagttttcccttttactaatggtcatacaaggagtaaataaacccaacagctggctcgcatcaaacatgctttgaaatagaacatcaaacaccttgagatttaaaaataagttggagcgtcatagcacaagtccaatatccaacatgtgtcaattcttgggcgtcatagacactccgtaaattttgtacgctattataattgtctgactaactatgacgcccaataagctggagtgcttataattgtctgccgtgagggagccctggctcgacggcgccttggagacgcgcaagcacgccgtcgtccgccggcggaggatgggcctcctcatgatgctcaggctgctcaagaagctcttcctggcgcacaagtccggcgccgccccgtcgcggaaggcgccgcccatctgacgcagctgaaaaaaaatcaagcctttgatgagtagtgcatgatgatgtgtcaggtgtatatacggaggtgatcaatacacgcatgcttctctcgtctcggtagcacaggaccaagaacttgctgtttgatgttctatttctcttacaagtttctcttgtgtacttgtgtccctgtcgagagtctggttatgccttgggtttgcttaaactttgacgagctgcaacatgttactaaaatcagggagggcagctaccagaattctgcattgaacaatattatttgtaaaatcagtcacatttttgcatcctttgtcaggttccttagctttttccaaagctacacaactcattagaatgttgccttgcaaaagcgtgttgtataatctgctcaactccaactcaacatcatcagctcaagtaaagacacaactgttcgagtgaagtagtgaactgtgcacaaattaagactatctgactctgctacagttgcgaaaatgacaaaaaaaaagagggaggatccgcatttcccaaattcaaaatatggactcttagtcacacctttttctgctgctgctttcggccgtttagatgtcgctagcccgtctaaagaagaattaaagcggtttgcgtatacaaatttacaatcctgtcatttttttattcataaaactggtccccttttctcaaatataaatgcttaattcactgaatcatggcatctatcgaagatgagcaacatgataaagaagggccatggcaacacgaactacgaaggataccataggtatacaggcatttctcgtcatagaacgaacaaattcatcaggaccaagaggaagagatatctcaatgattagctctataaaaaggatataaatggatggtgtcgactatctatataacacagagggacgaaaaatatgaacaggacatgcagacggtggttcatggatgaatgggtcgacagcaccactgacctggcaaggaaaaagataatgatgtgatgatgatgataggaagatctgggatggagagtcggcccacgtcatgcttccttgcaattacattcaaagtttcttctcgctagcgtcttctgctatggcaacatccagaatctggagattagatggagtatggtagttagggaaattggagtaagaatcgatagaattccatctcagaattgaagaaagcggatctcttattgggccaacacatagtactaccaaaaaaagaaaaagagagataaaaagtaagaaaggggggaaatattcatcatcatgctaccaaaaaagggggaaaagagagaaacaaagtaagaaaagggaaaaaggctcaccttattcgttttctcggtgatagacaattgacacaatttttcacatattagaacatacatgtgtcaaatgtccactttcatgatttccacgtagaagggttatgtgtgcaggatacctaatggcaattggaaaatgagagcagaagcaacaaaaagcaatgaacaaggaccttgacatagacgtcatcctcaagacagtagacaacgttgtccaccttagcgctccggtagtggcatctggctttgagcccttcctcctcatccgatctgtatgcataataaatcagcaaatagcagattgctcaacaaaaagtaacacatagcgagcaaaaaactggtcaaatcaaaccagagtggggagaaaaatatacttctttgcaacttggtgtacaaaaaagctctgctaaacgtgcaactattttcttacaactcaaatgtaagtcaggatcagaaggccaaacccacctgggatggcggctctaaaatcaaacatatgatctaaatacatgaatataattgagtaaggtaaaaattgtggctccctggatagaaagcgaaaagatagagctaatcttaaccaaagcatgagatcatggcttcaattttttctacaagacaacattagaattcaacaactatgagatctgcaagtgactctcaagttttagcagctgaaatcatcaagaatcaaaacttgttaccttgaggggattttgaacgaacacatggtggacatcattcaagtctcgtacagcttcacctgcgcagacttctgccggctgtagagcgcggcgttcgagtcttgcacctacaaccacaagagtacttttttgctgttcacgcttatcagaagcaacttcactaaacaattagatagaaatggtacacgattctggagactccatgcctccgaggagtaggaaatgatgcttaagttacttggacgacactcctaaactattcctagctggctagcagaattctgagctttggagctgggagaacaggggaggagcaaaagatgcctatgttgtactaatagtctaatactaatagagcactttgtcacaacaactctttgcacaagaataaaaaacatttgaactttttccatggtaaaacttgatatcaaagaagagaaaatcaggtggtccaattgatgcccccccccccccccgagaaattcaccatcatggtgtttaatccaggatttctacgaatagcaccatggaaagttcagaatcaaaaacatctaaacatactaagaacaaaatgaaccgcaccaagtcacttgaatctaaaaaactatccaagcaaagagaaatagactgtccaagcaaagaaagcttagatgtactgaatctaaatctgaaaaaagtcaaaaatatgtcaaggatgaataaagactaatctgaaaaaagagacaaaagcatgccaagaatgaataaaaactatgattaatctgaaaaacgtgtcaaaatcgaccacacactaagcaaagaaaggtggcctacctgaatctaaaagaaactgtcgaagcaaagagaaatagactgtccaagcaaaaaaagcttacctatactaaatctgaaaaggacaaaaacatgtaaagaatgcataaaaactacgatgaatctaaaaaaatgtgtgaagatcgacgactcattaagcaaataaaggtggcctgcaataaatctaaaaaacttgtcaatgtgagagaaagtatatagaaacatgtcaaggtctgctgattattggaaaataagttttgatgtaaatgtgagagaaaatataacttacataggcatcctttagttttagttcaagatccgcgcccaggtcctccctgcggcagcgtccttagaggcaggatcttcgagtaggagagcactccgtcgtggatcgcgaaccagcgcgactgccaccccttgccgatgtttgtccacttgtacagcacctctgtgactgtcggtgcctccttcatgtcctcagccgatgtggtcatgtggagcggtcgctggccactccccggcaaggcagcagggtaggttgttttaaattaaaagaatacaaaaccaaggaaacaatatattgaggtggtaaaacaaaggtgtcttaacatgtagatcatgggccaatatatcataaatgagtcaaaggatgatcttcaagccctacagaggactggaaaaatcacatgggaacaaatcatagtatccaatctaagccctattagcaaaatcaatattgttaccagtcctcatattgtttgttcagtcatatgtcattctacatattattagtgctagatattagaagctcctactaagcctgtacggttgtattgatacaactttattgctttctctgcattttcagtttatgaaaatattggatggttttagccatttggtctacatagcaaatatactcctaccgtttagtttcatgtgtggtaccggggtaaggacaatgcataaatgaaatataagggaagtccttttattaatatatacagtttgtcgtacacaatttagttccagaaatgcaagaaataaaatatctaaaagaaagcccaaaacacaatgaattcagtggcccaatctgcatcccaaaaaatatggatgttactgtgtatactcaattttgtttttcagtttcaactaatgtatttcccattcagataatcaagccatataacaattttcaccaaaaatgaaatatttagtcagagttgcacctttcagaagaagcttttgctataactaaaaaaaaggtcagcacaactttcaccatataacaatttcctttgtcaagtacaaatatatttgaacatcgaccaatggccaaacaaaggagttagtgttgctcatcttatgtcacaactaacattatgtcattcatttacaatctgcgcatatatgttgtacgcactgctcatgtaaacataagggcaattaccacttagccatgatatacacagcgacaagattcataaatgcttaaacttagcaagacatgatatacagagcgacatgatgcatggaaattgatgtttaaggactaacttctttaataggattggctgacaaaggcatgggaagttctgatggaagtgggtaatccatcatggccagataatcgaatgaatagtcgtaacatgtaatttggcacacaagttagaagtagctttataacacaatggtcagtaatcaaatgaaggtcaaagaaaacatgtagtactatgcattatatgaaagtataataatggcaaacagagggagggatctgatcagcttattaacccatatcaccagctaaaatgcaaacataaatagctaacaaaatgtatacagttggaggccaacaatattagttactccggctgtccggcatgcagttacctctgtgaatatcagaacatctggatctcttcttagtcagtagcaaaaaaggaaaacaaccatttcacttcccagcgatatgtttcttttatctagtgtcaaatttcttatgtgaaaagttaatctgtcttccatgcagaagcaaggcaaattttcaaagattcttgttcggttcagatctacagtatccaggcctgtattccaaaagatacagctatactttggaatcatgaatttgtgcaggcagaggagcttttcaatcagccttttgattatgagaactgtttgagagataataggtattgttctcttagcccatttggttttctcccaagtctaaggcatgcccacgaaggaattgtaagcaaagacataaccagatgagaatatacataaccaaacacacatatagatggagatagatttatatataaaatagtgaaatttgtcaaagataataccttgatgcaaacctgtgttcatatgcatgtatatttatgcaacttttatccctgatcagtattctcaatttcgtcacttcacaatcatgcacaggttttgtggtgttttgaattcttttgtcaagcgaacatccaatggaaagcatgtgagttcattgccaccaaagcccttgaatagtgctgcagccgccgcatagtctaagcctagtgttactccaaaggagcagtttgttactgctcggcggcaagatttgcctgtaagttcaaagcagggagcagacactaagtccgagaaggataattccacaatattagataaggctggcaatggtcctgttgacaaagaacaatcagttgatgcctatgcaagcaaaagtaaagctcaaaatggaaaggccatgcctagtaatggtggatcgctggctaacatgtggggtcgtgcatcagcaaaacctatgcctccaagtaccactaattctacagctgtagcaagtgttgcaggtattatctcacaaatgttcatattcaaattctttgtgctttactttctcgtctataactctcagcacatatctagtcctgtatatcaaccctttacaagcatgctaatatagaactaatgctgttagtatttttagctactgctgatgcacaaatttgtgcgaaggaagaagcagatggaaatagcagcgatgatgaacatgggataaactacaagaggggatccactaatgcaaataacagaaagagaacagtggtatttgattattcggatgatgaggaagatgacaatattgtaagcattgcatctcctgagctaccaaaacagcataccccagaccttgttgttggaattgttactatatcggtaaccaaaagcccaatgatcgaagttgttagcttgctgttcgtaatctaccattacgcaacagtagaggaaattggatcaataccattcagtgagccactaacacacatcataatagcattcaaatgtgtatacaaactttagtaacatgtccaaactaactgaatgcttgtcttagtttcacgtcaagacctaaccaaagaacactaataaacataaaaatggaaggctgttggtatattagaggaaacaagacaacaaaaactcaccaccaatgaatagcctggtggacatgaggagctttgaacactgaaggagacaagctaccagtggccctaaacctaacttagaagaccaccaagcctgcctaaggccgccattttgaacactaaacctgcacatacaagatgataacaaaaaatcacctgggcatacacgaacacttaacaacaattagagccttacacaagacattgtaataaagtgtgatgcaaaaatgctattaaaatgcaaattgctcatatggaaacaaatagtgagggtgagtttttaaaaaacaacagctcaccttggtctcatgtttatttaagattataaaattggcacattttcactcttattgttgggataagttgcagtgtagacaacatatcaaactggtaagaggcacaatcaataatcagaaacgacaccaattacacacataatgtaaaaacaaatttcatatacagaagacgaaacatgcaaaaacaattacaacctttacctctgaattatattccttagttcttcatattaagcataatcttgtacagaactgtgacacaaaagaaagcaaagcgagcatacagttagtatcaacctcactaaattgttgtacaagtgtagacaattgaacctgtgcacgcaacaacaacacctgaacctaagagagggggcaagatcagtcaatgaatttaccaatcctcacctgataatatacaagaatcgttcaataaacaaaggggaggccagtcaggggggagcatcgcgagtgagggagcacgatcagcggctagcgggcaccgcgacatcgacagatgcgatgtagatgtggtacagcgggaaggaggcgttgtggaccatgaatgcaccgtcgtggaagaacacaacaatggggagcttcttctcgggatccactctcgcgggtaggtagagtcgggaggagatgcctgtagcgaagtccttggacgcgacgccgttggtggaattgccattgggggacgacgggacggacttggtgtcgtcgaagcgctcgacacagtcgatcttgtacacacgcaaggcatcgggcatatcgaactcgagcttggagtcgggttcaatggcggcgtggggattgaggaccctgtagaaggggtgccgacaaagtcagttgtctttgaggaggggaggttgtggacgacgatgaactcgtgattgagggggggggagtggaggacgtggtcgtggagagggagagtagtttcttcgattgtgtcgcgagcatccgtggagaacgaagggtgcctacacaaagatgatgagcagacgcacctgtttctcacccgggcattggctggcgagatctccacgagcgacgatctcggggatggaggagaggaagcccgagagttggctggcgacatctccagctggccgcggcgcttccaaaccccggatggacgccggcgaccggatctggaccctcgtcgcctccaactttgctcctttgcctgccgaaggagtaccgccgccgcctccatgaaccggtgaccggagctggacggtgttgactctggcagagcggttgaggtcgtgggggggggggagattgaagtcgtggtgcggcgcgccgtcgtggaggcagattgaggacgtgggcacatctctgcgtgcggcgcgccatcgtggaggtttagggctgccgaagaggatgacagacgctgtaggctgggctgcataatgggccgcaccaacggttgggccacacgaaccactgggctgcacgcaggcactgttatgggatttattagattagtaccataccggccactaagacagaccaaacgtggcttataaacgttggcgtggattgtttgttgctcagactaattcctctggtaccgcactaagatgtattttttggcgcggggatgtacgtccacggttgggaggcagtccacggttgggaggcagaacgggtcggatcgcctggatgaaacgaacggtccagattacccggaggcaaacgaacggtccagattacccggaggcagaaccagggaaggcagcctaccccttgcgttcttaatagatagtatagattcatacccctgtgtaatgggtcaggcccaaccttggtctattaatacaacttccaaccctgagttagggttagggttccattctccaacttcgatccctaggggctcatcatacatcaccttcccactcgtgtcgtgctcgctcgctcgctgtaacagctttgccccctctactctattcatttgccctccacttcccccaccagtgtatcctccccccatgctcttacttccaccaccacctctaccgtttggcatcgtcgcctcggtcaccctggacttgacgtgatgtcccaggtctccagtcgctccgatatctcttgtagtcggggttcctctaggcacctctgccatgcctgccagctcggccaccactctcgtcttcctttttccacttccacgtccaaggctgctcaggcacctcattctggatggtttttctcattttttggactttcccgcttcggttgaagttcgccacgttcgccaccctcactcacttcttcgtttaggtctctatccagtttcgtcgcctggtccatgccctccagtgtgataattgtcgtgagttcgacaacaacgcctctcactccttcttcctcactcatggcatccagttgcgtctctcgtgcccctacaccactccccataatggtcgggccgaacgcatcattcgcaccaccaccaacatgatccgctactttatcttccaggagtctctccctaccagctactgggccgagcccctgcacaccaccacacatctcctcaaccgcctcccctcaaaggcgatgagccacccgtctccccacttcgccctgtatggcacaaccctctcctacgaccatcttcgcgtgtttggttgtgcctgctatcccaacacttctgccactgctcctcataagctatctcctcgctccacttcctgcctcttcctcggttactcccctgaccacaaggggtatcactgtcttgacctcgtcacccaccgcatactcatctctcgtcacattgttttcgacgaagatgtgtttccccttgctgactcctccccacccaccaatctcgactctcttcttgagtccgatccggttccccctccacatcggccgctcccgcctgctttccacaggctcagatgccatcgctcgtgcctctacccgcaccacgtgcagcccagacacctcaccttgcgtcgttacccgtgccacgcacgacttcgacgtctacgctcgcgcctctacccgcaccatgcgcggcctcgacgcctccgctcgcgtctcttcccacgccacgtgcgtccctgtcgaccttgcctgcatcacgcgcggccccgtcgaccccactcgcgccatacgtgactctgtcgatgagtgcggcccgcttcgccgacctcgccctcgtctaccaccgctacgggcgggccactccctgagcccccgccgaaccggccccgtcgacaagcacaactggcttcgtcgaccccgccctcgtctaccaccgtcgcgagcgggccactccctcggctcccgacgacccgccgacccgcatcgagcctcccatgtaccacccggtcgccatccaccgtgatcccgggcacatccacccgatggtgactcgtcgcgcaaccgacgttctccgcctcgtcgacctgctaatcctgacggctaacgctcctctagacgcctctccggtcccctcctctgttcacgccgccctcgctgacccccactggcgtcgcgctatggaggggtacgtggccctgctggccaaccaaacctgggacctagtgccgcgtccaccaggaaccaatgtggtcactgacaagtggatttttcgccacaagctgatctcggatggctccctcgatcgctacaaggcatgttgagtccttcagggcttcacccagcgttccggagtcaactacgacaaaaccttcaggtccgtcgtcaagttcgccaccgtttgggctgttctcactctcgccctctctcgggactaggcgattcatcagctcgatgtcaagaatgtcttcctccgcgacactctgacagaaactgtctactgcagccagcccaccggcttcgtcgactcaactcgtccagatctggtctgccggctgaaccgctccctgtacagcctcaagcagatgccataggcctggtacagtcgcttcgcctcctacttggcctccatcgatttcgttgaggccaagtcggacacgtccctgttcatctaccgatgtggcgacgacaccgtctaactcctgctctacgtcaacaacattgtgctcacgacatccatcgccgaccttctccagcgcacgatcgacgcccttcaacgggagttcgcgatgaaggaccaagggcctctttaccacttcctcggcatcaccgccgagcgtcagcctcagggtctcttcctccaccagcgctagtacggcatcgatatcctagagcgggctggcatgttcgactgcaagccctgctccatgcctgtcgacacttaggagatgctctctgaggacgatgggcccccagtcgtcgacgtgacgtcctaccggagcctgaccggtaccctctattatatgaccttctccagttctgacatcgcctacgccatctagcaggtgtgcctgcacatgcacaccctgagggagccccatcatcgctctcaagcggatcctgcgctacctccgcggcaccctcaactacgaccatctactctgaccctcctcgacgtcggagctcgtgatctacactgacgctgactgggttggctgtcccgacacacgccgttccacttccagttacgctgtgttcctgggcgccaacctcgtctcttgggctgccgctcccgtcgtctcccgctccagcacagaggccgagtaccatgttgtggccaacagcgtggccgaggcctcctggctgcgccaggagctccacagcccccttcagcacaccaccctcatctactgcgacaacgtcagcacggtttacctctccaccgatcccgtgcaacatcagcgtacgaagcacgtggagatcgacttgcacttcgtccacgagcgtgtcgctgccggtgacgtttgggttctcaacatctccaccacgctgcagttcgtcgacatctttaccaagggactatttcgagtgtattcgctgattttcgatctagtctcaacatctatgcaggatacagttgagactgtgggaggcagagtacctgtttagagttttgggttagccccttgtaattatattcatacccatgtgtaatgggacaggcccaaccttggtctattaatacaacttccaaccctgagttagggtttcattctccaactcattcgacttaattgattttgattccttttgtcattttagttatctgagagtagtagtgtctgctcgcaaactacaaggtagctgcagttgcgaatgttggacgcttcggattgctgaagcgctgttattaaaggaggaattccttcctcggggattagaaaacttttccccccctgaaatccaactggagcctcagattttatgcatcttatatttaatgacgatgagataaatggtacaaggacactaacacgtgtgaggctccactgaataaccagatggaaatctggaaacatcaacaaaatggaactgactaaatcaacataaccagataattaaaacatctgaagtacataatttttgttgaattctatggcatatcagtgtatctctgtcggaaaataatgcagtaaaatgagtatttactgttcctcctcttttgtttttctctgtaccatgattttacaggcacaaggactgtgcacacagctggttcctactttggctctttgtggcatactggtatagaaattgctataattgaaattcctgcaatcatgtaacttcaaatgtaaacttgtttgcgtatgccatgactataagctaaatttgttatcagtctcttgaaatctgattgagatcaacccaatacagtttgaaatgggcgctttccgacaatggtaccactgaacttttggagaatttattacattgtaatcctgcttcctaaaacaggtatact

SEQ ID NO: 784 - DNA, 8541 bp, Zea mays
  Intron number 1 from transcript GRMZM2G561684_T01 (locus G RMZM2G561684) derived from phytozome v7.0 (chr-ID 4; pos 7 0132496 to 70141036 reverse strand)
ggggatccgctgacctgcatcactttctgcttctggtttgcctctctaatctagctagttgcagatcagtggtagtttttctgcatgggagttagaaaaatcttgcagagaaaaacacgatgaccttgacgcactgaacgctagatgttgtgatgacctttatgcattacgtggaattaccacaaacttgaggtaccattttggaccgcatcagtttttggaaatatgaatcgaaaatattacaacaatttcattagattttggggttctcaacatctgtgaaataaaaattttataaaatctagaccacttgtacaagatagtaagagcagataatttctttctatttggattattagaatctgaaatgttcaaactgtggcttatgttttgtgtggacagtgggattgttttttattcatgtccgactacaatgaaacacagccaaacgctataaagtagtggactggagaatctgaaatgtttgggctagttttgctagatttcgtttcttgtttctcctgtcatatacaatagcgcttgtatttttttctagtcatccattttaagtgcaacaagttaaaatagattgtatttgttgggggccttcggcttccgaaggtcctcaaaaacatgatttaacagtgtttctggagtaaaatacattaacaggtatcttcggactcggatcagagccacagtatgaagaagcacaaagaacacgaaggttggcgcagagccgaagctgtgtgtagaagagcttcggagtaacggcggaaagggaaaccgacttaaagatgaaaaaccagattagacctcgaagaattatcatagagttattgataaatgtaaaggcattaatgtaattttgcatgggctgcgacccgtgcctataaataggtgaacagtattcccgtactgttcacgctgacttggcattcacttttgcgccacgcttgtgctttctttccttcaaaccgaaggtacatttgtaatttatctttgtctacataagtaatataaatagaaatatattaataataatgtttacagaaatcatactaccttctgcattttgtttgaatattcttcattttttattatgatcatgaaggtacgtccttcatgaccttcgtcctaaattcattatatccgaagggaaataatgattaggaggacgaagggcttttgatatttaacattttatgttgccttgttcttgattcatagcatttgagaacaagtctccaacattggcgcccacctccggtgaactcacttccattttctgagttttgaacactttcggcaagcatcaccttcgtcatgccgccgaaaaaagcttcagcgacaggggctggtactttacagccgctggatcccaatcaggacgtcctttctcttagagaggcccgaagccagaagaggaaagctgttagtccaacacttccggaggatgacttggatcaagaaattcaaaacctggagatccttcaacaacaagtgcagcgcaagaaggagaagatggctcgtctagccgaccttcagagacagatagacgaagcttctgaagaggttcgccatcttgttcaaggtgatcagagccggaggcctccacgcagagagctccatcaggaaggcttccagaatgaggacgactggtatgaagatttccatcatggaaactttgctttcgatgatgcttctcccctctcaacagaattacaggctacaccatggccccagtcttacaagccaccccagctacccatgtatgacggtcatacagacccgaagcaattcttgatgagctacgaggcaaccatatcttcgtatggtggcaatactgcagtcatggcaaaatcttttgtcatggccgtcaagagcgttgctcagacctggtactcttcccttcggccagggacaatcacttcttggcagaagttgaaggatatgctgataactagcttccaagggtttcagacgaagccaatcactgctcaagctttatttcagtgtacacaggaccacgaagaatacctccaggcgtacgtccgaaggtttctgcgtctgagggcacaagcgccaacagtgcccaatgaaattgtcattgaggccatgattaaagggcttcggccgggaccttcagcgcagtactttgccagaaagccaccacaaacattggagaaattgctccagaagatggatgaatacattcgagctgacaatgacttccgccaaagaagggaggaagcattcaggttctctgaaatgacaaggggcttcggaggaagatttcacccgaggcacgttaggtcaattcataactctgctcaaactgatgatcgagggagtcagcagcaaaggccacaatactcttcacaagcttcgggccagcagcaaagttcttttcggccgccagcgccaaggggcagaggcgccaggggcttcggaggaaggtttggagaccagccaagaaaaatttattgcctattctgtggtgaagacaagggccataccaccaggatgtgccatgttaccatccagaaacagaaggagatagcagaagcaatagcgcaacaaagtcagccgaagcaggtcatgcatactgcttcgtatcactcgccttatattccagaatacgtaggcaaccactctgcggcttctgttgcttcggcgagccaaccccaagcatcttggcagcagcccccaccgccaccgccgatccagcgagggcagcagccagaagggagtcagcacagtcaccttcagcgggatttcagagaggagtctgaagctcgcacagtcaacagcactgtgccagagtcgaagcacatttattgacaaatatcctacctcaacagcagttctttcgtattttttacatacagtattacctttttgttaataaggaacaattatgaagagtttaaatgtcttttattgaatttcaattccgtgtaatactttcgtcttttaccataatagaaatatgttttttccataggcttgagttgacgaagcatccgaatttatgctgatttgaaggacctttgtattaccaaaaatttgatctaatggacacagtacaaattgttcgaaacagtaaaaagtcgttcctaagggagcgcagtgtaagttttctaaacctacagcgaaaaataaacgctgattccgctgaaagtaaaaggcgaagaagctcctaagggaggcttacagcgaaaaataaacgctgattccgctgaaagtaaaaggcgaagaagctcctaagggaggcttacagcgaaaagtcagcgctgatataaaaagtgtgtgtgctttattacagggatatgtatctgcggcacaaatatcatcttgcataacataacatcatcacatcatttttgcataacataagcatcatacagcatagtgcatctggaacaagaaagggatacagtgttgatcttcggagcacattttgaaaaagagaaaatcgtgctaaggcacaagacgaatcgagacgaagagtagcctcattggagaggcaacacaaaacttttttatagcttcggagaatatttcacgaagtttggatgttcttcatcagagaagtaaacaaattcttgtgatatagaaaagattttcatcacgaagcatgaaaagaagggaaggtgtttttttcgccgaaggctcaaaaaatggtatgtatgcaaaatttcatgcatcgtaaagaattaaactataaatagattatatattacattcaaagttacaatatattacacattttacgtttcaaatgtttctacaataacattcaatcctctttaagcactatttctgcagcttcattcaatagttggttgacaaccttgtccataatggcttcggccatttttctaatttcatcgtcccccttcgggtgggggcccggagatgtctcggcaggttctgagggaagaaaaagatacggctatattactattacaaaccgcgaacagagtctggaattaaaaattacagcatgataaaaaccactaattaatacctatttgctcttcgggctctgtacttttctcggcagcttccgctatttttctggcatcgtggatgccttttttcactcttttgaataatttcttgcgccaattctcggtcgccgtcatcccagatatcggtgaagaatttcccgccgaccatgcttgcttcgggggaggggtctttaatgtcttcagaggacaaggtagcttcggactgcgctaaggattttacatgctcgcagcctttcctctccaaaacagcagcaatccctctagcacccgaaaaagcgcagatatcaccgcggctattcaggatttcctcgaaggcctctgcttcgtgactgttccattccattggaccttcaggattgcctcttgagaaattctcttcactagagaatgcgccaacgctggcgaagctggattttatcttcttgacgcactctatggatttaacatagcattttctctgggatgcgcgaagctccttaacacttatttctaaatgattggccaattgatcactaagctctcgttttgtttcttcaagtgtacgctcttctttagctttagctagctgtttctgaagatctttgatttcacgtctttgggcttcggcctgggcctttgaggcagcttcgtccttttttaccttgtccaccaatgtaagcagaattttatccttttccagagcttcgtttctcagtttaataacttctgatcgtaggttgttgaatgcaatttcatagctctcgtcttcagcattcttttgtgctctcaatgtgttgctcagaattaaaccctatatgtaaaaagttggtataagaataaaagaatgagttacgaattataaaatttgcaaacgtccaattctcataccttcaggctattgtacgcaagactatccgcgaggtcctccttcgtcatagcacataatccagcttcgagcttcggaaaccccatacttctagccatctcccgacagacagataattctttgttgtctgggagacagtataggaaatcttcttcgttcgtcccattgaacactagtgcccccttcggatatttcaattctttggcatagtgattagcttcaaaaacttcttcttccgataactttttccccgaagcatgtcgcacgatataatcgtacattttggaagatgcttcgggggcagctgtatcaatttcttcgatcaaagtaggctctgacattttcatttcttcagttgcctttgcaatttttgcttcttctgcttccaaaggtattaccttggttggttctgaaggcccggtttcaactctagtctgttgcttcggagctttagcagcggatacttcagcaagcgcttcaggagtttcagcaatcttctttagggttgtgcttggaagtttaattgtttccaaaacatctaacacattaaccattctttttctttttggggtcactgttggcccctttttaatttttgctgcttcaatttcttctgaaggacttaaagtttctgatgttttcgctccctcagttgatgctttcgcttcttccatcttttctgtcaatggcgcttcggcaagctctttggtttctggcaacagagtctttggttcctccaatccttttgttgttggcacttcggccaactcttcggctcctggcagcagagttgattccttaatttcgggggccgaagacgtttcactgccaaactcaggcactgtggctagttcgatgtaacgtggccggtgtgtgagaactttcactctttttctcttcagcgctggctcgctaggagcagctgaagcagtttctttcacagaagtcgtacctttccttttttgcccccgcactggataatggtagtcgggatacacgaacccaattgcatcaaaaactcggttcagtcttttcttttttcggcctccgaaggctgctgacaatgcagtgtcttcggccttcgagtataccccaagcaattcatcacttacagtctcaatgctctttaaccaatcatcatctggttcaacaaacttgtctccgtacttgaatgtatacttcagcctgactagcccaccttcgttagtttctttaacagtttctttcggcatttcccaattatctgcaagaggccacactctgaaggcaatgtgttcttgtattaaatcccttgttccaataaaagagcagaccatgccgaaggcccgttgacattcttcggctactacatccatttctaccttcggtttccggagtccgaagcactgccagatggggcacatgatgacatccttaatatcctctcgaaccttcaaatcattttttacatagaaccattctttcatccattctccgggccatctcttacgaaaggtgggcacgggacggcttgatccagagcgagcaccgaagttgtagcaaccaaagttgttatgatattgctctttaccccagggcttcgtttcgtataacaattcgtgtatattgcaaaaacttttcgcacttggctctaggccctaactcttcacagcccatacgaagattcccattcttattattgcttcaggggtaagttgatgaaggtaaacctgatatgttttcagaacttctaccacaaatctgcttatagggaatcgtagcccagcttttaaaaagcttcggaagataacgacttcatcatcttcgggagtcggcacagttttttctccgacatctgctctcacaatagacatatctcgaaaatatctccccctcatgttttcaaggtgactttgcccaatggttgattttccgaagactgaatggcttggtcgccatggccgatcttcggaatcttcacccccactatctgcatcataactgtcactatcaccagtatcttcagataaaccttctaaaatctcccttgtaatcttctccgtattcgtctttgctattgactcaagaaagcccagatgcatttcttcagaaaggctcagcttcacttcggcagcaaccttcttctccttagacatctcttcggaattcttgcctctcgcttccgaagcttaaaactagggaggcaaccaaatatttgtgggcagaaagctatttgagcaggcaaagcagatggcaggagagcgtgccaaataaattgtggcgagcccctatttatacacccattatgtcggagactggagggtcccacttgacaatgactgttgctattctagcaaagggaaggtgttttttcggaccttcggctcatagccttcgtccatttcgcaatctgaatttatcattctgacaaattaatattgcgaggggctactgttgggggccttcggcttccgaaggtcctcaaaaacatgatttaacaatgtttctggagtaaaatacattaataggtatcttcggactcggatcagagccacagtatgaagaagcacaaagaacacgaaggttggcgcagagccgaagctgtgtgtagaagagcttcggagtaacggtggaaagggaaaccgacttaaagatgaaaaaccagattagacctcgaagaattatcatagagttattgataaatgtaaaggcattaatgtaattttgcatgggctgcgacccgtgcctataaataggtgaacagtattcccgtactgttcacgctgacttggcattcacttttgcgccacgcttgtgctttctttccttcaaaccgaaggtacatttgtaatttatctttgtctacataagtaatataaatagaaatatattaataataatgtttacagaaatcatactaccttctgcattttgtttgaatattcttcattttttattatgatcatgaaggtacgtccttcatgaccttcgtcctaaattcattatatccgaagggaaataatgattaggaggacgaagggcttttgatatttaacattttatgttgccttgttcttgattcatagcatttgagaacaagtctccaacagtatttaagttattttttcaagataaaacttctattttttaagcatgtttgatttttatgatttttgtatataatatattttgggatttataggaatttgggattataaattatatgaaacaagttgtacattttgttgttatcatttggtctatagcatgccttgctatttataggaagcttggggtcttgatctatagcaatctggtctgtggcatgccttgctatttataggaagcttggggtcttgatctatagcaatctgaactgtgacttataaatgaaactatatcatatgtcgatgatggccctgaagcatctatagcaaataggcccgctgcatctcttagtccctgttgtttttgaagaaggttaaccctactcttccaaaaaagcatataagtttcatacagcctttgaaatagtgtcttctcttctacatggatccattgtttttccttggcaataataatgattgtgcattcattgtgtaaccatgtgaactaaacatgtatcaattggtgttacttgtagagtgcaaagtggaagca

SEQ ID NO: 785 - DNA, 64710 bp, Zea mays
  Intron number 1 from transcript GRMZM2G350537_T01 (locus G RMZM2G350537) derived from phytozome v7.0 (chr-ID 8; pos 5 8659508 to 58724217)
tacaaataccatttgtgggttacctctggtgtgtttaggtattcctcatattcctgacatttttttctgtctttaaatgtcatatcactattaaaaaattgatttttgttgtctaaaataccacaactacttttctaggtgcgagctacaatcaaagttaaggcattagtcatcatttgcttcacctcttctggataggctgcaaggtatatactacacaaatgaatattgtttgtacatacatatgctatgcaatttgctagtgataggataaaccaaactgcattgtactgatcacatgggacgacacatgctaaaattaatataacagtaacttgctcggaccagctgaatgatgatttatatgagccatcaacttaatgatgattaaccttgattgcaccagctgaagttggtgcataagttttgcctcgcactaatttgatgtacttttttctagggtgttatggacaaagaaagcttgtacattaaaacaggaggacacaagaagctggagtggttgtctgaaggcttttgaactgcttgaagcattagtgtagctttggtgattttgtgactgatcagctctggagcagctagagtgatgtagttgtgggcttttgaactgcttcaagctagagtgatgtcgctgtggtgcttttgtgactgatcatctctgcagcttttggaatgatctaactagctatctgtaaatgatctagttgtgaatgatattataattgtgatgcttttgtgaatatataattgtggtgcttttgtgtttatgtgatggatctatgactgtggtatactgattaattgtctatgtctttatgatttgtgtataaaaatctgtgatttgtggtgcttaattaaatgtatattattattaataacaactgtaaaaagggcgactttctgttggttgctaaatgtatagtttaacgacttacggttggttgctaaatatatagtacagcaacccacggttggtcgctaaatatacaatattagcaacggacggtcggtcgttaaaaagatgtcggtcgctaaagcctttagcgacggcacttacagcgaccatctttataggtcgctaaaagtttttagcgaccaaccgtaggtcgctgaaggccgttttagcaaccaaccataggtcgctgtaagtgaaccgtcgtgtagtgataggtgtcgttctcggttgcaactcgatggcgaattcgatgtcccggtctggtggcattcctggcaattcatcaggaaaaacatctgccatactcacagaccactggaatcttcttcacaggtgactccagcatagcaaaagcacatgattgagtataatcttggttggggagatataacaccaggtcttcggaggtaggggaacgaatctccagagctctggcagctacatccaatactatcgatcatgagtcatccagtcggctccgagaatgatgtccataccctctaatcccaaaattaggagtgtggttttgaagattttacttcccattgagataggcacacttcgaattaattgattggtgtcacacccggttccagagggtagaaccgagcgcatatcatatgtgtgccaagatccatttccacacatatgttaacgtcacaagtgtaatatatcaaaagacaatgcaataagggcgtaaagagagtagaatactttattacatcatctgaatcattgtatctttaacaagtatcacatcaaagtaaagcggaatttaaataacaggggcaatctcccacaggaagatgaccggcgcatcgttagacttagaattcgttgttgttaaaatctccatcaaagtctccagcatcacccactaatcaaaatattagcaagggtgagctcacttatggtcggggctcagcatgtgggggaaaaattaatgcaggtataacaagctgaggctaaggttgagcagcaagcattttagttggtcaacattttattaacaacacttgtcttactaataagtgtgaatcccaagtatcccatttaagcaaaggaatatgagtatatcaaaaacacttaagtgaaaccacttaagcaaacaattggcagatcatcggatctcaatttatttccatcttcaagttcaattatcatgtgaggagtccaggtcgctcttaaccgggagcacggctgatatatcagttttacactctgcagaggtggtacaactttacccacaagccatgtatcccatctagcccaggttgatcggacccttaaacactgctgaggtgaatggctagggatccattatgaggctttcacaaaatgcactttaatacgaagcaaacccgctaaggtttctaaagccgatggtggtgaccccctgggtgaggtaccttagccaagaatacgtccccatgataacgtgggctgccaacaccaccgctccctctcttgcccatatttcaagtaaggttgccaggcaccaagcatataaagctaattaccaaagccagagccatgatagcactcgtggttgcactgttatcttgggtggtcactccaaattccaattaatatgaaataatgttgttttaaccatcaggataatgtcataattgccaatttaatataattttaatgagtgacataaaagttattaagtggagcggtagcacaaatttgcaaagcttaataatttccccagggtaaacaaggaatacagttggtaaatctaggaaatccttaattaggtaaaaacccatcaagttatgcagtatatcaaaaagtaaacattattatatgcattgattgggcacaaatagagtatgcagagggagaatccacttgccttgctcaaaagcatcttgcgggtcgtcctcgaacgtattcaaatcctctaccacaaaatcagcttctaataacgtcgtacgttgccatacaaagagaaaacatacaccaataaataaacatgcaccattacataaacatacaccattacatacacattaacacattgcacttatcacaccttaaatacgtcataaacgcgaaaatacttattaattcaattatagctattattgtgagtcataaatgatgaatttatgagtgggtgcaataaatacagttttaactagtattaatatattttaacatcatcaatgacaataaatggtagttatcgtcttgaataataataaataaataaatagcttttatcctttttatttctaactcgaattattgagtatagccaaaatgaatttaatattctaaaaatccctatgaattactaattgaactttttataacacaagcgaggttattttgataagtacttcgcttactctaaaatttaagtgctatacttgcgaacatgtttatttggctagtaaaaaactattttccatactaccggtgatattttctcctttctttctaaaagaaaatattaataaaataataagtgataaatcatctaaaaatcatatattgtttatatgacatgagttctatactattttctaaatccattaaaatgaacctatgactataattctccatataatttctaaagttcattgtgaccaaatttaactactaaatttttgtcatatttctctctaatcctgaaatcatcgcatcaactaacatgaacaatcacgacactaataatcgcatgaatctaccaaaaattcgatagcgcacatacacatgtatttcggatcacatatgttcatattacaacagaataaacatataattcatcaattgaatcaaaagtattttgaaaatacacaaattaatttggggttgtcttccaccttggttctcgcttgcgcagggagatggaggtggctcgtcaaggaggccggtcaagcaagagaagcgggaaggggtcctcgacgtcgggcaggctccagcggggtgagctccggtgaactccggcgaactccggcgacgaacggcaaactccggcgacgagcagtgcactagtgatggcgagcgaggagagctagagagaggtgcgagctcgggtaggggaggaagagaggagagggcgtcagtacccttttatagagagagggaggggagatggagggtcggccagggaggtcatgggggcgccggcgggtcttcatggaggacttcaatggtgctgtcatttcctgctcgtaatggggagaggaggaatgaggggaggaataaacggacgccttgaacttcattaatgcggtggcgaacggacggcgggcttggtcgcgcggctgtgcatggcgcgggtcggactcggcctgggctcgctcggtgcgtggcggctcttggtcggctgctcgtctcggggcagggctcggccgaggtcgcgtctggtgcgcggggaggccggggcagggcgcggctgcgcaagttgcaggcgcaggggccacaggcgtcgcggcctaggaggcggtcgggccttggcgcgagcgtgagagagaccaaagagaggggagagagatgagaggagagagagataggatagaggaggggatcacagcagggagcggcggcggctgggaactgggatctaggcgcgcgcgtagggtagaatagatgggcccctagtgggccgattagggttagaaaatttgttttttttaaattgcaaaactgaatttctaaaggctcaaaatgttttttttaaattgcaaaactgaatttctaaaggctcaaaaaattcctaaaaaatcaccaaagttatttataaacacaatatttatttttagactaataatttttatattatttaattattatattatttactaggattttcttttaaaaagaattgatattaaacatctgatactcaatcatgcgcatacaaagaaaaatgatcaaaatgcaaataaataattaaacacttaaaaaattattaccatatttaacataataacctaaatttattatttgtagttgatggcttttatggtgttacaaacctaccccttaaaagaatctcgtcctcaagattaagaaacttccgagaataactgagggaattctgctctgagttcatcttctctttcccaagtggcctcatcttccgaatgatgactccactgaaccttgcacatgttaatgactttactccgtgtaattctgcgagatgtttccagaattctggccgggtactccgaataagtcaaatcctcattgatatccagttcttccatgggtaactgttcctccggtactcttaagcacttcttaagttgtacgtgaaatacgtgatgcacatccgataatctatcgggtagctctaattggtaggctacttcaccttttctttccaaaatcttgaatgggccaatatagcgaggagataattttcccttaactttaaaccttttcattcctctcatcggtgaaactttaaggtagacaaagtctcctacttcgaacatcaactctcttctattatcagcatagcttttctgtcttgactgtgctgtcttcaaattttctctgataatctccacttgcttttccgcctcttggagaatttctggaccaaatacttgactttttcgagtctgattccaataaagcggtgttttacactttcgtccgtaaagtgcctcaaatggtgccatttttagacttgcctaatagctgttgttatacgagaattctgcataaggcaaacttttatcccagcttctaccatgctttagagcacaagctcttagcatatcttccagcacttggtttgtcctttctgtttgcccatttgtttgcagatggtaagctgaactaaagtttagcttggtatccatagactcataaagtcttttccaaaagcgcgaggtaaactgggttcctcgatctgatacgatcttcttcggtactccatgtagacaaacaatcctcgacatgtataactctgctaactgggctcctgagtaagttgtcttcacaggtataaagtgtgccactttagtcaacctgtctactatgaccttgaatcatagccatcccgagtatggggtagtccaactatgaaatccataccaatttcttcccatttccattccggtaccttgagaggttgtagcaatcctgctggtctttggtgttcggctttaactcgctgacacacgtcacataatgcaacatgagtaccaacatctcttttcaattcgtaccaccaatacttttccttaagatcctggtacatctttgtactaccagggtgaatagagtaagctgaatcatgagcttctctcaaaataagttgacgcaggtgttcgatttctggtacgcagattctcttcttaaaccatactgtgccttgatcatcttctgtgaaatctggggctttacccatcccaatcaaagttttaatttccttgattttctcatcggactcttgtcctttatgaatctcttcttccaaagtagattcgacttccataaccgttgcttctacattattgagcataccaaggttgagttgttccatttcccagcacaattcctgtgacatcaaatgagtagtaatgttgttcacttgacccttacggctcaaagcatcagctactacatttgctttttcagggtgatattgtatttccaaatcatagtccttgatcaactcaagccatcttctctgtctgaggttgagttctttctgagtgaatatatatttcaagcttttgtgatcggtgaagattttgcacttgtttccaatcatatagtgcctccaaatcttcaaagcatgcactacggcagctagttccaaatcatgcgtaggataattcttctcatgctttctcaactgtcttgaggcataagctatcgcttttccttcttgcattagcacacatccaagtccaaggtgtgatgcatcgcaatacacaacaaatcccttgtgaatgtctggcattaccaatattggtgcagtggttaaccttttcttgagttcttcaaaacaatgctgacaagcttcatcccacttgaactctttacctttctccagtagagaggtaagaggtttcactaacttggaaaaaccttcaataaatcttctatagtatcctgtcaatccaagaaaacttcagatcttggacgcatcctttggttgcttccaatttagtatctcacttatctttcctgggtccactttaattccaccatcgataacgatatgtcctaggaaagcaacttcctttagccaaaagtcacacttcgagaacttcgcatatagttggttgtcacggagcttttgtaggactagccttagatgatcttcatgtgtttcttcatttggagaatatatcagtatgtcgtcaatgaatacgaccacaaactgatccagatattccatgaatactttattcatcaagttcataaagtatgctggtgcattagtcagtccgaacgacatgaccaaaaactcatataatccatatcttgtcgtgaaggatgtcttgggtatatcttttgctcgaatctttaactgatgatatcccaatcttagatctatcttcgagaatatcttagctcccttcatctgatcaaataaatcttcaatccgaggtagtgggtatttattcttgatggttacttcattcaaacttctataatcaacgcacattctcctcgaaccatccttcttgttcacaaatagcactggggctccccaaggggatgaacttgggcgaatgaaacctttttctagtaattcttctatttgtttcttcagttctactaaatccttgacatccattctataaggtcttttcgagataggtgcgattctgggtaataattcaatagaaaactctatatcacggtcaggtggcatacctggtaattcctccagaaatacgtctgggtactcacacactaccttgatattttccaagaacttttcttccaagtgattgatcactgtcttcccttttgcatctgttgacttgtttatgctaacttggattctttcaccttgaggacttgtcaacataattgttccgttggcacactgtatcactccatcacaacttttcaaccagttgcatccaagaatcacatcaataccgttggatcctaggaccactgggttgactgaaaaatctattccttgaatcttgagattaacatgggggcatgagtgtgtggcctttatgtcacctcccggtgaactaatgtgtaaaatcttcttaagagggtactttggtatgttatgcttttccacaaatgactcagttataaatgaatgcgatgctccagagtcaaataaaactgatgcaggtatggagttaacaaggaacataccatacactatgtcggcatcctcaggtactgattctgcggtgacatgattgacccttcctctactctgattctgcggagtcttgttctgagcagatccacgagcgggggtgttctggtcattcctctgattattgcttttctgaggtgtctgctggttgcgccttgggcagttgttagcatagtggtccagctcgccgcacttgaaacagccattgggttggactggtgtgttgttgcttctggcctgcgtgttaacggtgccaccttgatgattctgtgaactcccaccagacctctggttggtctgagagttgctcctttgctggttctggctttgattatttctctggccttgctgtctagagcgttgcatctgataattgtctccaccctggtttccagagtggaactacgaaccttgagcgttgtttgggcgggtgttcctgctggactgaccttgaaacttctttttatggtcagataattcccttcttttactttcaaggccaattgccttgttcagcagtgtctagaaattgggaaaagtatgactctgaagttgatagttcagaggtccaataatcgatccttccaagaaacgctcttggcgcttctcatctgtgtccacttcttccggtgcgtagcgtgaaagctgagtgaagcgatcacgatactcactgaccgtcatattcccttgagtaaaggaaagaaattccttcttctttagcttcataattcccgaagaaatgtgatgagcgcggaagttcgcttggaactcctgccaggttatagtatcctcgttggggtgtgccgctgtgaaggcatcccaccagtcagacgtggctccctcgagtcttcccgaggcgtacaagaccttctcccggtcattgcactgggtgatgtcaatcttctttccaatgaccttgagccagtcatcggcatccaaaggatcaaccgcatgagagaatgttggcgggtgatgactcataaaatcctgatgcttatctctagccgggggtgcatactgctattgctgctgatgctgttgattcagctggttctgctgaatctgctgaacagttgcagtgagtccttgtagtaactgcatctgggcggcgatgaactgttccatgttggggttcggtggtggtggaatttgttgaccacgctgattcctgttgttgttgggtcctgaacgggcgttcaccatctgattggttagatagtgaaatccttagaagagtgaggagtagaaaatattctagaggggaatatcttaagtttaaaatttttatatgctcttatggccatcattccataagaccattgcactcaagcaaaaatccaaatgaaacattgcaaacatcaccatcacattgttgttattattatagtataacactgttttattgtctactgcgtctagcttatttcaataaactatcctatcaacctaaaagagtatggtgatagactcaggggttccataacaaagccttccaaaaagaatgaggataaggcagagaaagacgtttcttcttcatcatccaaaggtggggtagagggtgttggccgatcttcagcaacataagtaatacttttgtaagcagttcttctgatagcaaccttccgatagatgagagaaaatcagactagaagagttgattataaaggagttgagtttggagataaaataagttttttatggaggaaaataactcaagttttgcaagactaactaggctttccatttctaactagtctaacgacctagggtcaacatagctctgataccacttctgtcacacccggttccagggggtagaatcgagcgcatatcatatgtgtgccaagatccatttccacacatatgttgacgtcacaagtgtaatatattaaaagacaatgcaataagggcgtaaagagagtagaatactttattacattatctgaatcattgtatctttaacaagtatcacatcaaagtaaagtggaatttaaataacaggggcaatctcccgcaggaagatgaccggcgcatcgttagacttagaattcgtcgtcgttaaaatcaccatcaaagtctccaacatcaccctctgatcaaaatattagcaagggtgagctcacttatggtcggggctcagcaagtgggggggaaattaatgcaggtataacaggtgaggctaaggttgagcagtaagcattttagttggtcaacattttattaacaacatatgtcttactaataagtgtgaatcccaagtatcccatttaagcaaaggaatatgagtatatcaaaaacacttaagtgaaaccacttaagcaaacaattggcagatcatcagatctcaatttatttccatcttcaagttcaattatcatgtgaggagtccaggtcgctcttaaccgggagcacgactaatatatcagttttacactcttcagaggtggtacaactttacccacaagccatgtatcccatctagcccgggttgatcggacccttaaacactgccgaggtgaatggctagggatccattatgaggctttcacaaaatgcacttaatacgaagcaacccgctaaggtttctaaagtcgatggtggtgaccccctaggtgaggtaccttagccaagaatacgtccccatgataacgtgggctgccaacaccaccgctccccctcttgcccatatttcaggtaaggttgccaggcactaagcatataaagctaattaccaaagccagagccatgatagcacccgtggttgcactgttatcctgggtggtcactccatgttccaattaatatgaaataatgttgttttaaccatcgggttaatgtcataattgccaatttcattatcggaacattaatatcaatttaatgagtgacataaaagttattaagtggagcggtagcacaaatttgcaaagcttaataatttccccagggtaaacaaggaatacagttggtaaatctaggaaatccttaattaggtaaaaacccatcaagttatgcggtatatcaaaaagtaaacattattatatgcattgattgggcacaaatagagtatgcagagggtgaatccacttgccttgctcaaaagcgtcttgcgggtcgtcctcaaacgtattcgaatcctctaccacaaaatcagcttctaataacgtcgtatgttgccatacaaagagaaaacatacaccaataaataaacatgcaccattacataaacatacaccattacatacacattaacacatcgcacttatcacaccgtaaatacgtcctaaacgcaaaaatacttattaattcaattatagctattattgtgagtaataaattatgaatttatgagtgggtgcaataaatacagttttaactagtattaatatattttaacatcatcaatgacaataaatggtagttatcgtctttaatactaataaataaattaatagcttttattctttttatttctaactcgaattattgagtatagccaaaatgaatttaatattctaaaaatccctataaattactaattgaactttttataacacaagcgaggttattttgataagtacttcgcttactctaaaatttaagtgatatacttgcgaacatgtgtatttggctagtaaaaatccattttccatactaccggtgatattttctcctttctttctaaaagaaaatattaataaaataatcagtgataaatcatctaaaatcatatattgtttatatgacatgagttctatactatattctaaatccattaaaatgaacatatgactataattctctatataatttctaaagttcattgtgaccaaatttaactactaaattttcgtcatatttctctctaatctagaaatcatcgcatcgactaacatgaacaatcacgacactaataatcgcatgaatctaccaaaaattcgatagcgcacatacacatgtatttcggatcacatatgttcatattacaacagaataaacatacaattcatcaattgaatcaaaagtattttgaaaatacacaaattaatttggggttgtcttccaccttggttctcgcttgcgcagggagatggaggtggctcggcaaggaggccggtcgagcaagagaagcaggcaggggtcctcgacgtagggcgggctccgggggggtgagctccggtgaactccggcgaactccggcgacgaacggcaaactctagggacgagcagtgcactagcgatggcgagcgaggagagctagagagatgtgcgagctcgggtagtggaggaagagaggagagggtgtcggttcccttttatagagagaggaaggggagatggagggtcggccagggaggtcatgggggcgccaccgggtcttcatggaggactttaatggtgctgtcgtttcctgctcgtaatggggagaggaggaatgaggggaggaataaacggacgccttgaacttcattaatgcggtggcgaacggacggcgagcttggtcacgcggctgtgcatggcgcgggtcggactcggtctgggctcgctcggtgcgcggcggctcttggtcggttgctcgtctcggggcagggctcggccggggtcgcgtctggtgcgtggggaggccggggcagggcgcggctgtgtgagttgcagacgcaggggccacgggcgtcgtggcctgggaggcggtcgggccttggcgcgagcgtgagagagaggagagagaggggagagagatgagaggagagagagataggatagaggagggggtcacagcagggagtggcggtggctgggaactgggagccaggcgcgcgcgtagggtagaatagataggcccctagtgggccggttagggttaggaaatttgttttttttaattgcaaaactgaatttctagaggctcaaaaatttcctaaaaattcaccaaagttatttataaatacaatatttatttttagactaataatttttatattatttaattattatattatttactaggattttcttttaaaaagaattgatattaaacatctgatactcaatcatgcgcatacaaagaaaaatgatcaaaatacaaataaataattatacacttaaaaaaatgattaccatatttaatataataacctaaatttattatttgttgttgatggctttatggtgttacaattggttgcaattttacccccaggagtggctatcatgaatgacccttttgtatgatagaaaggcagttgacatttagcactgaacttctggctaatgaaactatgagatgcaccagaatcaaacagaattaatgtagggtgattaaaaactaaaaagataccagtcatgataggggctctctcaggtaactcctctagagtagtgaagttgagtttcccctgcctgacttgcaccttctgctttcttcccttgtcttgatttggtgctggcatctgcctctgctgatttcttgggcaattcttggcatagtggcccacattgccacaagtgaagcacttgttcccattgccctggtggaactactgctgctgtggaggctgattgttccttggagtgggagctggaaaacgagtgggtgccggctgctgctgctgaggtggcctgatcacccatctacctgcctgctgctgaaatcccctgctcttattgtgagaaacaatcctgaacctctaggcctaagcggatggtgctgccattggtgtctttctcttcttctctgcccggtgagctacaatacagtcctcctgggagatggacaggttgaccaactcattgaagctattagcccggacagtgttgagatgttcccgcagcttggtattgagacctctgcagaagcggcctctcttcttctcgtcggaatcagcatgataacatgcgtactggcacaggtcgttgaaggcctgagcgtactgcaataccgtgcgggttcccttattgagtgccagaaactcgttcagcttgtgatcaagaattccagctgggatgtggtgccctctgaatgcagtcttaaattcctcccaagacacttcatgaccatcaggtagcatagcacggaagtggtcccaccaagtccgagcagggccacgaagctgctgcgcggtgaagcgagccttggtattatcagggcagtctcccgcgaggaggggaaacttggattccacgactcgtagccacacgtcggcatccaacgggtcctctaccttggtgaacaagggcgactgcgtactcaggaactcctggtaggtagccgctgtcggaggtcgctgcagctggcctccaccatactgtagagggtggggctagcgctgcaagagctgtcgcagaatctcgttctattgggccatcagctcctgcactgtgagagctggaggaggtggcgggggaacttgctcgtttttcccgcgacgctgcctagctgccatctgaaaacagagattgtcaccattgttatctcaattcacaagttcgaatgacatgctattatctcatatggaaagaaattgccataatcataacattaagttcgaatgaagataacatggttacaaacatcccacagatctcaaaagttcacaaggattacatcatttaggggaaaatactcgtaagcctagtccaaaatctgccatcactaagcttgcgtaggtttctgtccgcctaaagcgtcaaagcgactgatcaaccctgagcggtggaagcgacactggatgcgggtgaagggggcattgcggaggtagtcccattggcaccaggggctggtcctaactcctcaggagcctcttctccctcgcttccggcctcattggcctccatctctaagtggtgcatgtacaggtggtcattagcttctttgagttcccgctgcacatcatagagctggttttccaagacatcaatagtgttgtctcggatctccacctgctgctccaaggtggtgatgcgctggctcagcctttccacctgtaggtccttctccaccaactcggaggacaagtcgaccacaaagtcttctcggctgtcgagggtgagcttggtggtctgagcgatgttagcaagatgtgccatagcgtcgctttgcagggcctgaaggcggtacagcgcactcatgcactgaaaagtgaccctcccaaccaagtcgggatacatcgcccacacatccttcacatggctcgcacggttgcaccacatggggtcatccttcttctcagcagggaagagtcccaaggggtgcatcaccatctccaggggatggtagccatagaaggtcgtcagagtcttcatggttgctgcttcagtggtgtcgtctgtcctgaatccaatcatctcggagtcaagagaacgccaacccggctgaaggggatgagcctccaaagtcagccagactcggcaacgtggtacccgatgctcctcgtacagctgcaccgtgtacaaagggggcgtagggtaaccaggggagttaagcacttcccacaagatggaaggaaagccatcgtgagaaaggaagttagagctaaaacgagtgtctcctccactggcgggggtgggtgaggtcatctgcggaagggtatcagatgtaaagattatggtggaaggaagaaaataaaagagcctggatggttaaaaaggaagagggttagctcaaatttttacttctttagttcctagtccttttagtttttataatgcatgcatgctgaaaataatgtctcctctccgaaataaagggtgctcctagggcatcctttaaaaagttaaggactggcccacagggcctacttacttagccacatattttccctctattcctaaggcctttcgtcctaggtcttgctgtctagtcctgacgagtcatactagtttctaagcaagttttagatttttgaaaattggtattcatggtttattgtgtttctccgtggtggtatttgctccaataccagctgtggcagaaccgcccgaattattctagcttaagtgtccaaatcacgcctcagaggctgtaacacacttaaatcggaataacccgtcagtccctcagatctagtatgataaagccacttaaccaggatcaaataccacaaactcactcgaaggtgagtcatagaagaaatacaataaaacaggaaaaactcattttaaagtactggagttattacataaatcagagttttccatgtagctagtaaaagttcacaaaataaaatgcagcggataatcgatatcgtcggtagcgaggaattaggcaaggcctagcccactactcctcctgctcctctcctgctggagcagcatcccactcgaccgtccaacccggtggcagggttgtaggccaagtcacaccaacaaccataccctgaagcgtacctgcaaaaattatgccacaagcaaggctgagtatactaatactcagctagacatactcggtgtgaggaaactactcctctacctctagaccaggtcgctgtttggctgaggggtttggtttgccaaaaacactagctgagtctaaaatcaaattttagcctttcaatttctagcatcattatcttagctaagtttgctccttctaagcatacatggtaccaagcatttagtacaaacaacaagttgtctcatgtaaacctcatttcacttcttactcaatgtagtacaaggggtcaagcagtctcgttagctgcgagaagcatatggttcgaatcgagtttttatccttgcaaggtaaacctaaacacacgacatgacagagcactccgtccccgcacacgtcaaccgtccccatcgattccccgttcgcggccagggctcaccgccttggcatacaatgctccactgaccccggctccgccgtgcaatgactgcacttgtacccaccatagctagcatggtgacccagtctcaggacaagtgaggggaaaagtttgcgcctggcttcactcaggtactaggtttaccggttaccatatttcccgacatgtgtttagtacgtttaaacgcttgactcaggtatccacacattaatccttagttccttttcccatctcatggacaaggcatcctccctagatccaagtccatggaccatcatagatcccgttatcaagatgaatacaatcaattcctgacctcgcgcgagtgctagaaaaattactcgacttctaccgagatcctgatttagcatagcagctactcggcctagcatactagtatccatcttagaaagagttcatgcaactaggggtttcaagcaactcctacacttaagtgcacattacaaacctacaaacaataagtgtagtaaagtagcatatatagatacggttatgcataaaactggggcttgccttcaaatgctggggctgcggggagatcctcgatggcagtttcgggagcttgctcctggtcttcctcgtggacagctccttgcttggggatgagcacgtactctccgttagcgatattgcaatctaatgaatgcaatgagtaagagaaatgcatggtatgatatgcaatttagcaattaaactttgatgctgaatgatcaaattagtgaggtagagcttaatcatgctactgaagattcttgtggtaaacttagcaaattagggtcaagcttggttaagctaagtggtaagtttattttggtgttccactgatttctttttgatgtcttagtgagagtttattaaggtttctagctaaatcattagagtgagatttattattccctcttttccttcttaattcttttatgcttttaaggtgggtttgaactataagatagcttaataaatttccaaaaattctgcaaaaattatagtggcttcttactagtgtataagtctctgtctcaaaatttggtgtttaaaaagtgaggggttttctctgcataaaattatcaaatattagggcagagggggtgtttcgaactacaaccttcttttgaagtttggtaactttttgcttaagggaaagggggtaggaatgatttggattaaatggccttgttcatgaagtattggcaatgggtattattttgcagctttaaaattgggttttgcatttttatctggtggcctacttcattacctatctggtaaaaatttatttgcccattattgcactctttttggttttctcatgatttaattgaaatatggctcaatatcaagttctatttgtttaccctacttaaaaatgatgggaatgggtgtttatcatttttgtagtggtatcttagtggttacaagtccactagatttttcttaacaattttgaaattgttttcataattctaataattgtttttctagtttgattaatgcttaataaaacatttcacctagaatctgctctggactaggggtccctttatttttcctaggttctctattaccttagtagactaggaaaaataattacattcactgttcattattttctaatacctttctgattttcttaagttttgggcaaaatggcttttaatagataaccctactcaaatcttcaatactggggtgttcaatatttttaaacagtttccaaatggggtttgaacttctacaaatctttcttaagttcagcacataagcataactaattttcttcctttttaaaaggtttggtcagtttctttaattaatttcaaactctaaaaatcaaaacagaaagcatagggttcagtatttttatgtgatagttcataacattttgaatccagcaaaattggtttggctaaatttggttgaatataactcaagatataaattttctaagttctctgctgaatttaaaaagtttaactagaaatggttaaaggaaaaacagttttgcgctggggtccctggcgaaaggttttgaatgaattacagataggtcctcggtgcactattcatatgagtctaggactctgcagaaaaccccttagggttttgcaaaatcgaacccgcggtccttccctaatggaacagtggtcgcggaggaagaaaggggcggaggggcttaccggcgacgagactgctccagtgaggtggtcgaggatgtaggggaggtcctgagggtcacggcgatgtggggtcgccgtcaggaatggtcggagtcggtcggtccacgtgcacaggcggagatgctcgtcggcggcgaggaatccggcctgcacacggcgtgattgtccaagtgaacctgtcagagagcttcgccagaggtcaagaaggatagtggtgcaaggaattagagaatggctcaccggattgcttggtccacgcgcggcggcgggcgatcgaagtccggcgagggtgaattcgcctctccggtgaggcaatgcctcggctcaagcttgaagaagcttcatggcttcacggggaagcggtccaggggttggggcgaggctggggttcaacagagggggttggccacaacggccgtgcacgggcagagatggcgggcagtggtgcttgctttccacggcgaactctggtgatctctggctcgggcgaggctctgggtgcgcgagtgcaaacagctaagacctctggaggcatttataggcgagggcgaggtgcaggcgcgcggggcggggcgaccacgcgcggggcgtgcgctgccgcggccggtccgcgctcgaccggcctgacacggcgtcaagctcgtggctctttgcttctgcccgagttcaaacgctcataggttggagatcttcgcgtatttgggcatgattactgcacaagatttgctctcccaacagagctttttcgtttatgtgtggaagtcgagcgatttggggctgtgtacagagagttgtcgtgtcgctaattaaggtggcagtgtcacaaggtcgagtcccgaggtaaatccatgtcaagatcgtgtaaaacggtggagagaggtttccaaactttgtcatggtgtgttccaggaaatttggcgccactttgctatttggacttgtttgatttaagttttgaaaaacagagaacgtggttgatctttggaaaggggctgaaattcagatttctgaatttctgaatttttcccaagtgcattattttaggggttgatttagggattctgaaaaattcaaatggcaaaactttcttactatattttgttggttatttagtgtactaaaactttgttatttggtttttaccaaaatttgtatttttctcccaaatcttttcccaaatgccctttatgggcttaaatggtccactaagattaattagggtttgagagttcttcctaccttgaggttcatgacatgattaaggagaatttcttaagataaaaagacttactgcaacctttgttattaatttttttcttttttttgtttgatgatcaaccctttatttggtttacatgtgataatggtttgggttagcttaaggaagaaaccctaggtgacactggggtgtcacatgaattacctctgatcgaaggttgccaagagctatcgtgcaactttcatcctccgcattcttttgagccctcagggcgttgctcagaattaagccctgtgaaaaagaaggataaaggtttagcatgagaataaaaactttattccaaaattcttaaactttaagtttacaatttctgtaccttcaggctgttgtatgcaaggctgtccgcgaggtcatcctttgacatggcggaaaggccaacctcgagctttggaaatcccatacttttagccatctcccgacagacagatatctctttgttgtccgggagacagtataagaaatcatcttcatctgtaccattgaacaccaaggccccttttgggtatttcagtttttgggcataacgataggcctctgcaatctctccttcagataacctttttcccgaagcatgatgaataataaaattaagattctcggatagagcttcgggactaggagatttagcttcttcggcaatttctttctccatagttattccaaaccctagagattcttgttcagccccttcctcatttgcagcgggcttcatctcaatagacagtgaaggcacaacttcggcttcaacctcagccgtagcaacttcagcaactttcttcgcgggagcaggagttaacgcttttgtggtttctatgacagcgtctagcacgctggccattctccttctcttgggagttgtggcaggagcctttgtcaccttcggcaattctgcctctaccggtgggctcagaatttttggcagcatcactgttttttccaactctggctctttggccacaccatctttggcttcggctgacccgactataggcatctttggcactgcagtcgatccttcggcttcagcctcggcgggagcagcttgtttcgattcgacagtggaggaggtcccttcaccaaattcaggcactacggtcatttcaatatatcgtggccggtgggtcaaaaccttcattttcttgccctttggcaaagcagtggtggccgaagcggcaatttttctcttttttccttaccttcgcaatgggtagcagtaatcagggtatatgaagccaattgcatcaaaaaccctgttcaatcttttgttgccccaacccccgaagaccgaggataaagcatcatcttcggctctggtatatgccccaagtaactcgtcgctaatagcctcaatacttttcagccaattgtcatttggctcataaaaccggtccctgaatctgaaggtatatttcagtcgaactaatccacctttggtggacctggcagcagtatccttcggcatctcctagctatctacaagtggccacactctataggctatgtgctcttggattatgtctcttgtgccaatgaaagcacaaacattgctgaaagccttttggcatgcttcagcatcattttcaatcaccaccctcggtcttcgaaggccgaagcgagaccagatggggcgctggataatttccgtaatgtcctccctctcaatcagattattcttaacataaaaccattcctccatccaggctccaggccacctcttctgaaatgttggaactgggtagcttgcattgggacaagcaataaatccataacaactgaagttgttgtgatagtgttctttgccagtagccttcgtctcgtacaaaagttcgtgcatattgcagaaacactttgcgcttggttccagcccttggcttcttacagcccaaacaaacatccccatcctaattatagcttcgagagtaatttgatgaagaaagatctggaatatcttcaacacttcaaccagaaatttgctcaatgggaaccgaaggcctgccttcaaaaagcttcgataaacaacaacttcattttcttcaagggcaggggtggtgctgtctcctccaaccctcacaatagacatgtcacgaaagtatcttcctctcatggtgtcaatatgactttgcttaatggtcgactttccgaagatggtacggcttggtcgccagggccagtcctcagaatcttcatccccactttccacatcataatcaccgctgtcgtcggaatcttcggacaaatccgccattatttcctttgtgatcttttctttgtttgtctttaccatagatttgtaaaacccagcaagaaaagggtccgcgactttcttctcctcatacagcttctcctcctcagatatcttcttctcctcagacatcttcttctcctcagtcatcttctcttcaaacatgaagcaagcacttgtctttaagccgaagctcgaaaatcaggcaagggctgataagcaagagttaaaaatttgagaaaataacgcaagcagcacaaatggcgtaccaaatgctgcgctgtgggtttctatttatactcctagtgctttgcaacttggcgggccccatttgccattgactttcgctattctagcgaagggaaggtgttttttcggaccttcggcttaaggccttcattcacgtcgcactctgaattcgttgttacaagaacaaattaatactgcgaggggctactgttgggggccttcatcttccgaaggtcctcaaaaacacgactaacatgctttccaagtataatatactatcacaggaaccttcggctttgagatgaaggtgtgcacgacatgaagggcgtgatctgggagaaggatgaatcaattccgaagctacaagtgaagaagctttggcttagcgcaagggcggtgatggagaatgcaaccgacctaaaggggaatatactgccaagtcctcgactgattactccttagtcagtagtaggtgtcaaggacatggatgtaattttacccaggctgtgtcctgtgcctataaatagatgaacagtaacaccatactgttcacgctgacctgtattcacttgcatgtcacacttagatccttaccttctgtcaagccgaaggtacaaatgtaactcaatatcgttaatatttactcatggttattcaataagaatataaataatctgatgatttaagatgattattcgtattctttatatgtaactcatgcttctgctttccattacatattgaaatgatgacggtatgcccttcacgaccttcgtctgaagatcattatatcctgagggagataatgcttcggaggacgtaggcctttaaccattaacatttgtgttgccttgttcttaactcatagcatttgagaacaaatccccaacacctactaatgctaattctttaccttatggtggtacatgctaagatgcacgtctatattatttcaatcaatcaaagaagttctttgatttttgcgaacagaggagcattcagatcaagtatgcatcagtggcacacccaagagctaatgggcaggtggaaagagccaatgggatgatacttgatgcactcaggaaaaaggtgttcgacaagagtgaaaagcttgcaggaaaatggatcagagagcaaccatatgtagtctagagcctgcgaacctagccaagtcgggccttacatggaaacaccctattcttcatggtatatgggtcggaggtagtattaccaccggatttgatctttcgagcacccaggctaacatttaaaagcatagctgaagctaaagcaaccagactagaagatgttgatatattagaggaagaacgtgtgaatgttgtcattcaatcggctagataccagcaaaccctgaggtgctaccacgacaaagcagtacagcatcgatcattcgtagtaggagacctagtcctccactgagtgttgacgggagaaggacgacacaaattgtcacctcgatggaaagggccattcatcattgcagaggttacccggccaggatcctactgacttacccaaatggacggaaccgaagtggggaattcgtggaatattgaacacctgaggaaattctatgcgtagcaatacctcaaaattctggtgggcaagctgtactttgtaagcaaaaggtctcgttatcaataaagcttctgtgttttaccgcatacaaactctcaagtaggtctgagtcggaaacgatttaaaaccggcacagcgtacctgcacgggtacatgactaagggtgattactataccctactaacggaggaattagcttaagtcggagacatcttaagtcggtgcaacatgctcacgcttacataacttagggttaatactataccctactaacggagcaatcagcttaagtcagagacgtcttaagtcggtgcgacatgctcacgcttacataacttagggtgattactataccctaataacagagcaatcggcttaagtcggagatgtcttaagtcggtatgacatgctcacgcttacatgacttagggtgattactataccctactaacagagcaatcggcttaagtcggagacgcctgaagacggtacgacatgctcacgcttacatgacttagggtgtcactataccctactaatggagcaatcagcttaagtcggatacaccttaaggcggtgtgacatgctcacgcttacatgacttagggttattaatataccctcctaatggagcaatcggcttaagtcggagaagccttaagatggtgcgacatgctcatgcttacatgacttagggtgattagtataccctactaacggagcaatcagcttaagtcggagacaccttaagactgtacaacatgctcacgcttacataatttagggtgattactataccctactatcggagcaattggcttaagtcggagacgtcttaagtcggtgcgacatgctcactcttacataatttagggtgattactataccctactaacagagtaatcgacttaagtcggagacgtcttaagtcggtgtgacatgctcacacttacacaatttagggtgactactataccataccagcagagcaattggcttaagtcggaaacgctttaagtcggtacgatatgctcacaatcgcatactcgagggtgatcacaacaccctattaacggaataatcgacttaagtcggcatagcgtgctcgtgcatacatgaactctatgatgcaccacctcgacgagaaatgccaactcgatgaaaagtattttctgttcgaacgaatcaaaatttgtcttcattacacaatcactgtgcaggagcattctcgcaggggaccttgccagcaggatcaccagagggagaaggcttactcacaccagcggacgcggcaagaacgtcagcaacaatgttgtcaggcaccacaacacgaggtcttttcatcaggattcaaccagcacgaacagctttggccatcgctttatcacacatcggtttcatgataccatggtcatgctctaagaccttaatgtggcgacgagcaatttccaactcctgcgaaacaagtttcttcgaggcgcgcaactatttgatgatggaatcttttgaagacagtaacttactaagacgcgacacttcagtctagaaagccctcagctcaaccctatgatggtcaagctctgacatagtaaagcgatgactcctctccaaagtagtaagggaactgctggcatcacgatatagtttatccaaactgtcacgggaatcaagaagtcttcgcatctcctcctacaggcaagaagagcactaaacatcgaattaaaggcgcgaaacaaaggcatcaggaacagttagaaaaatctacctcataggctctcttatctgaatcaagctgagcgttcaaggaagagttcagggtttgggcgccatccaagaaagcagaaacctggttcagatcggcttgactctgagcatacctctcctcagcatcagagcatcgtcgagtcatagctggtaaagaaataaggaaagagtacaggaggtaaaatgagagaagcaatgagcagcaaagaaagctatcaatccactaaccgatgttcgaggcttttagatcatctatttgcctctaaagtaggagaggattccactgcagcaaggataaaccggatcgggaataggggcatcgcaagacctcaactgggccgacacacagctcataacattctgcgaacacaagaattagcaaaggagcctatttgtcaacacaagtaaagcagggcaaaggtcagctcacctgaaggttagaaaggaaaaagggaaatcccagagccggaggcatcgacatgctatcggacggtggagtactaactgaagcaatattgagggcagactcgaaccccaaaggaggattagagctcacgcccaaggcaacactcagagagacctcagctctgacagtaggcagtggattcccagcattcgggtcattgacctctaaaatgaccggaccaacaagagcagtaggaggacttgtcaacactggttcctcagactgaaccggtggcaatccagcatgaacgtccatggaagcaaccaaggaggagccgagcttggcacccttgggggttgggttatcctcagcagcaccctcgggggctgggttatcctcagtgacacctttaggggctgaagcaccctcaatcgtacccacaggagctgagaaactctggcatgcaacattaggaaccgaggtgttctcatgaattaggccgccctcaaaggtcgaagaagcatgggaaatcgtccgggttatttcttgctcgactggattactagctgagggggtgtcatctgggacctctgtacggatgacagcaccctcattttcgggaagcttcgataaaagatcttcagggacaatctcctccagtgcatggtcaatggcagacatcgtcaacctctggagactaaccagtcctgagagagcttgaattaggacgtcatcgctgtttttgctacgacaattctcatgaatcaaagggggacttcctcttcatcctcttcgtcctcgtcagtcacacgtccaccgactctggtgccaccacaattctcaatatcatcctcgaggttggcgctcgccgagccatgaccgaggactggggtggtagagtcagtccccagctccaagccagacgaacgtcgaagtcttttctttcttttcttcccctcggcagacacagctggatgacctgttcgacgcaatcttttgcgacaaacacttccaggactgcaaggtccttcatccttgccgaagacgtgcctagctgcagtgctcgccgactcagtacgggtagagtaagacgacttgcccgctagcatactaagaacagcattcacctcagcctcatcagtagtcgtttgcatctagaaatgggtttgtctttcttctttagggaaatttcggtatggagcaatgaaggcctcaatatcttctgaagagggtcacactctatggcctggactaccgtcttggacaggcaggttggatatgaacatggaaatgggcctctatgggggaagattctaggcagaatacaaaaagggagcaccagcgttcgaaaccttgcctctcaacatcgaatcaactcgactcaacacgtcctcctcagaaattcgcttgttggtaattcgagtagggtcattaacaccagtgtacagataggcagggtacactctatccttcaaaggttgaatgttcttgaaaacaaagtcaacaacaacagctttagcagtcaagcctctgtccttcaacgcacatatctctgcaagtagcaccctgcactcagcaagctctgaatctgtggggactcctgcccagctaggcattcggacatcgggttgtgtccctgatcgagcaggaagtgacttgttatgattttccatagtaaaccactcgaagtgccatcccttaatactgtatttcaagggatgtcgatatactcagctttcctgcctcggcgaagttccaagctagcacctccaacaagctgatgctgccctccagccatcccgggccaacaatggtaaaggtacttccaaagcccaaagtgtggaataattccaaggaaagcttcgcaaagatgaacaaacacagcaatttgaagcacagaattgggatttagatgagtgaggttcagagagtaaaaatcaagaagaccgcgaaagaagggagaaactggcagggcagtccccggatgagaataagcatgaagataaccgcctcatgagtatcctcagttgggacagtaactccgcgctagatccgccaagaacataattccttcggcggtagaacaccaatctcaacaagatgcagaaggtcagccttagaaacaacagaaacatggttaccagcgaaagggagttagctgttgggatcgattgcagggatgtataggatagtggcactctgttttcttttcctcgccatcgtgatttttcaaacgacgcgaacggaatcaggaactcaaaaagctagagagcggtggaggaaaaaacaagaactagggttcagagctcaagaagacgtcaacagaagtgtgggttggcatgttaagtcgggcgcaaagtggcaggacgatagctcgggagaagtcttggtcgcagcaaagcaagcatcactcgggcattacctctaaaatgctagtgaaccgtcagatacaagagcacaatacgtagcaacagattggcacaaaagcagggttttcattcacaggggggagatcattacaaaattgagaccgactcatcattagtcggcctcccacccctcgatcattgcattacattacattactacttagactacactacactactagctaaactacattattctactactaactacaactacgctatactaatatttaagctggcagcattatgccaccagccttgccgtcgtcgccgtcgtcgcctttgccgtcgtcgcccttgccgtcgtcacccttgccgtcgctgtcgtcgccgccgccttcgacatcgtcgtggtcgccgctgccctcgccaccgtagtcgccactacccttgtcgtcgtcatagtcgctgctactgtcgccctcgtcgtcactccactccttggagtcagaggagtcctccacctcctccgaggatgcctccttcgagtcgtctgacccaccaagcctggcgctcgatggatcgccagtacgcccgcgctgcaacggacaaccccatggagttgtccgagtcctcggaagacgccatgggggacgcgggagcaggcgagcgatcgtactcggaggaaacttcctccgagtactttgagtccccgaagtcctccgagggaggactcagggggcgcttgcgcttcccatcagcacggtgacgccctctcttgcccttcttgctccctgccatggtccacacagagggaggagaagtaaagaagaaggagaagacaagtgatcaagagcgagtaaagaaagcagctgaggcgggcgggctatttaaagaggccggggggcgaacgtccacttcctgccccgctcaccgaacagtcataagaattcaataagcaatttaaatcgcctgaaaatgagttaggtgtctggcgtcgtttcgtgtaacacggcaccagatggaatcaaaagtcaaccgttcaggcaaagcattacacctttccgtcatgtcaagttactacttcaggacaacgcgatagacaccttttgcggggcaaacaccctttgggcacacccattgggtgtaccgccgattttctgaagcagcgatacctgcaacatatacgcaatgaatataccgcaacaaaggggaagattggctgaaatgggaggatgtccaactgcggttaccaaagcacaagtccaatcaatagaagcattaaagtacgcggctgtgtggtgtccatccaagggcttcctgttttgaccgactggatttccaactcatcaccgatcaaattgattccagaccaaacaagatacagacaaatgtcgtcaccaggttattctaaaaaatcattttgaaaaaagcataagatgaagacatttgaattgattattcaaaatcaactcaaagctcgggggctacacccattggcttcggtgcacccaacggattcacaataatttgaagccaagtgttgatttcaaaagcataagatgaagacctttgaattgattatttcaaaatcaactcaaagcttgggggctacacccattgagtgcacctccggtgcacccaacagattcacaatactttcaagtcaagtgctaatttcaaaagcataagatgaagacctttgaactgattatttcaaaatcaactcaaagctcggggcacacccattgggtgcacctccggtgcacccaacggactcacaatactttgaggccaagtgctggtttctaaagcataacatgaagacgtttgaattgattttctcaaaatcaactcaaagctcgggggctacacccaatgggtgcaccatcggtgcacccaacggaggtataaacatttcaagtcatactatgagcccacaagcagggaccaggaacctttgaatcgattatttcaaaatcaactcaaagattgggggcttatgggggacagatatccctcgggtccactcgggggtgaaacctctgcttggggccacataccagtcgccccacaggaacgccatgtcgtgtgccgggcaaagagaacgacggaaatgggccgacccaggaggcgatgggcccacgcccggattactcgtggcttgggcgtgattccgttgaagttgttcgctttttccgcgcccgacatcctcaaacgccggagatggctcgaagcggaggcgtcgttcatcaccttacttttcgtgtccatctaggactgttggtttatacatggatcctattctagactagaatagaacacgtatctacgattttcccatccaagtaagccatggtgaaggaaggttaaatcttgtctaatatatataaacttgacctttgttggttcatacataccttttcattcctgctagtaaggcattccaggtttgatcagtgcttttctcgaggaagatcaagatccagctctaaccatagtcggttctgccggtttaagtttcagggcaagtttcttgtgtgggtggatacggtgtgtatataaccaagggggatccccatcactatcatctcaatttagcacctcaccacttgtaaacacctcccacatacaaagtcatcacaggaagtagggtattacgcttctcaaacagcccgaacctgctgaaactcgctcgactctcttttttctcgtgcccccggcacgaatcatcgagttacaatccacgacatcatcctacccaaaagcaccataagggtacctcggatgtgcggtcggacactaaacgccgatatatatgagtttagatcgtatttgaataagtatcacatttatgtaatgcaatagatagaaacgggtagcaatgcacgatttatgtttaaaaacgatttatgtttaaaaccgagttgagatgcactgcgaagacgagagattgaaatgttgatggccctgtccgaaaacatcccagtgagactggccgacgtgtccaagctataagcctataatgacagtggcagcttcaaaatttatatacgtattgtttcttccctttgaactataaattgatcaactagtcttcattaaagaaaaaacatagaaaggacagttgaccaactgtacgacatacacgtcatacggggcgatcaagtccaaaagttaagaacgggcgagacaaggaagcgtacatggatggtcctgcctagcttagcaactggagaagaattggtgaacatctcgtaaggattttctagcagtgttatttactcgcaaaatacacagcaaaagaaaaaaccgctgcataagcataatttgattccagtactaatattccctactcacaatcattcaggtcatcaaatcagtgaggccatgttcgtttctccaggaatggttgatcaaaacttatataaattagaaaagcaatgtgactcagaatcgttctgggtcaccaaccgaacggcccctccgcgatctggcagctgatggccgtcgtctacaaaactatgctaggcagctcttgtgggccaaccaaacgactgttggccaccgtcggctcaccgtcactctccacccggacagggcggagcagcatcccctgttagccgcaccagatagctttgccctgccggctgcgaactcacgtatctcgtcgcagcagttgccgttgttacatcactggcaccgacggatggatggtccggctcgctggtcgaccgaagattgttcaatgcactcaggtccaggttggggaagacggagcaccggcaccgtgggcacttgacattcagccggagccactggtcgatgcactccacatggaaattgtgcgcgcatgggagcccacggacctgcatggacatggattgggttggacccatgaggataagtaactattaagagcctgtttgaatccattagtgctaatagttagcatagcaggtggagatccaaatagctaatagacccgctaactattagcaagtaaaggtgctcataattagtttcttagtagctgctaatagttcatatatatctccaactactatccatatacatagatttgattatacatctacatatagcgtatatctaataagtgcctagaaaagctaaaacagcttgcaatttggagtagagggaatattttttagctgttagttaacaactaaggccctgtttggaattgtagtatttttgcagttttaaaataatattatggtatttgatgatactatatagtattggagctcaaaatgtgtttcgtttgtacagtcaaaactcagttttaaatatcatggtttacccaaaactgtggtatttttggagttttcgaaactccactcaggacctcagttttcttctcttctctctacatatactttgtttttccaatagaaccaaacaaatctcggttttaagcaatactgtagttttactgtggtaaatcaataccgtagtatttatgtcaggtacaattgtaaactatggtatcttaaaactacagtatttcaaaactgcattcccaaacaggccgtaacagctttccaaaatgatacaaattatgttattttgtcttttctaggcacatagttttgctatacatagtatatacaaaaactatgtacctagaaaagccaagacaacttataatctataactgaggaaaactattagggcttgtttggatgtatggggattggaggagattgaggggcatataatcccttggtagtcaaataatacacatgcatccaaacaggccattttagcgacttgtaatctcgaactgagtaaaactattagcactagtggatgcaaacagggcctaaattagttgatgtcggaataaggctataggagttcattttacctcattgccaacatgaaattcttcaaggcagatgagacactcactacagtccgttggaacagctttcagcctgaacttcggaagctcttgaatcagtgcctcaactgcttctctctgcacaaaaaggatccctcaaaattctatgtataatccattgaaggaaattttggctctaacataatgctagtataaaatagagcagatataagatgaggtaaatgctactctaatggtgttctataactgtaattacaagagtttcagtttatttcccaaggaatatcgaagagcagtagaaaattcaaacattcaagcaaggagcttcagcattgatcttctagccttgaatgaaggtcctaatcaggtaccctgaacaatagtaaatgttccacgaatctctagcccctgaacgtttcggtcactttgtagaattaccacattgctctttttccatagaattacacaattatcatttctaacagccaagaaaatgcataaatttgctcatctagaccaaactgacaattaaaaagtcatgccaccattgaatcttacagctaagcttatatggaaatactttagccataaagtataaacttgtgcaagagcacctgaattagttcacctgagctgcagttaaataaagaccaggatgatatgcagtatcttggcccactctcatttccaggccaacagcctcaaatgcccagtcaggaacacggatcatatcaaccaaaacctgcacaaacaccgaaatatatgacaccagaaacacactcaattatgaaacatgtacatccaaccaaaatacacaatattgcgcaagaaaacagcagcctagccgtggaagaaaagcaaagcaacacttccgtgcaccaatagccaaaaaaattcttgcatttgtacatttaacccccaataaatttcatataactatgttatgtagctatactctgaataaagttgaagtatgatgtgcactaaaatattatagggtgtataagttggacttgatatgaaaaccaatgttttcaagtcgtccgattaatcgcgactaattacccaagtcggtttgtaccaatcgcgattaattgtcaagtcgtctgactaatcgtgattaatcacccaagtctctagaactgactaatcgcgattaattgtcaaatcgcgactattaagtagctagaactgttggaatataataagtgaattgtccgtctcttcctatcagcttaagattttgggttgaactgatttgcaacttaatatggtatcaaagccagatgtatgagtttgaatgatggttagtgcaattaaaaaaaattgttcatcgctcctgttccacgtctgcgacccaaaagaggctcgacgtgaagggggtgttggaatataatataatgaatataatataagtgaattgtccgcatcttcctatcaacttaagctttttggttgaactggttggtgcatgcaacttaataagaatgacaagcaaatcgtccgacttgaaaactttgatgaaaacactaccaaaaatgcacgaaaaggtttgatactctccaactgcagtgccaacaacttattttatattgaaacacgatgcatgggaaatagagaaaaagcattaccccatattcagagactggaattccttgttgtgctctctgttgaagtgcaatccttcggtttaaccactacaaaataatacacataaattgcatctacccaaataatcctcagaatgatcaaagccacagtaataaaaaaagtcaataatgcctccatatgagacacttctgcaggaacatgcctttatcatatgtcacattgcatagttaaatgtatagtgaaaactcaaacaaataaacaacatctatagtatttttgttagtatgtgagataccggcatctacgtgttggacccaagtgactacgcatataaagcatatcattttcgttgagtagaagataatcatcaatatagcaagattaaagattttacacaacagtggatcggtaacatctcatccttctagtgaatccaatgaaattgtatcattgtcagcacaaagttcatctaagcacggttgtgcccattagtatagagtcatcagtgtgccttatgagtattgtttggaatgaggcatggtctagtcctaccctgtccccccatcccacccccttgtaaaaagaccctagttgtaaaggctaagggccagtgcataaaccaaatcatgatcataatcgaagtatggtgtgtcctatgtatgatcagagaccgtagatgtgtagagctcgtcaagacgattttgatcgactgatagattgtctcgtttgggtttcgaatcaatattcaaagtaccaaacgatttgggtcgttgatggttagggttgggggacttttcttattttctttctccctaagtcgctgccctctggttttcttccgtgagttcttcacacacgaagcacattgtgcctcttcctctttcacgtaactaagggggaagtcgtccccccttctatgaagtatctgagttttgaagttaacttgctcatattctgttgaagatgatatttgttatggatatagagttattctctatatatcataaattggttgtgaattccatttctgttggaagaaagatgatataccattgaagtatgcggtttattacattcattatatgcattctattctccattgttattgcattgaagttatgtcatgacctatggtcttgaccgtaccagtattgtatttgtgtgatcctgaagctatgtcaagccttatgactggaccgtagtggtactacatatacgtgatgaagttattgcattgaagttatgtcatgtcctatgtcttgaccataccggtacagcatcttcatgacatggctccataaattactaggtatgaaggtagaagaaagcatacatcacactcatatgcattcatgtggggcatttaaagcggatatgtatttgtggttgtgaagttctaccttttatcatgcaatgtagtgtatatgcttataatttagttgtagtctaattcaatggaagaggtgcattatatatttaattattctgtaagtacgaagtttacatgacttgttaaccaattacttgttgagatgttttcatctcaccattgctttatttattgttttcgggtgtatgatgtttgtctttgggaaaatagtagcacatttacacttcaccgtttaaacaatttatgttaataattcaactattttcatgataataataactttttggtggatgtttaagcttggcatgatggtatagtttatttacttttaatatggtcgatttatatttataatagtagctgagttggttcggtggtctgagtagcactcctcaggtcctgggttcgactccccgtgagagcgaatttcaggctgaggttaatgaagtcacccattggttcccttggtcggcatgggcgaactggcctatggtgggtgggcccatgtgtaaggggttgttcgtgtgggttgggcctcaaagcacgggtcgtgggaaaccctaatctgataccatgtaagattgtgtaatgcttgatgtattgcatagagaaggggtacatatatagagacacatcaccgggcggtggtcgacgggatggtccagtacgccggccgactctacttaccgtcatcttcaccgctgcttcaggagctgctggcagctatgcacgccgacggccacgagggggtccagcgcacgctgcatcgccttcgatgtaacaccccaggtgttacttagggtttttcactcaagactatacaagtaagcccatcatcacatgtgacttaagttgggaaaaagtacaccaaatttggagctcaagatcctaagtaagtgcaacctatcttagatgtcatgccttggcttaccatgtacattgaagggggagaaattgcccaaaaccctaatgcaccccctgtgcataattggagtactataggtaagtatgaccaaaaagttatgaaaaccacttgatcatgtcttggggcctaattatacaagatgtagtgcacttaataccgtacaagtaatagtaagaaagtaaccccaaaaagatttcaaaaaaaccccaaaagattcacaaaagggttgaacataagagaaaaatcagaattcttctaagtccaaaaccaccccctttccaaagatcaaacatgttcaccttgatcccaaactccacttggcccaattgacaaagtggcgccaaaatacctctagaacaccctggaaaagtttgaacccaaccctaagtcgtttgacacgacttggcacaagatttgtctcggtttggacagctaggacaaagacaacttcccacccccatatctctctaacccgaccacatctccccttggaactcacatgaactaggtagccctaggtgaagggaagagatctctcacaggtcttagggcaagattcgtacgttttggccgctcagcagagggtagaacaagaacagaaacaaagagccacatgttcgacgcgctctgagctcgccagagcacgcccgacgcacgcccccgcgtgccccgcgtcgcgccaaagccgagccggcgccgttgcccgcgcccgcgcctataaagcccccagagacgtcgaccatactcctccgcgcgcgctcgacctcaccggagccagagatcaccggcgtttgccctgcaaacggcgtgcccgcggccacccgaacccccgccaccgtagaccggccagcagagcctctctcagccgcgtccgaccctcggagtagaccgtgcatgcctcggtgaagctccccgagcaaggaattggaccttgcctcgccagagaagccagtccacgatcgccgggcttcacccgatcgccggtgaacgtagaccggttaagtctctgcaccattttccgattccctgcgcgcatagcctctacgtcatcccttggagctcatcgtgccgtttaattgaactagatcgccgtgttaggccggagcactcgtcgccgacgagttcacccgcctgcgcacgtggacccgtcgattccggccaccaccgcgtcgagcgtacctcgctgtgaccgccaggacctcccgaagcgaacccgcccctcgccagacctctctcgccgtcggtaaaccgcgccgcccttttcctttccgcggttactgtttacataaggggaaggacctcgggagagaagaagaaaaggccagggggttttgtgcgctgtcagtgactcaggggaatagtggcgcaggggtataactgaaggaattagtttagtaagaacccagggtcttcgatgcaaagtagttttccaggaaaccttttaaatattctgatttaaatccaaacataacttgaaaaattcataacttcagtttggtttacccaaatcgagtcaaaccaattttgccagatcctaaataatgtaaactacttaggaaaaatataaaacccctaagtgttacagaaaactttaaagttttgatttaaatgattaactggtcaaaagctaaaagaaataaggaaaaatagctacactattagactggggttaagaaaatttagagaaatacttaatcacttcctaacctatttaaaaaataataaacccctctgtataccaagttaaggtagagttaaccatttaaatcatttttagcctttttagcctaaagttagagaaaatattaaaggtagtttaatataagaaccagggagcacccacatttttgttagctcccttattcagtgtaattcactagaaaatttattatacccttgtttagtgcaaaagaaaggagataccttttaatttagaaaaaccaggaaaccctagaaaaataaccctgaggagaaaacacctcaaaccttgggataactaatgttttgttattatgaacataggaaaaatatgaaatctgttgtttgatatttttcaaataacaagttagttataaacacctttctggcataaaactttagaaattcacaactaaatatccagtaggcctttttctgtgatttttaagacagaggcctaatatcacctatgtatttggaaaaaaaataaaatttggtacagaaaccttacttaaatcacagctatagtgtaaagtgcccttttaaaacttgtttttgttaattttgcacaagtaatatcttaatcagtatccacctcaaatttataggacagactgcagtgacaaatagtaacccactgtaatttttatagaatttttgagaaaagttaaatcactgttatagttcaaacctaccccaaaagcataaatagaaaaagaaaaagaaattaatagtggagactaatgttaccctaactaaaccagcaaaaccccttgagtacccactaaaacatttaaggggcattccaagtctccatccattatgcttaggcaagaaactcaaacctaaattgataggcctaaaaccctaagagcctcttataacaagaaaaccctaaatgattaaccaacttagtttttctacactaaggcataattgctattaaattctacatatcatagcatgcatatatcttattcattgcattcgatagattgcaacctcgcggacggagagtacatcctcgtgccagagcaaggagttgctcaggaggtagccccggatccagcaccagagcctaccccagaggatctgcctgtcccagctttggaaggcaagccccggttttatgcataacctgttctatacgatattttactacacttaatgtttgtaggcttgtattgtgcacttaagtgtaggagttgattgaaaccctagttgcatgaactcaggaatccttgttgagatggatactagtatgctaggtcgagtagctgctttattaattagggatctcggtagaagtcgagtgatttttctagcactcgcgcgaggtcaagaattggttgtatccattttgatatcgtaatgataatagtctgtggacaacggtccatggggatgcgttgtctacgagacgggaattggaataaggattaaggtgtggtatcgtgtgtcaagcgtttgaatgtactaagcacatgccgagaaatatggtaaatcggtaagcctagtacctgagtgaacctggcagtggacatatcccctcacgcgacctgagacgtggtctcccattccagttatggtgggtgcaagtgcggtcactgcacgacggcagtcgaggtcagtgaggcattgcacgccaaggtggtgagccctgatctgctgacggggaatcgatggggacggttgatgtgtgtggggacggagtgcctcgccacgtcgtgtgtttaggtttaccttgcaaggtttaaaaactcgattcgaattgtctgcttctcgcagctaatgagactacttgatccatgctgctacattgagtaacaagtgaaaatgagatgacttggcaaaagttgttgattgctaaatgtttgataccatgtatgattagataggtatacatttagtcttaagagagtcacactaaaacttgacaaagctaaaacttgattaataaactcagctagtgcttttggcaaccaaacccctcagccaaacagctgcatgtctagaggtagaggagtagactcctcacaccgggtaagtctagctgagtattagtatactcagccttgcttgtggcataattttacaggttctctggaggacatggttgttggagtgacttggtcgtccatcttgccaccgggctggacagtcgagtgggaccctacctcggctgaggaggagcatgaggagtgatgggacaggcttccccatctctctgtttatttaccgttagttttattccgctgcattccgaacaatgatgactacttttgcaaaaactccgatgataatgtaataaatttaatactccttaatgtatggttttatgttttattgtatttgctctgtgtctcaccatcgagtgagtacgtggtacttgatcctgttggtggcctcgtcggactagatccgagggattgacgggttattcccatttaagtgtggtctagcctctaaggcgggacttaggcacttaagttggaataattcgggcggttccgccacattcgacgcgactttcactttcctaacatgaagcaggtggtccaagactatgtgcaggagtgccctacctgccagtgccacaagtccgagcacctacacccggccgggctcctacttccccttccgatccggcagggagtttggacagacgtggcgttggacttcgtcgaagccctgccccgagtacgtggcaagtccgtcatcttgacagtggtggacaggttcagcaagtactgtcattttattccgctggcacacccatattcagcggagtccgtggctcaggcgttcttcgcggaaattgtccgcctccatggggtgtcgcagtccatggtgtcggaccgcgacatcgtgttcacctccaagttctggcgggagctcatgcgactgatggggaccaacctccacatgacatcggccttccaccctcagtcggacggccaatccgagtcggcgaacagagtcatcaccatgtacttgcggtgcctcacgggtgatcgaccacgacaatggctgcagtggcttccgtgggcaaaatacttcttcaacaccgcctaccagagctccatctgtgacacgccattccggatcgtctacggacgcgatcctccatccatccggtcctatgagccgggggacacacgtgttgctgttgtggccaggaccatggaggaacgcgaggagttcctcgctgatgtgcgccatcgtctggagcaggctcaggtcgtccaaaaaagtactatgaccagggacatcgcgccgtcacatatcaggtgggcgagtgggtgctgctctgcctccgccaccggtcccctgcctccctcaacaccgacaccaccagcaagctaaagcctcggttctatgggccgtaccgagtgttggagatcatcaacgaggtcgctatccgcctaaagctaccggcacgagcccgtatccacgatgtatttcacgtgggcgtcctcaagaagtaccagggcactcctccacaagctacgccaccactgcccccgcttcaccatggagccgtcaccttggagccagcccgagccgtcaagaacaggatcgcccgcggagtgcgccaggtactcattcagtggaaggaccagtccccagcatcagcgacttgggaggatgtcgacaccttcagcgccaagttccccacattccagctcgaggacgagctgcctctcgaggagaggagagatgtcatgtacgggcacacgtacgccaggcgcagaagagcccgcgacgtgcgtcgtgcggctgagcgagcagcaagggcgcaggagcagcaggcaatcagctaggatggaaagtacctagctgattaatcatttccccattttgaattggctaggatagaaagtatctagctgattaatcatttccctattttgaattggctaagatagaaagtatctagctgattagtcatttccctattttgaattggctaggatagaaagtatctagctgattagtcattccctattttgattagtcctacaatcaaggaggaccttctacattttgtaaggccaccggctatataacctagtgcggaggcaccttgaggggaaagcaatatcattactttccagccctctctctatctatccctctaagccggcgactggaggattcacccagtcgacgttgaagctcggcgtgggggcataaccctgccggcaaccacgggccaaggctatgaactacgtagccggggtcctcctgccttgggcactaacgcccttgacatcttcttagtcaaaatccatggggcggtctttccccccaccatcgaagttttttatattggttatgcttttgttaggttcaataactgatttatacatcgtaatactctcgatatgcttaagttacaaaggagatagtgttaaaaaattatatgttttctttctgctagttcttaatgtttgttagtttgggagtttaataacatcctggaacttctggaggttatagggtgttacagatagggaggaagatttcctcttccaatctcccctatgaatacaacccatgggccaaaggcaagggggatctcacaccaaaccctagagcatatctcgtctctctcctgtttggggtagtcccaagtccgaacactaatactaagattgtctttctcattggtgattgagttattcttctatttacaacctgctctagcctcaacttttgaggaattgcagttgcttctgtaatcatgatggttttattatcttttttctgttaatacaaagaggtacgttgtacacagcttctgtgttctaagaactaatactatgattgaagcatataacattcatgcctaaattagcttaatatttttctagatggtgaacagacggaagctagcataatattattctaaatgtgaaagctagttggatccaaaagcttggctctactaacagccccaattccggggatttagtgggtagttatttttatccttttatggatccattctttgtgacggcccctgggcactccactggtgagaagactgaaggagaggcagacgcggatgctgaagaagatgaggccgaggcgtgagtgtgtcatgtaagtagagggactctaactctcatcaagaggatgacactatgagttggggcaattttctgtttatttcctcaaacactacacaatgccatacccttagaggggttgaggacacatatttatagccctaggggctgcactaccacaccttctcacacacactacacaacaggattgtcctctagatgcttctagatgctaaagagactacagaggacagtcaaaagcgactgttgtcctctagatgctaaagcgactacagaggacagtcaaaaagcgactgttgtcctctagatgctaaagagactacagaggacaatcaagttgttctctagatgctaaaggactacagaggacagtcaaaagcaggttgtcctctagatgctcaagacttattccatcattctccccctaagccttgggcgtcgtcttgtgagaaagttgggtcatcccggacctggagcaaagctcaacaaacttgatcttcccaaggggcttggtgagcaggtctgcaagctgatccttggtgttgatgtagcgcgccttgatgctcccttctgccaagcagtctcggatgaagtggtatctcagccggatgtgcttgctccgttcatggaacacggggttcttggccaatgccagagcggactggctgtccaccctgagttccaccgctccagtgtctctcccgaggagatcaccgagcagttgagccagccagagagcctgagtcgaagcagtggacgccgctatgtactcggcctcgcagctggacatggccaccacctgctgcttgaccgactgccagctgatggggcacttgccgaggaagaagaggatcccgcttgtgctcttgctggtgtcgatgtcgccggtgtggtcgctatcgctgtacccgacaaggtgtgcctccccagggcacctcgggtagtagagaccgtggtcgagagtccccgcaacatagcggatgatcctcttcacagcctgctcatgctccgtcgtcggtcgctgcagaaaccgactaacgtagccgacggagtatgccaagtcaggccgtgtgtggacgaggtagcgaaggctccccacaagacgctggtactgtgtagcgtccacctcctccgtcgtgctgtcgcgactcagcttcagcctctcctccatcggagtgagagctgggttgcagtcggtgagcccagccagctcaacaatgcgcttggcgtaggcggtctggcgaagtgtgatcccggagtccccttggtgcacctcaatccccaggtagaaggagaggtgccccaggtcactcatttggaaggtggccttcatctcttccttgaacgctgccacctctgcatccttggcgccggtgatcaccaagtcgtcgacgtagacacccaccagcagagcattttctccattgccccgctgatagatggctgcctcgtgcgggcttggcgtgaaacccattcctttgagcgtggaatccagcttggcattccacgccctcggtacctgtcgcaggccatagagagccttgcgcaggcgcaacaccttgccctccttgccagggatcgcaaaacctggcggctggtgtacgtagacctcctcctttaagtagccgttgagaaacgccgacttgacgtccatgtgatgaacgtgccagccctgctgggctgacagcgcaaggaggagtcgcatggattccatccgtgccacgggggcgaaagcatcgtccaagtcgatcccctcctgctgtaggaaaccgtgtgccaccaagcgagccttgtgcttgacgatggcgccggcttcatccctcttcagtttgaacacccatttaagggtgatcgcgcgatgaccatgagggagatcagcgagctcccaggtgcggttcgtctcaaccgcgtccatctccgactgcatcgcggcacgccaagccgcatgtttctcggcctccgcgaaagaccgaggctcaccatcgtcgcatgcaagatgcaactctcctgccagaatgcgagatgcagggcctggcaccgacgggtcgatgagaaggccctccacccttcgataccgcaacggctcgccgtcgtagcacgtgtcgacgcgctcctcgtcgcgggacagaggggtcatgagctccactgggtcgtgctcgacacgagctggtgtcggagaggacgttcccggagagggtaccgttggtgctggagtacgtggtggcgaagagctcgctgtagccagagtcgtggctggagtgcgtggtggtgaagagatcgttgtagcaggagctggagagtttggcgctggagtcggtggagacttgggggctggggtagacctgctcggagaagagttgcctactcccccagctccctcaatgtggacgtactcgatggtgaagtcgtacgtcggagtcgtgtcgtcgtccaccgccttgtcccacgcccatcctcgcccttcgtcgaacactacgtcgtgcgccgtgcgcacacgctgtgttcttgggtcaaggatgcggtaggccttcgagccctccgcgtagccaatgaacacccccggggtgctcctatcatcgagcttgctgatgtggccaagctccttggtgaacgcgaggcaaccgaagacccgtaggtgagagaccgccggcttgcgcccatgccaagcctcgtacggtgtcatcccgttgagagccttggtgggcgagcggttgaggatgtaaaccgctgtcaccaccgcctctccccagaagacagctagcattcctctctgcttgaggagagctcgagccatccccacaaccgtctggttgcgccgctcgacgacgccgttctgctgcgggctgtacggcgcagagtagtggcgctgaacgccctcatccgcgcagtacgacgcgaactcagccgccgtgaattcgccgtcgttgtcggtgcgcagcacgcgcagcttgcggccgcactccgcctccgcagggacttgcacacgcctgatggcgttcgcagcctctcccttactgccaaggatcatcacccacatgtagcgggagagatcgtcgacgagcagcaagaagtagcgtcgtcctcctggtgtggctggtgtcactgggccacacaagtccccatgcacgagctcgagcctctccttggctcggaagctcgactgttggggaaaggggagccgtctctgctttgtcaacacgcagacatcgcagaattgctccacatggtcaaggcacggcaggcctcgtaccatctccttggcactgagccgcttcagggcctcgaagttaaggtgcccgaagcgctcgtgccactgccatgccccgtcgtctcgacgagcagcaaggcagcaaggttgtgccaccttcacattgaggatgtatagccgatttgaactcctgtgtaccttggcaagaaggcgacgagagggatcccagatcctcatgactccgtgctcgacctccatgcgcgaaccgttctcatccagctgtcccaagctgatgatagagttcctcaacgcggggatgtagtagactccggtgagcagcctgtgctcaccagacgcggcggtgaagacgactgagccggcgcccttgatctctacgccggaggcgtccccaaacttgacggagcctcggacgctagagtcaagctcggtgaagaactcccgtcggccggtcatgtgatgagtggcgccggtgtcgaggcaccatcctttgatcatgtccttgttagagccgtcgccgaggaaagtgcgtgctttcgactcatcaaggtggaggagtgctgctgcggccggtgccgctggagatggctcgatgcttgcatatgccaggagcagggcctcctcctccgcctccgcctgtgcgacgttggcctggccacgccgtggctgccgacaatccctggcccagtggccaagcttgccgcagttgtggcagccgtcgtctcgtgccggcttcttgttgccgacggcgccgccttgggcacctccacgtgcaccaccctcagcatgtcctcgcgccccggcctgggcgcctccacgcgccttgcgcggcttgccgcgtttgcggcctcgtgtcgaggaggagtcccccttcttcttgtcaccctggcaggcctcccactgctcccgagtgagatgtagcttcccgccgatagtgataggcccagagagagcctgtggttcgtcgccgtcgaccaccttgaggcgaccaatcgcctcttcgatcgtcatcgtggagaggtctagcagagactcgatcgagcgagcaatctgcctgtacttctcggggatgcaacggaagagcttctccacagctctctcctcatcgtaggtgtcgtcgccgaactacaccatcttctgcaacagagtgttgaggcggagagcaaagtcatcaacatcctcacctggcttgaaggccaggttctcccactccttgcgaagtgcctgcagtgtggtcttgcgggcacgatcgctgccgatgcgggtcgcagcgatggcgtcccaggcctccttggcagtccgcttctgggaaagcgaaaactgcatctcgagcgggactgcagcaatgagggcatccagcgcccgccgatcctcctggtagtcgacgtcgtcgtaacgaactgcttcccacatgtggcgaacctggagccgtaccctcatcaccgcggctcactcgacgtagttggtcttggtgagggtaggccacccaccgccgggaccgatgtccctgacaatggcctgggccatgcggcgaccatggtaccgatccggggagggagaaccgcgccgcctgtagaggccgcgatctccgtcgactcgatcgctgccgccgggagcaccgccggcgcgtctactcccgtctgggctgccgccgcgtgcgcccccgcctggagcgccgtcagcgcgtcggcgcctatccgggctgccgccacgcgcgcccccatggggatgcgcggctgcccactgtgtcgcctgctctcgcgctgcttccctggccagcctgagctcttcgtcggtgttgtcgtcgacagaagcagagctgccagctctactgccgcgcagaacctcgagctctgttgccgccgcacgtgcagcatccgtcgcctccgctgcttctacttccgctctcgccgctgccagttccgccgccgccaaccgtgctgccctcgccgctgtcgctgctgctgctcgctcgcgttcttgtgccgcggcgacctcggcctcctgctggcgccgcgcactcgaagtggtcgagcgtagggacatggtgggctagtgaggggtcgctgcgtgtggaagaggctgtctcagacgaaaggctgctcgtctgagcaggggaggaaggaacagttggagctcttgctgccgactgagtgtggggagaggctcgggaaggagatgagcacgagatgtttaggctgcaggatagtttggctctgataccaattgtaagtagagggactctaactctcatcaagaggatgacactatgagttggggcaattttctgtttatttcctcaaacactacacaatgtcatacccttagaggggttgaggacacatatttatatccctaggggctgcactaccacaccttctcacacacactacacaacaggattgtcctctagatgctaaagagactacagaggacagtcaaaagcgactgttgtcctctagatgctaaagcggctacagaggacagtcaaaaagcgacagttgtcctctagatgctaaagagactacagaggacagtcaagttgttctctagatgctaaaggactacagaggacagtcaaaagcaggctgtcctctagatgctcaagacttattccatcatgtcatcagtgttatgtggtgtgtgggccgaactgtggggcgtctatggctgtgacccaacccaggttcacgagtataaggaaagtgtattcgaactattctccaagaaatgaaataatcgtgaacagaattctacctacccagcatcgcacgacattgtcgttggtgttccacgatcacatcccgacgagaccctcgtcgacggccatgggccattacaatcttgtaccaaagccactctcctcggcgtggggtcggcaacagagaaggacggaggtagttggagtcatccgcaacggcgccaactccaaaaccctcgtcagacatagctcgtcctagaggccatgtcgactaaggagaaaaaggatgtggatcggtgggagaggttgatgatgaagatggatcggttgtcgaagaaggtgatggggatggaggaggtgtagcagcagctgttggcgcaagcgagtttggcggcaacggtggtgcagaaggcgacggaggagtgtgtcttgcttgcgcaacagtgggagaggacggataaggcggtcaccaagatgaggttggagcaaatggctcgagacatggaatcgctagatctgatagctagaggaagaagttggggaggaggcacaaggtctggacaacccgagctggcaaggaggtatgaagaacaaatcgcacatcctaatcgtgaatttggggagaggcatatgggggatctagaggtaccggtgtctacgctacctcggcaaccttttccaaggtttgaaggggagggacctcgagtatggttggagaaatgtgtggactacttcaccttgtatcgagtgccagagtggatttgggtgatcacgacgtcgttgagtatgaaaggtaatgcctcaaggtggtttcaactgttcaagaattagaatggactgggatcgtggaatgagtttggtagggcggtgttgcaacgttctggtgaggagtatccccaggccatgagagctctactgaatctgtaccaggcaggatctgtggaggagtatgttaagcatttcgaagaggctcgaagtgtaacatcagttcacaatcatacactggatgatacattctatgtggctcagttcatcaagggactaaagcatgagttgcaaggctcagttcagtcacatttgccttcttcagtgaatcgagctatggtgttggctcaggtgcagcacagaattttggagaaacaacgccaaaaatcgttgagggtagctggtccaagtttggaggtatgggatcgaagtcagaggtgagaggagcacaaaatatgcctgacatgtccaagcaacgactggtgaaagagtataggagacagaatggattgtgttttacatgtggcgaaaagttcaaaccgggacatcaggctcgttgttctaaggttcagcagcagttacatgcattgctactgagaagttggaaatgactttaaccgagatgctggaatagattacattagaagaggagaatttttatttgtcgttgcatgccattagtggcactacaaatcaggagtgtatgagagtaagagctttgattggcaaccaaactctattacttttgattgattctaggagttcagcaacttttgtgaacaaggagttagtggagaggttaggcctggagacgcagagttgtactcctgtcaaggttaaggtgacgaatggggaggtgatgaggagtgattaggtggttcgagcattggagtggtggtctaatggtcactcttatagagatgacatgaaggtgttggaattgggagcatatgatgcgattttggctacgaatggttacataatcacagtccgatgtattgtgattggaaggaaagggtcgtcacttttgaagataagggaaagttagtacagctgataggagatggggagcaagtagaagtctgggaggtgtctactgtccaactcgacaagtggttaaaaggtaatgaagtctgggtgtgtgcattactggaagaaaagcccaaggagcaagaagaggtgattagtgctaacctgaaacagttgcttgagaagtttcaggacttgtttgcagtaccctctcagttaccatcgcaacgtccatttgaccaccacataccgctgatacccggatccatatcggttaactcaaggccatacaaatatccccctgcccataagtcagaaattgagagataggttcagaagttattagcagctgggttgatcaccccaagtgtgagtccttttgcctcagtcgtgttattgctgcaaaaaaaagatggtgcctggcgcttttgtgttgattaccggaaactgaacaatatgacgatcaaaaccggtttccaatgccagttgtcgaagagattttagatgagttagcgggaacacaagtcttttcaagcctggacatgacttccggataccatcaaattcgtatggggaggcagaagagtataagaccacgtttaaaatgcatcatggacattaccagttctgggtcatgccttttgggctgacgaatgcaccggtaacatttcaatgtgtgatgaatttggtgttagctccgtatcttcgcaaatttgcgatggtctttctcgacgacatcctagtttatagtccaaattggcaagaacatttggagcacctggccacctgcagttggtcttttctgcccttcgacagcatcaattctttctcaagatgaaaaggtgtgcttttggccgtccgcagttaacttgggacatattatatcatcagatggggttgccaccaatccacagaagacgattgcaatgtgtaactgacctcagcctactaatgttactgagcttcgtgggtttctcgggctgacggggtaaactgaatgattcgtgaaagattatggcactatggctcggcctttaaccaaattgttgcaaaaagggtgtgtttcaattggaactgaatgaagctactcaagcctttcaacacttaaagaatgccatggtgaccacaccggtcttggctttgcctgactttcagttgccatttgcagttgaaaccgacggctgtgattctggggtcgaggcggttttgaggcagcaaggtcgacctttggcacatttgagcaaggcacttggagtcaagaatcaaaagttatcaatctatgaaaaggaatttattgcattgattatggccattgatcggtggaggtacttgcagaggggtgagtttgaaattcacacagatcatcatgctctcaactttttgggcaatcaagtcggagcttcaacgtaaagctatgtcgaagctgatgggcttgcaatttaaggttatttacaaacagggcaaggagaacaaggtggttgatgctctctcgggtgggatattgtatggcagtcactgtagttagtgcagtgcaatcggtctggctccaagaggtggttaactcatatactacagatcaggaagcacagaatctgttggcacgtttgtgtctccacagcccagatgagcatgattatactttgtcacaaggtgtgatcaggtaagacaacaagatatgggttagcaacaactcagccttgcgtactgaacttatatccatgttgcacgacagtgcgatcggtggtcactcaggaatgcatgctacatatcgtcgtcttaaaaagctgttctagtggaagggtatgaaataggaggtggaagactttgtccgacaatgccaaacctgtccggaggctaatggggatcgagttcatccggttgggttattgtaacctctgtcgataccacaaggggcctggcagcacattacgatggacttcatcgagaaattgccaaagtccgagggatatgatactatattggttgtggtgggtcgcttttcaaagtatgctcatttttacctctgaaccactcgtttacagctgctcaggttactcaggttttactggatcaagtggtgaagttacatggcctgccacaatctattgtcagtgatcatgacaaagtgtttacgagtgcattttggactcagttgtttaagttgttgggaactaaactaagcctgagcaatgcataacatcggcaaacagacgggcaaagtgagcgcatgaaccaatgtgtcgagatgtacctacggtgtgttgtacatgctcaaccccataagtggaagacctggctttccttggccgagttcgggtacaatacgtcctaccatacttctttggcttgttctccgttgaaggtgttatatggctacgatcctccatttgctgcggctcttgttgttccctctggtactgacattactatggctcagatgttagctgaatatgaccagtttactgaactcctcaaagaatagcttgttgttgcctagaaccgtatgaagcctaaggctgataagttgaggtcagagcggcagtttcaggtccgcgaaatggttcttctcaacgttcaaccatatgctcaacactcggttgtcagcaggccctgtcccaagttggcattcaagttttttggaccttataaagttctggaacatattggatcagtggcatatcacttggaattgccagactcagctcaagtccatccggtgtttcacgtttccagctcaagttgtttactgctaactattctccgagtgttttctactattcctcctagctctgatcttagcaaacatgaagtggaacctgtcgaagtcatggaaagacgcttggtgaagaagggcagacgagctattcctcaggtgctggtccactagagtaatctacccaaggatgttgcgacatgggaggattatcacgtcctccggcagcgattcccgcaagcacttgcttgggggcaagcaagttctgcagggggcaggtgtgatggctcctgggcactccacgtgtgagaagactgaaggaggggcgtgttgagctcaagaagtggcctcgcggacggtccacggtggtggcgcggacggtccgcacgtgcgcagagtcagttagggttccgagtttctcgcggtatttgttacctaaaaccgcgggattagctcgggaaacaacttgtagcggatccagacctccccctttatatagatgaagggctacgaccgattaaaccccccacaatcgatcaaatcaagtctatttctcgttttacttatgcattaggagtagttctagtttagctctaggttagtctttccctaccccaaattcttcgcttctcttcggctctacgtcgattagaggtgtctagggtggcctgccgaccctagacgaagcctaggatctctcctccccgacggggtccctcccgggagcgagatttaggcaccaccggcgaactccgccgcccctgcgcacgcgcggaccgttcggcctctaggcgcagaccgcctgacccgtcaggcagggaacctgagccatgcgccaggtcgcggatcgtccggcccctggccgcgaaccgtccgcgcctgtgcagagagcaccgccgcaggttctcaacctagtgattggcgcccggatcggcgccaacacactttttggcgactccgctggagaaaggtgtctagatctactaaaaattaggccctcaaatggccagttctaaagatcacactgatatctccccagacaatatcctgaagccaactgttgaaagtctaacggccgatgagcaacaacaatacgaggactacatgtgtcaagcgaaggagaaattcttatcataatacacggtagatcgccaccaaaaagttgtcaaacatagagagaccgacgtcacatctcttctatcttcgcttcaagtccccaacgtacgtaaacccgacgacatccaatctattaaacagtatgtagatcatcagcagaatcaaataaaacaacagattgaagggttagaagaatcaattagaaaattaacgcgtacgttggagaagtctgttgctcctaattttctatcatatgaaactagtaacaggatatctatgtctaatacatcggcaacaaatgaggattcgcagccccagccattatatggtatgccgatgaactcatatccagggcaaataccaccaccgttgttcctgcgtggcagatcggcgcccctggacacggttggaccgtccgagcttttgcccggaccgtccggcccttacgcagaacatccggctttccctgccgcacagcccgggaccgcaccagggctaccgtgtggcgccccaataaaagcgaacacaaccggccagttcagatgtaccaccggacagaccggatacgcatacgcagaacctattgttgcacactacgcaccaaattattacacaccacagcagcagtacgttccgtcccctacatatttaaaccacaacacgccatacgatcacaggtcgatcaacattatcgatcggtcacggcaagaaggtcggcataacaatgaccgaccgaatgaaccccacagcctagggtccgatggtctgccacgggcgcaatggagaaaattagagaagaaatggctgagctattccgagataggctcggagttagtgtagctagagtggggcaatcatatcagaagccatatgatcactggtttgacactgtcccatatccacaaagggcaaggataccggagttttctaagttttctgatgaaaatgggagaagcacacacgaacatataggccaattcctggcacacctagacgaattggccgacggggaagcattttgtgttcgtttattttctttatcccttactggtaccgcttttgcatggtacgccgtcctgcctcctaattacattaattcctgaaatgatttaaagagtaaatttcatgaacatttcttttccagggaatatgaattgggactagctgatttagcttcagtccgacagggacacgaagaatcggttaactattatatccggaggttccgggacactagaaaccgatgctttcggatccatgtcgcagacaaagagctagcagggctagcttttaatgggttgatatcctacttaagagacaaattagatgggacccagttcttttcaatagctcagctacatcagcgggctttagcttgtgaaagccgatttaaagagacatcaaaatcggccgcccgtactatacatctagtagagcatgataattaagatgatgaatccacagatgtatataccgctgagtttgtttggccaacaaaggccaaatcttctacatgttcttccttacagccggttcaaaagaatcggcaagaagagattaaatttacatttaatgttgccaaatgcgataggatatttgacgaactacttaaaaatggcaacattaaattaactcatattattcctcctatggaagaattaaagagacgtgtttattgtaagtgacaattctttttctcatgccaccaatgattgtaatgttttccgtcgacagatacaatcggccataaatgagggctggttggtttttcaggagatgcaagtggacacgcagccatttcctgtcaataccatagaacccacatgcgaagaggtcttggttcggcccgaagtggccgataaaggcaaaggcgaaaacatcgtcattagcgatccccgcacgtcaaatatatcacaagaagagattgctcggaaggctctggacaagaagaccagcaagtccggaggcgccgggggcagactcaattgaggagccaagcacgacaggctgacccgagcatcgcggacggtccgacacctacgtgcggacggtctggtgttcagacagacggtccagctgactcagccagacagtccgcccatggccagaggcgtcagcgtccacacaaagcaaggaaagagacgcaagggcaaagccaacatgacgcacatggtcggctggtaaaagccagccctactttcgatcaattgctagccaaatatgctggcaagaaggtcgttctatgcgatcggccaacaaagaaaccccggtcacccactaaaacaaaatggccgagtaaaacagtccgaaagacgacgcaacaagcatcgcctgttcatcctgtcatgccaggatgcttcccacccacctactcatcgtcgatgtattgtcctattcaaatatggaatggtacgacgatgaacccatggtacatgtgtactccctttgtctatttaggctagggggcacctccattctattccttttgatccattgatcaaatggtcacggccgagaaatatgcaatcctaaacagcctttatgcattatggctatattgaatgatcaccatattgaattgaaaaagctggtggcttgcatcaggcttagttcatatgcttttggttcgtcaacctccaccaaaaggcaggggggcatatgttgagctcaagaagtggcctcgcggacattccgcgcgtgcgtagagtcagttagggttccgagtttctcgcgggatttgttacctaaaaccgcgggattagctcgggaaacaacttgtagcggatccagacctccccctttatatagatgaagggctacggccgattaaaccccccacaatcgatcaaatcaagtctatttctcgttttacttatgcattaggagtagttctagtttagctctaggttagcctttccctaccccaaattcttcgcttctcttcggctctacgtcgattagaggtgtctagggtggcctgccgaccctagatgaagcctaggatctttcctccccgacggggtccctcccgggagcaagattcaggcgccaccgacgaacttcgtcgcccctacgcacgcgcggaccatccagcctctaggcgcggaccgtccagcctttaggcgcggaccgcccggcccgtcaggcagggaacccgagccctgcgccaggtcgcggaccgtccggcccctggccgcagaccgtccgcgcctatgcagagagcatcgccgcaggttctcaacgcagtgattggcgcccggatcggcgccaacaggacggacgcggatgctgaagaagaagatgaggccgaggcgtgagtgtgttggataggaaacagtgttatgtggtgtgtgggccgtgtgtgggtcgaactgtggggcgcctatggctgcgacatggtctaggttcacgagtataagggaagtgtattcgaactattctccaagaaaggaaataatcgtgaatagaattccacctacccagcattgcatgacgtcgtcgttggtgttccacactcacgtcccggcgagaccctcgtcgacagccacaggccattacaatctggtatgaagaagatgaggccgaggcgtgagcgtgtcggataagaaacagcgctatgtggtgtgtgggccgacctatggggcgtctatggctgtgacctagcctaggttcacgggtataaggaaagtgtattcaaactattctccaagaaatgaaataatcatgaatagaattccacctacccagcatcgcatgacgccgtcgtcggtgttccacgctcacatcccggcgagaccctcggcggcggccacggcccacgggacattacattcttgtatatttgtttttagacaccgtaaggtaccttttgttcttggtctttttctggacttttattctatttaatatagtgatgtgcacatctcttgcgcgttcgagaaaaacaaaagatgttaatacatcaagactaaataaaagtttactcttatggtcagcatttggggctgatgttatgtggttcctaggatcgcgagtattgttcaatggatggggttgtgagggttagagggcggtggctagggttagagggcgacacctagggttaggggcgttggggaggccggcagggctttgcccactgccggcaagagagaagggatttctaaacctacgatatttcggtttgagaatttctggcttgaattggatggtttcatgaacctttttcaagctacttggaatgggatccctagcattcccgacaaggccaagaatctgactgccaagttcaaaattgttaggaaagttctgaaagattggcagagatcgctgccaaaaatagatataacggtgaagaacattaagttgctaattgagcttattgacatcatggaagagcaccgggatctttctgttgaggaatggaacttcagggaaatcctgcaacaaaaggtggctgagttgcttaatattcaaaaaatttattggaagcagcgtgcggctattcggtgggttactgagggagacatttgctctcgcttctttcacgcccatgccaccattaaacacaggaaaaattcaatctctgctttgactgatgacaatgggaccatattctttgaacatgaacataagtctaatcttctctgggaggctttcaaatgcagactggggtcgtccgacttttctgatattgggtttgacctatcagaaattttaacttccaatgagcaattacaggggctagatcatccattttctaagctggaaattgatagcatcataaagctcctaccttcagataaatccccagggccagatggttttaatacaaacttcatcaaaaagtgctggcatgtcattgcccccgatttctatgatctgtgtgacaaattctttcatgaccaggcttgcctcagaagtatcaatggatcattcattgtcttgattccaaagattgagagtcctatgaaggtgggggattacaggccaatttctcttctaaacaatagtatgaaaatcttaatgaagctattggcaaatcgtctgcaaccgttcatgccccggttagttcacaaaaatcagtatggtttcatcaaggggaggtccattcaagactgcttggcatgggccttggaatatattcacctttgtcactcctcaaaaaaagagatcattgtactcaagcttgatttcgagaaagcctttgacatgattgagcatgagttgattatccaggttctaatccacaaaggtttcagccctaagtggatcaactggatccggagcattcttcactctggcacttcctcagtgttacttaatggagtccctggtaagccttttcattgcaggagaggggtgaggcagggcgaccctctttcacccctgttgtttgtcctggcagctgaccttcttcagagcatcatcaataaagctaggatgcggaatcttctcaagctaccattgcctgacattggtgaacaggatttcccgattattcaatatgcagacgacactcttctgattttggaagcatgccctaagcaacttttttcctcaaggcaatcctcaactcttttgcctcttctactggcctgaaggttaactacaacaagtcaaatatgttccctattaacgtgtctccggataaaatggtgatcttatcccgtaccttcaattgtcagattggcgagatgccattcacctatcttggcttgcctttgggcctggtgagacctagaaaggaacactacttacctcttattcaaaggattcagaggaggctgtcttgctcttcaaattttttgtcccaggctgggcgcctggaattggtaaattcggtcttctcagccttaccaatgttcttcatgtgcacgctcaagattcctaaaaccatcattaaggaaattgatattttcagaaagcactgcctgtggagaggaaatgacatcaactccaagaggccacctttgattgcttggaattcggtcactcagaggaaagtgaatggtggcctgggtgttcttcgcttagaaacgcagaacgaggctcttctaattaaatttttgcataaatttttcaaccacagcgacttaccttgggtccatctgatctggaacaattactatcttactcgaggtctccctggtaatagaagcgttggatctttctggtggaagagcattgtaaagcttctgccaaacttcaaaggactggctacccccgtcattggcaatggcagatcaatttcattctgggatgatcagtggagtcagggcatcccgaggcatattttcccacagctcttctcctttgccaagaactcaaaaatgactatcaaagaggtcaacgatcaagagcagtttcatgatctttttcatttacctgtctctgatcaagcgtttgatcaatttctggtactcaaggggtcttgggagcaaattgttcttaatgatgttcacgaccgctggaagtacatttggggatcggacaaattctcgtcccaaaaagcttacagatctttcatgggccagatgcagactcatcctatctacaaactagtttggaaaagtgtcagcctaagcatagagtcttctattggctgtggcttaagaacaggctaaacaccagaaatatgttgagaaggagaaacatggagctagattcctattcttgcgaaaactgcctttggcaaagagaggagaccctttatcatcttttcctcagatgcaacttcgcgaaagcctgctggaactcaattggcattaccccacccagaatttccaaccctgaagaggcatctgtgaacctcaaacaccagctcaacgttcccttctctatggagatcactattcttatgacttggagcatctggaaaagccgaaacgagtggctgttttcaaacagagatccctccgtgctccgctatactcaggaatttagtagagaattgcgactaatcattcacagagcacggggagaattcgacacctcaatcccgaactggctaaatttgtggcaaatatagaaatagctcttcctttttctttctttttctcttcttttattgcttgtaaaaggaccagggcctaacctttacttttcgctttctaataaaatgcgcagtaggggtttccccctcctgatccttcaaaaaaaagagagaagggatttccttttaatctcttgcttaccttaaattgatacaatccttctccttatatagagagggttacttgacctctaagcactagatctaatcttatctctaattctaatcttatcccaaactagtcttatctttatctaacctacctgaggggccctgacatttacacacactgaaatcgatcttaacaacttcactccaggactccgtggaagaataagtcacaacatgcttgtacacttcagttatgatggccagcaaatctaactccactaacaacatcaccatatagcatatgtggcatggctgttgggtactcatttttaaaatgtatcaagaacttcatagtattactattaccttcccaatagctacaaaagcaatacaggcaagcccgcagtaactgaaaagaagccatatcaagaagccccacttttgcccttcctccggcaactataaagggaaaatcatttagtagaatttactgcttacagtaatacaagtagtactagtacctaaatcgagaataagagaactcacgcagccccttgcagtgctaaaccacaatgttccaatcacagtccaaacccagagaaaggggtagagaagtagtacaagaactgagaggacaattattcttccacaaaaacgagcatatctttgttgccatccgagatctctacaatttttccaaaaaaaaagatatataatagaagaaactgacagccatgcttttgcaaagttcagttcatcattggttgtggggcaagcaaacaagacatgaagacaaagcttagaaatctaagacaactgtatgagaatggcaaacataaagtagcaaaaaatatggtaggaaaatggaaggtcaagaaactcctatgcaccaagatacattacagatggcccagttatcattacttttatcgtaagaatacagtcagtcagtcacattgaaattcaaaccttagaatcatgcatttcagaagtaatcatctgccattgtatgccagtaacaagtttcatttcagtttccaacatcataaataaaaaaactgagatctaaattagactatttcattagctgatggaaaattgagagtagtttggacaaagaaaaattgagactgcaaac

SEQ ID NO: 786 - DNA, 9099 bp, Zea mays
  Intron number 16 from transcript AC218972.3_FGT001 (locus AC218972.3_FG001) derived from phytozome v7.0 (chr-ID 8; p os 170614292 to 170623390)
cctaacattgttgtgctcacatttgacccaaataggtaagcttagtctttatgttctccttgctagctggtaataacaggcttcatccctgtaaaacatttggggatctgaaatagatgcatgtaagctttttatggcgctagactaggatgccatcttgcacacaggaaggatgtgatttggtgaagattgcacaagtgtaatcagcgtatttttcgcacatatgttgtagacaaaagaagcaacaacaataacgaagtcttttagtctcaaacaagttagagtaggctagagttgaaacccagcagaaaccataagtcaaggttcatgcacatggatggcggttttccattcactgatattaaagactaaatctttaggtatattttatcatttcaagttttcactgtctcttttcatgtcaactttggtcttcttctgcctcttaccattgttattgcaccttagtatcccactacgcattggaggtcttgatttttttagataatggataacaaagtatccgactttcacctcactaggaggataaggccaaaattattacaggaccagcagctcattcgtctgccccagagggaagatcaaacctccaatacataacaccaacaaaacagaaaggatagatagtttggttacaactcaatcctatttgtaaaccgccatccattgagtgcccaaatctccatagccaccgtctctaaccaacggcaagcgacctttattttgttagcttcttcacttttctgcagcatggcccaaaacctgagccaatatgttcccctgaagagcacctgtaaagaagttagcattggggtgttaccaaaaactaaatcattcctacttatctagatagcccagcacagaactgaaacacctgtaataataagctttctagtttttgagttcacctgcaacaatcaattcccgaacacttgacggattgaccgaggtgaactcaaaccaaaacaccagtacaagagccaccacaaatggttggcaaggtggcattgaaaaaataaatgttgaatcgtttcatctctctagcaaaacacacattttttattgccccgccaattccgttttgccaagttatccttagtaagtaccactcctttgagtaagtaccaaatgaaaattttgatcttcaaaggcatttttaatttccaaagaactttgtgatgggagacataaccattgttgatcagagtcctatacatcgattgaacagtgaattgtctcgaagaagttagattccaacaaatcaatccttttcagtatttaatctagcattcacaagacgttgaacaaggttatgccataccaccaagttgtgccccactaaagctctacggaaagctacatttagcggaactgagctgaaaaccttggcaaccgttgcacttttgtgctgaacaatttggtataaggatgggtattgaaacatgaggggttggttacctaaccacttatcttcccaaaacctaatttgttcaccatttttaagggtaaaaacaccacatcttaagaaaagttccttagctttcatgagactggaccgaaagtgcgagtcccaaggtttatgcgaaactttagatagagtatatttctttaggtatttttctgcagaatattttgccacgttccatcctcattaatcaacttgaaaagccacttgcttagcaaacacttattctgcaagtctatattctggatccctaaacccccacgctcctttgtctggcatatgatgttccatttagcaagcctatatttcctcttatggtcttctccttgccagaaggacctagaatggaagtagtctattctctccaaaactcccctaggaacttcaaaaaaggacaacttaaacattgtcagacttgaaaggacagaatttattaacaccagctgacctcctactgacataagttttcctttccagctactaagcttcttctcaaacttatctccaatgattttccaatcgctatttttaagcttcctaaagtgcataggaatccctagatatctaaaaggatattcccccacttttacacctaaacaaattaatgtattgagactcatcatctttggcttggccaaaacagaataactcacttttgtgatagttaatccttaggccagaaacttgcttaaaagccagtaagagatgtttaatgttttctgctttggccaagtcatggtccgtaaaaattagagtgtcgtccgcatattgtaaaatagatagcccaccatcaactaaatgggggataagaccgtcaacctggccctcatcgtttgcccattttattaatatgacaagcatatctactacaatattgaagagaattggagataggggatctccttgacgcaaaccttttttatctgaaagttttcccccacctgatcattgacttttatacccacatgaccaccaatcatcaccgaattaatccaagagcaccacttactagcgaagcctttcatccgtaatgtttgctgcacaaaaggccatttcactttgtcataggccttttcaaaatctatcttaagaatgacaccactaagttttttttctatgcaactcatggattgtttcctgtaatactactaccccctctagaatattccgtccgggaatgaaagccgactgaaatggtctaatataattatccaccactctggatatcctatttgtgagaaccttagtaaagatcttgaaactaacattcagcaagcaaataggatgaaattgtttaatggactcgtgttaccggcttccctctgctaagcctgcaacttaggtttcctagtctctcccaagggtgagtggaggggaagatcagaattgcgcaaggcgaggggggaggaaggcgttgatcgcctgattgccctggtcaccggtgccggcgctgtgcgcagccagggtgacccaagacgatcccgcccctagggagatcttatttcttggatgccttagtctattacagctgatgcctagccgcccttatagtcgcaggtgacctggcacaccctactgtagagattatttaggaaacaaatcaaaatgaaactaatcctctaaggaactgatcttctaaggaaacttatcttctcctcctaatcaggaactgatcatccctgctgcctcttcttgcgccccttcccttgcgcctggtaaactggcggcccataaaagcatctataacattttcctcctctccgactgtccgacaaacaactcgtcctcgatttggatctctgggtaacgcctcttgaactcagtaaactgctcctaggtagcatctgacggcgcgcgcggcgcgccccatccattgtataattgttatatgctgaacacagtctttttgtaggtcaacattatgcaccatacaccatagcaggtctaatcattgtcctataaaacttgctttttagcttctgtagtactcttttgtcgcatagagcgccagatgcttgaagtcatttcatctacactactttgattttatggctaacatcttcaccaatatccttgtctttttgtaggattgatcctaaataccaaaagatatccttcttgaacatcaattgaccttctaaactaacatcttccacatgcgtagtattgttgaagtcattgtttttagatcgtctgagagtcgggctaatcggtactctgtgctcgattagggtgttcgattcgattatgttgcctgatcgtctgtgtcaaggaccaagagggcccactacagtgcctctacagtaacagtggtactgtagcacgtccctcatgttggttactaaagaaaaggttagataaagataaggctggtttggaataagtttagaattagagataagattagatctagtgcttaaggtcaagtaacctctgcgtaaaaatatgattcctactgcatgcgcacaaatttaggatggcaagaatgtgtgttgaaaggaaatggatcgacatgcatgcaaacaaaaaaactgatttaaatgttttatttcctcataaatatagtatctctccaacagccaagcatctagactcgttagaaccggtttatgatatatactgatactaattatgctacacgatgaaggtatttatgcactgcggtatagtgcgtaaaaatctgggatgcggttcgaattaacaaccccatgtacatgcgtcaactataaatcatgagatttgattaggggcatcgattaggggatttaatgaggtggattgattagggaatataaattttttatggtagtaatggacaccataaatcaagggattgcatgcgcgagattttatgaaataatggcaaatggccttattttcgggagcagttaccttttttgtgaatttttgtttcgttgcgtaaacgagtgtgtcgtaaatatcttatacatatggtgtaaatggtagaaaccaaatatacacactgggttaggtaatgagatcatgcataaaatcaataaacgtttgcgtaatatgtgaataaaaatatcataaacagacaatatatggaagcgaagccatgaactgaaatatatgtcgtaaacacgtattgacgttggcataaaatatgtatacaaattagcataacaataggtctgccactcgcggaaccgccacctcgtctctgggattcgccaccactcgtcggaggatgcctgaagtgcgtcgaatcggaggatgtcgcggttcccacggtgtggatggcgaaccccgcgcgtacctctggggagccgccaccgccgtcgcgcctctgggaagccatcgacgctgtgcctctagatcggggaaccgttgttgccgcgcctccggattgaggaactgccgccatcgtgccaccgaatcggggagccgcaatcgttgtgccttcggatcatggaaccaccgctggggagctgccgctgccgtgtcaccggatcagggagccaccgtcgtcgtgcctccggatcgacgagccgccgtcgtcacgccttcggatcgaggaaccaccacacgcggctagttggtcgcccgtgcatcgtggtgggggcgtaaaaacctaaaccctggtggcctagtgctctttttgtagacacccggaacctggtgcggctgaactagatggcagcattaggccagggcttcccttagctattggaagcccatagcttgtaatatctgtgcgtgcgtgggcgactaatcgccctgaatcatcgcctaatcgtctgatcgccctgtggcatcgattggacgatcaggctatctgaaaactatggttgaagtcacatctcatatatttggtttcagttttactaaaaactgagttaactaatcatatgtgacttcaaccatatatgagatgtgacttcaaccatagtcacatctcatatattcgccgtcgtcaaacctttggaatcaagagtctcctgccacaactctagttccttatctactcttgctcggctttcatcaactagtattacatcgtccttaaaaagcatacaccaaaggatatccccttatatgtgccttatgacctcatctatcaccaaggcaaaaagctaagggctcaatgctgacccttgatgtggtcctattctaatcaggaagtcatttgttctatgtcccttgttcgaacactagtcacaacattgatgtacatgtccttaatcagtccaacgtacttcattgacattatgtgccttatgacctcatctatcaccaaggcaaaaagctaagggctcaatgctgaccaaggttttaaaatcggctagtcgactctagtcgcctaagcaccgataaggtgactaatcgcgattagtcgtcgattagctcgattagtcgatcctaggtcgactccctagtcgtcctatagtcgtccatctataacaggaccatatatatatatatatatatatatatacacacatatacatatatatatacatatatatatatatatatatgtatgtatgtatatgtatatgtatgtatgtatatgtatgtatgtatatatatgtatgtatatatatgtatgtatgtatatatatgtatatatataaatatatataacagtatactagattgcaaatcctagtcgactcccatcctcatctgcagcaagcaaagagcaactcaagaagtgctcatctctgtttccagcaaaagaacaaaagactagaggagggagggattaccagaagttctcatctctgttccagcaaaagaacaacagagcaggagggagtggaggatggtctgaactctgaacagagcagagcaggcggcgctcagcagtcagcagtccagctccaacaagaagctgagggcggcggcgctcagcacagcagttagcactcagcagtccatctccagtccagcaagcagaggagggcggcggcgctcagagcagttagcagcaagcagaggagggcggcggcgctcagagcagttagcagcaatcaaatgaaggcggcggcgctcagagcagcagcaagcagaggagggcggcggcgctcagagcagttagcagcaagcaaatgaaggcggcggcgctcaactccagctagggtaaaagactgtacaagaggggcaacggcattggcacattggcgctcagtttcagctcccctggtgggccggcccaaatagaaaagaccagcctggagcccaaaacagagcacctagtcgagaacaagcctaatcggacgactaatcgccgactaatcacgattagtcggacgactaggtttctagtcgccctaatcgcgtcggtggccctaatcggccttgcatcagcgataagtccgactaatcgcgactaatcgcgattagtcggacgactttaaaaccatgatgctgacccttgatgtggtcctattctaatcaggaagtcatttgttctatgtcccttgttcgaacactagtcacaacattgatgtacatgtccttaatgagtccaacgtacttcattgacattttatacttttccaaagttcaccacataattttccttgtattttgtcataagccttcttcaagacaatggaaaccatgtgtaggtccatcttctgctccctatactgcttcatcacttgtcttgttaaaaaatggcttctacagttaaccttctgagcctgaaaccaaattggttcatagagatccttgttacttctcttagaagatgctcgataactctcccccatatcttcatagtatggctcatcaacttaattccccagtaattagtacagctttgaatatctcttttgtttttatagatcaataccaatatgcttctccgctcgtcagaaatcttgttcgaccggaagatatggttgaacaacttggctagccatactatagctatgaccgcgagtcatctccatgcctcaattgggatactattagggcccattggcttacccctttcttctttttccaagcctttgacctcagattcttggattctacagcaaaagagccatccatctgaaaggttgtgtccacattctccccattgaattttagacagaagaaggaaggaaaattaaggacaggagacactagtctctcttgggtcttggttcatcaccaaactcaagcccaaccggcctctgatcaccaatcctatcctgtgttcctttatacctagtactaacctactactaccaggtcattgcgcaatgcccaaccctttcactgggctgctgctggcatagttgttaaagcggcaaggcgaggtaaggcgaccgaccccctttttaccttttaagcgataaggcgtaaggcgaggcaacgccttagtaatatacaaaaataggcaatacaaattaaatatataggaatatagtctcgaatagcaaataggagtacaagatcaacataaatcaacataatagactagtccaactgaagtaatagatagtagtagataacaccctcatctctcaatagccatcatcaaactcatcatgaaatgcaggaggattctcttcatcatcttcctcctcgtttgcctcatcactatcactcacattcatatccagatttagagaactaaaactgagttaactaactaagaacactagcagttaactgaaactgagttaattaaacagagagagagagagagagagagagcagagcagagaggaagagaacatagaaacagagaagggagataacagagagagcagagagggaagggaagaaagcgcactgggggagagtagagatggaagagagcacactgagggaggacagccatccaaggcgcccgcaaagcgtcgctaaggcgacgccttattgtctaaggcggacgccttagtcacggacggtcggacgcaaggcgaggcagacaccttgcccctaaacctcgccttaccgcttaagcgacgtttaagcgatgccttaacaactatggctgctggccaatgtttccattccaatctttcagccttggattatccacacaatgtcataaaatcctcagcacacagtacagtaggcaagattcgggtgtggcagttctctgtacctgtctgtcagcatctagcactgattatggatggcaagcccatataaagagcttcgaccttgtataagcccaaggtttccaaatgtgctgacaggttcagaggtcaggtcacatctccagcaaagaaagctttgtaggtttcgtttaatgtatgcatgttaatcactaataaatagtagtacttgtcacattcaagttgatctagattgttggtgtcagcaaacttgaatgcatgacaccattcattccatgtttgtacatggtactatgcatttgtccatcagagtctacttttccctctttttgtggagtgaggtttggttataacctaaacctattggcataaccgtgggcccatgattcagtagcatgcggcaccaaattggagaaattgtttgagcactagatgcacaattgctacaagagaagtgcttgatcctttccaatttgaatgcaacaatatcttgctaacatatttttctgcactatattttattgttttagtttttatagcaatttctttgatgtttctacagtg

SEQ ID NO: 787 - DNA, 5083 bp, Zea mays
  Intron number 1 from transcript GRMZM2G161299_T03 (locus G RMZM2G161299) derived from phytozome v7.0 (chr-ID 5; pos 1 52435489 to 152440571 reverse strand)
tcgcgccgctcgagcgcgtcaagatcctgttccaggtgcgttgcacacacgatccttgcgcgcccgcctggcaacaagtttccctttaagaacgtgtagcgatgtatacagaatcttgacgaattgaggagaggttgaatgttgccgtggcataatttgcctctctggggaccgggagctgagatgcgttttcgtgcggcggttgttctcgcccgatcttgtacggcggattctttgttcgcccactgtcttgggctctacagtatttctaaccacagatgcaaattgcgtgatcatggaaccttgaatggctagcatcactttaatgaataacgatacatgttgtcggtaggtgaacttcatcagtcatgcgacaatctggccgtgaataaagtacaattccagtccttaaacttgtctgtcgagtctccccgttttcttgcataaaccaacgcggggaggaggaaacttgcggtgcgcagaacatggcggttgagacttgcagctaagcttcagagtcgcttgattttgtcgattttgctgttgttgagacttgcagctatgcttcagagtcggccgattctttgtccacaagagaagaagcaaacatgagtactctgcaaaactagagaactcggaaggcttagccataaaagaccggcaagagttttctggctatgccaattaaaatgccgaggggaaggaatgtatgttacgtcacgctcgttcaaaactgaaaagacagtgaaatacgagaggaatgatggtaacaaatttagtttggtgagcagcttagagagcgcaagtgaggtttcattgcgaggtggtggagcggctatgttttgtcgattttgttttgtcatttcatactactaagattaatttcacaagttattttctatttgatgtcttctctagatcgtgttcaaaaaagaagatttttttttaaaaaaaaactcttttcaatagttgttgatgaggtcttgagagggttattgatttttcaggaaagtttaagcaagaagatgggaaaggcccttttattgggtctgttttgatctgttttagatctaagagagacccgaacatggataatgctttaagagatatactttaaaagtttatagaccgagataacacaactcgacaagttaaaggaccggaattgtactttactcatctggtcgtagtttgctggagcctgaaggtattaggttgaggggtatagttattgtaacccgtgacttattctttgttcttgggtagtattgtgacttgaaagatctatatgacatgaaaggttttcgaaagtggttggtttctttgttcttgagatcgaatgcactggaaacattctccattggtaaatttttttgaggggaaaaggctatagaggaaaggaaacccctacagcgcgattttattgaaactttttggaatgaaatacgattacaagggggagcaaagaagacaagaaaagaagctatcgagaatttagccaaagcaatagcctagctctaaaagaggggttaaatctcagcatttgcgacttcgacatgtcgttgaaacaacatcgccaagaagaaaaaagagcctcattcctaaagatgaagttattcctctgcttccaaatgcaccaaagcacaagcgccgaaatttccataaataaactatggccaaaggcacccttagccacatgaatcatcggaaagaagtcaagatcataattccagtggagtaactccagtagtctgtactgaaggggtagcaaaacaccaggtgataagacgtctcttcgcagtgcatgtcgcacagagtgcattcaaggttgctgtccagcggcaagaaaccctttcttctgaggatgctcttggagttgattctgtccctgaagaccaaccatacaaaaatcttgagtttcttcccaaccttggactgctaaatccaattaaaggcaacatgaggctggattgactgaaaagtgagactatagaacttggatgagctgaaagtagtattgccccacgaataggtccatttatctttaacagttgcagaattctgaagattgctcatcagctcgtggaaagccaggtattcgtgagcggagtatggaaattgtgctccatatccatgttggctaaaagttcttgaagtgagcattcctttttcttggcaaaggagaaaagacaagggaaggtgaatctaggggagatattgttccaaacatcatgccacaacagaattgtccttccatccccaacccagggcatagcatgccctctgaaataatcaaccaacctaaaaacatccttccactagaaagagcctgtttcaggataggcatgggggatcttgcccccagagtagtgagtggcccaaataagatttacccaagaaatgtcttctctgccatagaatttttgaatgaatttgagcaagagagttgtgttccgaatctttagattgagaacccccaagcccccctatttcttggacaacaaactttgtcccaggcgaccagaggatttcggtgcacattttcactactaccgcgccaaagacaaccccttctgatacggtcaatagcgttaatgaccgttaccggaatcttaagggtgcacattgcaaagatgggcatcaccgggaaagtagagttgaccagagtgagtcttcctgctatagataaccaagaactgatggcgttgagccttccttccactttggtgatgagagggaggtagtatttgactttcggtctcatgagacccattggcaagcccaaataagtgaacgggaagatgccaacttggcatccaaacactaccaccagctgattggttttggtggcatccaggttgatcggcaagaggcaggatctgtgaaaattaatcttgagtcctgtcaacatggagaatgaatgcataataccttttaagcagaacaactccctctacgaggcattcatgatgatgagggtgtcatctgcatattgaatgacaggaaagtcagaaggggtggcgccatctagaggagcccagaggatgcccatatttacggctttgttgatgatatattagagaaggtccgctgcaatgacagaaaggagtggtgaaagaggatcaccttgcctgacccctctcatacaccgaaaaaatctcccgaggacaccgttcaatagaatcgcagaggaacctgaattgagaatggtctggacccaactgatccacttgtcagggaaaccaagctgtctgtgcatcgccaggatggcattgtgctctattgtatcaaaggctttagcaaagtccagctttaagacaactgcttcttttttgactgttggcattggtgaatgtactcataggtccatgccaaacaatcttgaatagatctgtgcttgataaacccatattggtttctgtgaataagactcggcatctttggttgcagtctgttggccaggagttttgtgatcaacttgatgcctatgttgagaagggagattggtcattggtctgtagtcactaatggtaaccggattgctgaccttggaaatcataataatgtacgaggtgtttatctcttcaaggctaacagaatagtcaaagaaatcctgacataacttgtagaagtcagccttgatgatggaccagcaggacttcaagaatttgctattgaatccgccagacgccttatccacaaccatattctgaacaattctatcaatttcatccgaagagaacgatatagtgagattcttcaaaccttcaacaggatggaccaagtctgtaagattgaagaccatggtggggtcatcagagatccccatacgatccttgaatgcatcccaaagacaagcaacttttgcatcatgattagagaaattaatgccctcctcattgactaaaatggtgatgacattgtggttgtaactgtttgttgcggcagcatggaaaaatttagtgcattcatcccctagggtgacctatctttccgtgtaacgttgcctccagtagctattcttgttttaggagcctgccgatctgagttttgatgattgatctcaaattcttttccttaagaaacggagatctttgttcttccaatttgtcaatgactaagatgaccttattgtagtttgttatcaagcgattcaaattggaggtagacttactccatttcttgagagcgtatctgacattcttgaatttagcaactattcttgcagcactggagactgttctgatctctatgttccaagcattagaaaccacctcagtaaacctggtaacttcatccaataattctcaaaacgaaaaatgttagctttcggaatggaagaaccaatctgggcaacacaaggaatattgtcgaaggtggtcttcgcctctccattggtaaattagacgggaacctctgattaaatgcgactgaaacaagattgcatcgtcttgattgatgtgctcatcacgtgtagcagtcttatcttggatgaaaggagatccccattcggtattctatcttagatgactactgtctctctctttggtgaactctctgtattccgaatttcccatgcacatgctaccttgttagttgttactaaataaattggtaaagccagacctagttattatgtacaaccaaaggaagcaggggggggattggaagtactaggtgaagaatcatgttacagcaaagaacttttgggaaggaagttatgtcttacagcttagtgaacatttccagcaaccttgatatcaacttataatttctctcttaatgaaatacatgcttcgagtgtgttcgcgggcaaaatagatatgaacttgtaactgtctgctggtttggctgatggctggaattcttcgttcacaagtttctcgtatgtgcatcacatttaacagtggtagctaaaaattgccatcatgaaacttttcttgctatcattgtttgaaagaaatataatccaagtcacttaattattgtcatgcttctgttcctctatatcaccatgaatattaggtagctttctaatattttaaattatgttggaacttccagacaagaagagcggagttcc

SEQ ID NO: 788 - DNA, 3496 bp, Zea mays
  Intron number 16 from transcript GRMZM2G119248_T02 (locus GRMZM2G119248) derived from phytozome v7.0 (chr-ID 1; pos 156530280 to 156533775 reverse strand)
tgtaattgtggaacttcagtttccagaatcttgaggtgcgttgtaacttgtaattacttatcttgtggtaactcattgttcctggctgtcaattgctttagaggcccatgcaaacgaaacccatttagttgaaaatcatttggttgtgcatcgaagtggttgaacgatttgccaattttagctgggctatgtgttaatgtacatttgtattgatcttttttggctattgtaggataaagatacagaggtcttgcaaaaatatctatgcatctatttgttagctctacccactttgactagtcttgcatggtagaaaatcttggatgttaatacttagtatcttttaggtagacatgctctacccagtattgttagcaactgaactacttttgaataataagtaataacgctgcatgtttatgtgccctgacgccttccattcaagagactacagattgtactgcatgcattcactatttcacaatgtttaatgtacagtaaggaggatataccagttttatgtcgagaggagtttaatctggctatatacaccaaaaagagagaatagttcagtttaagagagtgcatattgtattacatgcattcattatttcataatgtgtaatttacagtgaggaggatatactagttttatgctaataggaatttaatcagaatatatacaccaaaaatcaaaaagaaagaatattttggttagccaagtacacggattagactatcagtctaaaaaaccctgaaagtttagtattatggctatcattccctgtccccacaaatctattgtctaggactgtcttagagtgttcatggtatgctatagatatgacaagacggcaggagtttgcttgtaaagtagtacacgaggatatttccttgcctatgtcatttggcatgcttgtaactagatttttacttttgttccctccatattatacctagttgagcaattcaaaactgcattatggcttcgtatgttgctctggttggtacgataacttctattagtgaaatggctattttagtctttggttaccttgtcttgcaagccagactgacataggtatttttttcttaacaaataacagaaacatgaatgctttagggtttggttaccttgttttgtaagccatactgtgcgaaggtatcttttctttcttcataacagaaacgagttatagtttcataagatgggagagaataatatgccataacatgagtctctattgtgtgttttttttgctgcctcttagaaggtatgcatcattcttttcattctaccagctgagatgtagaatgccttaaccctctcatctccagcagttctcctatctcaaacttcaatctgcaaatagtgtcaaacaatgtaatctacagtgtgacgtcccctattttacacgatctaccgaagataggccgagggtgttcccaaacatatacttacatagtgctttgcacttttgtactgatttgcgaacttatgagaataatacagttttccttgaagacacgataatatagatgtagcatcattccttaaaaagtggaattctctctgaagcaaaagtaacttgtattgatcactggcacttacatgtacagtgttgctatgctttttaaagcagatgtagcacctagaacatcatttattagttctgcattcagcagttaaaaagcccaaagctgttcattacaaatctagtaatagttaggcatggcgaataatgcactgtctggctgttattgcgttttcacgtgttcagagtcaaccatgaagcttactttactgaatggatctaggttttaatatgaattatttattccttaatgagtcatcaaggcattgacaaattgagaagtggattcctttggaaaggctgtaaagacgtcaaaggaaaacactgcttagtgaattggcagaaggtgtgtatgcctctgatctgtggtggattaggcattccaaacctggaagttatgggctggtctcttaatctgcgttggttatggctgaaaaagactcaacctgatcgcccgtggaactcctttgaagtccaagttcatcctaacgccgctgcaatttttgctgtttcaattcagtcaattgtgggcaatggaacaagcaccaaattttggacagatcgctggttagatggtaggagaattgtagagttggcttctaacttgtttgctgctgttaatagaaaagcagtgaggacgctgactgtccatgaagctgttatgggtgatattccggggaatttcccccctagtgctttctcagattttttccaaatctgggatcttgttcgggaggcctacctgctacctgctactcaagatcaacacatttggacaccatcctcttcgggttcttattcctccaagtcggcctatgatcgatttatggtggggggtgctagtttcgcgccagctgatcgtatttggaggacctgggctccaccaagatgcaagttctttctctggcttgcagctcaagataaatgttggacagcagatcgcttagcgaaaaggggtttaaatcatccggttcaatgccctctttgtgatcaagaagatgaaacagtgcagcaccttctgatttcttgtgtcttctcgagagaattgtggtttaggattctatccatggttaatctgcaacagttttctccatcaaattctgatttggttttccaagtttggtgggctaatctggaaggaaagatcccagctgtgcaacgcaaaggaacatttgcttgttgtgctggtggcatggtggctatggaaacaacgaaatgggggctactcatggtggcaatcgtattattcaaaacatcaaagatggcgttcatcggtggtgtcttgcaggcacgagatgtctgcacgcggtttggagttagtctgtttgttggcttctgatagtagtagttttctataggttgtttcttagatggatctttttccgtgtgattggttccgtgaatatctagcgcttggctagctctaacctggctcatcggatacactcttgtgctgtgtctccacagatgatggtaaagttgtttgatttgacttggattgcactcgcaaatgtaggtcttgtctgtcctgtacaagcaaccagacacagaccgaagcctggtcaatgcatatgcagagtctggttgtgcgcgtgcatgcaaccaaacatatggtttgtgtatttctgtttttggccaacgtaaggtggttttccttggatgtttggtctattttagacctctatttcgatccccttaatatacttaatgcgtagttctcctgcccgttaaaaaaaactatctatctaattttgcaaaagtagagtggaatgagtttagggggtgtttggtttgtggaatgaggtgtttggtttgtggaatgaggtagtccagcatctgactcctcaagcatgtcaaataaattattattctaacgtgaggtttgatgatttctgcaggcc

SEQ ID NO: 789 - DNA, 13892 bp, Zea mays
  Intron number 4 from transcript GRMZM2G135322_T01 (locus G RMZM2G135322) derived from phytozome v7.0 (chr-ID 3; pos 1 11848373 to 111862264)
acaatgtatgagatacaaacaaccaatctaattttgaattgtttcttcagtgtttgttcagatggatatgataatttgtaggtctgcatggaaatttcattccccagacctaagtgcgtgggggattacatcttacattttttcctttaatgcataagatcaactttattaaacaatacctttcccttctagattgtttcctgtagatgtttaggtggtaaattatattaaagttgcttttgcattttgttttattcaacatatagagtagattgctttccaaccttcataaaagatcatagattcatatagttgcttccatatatgatgttggttattgtgaattttgaaccccaagtgagatgaatttgcagccaatgatttcaagtcgtccgactaatcgcgattagttgggctagtcggttttgttgatgcgactaggaagtccgacccgatctgcttgactaatcgttcggtcgtccgactaatcatcgactaagcgcgattagtcgtccaatttgggtagggacgactaggatctttttttgtcgtggactcctggttgtggcccagtttggatgggaacgactaatgggctggtaatagggccattagtgttagggtttggtaaaactggctgctaccctctgcccctctccttgttctaccagcagattgtttgattccggtggctgccctctccttgtgatctgttcctctcttgaattcccctctgttcatctctgttcatcgctgcacccttctgttcatctctgcacctttacaaccctcaatttgtttcattcttttattctttgtgttcgtgactggtatagcttatgaggggcggtggcggaagtgttattataacaggcacaaccgaacacgcgaaggtggtcgtaagagggggctgtgccgtacagggcgaagcggggagtagggtggctcaccgccttcgagggaaggcagttgaggaggtgtatggcggtgtgcaaggcctatgcctagtagctggcggggagcgatgtctggaagcgaaggcagtgggtcatattagtggtggtgcgaatcatgcgttcggcccagccgttctgggcagaggtgtagggaaacgagaaacataactggacgccatgagtgagaaagaaagaacgggaggcgtgtttgtcgaactcgcggccattgtcacactacagggcacagactgggcgacgaaactaggtggatatccaggtgaagaagtgtgtgaaagtggtcagactttaaccgaagaggaaaagtccaaagaaaatgggaaaaatcattcaaaatcaccaaatagtatttatagccagatagactgagtacaaggaggtccagagatcacaatgaaccagatcaaaagcctgctcaacccgagaagtaataaatgggagacgagtatgtcgacctaactgacaagcatgacagagaccatcaaaatgccccctactatatgaaggatctaaaccattggtaatcttggtcatgacgtcgggtactggatggccgagacgacagtgccaagtggtggagaccaggacgggaggtggggacgcgccggtggtggaagtccggagcgtgtagagtggccccacgctgtcacaccggggaagaggggtcctggtggccagatccttcgcagaaaaaaccagaggggtcaaactcaatggaacaaaaactgttggtggtgaaccgacgaacagaaagaagattatggatgatgtgtggggctacgagaacgttgttgagataaaatgacccttcgcaatgaagcttccaccgacccacaggtcttaagcttttgggctgccattacagctggaactgcaaaaccaggatggacgaaagctgatggtctgctactatttcaagggaaggtcttcatcccggacgcttcagcagtttggacagaaatcctggcagcaacacacaattgtggtcacgagggcattgagaaaactgtacatcgatggagagcatccttctacagcccgcatgccttacgacgggtcagagaatttgtgcaagcgtgcgccacttgccaacggaataaaattgagcatctacatccagcaggcttgctgcaacccctgccagtaccatcggaaaattggaacgacgtctccatggactttgttgaagatttcctaaggttggtggcaagacagtggtgttaacagtggtcgacaggttctctaagttcacccactttattcctcttggccatccatataccgcagtgaccgtggctcgggcatttttcgaagggattgtgtgccttcatggtattccgtgctcaattgtaagtgatagagatacaatgtttactagtgccttctggtccgagctttttcaccttgctggggtcaagttgttacttagtttcgcgtttcacccccagaccgatggacaatcggaagtggttaacagaattattgtgatgtacttacgctgcttggcaggtgatcggccaaaaacttggttacaatggcttccataggctgaattttgttacaatacgtcatacctgactgcggtcaagtgcactccattcaggattgtatatggccgggaccctccaacaatgctttcttatacacctgggacagccagagtagctgtcgtcgatcagcaacttcaggatcgagatgttttcttggcagacatcaaacaaaggctaatctaagctcaggtaacaatgaagcaggcgcaggacagtggcctcgagatgtgcagtatgctgtcggcgattgggtttggctgcgtctgcaccaaaggtcggcagtgggtgtcactccagcagcaatgtccaaattaggacctaagttctatgggccatatcaaattctgcaacacatcggagaggtcgcctataagctacagctgccaaccaatgcaagaatctatgatgttttccatgtggcacttctcaagaaattccaaggggagcccccatccgcaccagtaccccttaccaacgattctgcatggcaaggtacttccggtttcagcacaagtagtgaaggctcgtttaaatagaggtgtctgggagttactggtccagtggcttggacgtgagccgactgatgctacatgggaacaatgtaatgagttcaagagaagatatccagaaatacaactcgaggacgagttgtttgtcggagaggagggaaatgttatagatgcttttgtgggccgccaattcacaaggcgtagaaataaggaagaggcgccaggaaaagaaactaacgcctaataaggagaagagataagtcaggaatagtttatgtttaatcagttcctaaataatgggttagtttctttttatgtggctaaatagtagcagtagatatgtctatcctcagatgatccagaccgcctatggctataaaggcggttgggcatcagctgtaataatctaccaggaataagatctcccttttgtttgggcgagatcacctgggatcatcctggccaggcacgacgctcgcgcaggagatctgggtgatcgacgccctcttcttccatacaccttgcgccactccaatctccctctccactccccattgaaggatacctggaaaccaaggttacggactcaccagctaggagtcggtaacaaatatatagacctctactagattgtgctccacctgatttatagaaacaatgatcagggagtcaatcagggagatctcacactaaataggaaacaaaatcacccattaacacctaatcaggggcaatcaaccaacacttgatagggaaggatatcacctaattaggggcaatcagccaacacctaatagggaaggaaacctcctaaacatggaaggaaataggctgtctaacaatgggtttttgcaaagtttaaactggtggattatatagtggtatagatatatctaggggtctaattgtatttatggatccctttatgtatgcttgtacctagcctccatgaggcttaacttttttgtattgtcgctttgaccttggctatttttcttcttaatataatgatacacagctctcatgcgtatttgagaaaaaaattgtaactgaagtcgagcgtgactatatatatgaaagccacccaacccacggggtgtgaggtgtttcactaatatctacatggtatcagacgcttaggttctccggcctttgccctagcccctctccactccacgcaccgccatccgtggtcgtgtgtccacctctgccgtcgcgtcgtctcgcgtgtccactgtccaccctccccgcttctatgcgcgctcgcgtatcccttccctagtcgccaccccatgcggcatccacgtctcctactctctccttcctaggttcctcggtcctcgcgtatggtggcatatgcagggtcttgtctgtgggattttcttactggcaagcttccctacctgtgttgccctaaggctcctacccaacttgtgatatcgtacacggttactcctgacgctaaggagcagcttcttacatattatgatgatcaactggcatcatatgaggttcaatataatgcatattggatttggctagatgaggatgttcgaggcttcgagctggttctattctcagtgctagtatggaggatcactttgttgcagaggttattgagtgtgacaattctcattagatgtggacccttcatgatcgctacgagcgtcctggtcactctacttatcttgctgctattcgtcaggagcattctttacgttagggagattctacagctgatgaattctacatttagttgtctgctgtctgacgtcagcttgatactcttggtccacagatatctcctagcacatgtgaaatctgtatgggttagaagactgaccttgagttttgtcgcacatataacttcttgactcatctgcatgatgagtttgagcctctttgcggtcagttacttgctcgtaacctttgtgtctctggtggatgctcttgatgttcataatgaggaaactcgtctttgtacaactggtctgttgtcttctttggtttcggttttgactgcttggtcttcgtcttcaacctgtgctccccagttgccattgccgtctgttggggacttgttctcaaatgctatgaatcaagaacaaggcaacacaaaatgttagatgttaatatccttcgtccttcagagcattatttccttaaggatataatgattttcggacgaaggttatgaaggacataccttcatcagcataaaatataataatgaagaaggaatcatatgaaacataaaagataacataaacagttgtgtattattgtcgactcatttccattttattatgatagaaaaatagaaatgatatcaaattacaaatgtaccttcagctcgtgagaaggtaaaagtacaagtgtgatgcaaaagccaatgccaaatcagcgtgaacagtacggggatactgttcacctatttataggcatgggtcgcagcccacgtaaaattacattaatgccctttacatttatcaataactctatgataattcttcgaggtctaatctggtttttcatctttaagtcggtttccttttccgccgctattccgaagctcttctacacacagcttcggctctgcgccaaccttcgtgttctttgtgcttcttcataccgtggctctgatccgagtccgaagatacctgttaatgtactttactccagaaacattgttaaatcatgtttttgaggaccttcggaagccgaaggcccccaacagtagcccctcacaatattaatttgttagaatgataaattcagattgcgaaatggacgaaggctatgagccgaaggtccgaaaaaacaccttccttttgctagaatagcaacagtcattggcaaatgggaccctccagtctccgacataatgggtttataaatacgggctcgccacaatttattcggcacgctctcttgccatctgttttacctgctcaaatagttttctgcctacaaatatttggttgcctccgtagttttaagcttcggaagcgagaggcaagaattccgaaggaatgtctgaggagaagaagattgctgccgaaatgaagctgagcctttctgaagagatgcatctgggttttcttgagtcaatggcaaagacaaatacagagaagattacaagggagattttagaaggtttatctgaagatactggtgacagtgacagttacgatgcagacaacgggggtgaagattccgaagatcggccatggcgaccaagccattcagtcttcggaaaatcaactattgggcaaagtcaccttgaaaacatgaaggggagatactttcgagatatgtccattgtgagagcagatgccggagaaagaactgtgccgactcccgaagatgatgaagtcgttatcttccgaagctttttaaaagctgggctacgatttcctttaagcagattcgtggtacaagttctgaaaatatatcaggtttaccttcatcaacttacccctgaagcaataataagaatgggaatcttcgtctgggctgcgaagagtcagggtctagagccaagtgcgaaaagcttttgcaatatacatgaattgttatatgaaacgaagccctggggtaaagagcaatatcataacaactttggttgctacagcttcggcgctcgctctggatcaagctgtcccgtgcccacctttcgtaagagatggcccggagaatggatgaaagaatggttttatgtaaaaaatgatctgaaggttcgagaggatattaaggatgtcatcatgtgccccatctggcagcgcttcggactccggaaaccgaaggtagaaatggatgaagcagccgaagaatgccaacgggccttcggcgtagtctgctcttttattgggacaagggatttaatacaagaacacattgccttcagagtatggcctcttgcagataattgggaaatgccgaaagaaactgttaaagaaactgacgaaggtgggctagtcaggctgaagtatacattcaagtatggagacaagttcgttgaaccagatgatgattggttaaagagcattgagactgtaagtgatgaattgcttgggatatattcgaaagccgaagatactgcattatcagcggcctttggaggccgaaaaaagaaaaagactgaaccgagtttttgatgcaattggattcgtgtaccccgactaccattatccagtgcgggggcagaaaaggaaagatacgacttctgcgaaagaaactgcttcagctgctcctagcgagccggcgccgaagagaaaaagggtgaaagttctcacacaccggccacgttacattgaactagccacagtacctgaactcggtagtgagacgtcttcggcccccaaagctaaggaatcaactccgctgccaggagccaaagagctggccgaagaaccaacaacaaaagaattggaggaaccaaaaattctgttaccagaaaccaaagagctggccgaagtgccatcgacaaaaaagatggaagaagcaaaagcatcaactgagggagcgaaaatatcagaaattttaagtccttcagaagaaattgaagcagcgaaaattaaaaaggggccaacagtgaccccaaaaagaaaaagaatgtttaatgtattggatgttttggaaacaattaaacttccaagcgcaaccccaaagaagactgctgagacttctgaggcgcttgttgaagtatccgttgctaaagctccgaagcaacagactggaattgaaaccgggccttcagaaccgaccaaggtaatacctttggaagcagaagaagcaaaaattgcaaaggcaaccgaagaagtgaaaatgtcagagccaactttggtcgaagaaattgatagcgctgcccccaaagcatcttccaaaatatacgattatatcgtgcgacatgcttcggggaaaaagttatcggaagaagaagtttttgaagctaatcactatgccaaagaattgaaatatccgaagggggcactagtgttcaatgggacgaacgaagaagatttcctatactgcctcccagacaacaaagaattgtccgtctgccgggagatggctagaagtatggggtttccgaagcttgaagctggcttatgtgctatgacgaaagaaaatctcgcggatagtcttgcgtacaatagcctgaaggtatgggaattagatgtttggaaattttataattcgtaactcattcttttattcttatacgaactctttttcatatagggtttaattctaagtaacgcattgagagcacaaaagagtgccgaagacgagagctatgaaatcgcgttcaacaatctacgatcagaagttattaaattgagaaacgaagctctggaaaaagataaaattctgcttacattagtagacaaggtaaaaaaggacgaagctgcttcaaaagcccaggccgaagctcaaaaacgtgaaattaaagatcttcagaaacagctagctagagctaaagaagaacgtatacttgaagagacaaaacgagagcttagtgatcaattggccaatcatttagagataagtgttaaggagcttcgtgcatcccagagaaaatgctatgttaaatccatagaatgcgtcaagaaaataaaatccagcttcgccagcgttggcgcattctctagcgaagagaatttttcaagaggcaatcctgaaggtccaatggaatggatcagtcacgaagcagaggccttcgaggaaattctgaacagccgcggcgacatctgcgctttttcgggtgctagagggattgctactgttttggagaagaaaggctgcgagcatgtaaaatccttagcgcagtccgaagctaccttgtccactgaagacattaaagacccctcactcgaagcaagcatggtcggcgggaaatttttcaccgatatctgggataacggcggccgagaattggcgcaagaaattattcaaaggagtgaaaaaggcatccacgatgctagaaaagtagcggaagctgtcgagaaaagtacagagcccgaagggcacatagatattaattaatggtttttatcatgctgtaatttttaattccagactctgttctcggtttgtaatagtaatatagccgtatcttttcttccctcagaacctgctgaggcatctccgggctcccacccgaagggggatgatgaaattagaaaaatggccgaagccattatggacaaggttgtcaaccaactattgaacgaagctgcagagatagtgcttaaagaggattgagtgtcattgtagaaacatttcaaacgtaaaaatgtgtaatatattgtaactttaaatgtaatatataatctatttataatttaattctttacgatgcatgaaactttgcatacataccatttttaagccttcggcgaaaaaacaccttcccttcttttcatgcttcgtgaagaaaatcctttctatatcacaagaattcgcttacttttctgatgaaaaatgtccaagcttcgtgaaatattttccgaagctataaaaaagttttgtgttgcgtttccgatgaggctacacttcattttgattttgtcttagcacgatcttctcttttccaaaatattctccgaagaccaacactgtatccccttcttgttccacatgcaatatgctgtatgatgcttatgttatgcagaatgatgtgatgatgttatgttatgcaaaaatgatatttgtgccgcagattcatatccctgtaatagagcacacacactttttatctcagcgctgactttttgctgtaagcctcctttaggagcttcttcgccttttactttcagcggaatcaacgtttatttttcgctgtaagcctcccttaggagcttcttcgccttttactttcggcggaatcagcgcttatttttcgctgtaagcctcccttaggagcttcttcgccttttactttcggcggaatcagcgcttatttttcgctgtagtttcagaaaacttactctgcgttcccttaggagcgactttttactgtttcgaggaatttgtactttgtccattaggacaaatgtttggtaatacaaaggtccttcatgccaccataaatttgtatgcttcggcaaatcaagcctatggaaaagacatatttttattatggtactagacgaaagtgttacaagaaatcgaaaaacgataaaagacacttaaactcctcataattgttccttactaacaaaaaggtaatactgaatgtaagaatgcgaaagagctgctgttaaagtaggatattcatcaataaatgtgcttcgactctggcacagtactgttgactgtgcgagcttcggactcctctctgaaatccctctgaaggtgattgtgctggctcccctctggttgctgtcctcgctgcgtcggcggcggtggtggaggattctgccaggatgcttggggttggcttgccgaagcgacagaggctgcagggtgattgcctacatattctggaatataaggcgaatgatacgaagcagtcatggtttttaaagcgttaaggcgctccaaggcgttggaccaccgcctagacgcctaggcgaggtaggcgggcaaggcgcctaggcgtcagaccaccgcccggacgcctaggcgtcgcctaggcgacgcctttaaaacagtggaagcagtatgcatgacctgcttcggctgactttgttgcgcagctgcttctgctatctccttctgcttttggatggtaacgtggcacatcctggtggtatggcccttatcttcaccacagaataggcaataaattttccttggctgatctccaaaccttcccccgaagcccctagcgcctctgcctcttggcgctggcggccgaaaagaactttgctgctgacccgaagcttgtgaagaatattgcggcctttgctgctggctccctcgatcatccgtttgagcagagttatgaattgacctgacgtgcctcgggtgaaatcttcctccgaagcccctggtcatttcagagaacctgaatgcttcctcccttctttggcggaagtcattgtcagctcgaatgtattcgtccatcttttggagcagcttctccaacgtttgtggtggcttcctggcaaagtactgcgctgaaggtcccggccgaagccccttaatcatggcctcaatgacaatttcattgggcactgttggcgcttgtgccctcagacgtagaaaccttcggacgtacgcctggaggtattcttcgtggtcctgggtacactgaaataaagcttgagcagtaactggcttcgtctgaaacccttggaagctagttatcagcatatccttcaacttctgccaagaagtaattgtccctggtcgaagagaagagtaccaggtctgagcaacactcttgacggccatgacaaaagattttgccatgactgccgtattgccaccatacgaagatatggttgcttcgtaactcatcaggaattgcttggggtctgtatgaccgtcatacatggggagctggggtggcttgtaggactggggccatggtgtagcctgcaattctgttgagagaggagaagcatcatcaaaagcaaagtttccatgatggaaatcttcataccagtcgtcctcattgtggaagccttcctgatggggctctctacgtggaagccttcggctctgatcatcttgaacaagatgacgaacctcttcagaagcttcgtctatctgtctctgaagatcagctagacgagccatcttctccttcttgcgctgcacctgttgctgaaggatctccaggttttggatctcctgatccaggtcatcctccggaggtgtcggattaatagccttcctcttctggcttcgggcctctctaagagaaaggacgtcctgattgggatccagcggctgtaaagtaccagcccctgtcgctgaagcttttttcggcggcatgacgaaggtgatgcttgccgaaagtgttcaagactcaaaaaatggaagtgagttcaccggaggtgggcgccaatgttggggacttgttctcaaatgctatgaatcaagaacaaggcaacacaaaatgttaaatgttaatatccttcgtccttcggagcattatttccctaaggatataatgattttcggacgaaggttatgaaggacataccttcatcagcataaaatataataatgaagaaggaatcatatgaaacataaaagataacataaacaattgtgtattattgtcgactcatttccattttattatgatagaaaaatagaaatgatatcaaattacaaatgtaccttcagctcgtgagaaggtaaaagtacaagtgtgatgcaaaagccaatgccaaatcagcgtgaacagtacggggatactgttcacctatttataggcatgggtcgcagcccacgcaaaattacattaatgccctttacatttatcaataactctatgataattcttcgaggtctaatctggtttttcatctttaagtcggtttccttttccgccgctattccgaagctcttctacacacagcttcggctctgcgccaaccttcgtgttctttgtgcttcttcataccgtggctctgatccgagtccgaagatacctgttaatgtactttactccagaaacattgttaaatcatgtttttgaggaccttcggaagccgaaggcccccaacaccgtcgttagcacccttttatttctacacgtggagggggtagtggtcttcattgcaatcattgtggacaggatggacatgtggagtctttctgttataggaagaagaatcaagggttgcttatcgttcttcaaagactagtaatcctactactggaggtccagctacccaggagatgctcatgctccttcatcgccttgctccctctgcaccgccgggagtcgctggttcagtagcacaatctttagctttgacaggtggacatgcctggattcttgattctggtgtttcttttcatatgactccttattccacccatctttcttcgatgcgggctccatctcattctctcattattgatacaactgatggttccccgttgcctgttgctggacagggcactcttttgtctaccacgtttcatgttcctgacctaaaaagatgcagcttatgcaggggtgttagatatgtatatctaggggtctaattataactgaagtccaatgtgactacatatacgaaagccacccaacccaaggggtgtgaggtgtttcactattctctgcacaaactctaattacaacattgctaccatacaataaataattgaagttcaatgcaaatgaaacttcaattgaaagtttgatggtgttaagtgcaagttcatgtacttatatgtttagtacggattcatatttctcaacatcttcaaagttcagaataagacagttttactcaaatatgcaagggagctgcgtaacattatattaagaaaaaagggcaagaacccttactaaacaggcacattcacacagattgcaacatagacatttatgtgtttatccagatttctattttgtttactctcgtcatagtgataaacaaaactatacaattttctgttgatgtttgtatatttgttacaaaaatcattattgaccatagaatacattcagaggatatgcttgttatggtttcttgtgtatatttcttcagtgagatgatcatgctgcagattataatgtcgcgtttcgaaacttcttcctttctgaaattgccctgttaggtccagcattgggcttttatgaatttcctcactaatttgtagaaattaaactgttgtgccctcttttgggtcgtcaagtcttactttcttccaatgtttcaggg

SEQ ID NO: 790 - DNA, 2539 bp, Zea mays
  Intron number 2 from transcript GRMZM2G330575_T01 (locus G RMZM2G330575) derived from phytozome v7.0 (chr-ID 3; pos 1 55890063 to 155892601 reverse strand)
ctaggttccaggtaacaaatagatctctaaacttcttattttttacacagatttgcttattttcttcatatctgaccgggagagcttgctatcctacacttgaactgcttctgcattcctacccaacaagcagggcccttcttttggtggagaagtaatgaactcttactggtttgagaataggtaagtccttggctttttgaagaacagtagcctgtagaacttctggtaggcaaacagcagatcctgtttccttatgtaacaccttcgctaaccgacgattaaatttctgcgacactatccaagttgtatggtaaactctctgtgatatcatcttaatatgtagagaatcaactcttcccatctctctagcagctgaagagtctagatttcccgaaggaaatcagcagatactgcaagtattcatgttattaatgaagcagatacatcttctctactactcatacctgagtatgtacctgttactactcatacctgttagtatctattactcagtcagtttgtgcacacatccataatttcaatcgcagtcgggtactttcctacttacaatacaattgctatgtctgggtaatcagttttattctttaattttgattttgattttggctagatgttttggtaaccagacatagcatagcttcagtgacttattttcttacaatctatcccttttttatagtgtaacgcccagacccatgttcattttaccagtccgcaaaacagttgttgggaggcatgtattttttttcaaagtaatcatccttagtctgcaatttagactaaatcaaaacagtcgctgggatgcagttttttctattagacagtagttggaagttaatttttttaacatgcctcaacatagatgacgtcccattactactgaagcaaaaaaaacattgcaaggttaaacactcgggttaattgctatgtctgggtaatcagttttttgtttaagtttgatttagtctatatgttttggtaaccatacatagcacccttagttgaatcagtttttttgtttaatttcatgaaacttgacagatgatctacgaaaccatgaccaatatctttcatgttaattgaattacaaatattgcatttaaccctttcacaaaacataagtattgttgcctacctctgcgccccgtccgaatcggatagcgtcgtggatctgttcgtcgggcggtgcctcagtggagatggtggatgacgacggtggatctcgtctggttcggatcgtcgtcgccagccaggtaaatctgattgattcttctccttacctgcttctcccggtgtggatctcggctctcgacgagtttcagggggttgttcgtaacatctgacaagatccgtggcggctgtttaggtgctggatccgtagcggcggcggcagccatggataggagcatgctcggcgacctagatggcctccccgaggaggacaagatgcggatggccgccatgatcgaccagctctagatccgcgacaggttcgttccataccaactcgagccctcgcgcttgccccctacgccacctactcgagccctcgtgctagccccctacgccacctagccgttcgccgagtgtcgagtcctcccagccgcctcccgctcgtcgcgacctgcagacctcggtcatcaggcggtgttcttccgacctttcgtactgtcgctcatgaatcccgttctgtcatgaatttgcatgcagtagctagaactagaatgcctgcgaattagtctgccttctatttttattcatcagagccaggttacgatatggtggtagtagctgtgatgagcactgctttcttctgacacctcttgtatgagcagggacttcgttcccaccgttgagcagattcagcaactctttgagctcttgcagtcgcccgcgtctacgctttgtggtccgccaagagaagcgcaaacgctcctgcgtcgccgtccaccgaatccccgaccgcgcccggcgcccttcgacctccgttctccatgtcggcgtgaaggctagctcctgctaggcactgggtagcgggttaggcggtgctgtgcagatccatctgcgtcccgccttgttctgttctgtgctgccgcttgtcgctgcgtcattgaccaagtgctcctgtgccagccggcctacggccagcaccacagttcgcagggacgctggtgttctctcttggctggccccagtcccctgctcgtcctgcacagtgagtcagtgtgattgtttgatttctattttttgttgcatcttattccggtactgctttgtttccttcgtcagttgcacatgttcttaatttattctccttattaagtgtgaagtcaggaatccgtttgtcactccttaagtttgtagtgaacttgtaacttgtttaagagcatctcctacatatcctaaaattaagtacgaaatcaggaatccgtttgacacctcttgtatgatgcaggttaaggggtgggtatctgttgtttcagttgagttaattggggactggttgtaggcggag

SEQ ID NO: 791 - DNA, 7353 bp, Zea mays
  Intron number 2 from transcript GRMZM2G068008_T01 (locus G RMZM2G068008) derived from phytozome v7.0 (chr-ID 7; pos 2 902998 to 2910350 reverse strand)
attttgcttcgccctgttaacatatttgttggggacttgttctcaaatgctatgaattaagaataaggcaacacaaaatgttaaaggttaatacccttcgtcttttaaaatattatttctcttagaatataatgatctttagacgaatgtcgtgaagaacataccttcatcatcgcagtatatgttaataaaagaagaagcatatgaaatataagaaacaacatgaactatcacataacattatcaactcatcttcattatattatcatgagaaaataaaaataatattgacttacatttagtaccttcggcttgatagacagtaaaggtacgagcgtgatgcaaaaacaaatgccaagtcagcgtgaacattacgtgagtactgttcatctatttatagcacgagacacagcccatgtaaaattacatccagaccctttacatttgttaataactctatagcaattcatcggggtctagatagccctttctcctttaagtcggtttcctttttcctgtcaacatgccgaagctcccttgcgtacagcttcggctctgttccatcctccgtttttcttgtgcttcttcgcattgtgattttgactcatgtacgaagggtccaagtccgaaggtacctattcatgtattatactccagaaacatcgttaaatcacatttttgaggaccttcggaggccgaaggcccccaacagtagcccctcgcaatattaatttgttagaatgataaattcaaattgcgatatggacgaaggccttaagccgaaggtccgaaaaaaaactttctctttgctagaatagcaacagtcagtgacaggcggggccctcccacttgcaacgcactgggcgtataaataagagcgcactgcgagcacacttggcacgctttcttgccatctgctcttgctttctcaatattttagctcttggataccaacgcttgcctggctttttagactttttagcttcggcttaaaaagcacgttttcgacattttcgaagatgtctcaagataacaaagctgtcgtcggagcaaagctgagcctttctgaagagaagaatcttgggtttattgaatcgatagcaaagacgaacacatagaagatcactagggagattttagaaggtttatctgaagatactggtgaaagtgacagctatgatatagaaagtggaggtgaagactccgaagatcgaccgtggcgacctagtcatgcagtcttcggaaaatcgagtattaaacagaatcatctcgataacatgagaggaagatactttcgagacatgtctactgtgagggccgatgacggagagaggactgtgcctactcccgaagagaatgaagtcgtgatctttcgaagcttttttaaagctgggcttcgtttccccttaagcaaatttgtggttgaggttttaaagatatatcaggtttaccttcatcaaattacccctgaagcgattataagaatgggaatcttcatctgggccgtgagaagccaaggcttggagccaatgcaaaaagtttctgcagtatgcacgaactgctttatgagacgaaaccatggggcaaagagcaatatcataacaactttggctgctatagcttcgtcgctcgctctggcttgagctgcctcgtgccaaccttccggaaaagatggcctgaggactggatgaaggaatggttttacgtgaaaaatgacttaaaggcttgagaggacattaaagatattatcatgcgccctatctggcagcgcttcggccttcggaagccgaaggtggaaattgatgaagcagccgaaaaataccaaaaggccttcgacacagtatgttgtttcatcgggacgagtgatttggtccaggagcacatagccttcagagtgtggtcgcttgtagagcaatgggaaatgccaaagaaaactatcagtaaatctgacgaaggcggactggttagattgaaatacaccttcagatacgagggttagtttattgaaccagatgatgattggctaaaatgcatcgaagctacaagcgacgaacttcttggaccatattcaaaggcagaggataacgcgctgtctacgaccttcggaaaccggaagaagaaaaggttgaatagagttttcgatgctattgggtttatgtaccctgattatggctacccgctgaaagggcaaaatagaaaaagcgtcacttctggaaaaggagatgcttcagttgctctaagtgaggccgcgccaaagaggaagagggtgaaggtccttactcaccgaccgcgcttcatcgagccggcctcagttcccgaatttggtggtgagacctctatggctattgaagccaaaggacctgctcttacacaaaagaatgaagagtcgactgcaacaccgaaggctgataaaattgaaggaccgagagctaaagggacaaaaacatcagaaattttaagtccttcggctgaagttgaagtgccaaaaacccaaaaaggtctagcagtgaccccaaaagaaaaaggatggttaatgttctggatgtattggagacaataaagtcttcgagcaccataccaaagaaaattgtcgaagctcccgaagcgcaaaccgagacaacatcctctgatgccgaagctacaaagcaccaagctgaaactgaagttgggccttcagagcccgccaaggtgaaatccttgagaaccatagaaaaataaacagaagcatcagaacaaattttgactgaagaaactagcactgccacccccaaagcattttccgaagctctcaattatactttacgacatgcttcggggaaacagttgactgaaaaagaaaaacaagaggctcagttctatgcccaaaaattgaaatatccgaagggggcattgattttcaatggcagcggagaagaagacttcttatactgtctcccagacaacaaggagatctttgtctgctgagagatgggaagaagcttcggattcccaacgctagaagacgggctctcagtgctatcaaaagatgaattggccgacagcttagcgtacaacagcttaaaggtgagaggacaagatctttgtgtttaaaaacaagatgtttttcgtttgcttatacttaataccacacttcttttacagggccttattcttagcaacgccctcagggcgcaaaaaagcgccgaagacgagggatataccatggccttgaataaccttcgttccgaagtaattgagctaaggaacgaaggtcttgaaaaagacaaaatattaaactcactgataaacaaggtaaaataagacgaggctacttcgaaagcccaatttgagacccagaagcgcgaaattgaagatcttcggaaacagctggcagaagaaaaattaaaatgtgtcgttgccgaagctgaccgagatgccagtgaatactggaaaaatcactgggagaaaacagttgtggagcttcgttcttcaaaagagagatgctataaaaaatctatggcatgtgtagaaaagataaaaactagcttcgccaaaattggcgcatactcaaatgaggacaacttcgtagtaggcgatcccgaaggtccaatcgaatggatcaagggcgaagccgaagcctttgaggaagttttgagtggccgtggagatgtctgtgccttctcaggtgccaggggaattgcgactatcttagagaaggcaggatgcgagcacgtgaagattctggctcaagccgaagctgcgttttctattgaagatacgaaagacccttcggctgaggcaagcctaattggtggaaagttttttaccgatatctaggaaaatggtggccaagagatggcccacgaaattataaagaagagtgaaaaagatacccacgatgctagagaagcagcaaaggcagttgaaaaagctgcagaacttgaaaggcatataggtattgtctaactgcttttgactttatgttttattcttgtgacttcgagtttattcatgttttgtattgcagccgacttatctcctcccccggagccctttgagtcacaaacgaaccccaaagcaaaaagtgaagatgaaatcattaagatggccgaagctattatggacaaagttgtaatcaactactaaacgaagctgcggaagtagttctaaaagaagactagctattgttgtaaaaacattcggagtactgatgtaacatttgctgaacaaagtgtgcaatattctatagttttgtaagtaatatatataagctgtatgtaattcagttctttacgacgcatgaaactttacatacataccgttttttagcctttggcaaaaaaacaccttcccttcttttcatgcttcgtaaagaatatccatattcgtgaaaatattatgcttcacaagcaatagatttcctccaatgctaaagttgacgaaactgcacttcttcagactttattttgtgctttggcacaatttcttcgaaaacaattttcgaaggttaatattgtattcccttcttgtgccattgatgcaatatgatgtatgatgtcatgtttatgcgaatgatgtgatgatgctatgatatgcaatgatgatatttgtgccgaaggtacacacacattcccacagtagaatacagtctccttaccgtttatttttcggcttcaccgtttatttgtcggtgtatcagcgttgacttttcgctgtaagcctcccttaggagcttcttcgccttttatttcggtggtaccagcgtttatttttcgctgtaagcctcccttaggagcttcttcgccttttatttcggcggtatcagcgtttatttttcgctgtaagctctgcattccctttggaacgacttttgagtagaaaacttacgctgtgttcccttaagaacgacttctgttgcttcgtcaaaacttttggaacttcgtcgattaatgaggaaggtatattacattatgataatgacgaagctattgaagtcaacaaaagaactaaactttcaataattgttctttattggaaaaggtaaatgataataaatgtaaaaactatttcagaggtaggatatgtcttagtagatgtgcttcgattctggcacagtactgttgactgtgcgagcttcggactgctccctaaagtctcgctgctggtgagtgtgctggctcccttctggctgctagccttggggataaacgggttgtattggtggtggaggtggaggctgttgccaagatgcctgaggttggcttgccgaagcaacagaaactacaggatggttacccacatactctggaatgtatggtgagtggtacgaagcagtatgcataacctgcttcggctggctctgttgggctgcagcttctgcgatctctttctgtttctaaatggtgacatggcacatcctggtattatggcccttgtcctcaccgcagaataggcaataatttttcctgggctgatccccaaaccttcctccgaagcccctggcgcctctgccccttgaagctaggggccggggatagttctattgctgccccgaagcctgggaggaatactgcggcctctgttgctgactttccctgtcgtcattctgagtagagtggatagatctgacatgcctagggtggattctccctccgaagcccctggttatttcggagaacctgtaagcttcctcccttctttgtcgaaaatcattatctgctcggatatattcatccatcttctgaagcagtttctctagggtctgaggggttttcctggcgaagtattgggctgtaggtcctagccgaagccccttaatcatggcctcaataacaatttcattaggcaccgttggcgcctgtgccctcagtcgtaagaaccttcggacatacgcctgaaggtattcttcatgatcctgagtgcactggaacaaagcttgagcggtgaccggcttcatctgaaacccttggaagctagtgatgagcatgtccttcagcttttgccatgatgtaattgttcctggtcgaagagaagagtacgaggtctgtgcaaaatttttgactgccatgatgaaggatttcgccatgactgcagtattgccaccatatgaagatatggttgcttcgtagctcatcaaaaattgcttcggatctgaatgcccgtcatacattgggagctggggtggtttgtaagatgggggccaaggtgtagcctgcagttctgctgacaaaggagaagcatcatcaaaagcaaaatttccatgatggaaatcctcataccagtcatcctcgttgacgaagttctcttggtgaagctctctgtactggggcctccggttctgctcatcttgcgtaagatgacgaacttcttcagaggcttcgtctatctgcctttgtaggtcagctatccgggccatcttttctttcttcctttgcacttgttgatgcagcatctccatattcctgatttcttggtccaagtcgtcctcctgaggcgttggactggtggccttcctcttctggcttcgggcctcccgaagagaaagggtctcctagttcgggtccagcggctacagagcggcagcccctgttgctgaaactttctttggcggcatgacaaaggttgatgcttgccgaaggtggtcgaaaagggttcaccggaggtgggtgccaatgttggggacttgttctcaaatgctatgaattaagaacaaggcaacacaaaatgttaaaggttaatacccttcgtccttcgaagcattatttcccttaggatataatgatctttagacgaaggtcgtgaaggacataccttcatcatcgcagtatatgttaataaaagaagaagcatatgaaatataagaaacaacatgaactatcacataacattatcaactcatcttcattatattatcatgagaaaataaaaataatattgacatacagtaaaggtacgagcgtgatgcaaaaacaaatgccaagtcagcgtgaacagtacgggagtactgttcatctatttataggcacgggacacagtccatgtaaaattacatccagaccctttacatttgttaataactctatagcaattcatcggggtctagatagccctttcccctttaagtcgatttcctttttcctgtcaacatgccgaagctctcttgcgtacagcttcggctctgttccatcctccgtttcccttgtgcttcttcgcattgtgattttggctcatgtccgaaggtacctattcatgtattatactccagaaacatcgttaaatcacatttttgaggacatttaacatttttgaggaccttcggaggccgaaggcccccaacaatgtttttattgctgtcgtgggctcttcacaatttaa

SEQ ID NO: 792 - DNA, 2073 bp, Zea mays
  Intron number 6 from transcript GRMZM2G062453_T02 (locus G RMZM2G062453) derived from phytozome v7.0 (chr-ID 7; pos 3 4016400 to 34018472)
tgtgacacagaggtaagcaaaattttattatctccccataactcgcttatgcttgaaacgtagaatccacaaactgtatgctgccatgagtctgaatggtttatactcccctccattccaaattgtaaagcatttttctagatgctcatgtcaataagtcttagtttcatgattgtaggaagcgttagtgacaggtgatacatgcagtgggatgtatgaaaatcggaaaaatattttgttctctgtgttgaacaatcaaaattgcgtttgcggagcatttacattcttgaattagaggcaaagcatgctgtacgaacagatcatgaaattgcaaggggagcaactggcattgttcggttgaggggtcgccgtagctacaaaaatcaattttgtgttcttcacagcatgttgttgacttgtattaagttgcgtttaatgttatctgtcaagttgcataatttaaatatgcctgaaaggatgaagggcccactaccccatcagaattaggaagaggcctgctgctgctgcttttaggtggttttggaagagcttggttgtttggatttctgttggactgtggtacgatagccgccttaggtgaaatagtgcaactacttgactggcatgatgtcttcttcattctctatttaggtaccagctcaaccattgtgtgctctcgtccttatgaggactctaatcaccaggaacaagctatagctatgtaattcttgctgtggctttgtttgtgtcatctacctgtgcacgcttgtacacataaaaccatttattttatataaaccatataaatatacatgttgtttttcatgccatcaataacaacaacaaagccttttagtcccaagcaagttggggccgtctttcatgctatatgctgccaaatgatgctgaattgctgattaactaggatcagagagtactgagcttattcttgtggtcagttagttaaagcttggttggacttcttgggaaccaacttcaactctttattttgggcaatcaaatccttttcttttgcacagaatagattgtaatggtagttaactgtagttactgcattggattccaagtgaatctgattgctgatttacttgatacactccaccagaggtatcatgcatggtgacatgcataagaaaatatggggatttttttggcagagatcatgtagcattagttgctctatatgtctatagtcatgttatgtacttgctccttgagtttaagtaacataaatcagggcacgtctgccatactgtgagttcagggtatttaaactcaaagtctcatactgagcagaatatcttggacagtaactcagcaactgattaacccttcatttaaatggcatctaagagagctttaacaagtatcactgaattatcaacacaggatgcacaaactgatgttctgatttatgacgtcctttttcctcatttcctgatactacctatataacattgcctttttatgtgatacacggtaattattgtaatttcatctgtgttatgtgctgcttccactatgtcgcacttagttcacagcctttcttatgaagtctaattttgttttttaatagatactagcatgttctaattttgcttttggcttgtgtattccgtctgacacctcttaggggttcttgagtttcgtgttcatgattctctgttttctttttgtcttttgtcccttgctgcagacttgatccatattttctcctctgttccaaggcacctcaactttattgatcacaccagtgacattggatggaaagagtatgttctgtctgaacatagcaatagtgaatggtacacagtgcactgctgttagtttcagcagcatacttattttgcaggtctcagagagtgcagccgattatagtagatgctggagtatatttggcagggaggaatcagttcttccaagccacagagaaacgagacactcctgatagtttcaaatttttcacaggcatttctctttacttgcagtttgttttccacctgcttgatgaaatggttttctaacacagattcccttcctgtcaggttctcc

SEQ ID NO: 793 - DNA, 9645 bp, Zea mays
  Intron number 1 from transcript GRMZM2G171807_T02 (locus G RMZM2G171807) derived from phytozome v7.0 (chr-ID 8; pos 1 3198849 to 13208493)
gcagtggcagacaagtaagcttcctctttgtactgaatacctattattaaaaaaaatttaccggatgtcacctgatactccagcaggaaattaaaccgaccagtatagccatatagagacatcgtcagagtactgcacctgcactaggcctatacccaaaactaaacatttgatcacttatcgtttaactaattggtcagcctaaacaaccactcgataataaacagacaagatagctactaaaacactctaatcagccgactgaacagtaccagttttaatggaacgtatgaacgaactagactaacaacgacccttatatttagaaaaaaatgatacattattcagttatttattctgtaaataatgtttcacaaaactttgctacttgacttggaggcttggagccgagcagcgttgcctggcccagccagagattgcagacccagaggtttgtttagttgccgtcttggccggagttagacagatttgtcagttagatactcaggtttgtcattcttcaaacaaacaagcactaagtgtttgagactaaggtcctgtttcaatcttttcaatctcattggataaactttagctttctgctaaactttagccatataaatagctccttagaaagtttagactagcatattgaaataaaaaacacaaatgcctgcttgactgagccgagcagcgttgcctggcccagccagagattgccaggtttgtttggttgccgtcttggccggggagtgctggcctggccagacagctcggtctagttctaggcatttaaaattgaaacacctaagattgctacctgggtcagacagatttgtcagtcttcaaacaaacaagcactaagtgtttgagactaaaggggtgcactagaactaatagttagttaactaaaaattattattggaattagctagctaaaaaatagctacctaactattaactaacttaccaaaaatagctaatagctgaactattagctacggtgtttggatgtctcaactaattttagccactaactattagctctagtgtattcaaatatcccctaagattgtttatctggcaggcaaatgactagaagggctccaaccaagctagcgcttaaatctgcctaaagcttcctagtcctaggcatgcaattcaacgcgttgtacctttttttgaatagtcatagtatttttttctcgtgttaaaattcgatgcttcgatacatacgtgtgttatactattatatgaccatacataatcatccaccatctccatttgttccattttcatgcatgggtcaaaacaaatcctaaaacaatgttgtttcgtctatcgccgcctaagcatcgctgaccactttttaaagctaaggttataggtgcaactattttttcccctcaccgatagtctggtctggtatttatttattacctaatttagggagtatttgatatctatggactaatttttattccatctattttattctattttaattactttaagtgatggaattcaagtattccaatttgggtgtggatcattagttacagttcagacaaatggagccttgattgaagcttccagtcaaagaactcggaatttgaccttccatttcatcggttcgtgctagcaaaaaatacactccaaacttagaagtccctacatttaaccatcatattctttagcgtgtctgattctaacaatttccgtgcacaacactaacaaagagaaaagggaaattcaactaaccccccgtttggatcactggaattgaatttcattctaataatagtaatttagtcatatatcaattaagctaattcgcttttatgcaaaatatttttgtatactattattagtaagatgtcgaagatatttatgtgctacatttttattatagagaagtgggacgaagagtatcatgtaaattatagagtagaaacaaattctattaatgcacaaaaccatttcatatcctccaccctatgaaattgagataggtttatatatgaactttggaaagttgtggtatgccaaattccaaactaaataagttactttattgagtgaattcaaatttctttaaaataaagggatgcaaacgcctcgtaaaataaaaggtactccctccgtttctttttatttgtcgctggatagtgcaattttgcactatccagcgacaaataaaaagaaacggagagagtatcgtatttgatgcaaaaaaaatggacagtcttcttataccaataaggtgtgtatcccaaacaacctatagaaaacatacacaaacaaagtatagttatgggcaggatgggtagtgatagaacgtagattctaacagatattttttctagcacgagcatagtcgcccctatccaaaaaaagaagaagaagctattgccacctttgcaaagcaccgcttccactgctaggaaatggacagaaacgcgtctgttcaataaagaatttgatgccggctgttgtcaatacactttcttgacctttccaacatattcaggtgcactatcggaaactgctttgtcgagtatctgaagcactcgataaagcctgaaaaatattcgacgaaggctttttcaagtgtgacacttagcaaataaaactcggtgaactctacatcggcaacgacttttttgccgattacttttaacggataatcggtaaatactttgtcgagtgtcactcgatacttagtcacggcgctcgatacttagtcacggcgcccggcaatggtaacggagtttttgaagagtgcccacaaagtggcactctgcagagcgctaattacttgacaaaaagcgagattccagtagtgttggaaagatgaaactacgagccaaaatcaaaattcatctagtgtatccgtcgatcatctttcctattggaaaaaaaaacaaggtctgttagcctccgtcgagcatttggcacaaagcgggggacgagcttgttggccgacaggagcgttcgtgcctatccggaggccagaaagattatcaggggacagggggcgcgcacggtcacgcgtcactggctcgccactgtcgcgtgcgcatcgtcgggcacctcaggaattcccgtgcgccgatggcgacggccgcgtccagtcaaaggtttcggccccagtgcccacgcacaggacgcgcggactcacgatctatctcccttttcccatcaccttcaccacttgcggtgccatgctcccatggttgcggctccgtccttgtcgcggcgcggctctccctcgtgtcctgggtctggatggctgcatggccgtggcagtggcactgccacccggtgccacccgtgacgctctgccccccgacgcgacgcggcggcgtgagcatcgccctcccgttcgggctcgtccccgaccacgcgatggaggccagctgcggggtgatcgggttccacggcgtgaggccacctcgtggacacggcgtgcggcgacaggacgctggtcgccgtcgccaggcgccccgccgtgcctggcagctactacttcttggagggatgcaacgccaccgtcgtgcccatgctcgcgaggaccggcgacgtggacccagcgaactacagggagttcgtccgtgagggattcctcttgacatggcaactgccgccgcggtcgtcgccgccatcaccagccggtaagctcgcgattagaatctagcttggaactgctgctacatagtatagcatagcacagagagaattgcactcgttgggcactggtctagaaaaagtgtcaacggctagccagcaggcaccacagccccgggctgtcagactcagacgaccacgagaacatgacaacccaaacggccaaaccaccacggtgttcgcccgctgattcctgattcgtgcttcccaaccgcggtggtcggtacgcgttttagcttagccgccgccgccgccgctttgctgtacggggtccggggtcggcacctcggcggaacggaagtcagcctggaacagaaataaggaagtgtttggtttctagggactaatttttagtccctacattttattccactttagttacaaaattatcaattatagaaactaaaactctaatttagtttctatatttgtcaatttatatactaaaatggaacaaaatgaagggactaaacattagtccctagaaaccaaacaccccctaagttcagaaagaaaaaagagaaaaataatacagtacaataataatcaaacgcttgcaggcgttgaccacgaccggtcaaaggcgttctccccttcatcatcatatccgtcatccgggcgcctcgctggcttgttccattccgtcttcgggtccggaggtcggaggtcctccctggccgtactccgaaatctacccactccctccggcgccgctgcagtgccacccctccatcggtccatccccaatccgctatgcaaccgctactcctactgctactcgcttcctccctcctccggccgcctgcggcggccagcgcggcagactcgtcatcaggctgctggcccaagacatgcgggcacctcaacgtcacctacccgttctgggtggaggagcccgggcgggccccgtgcggaccgccgtccttccagctcaagtgcaacggcagcggcgcgttcctgagcatatccgtctaccaggcctaccaggtgctcgacatcttccccgagaacagctccttccacgtggtggaccacaacctcccgctcgccaccggctgcccggcgccgacgatgaacatctcgctcttctcgcccgggacattcgtcttcagcgggctcaacagggagctgctcttcctggggaagtgcacggggttcccgccggcggagtcggccgggtttcgcagcctgccttgcgacaacagctcctttgtccggctcggcgacggccggaatttctcgagccagggcatccagggcggcgtcccgcacggctgtctcttcacagtggtgccggttctcggggctcctgatggaaatggggacgacgacgactacgtcgccagcatgaggaatgggttcctcgtggattggaaagcggtgccaggggattgtcccaagtgcatggcacgcggcggggaatgcacgtacggcggtcccgacgccgagttcgcctgtgattgctccggtggcaagtgcggtgagttcaggaaatttaaaacgcgcagcaatttcgactttgttttttgttgcaaaagcagcaattagtttgctaacctggaaggagtaaagttggcctatcccaaatagtaccaagaggaggcagaacacacactgacacacacacacacacacaaatcagagaagttcaagcacaacttacggaggaatgctgtactcctgctctcctagcagtaaattaacacttcaccatcacttccttttctcgaccaaaaccagtagttcttacgtcatgcgatacaactatatatgcatatcgtacttacgaatttaataactctgcattgaccattggggtgccaaatacggttctgctaatgccataaagtccccatcgggaaccattgaataataacaagttaacaacaggtcgccttcatacagtttagcgtgatcggctacatggaatatagaatgctgattgggaagaagtttgtcctgcttttatgcagacagtcttcttcgactgcaaattattttttggttgattggtgcaagttattccattgaggcccactgtattatagtcaaacacattggttgaagtattcaactgtactacttgaaaaagatgccatgccaatggtccttatccctatttttttcttctagtgatagctggctagagaactgttctagtatttgccagccaatgcactgtatttttctaagcaaataattcaatttatctgtgtggaatcaagcttctaaagctgatatcaatgatgtagtgaatttaaacggggagcaatcatacccgtgtgatgtgactgtctgttttcaactgcacagcagtgatgttaatcaccccaccaacaattattgtgactagtgatcatgttttttcacctggacaaaaggtagaaacaaacaaactggactactctggatggcatggacacaattatttgattgatttgatattaattcacaagattccttgttgtttatttttaaatttgcgaaagggcctctagctgagttggttaggtggtctgagtagcactcctcaggtcctgggtttgactccccgtgggagcgaatttcaggctgtggttaaaaaaatcccctcgtctgtcccacgccaaaacacaggtctaaggctcagcctcggtcgtggtcgttctcatatgggcttcgatgccgctgtgtatgggtggggcaggagttcggcggttttctcgacctgtgtgagaaggtcttcttcttaattcagtgccagggggctgtcttacccccgcaggtcgagttttttttttttttttgaatttcatgtttcctcgctggatcatattgctcctgcgtgcattttgtaagcatgatgtttgaggtgtcttagtataagtgctattttcttccaccatgacttctcttttctggcttctctgcagactgcagagttagtttgcacaaggatttgtttagtactttctagctacagttttctgaggggtattttttctaacccttatctaattgcatctttggttctatctatgcggagaacctactgccttacccttttatattcttctgacaccagagagtttaccctctagttatccctgttttatcttttctgccatttcatggtgaatatagtttgggccatcaaccatgactaacgggttttatcactctttgggcaagtcaaagtcaatggtagtaaccaataccaatgcaagaaaattctgtcaaacaagatactgggttatcggttatcaacccaatttaacatgtaccagttgtgcttcaatcatgttttttgatcttatctgaattgttccctggtgattaggtgttagcggagaccccccttgtttttggcgtacccttttttttgccccatccctccaggtgtggtgttcgtgcgtaagttgttagtgtgtatggcagtgttattaaaacaatgtttaaacatcaaaactctaattaaaggttgaaaccgtgttttggcgttctaaactgtaaaacatagtgtttcatgcattttagaccattagctacttttgggtccaatccggcttatgggtgaagttttggtaagccactaacctcttgttaccgactcctagctggtgagtccgtaaccttggtttcgtggtgtccttcaatggggagtggagagggagattggagtggcgcaaggtgtatggaagaagagggcgctgatcacccagatctcctgcgccggcgtcgtgcctggccaggatgatcccaggtgatctcgcccaaacaaaagggagatcttattcctggttcattattacagctgatgcccagtcgcctttatagccataggtggtctggatcatctcaggatagacatatctactgctactattcagccacataaaaaggaactaacctattatttaggaactgctactatttagctatataaaaaggaactaacctattatttaggaactgattaaacagaaactattcctgacctatctcttctcctaattagtcgctggtctcttttcttggcgcctctttcttatttttgcgccttgtgaattggcggcccacaaaagcatctataacacctctctattttggtatttaacttcatgttattgtctgaaattatgacatattggtatttttcctatgttgtttaaaactacgtttaaactttgtttaaaatgtttaaaagtcaaaacttcacccataaatgtttcaacgttttatcgtttttgtctttgttgttgtcattgttttttcttcttctattaatggaatgatacacaaccctcctgcgtgttcaattaaaaaaatgtttctttaacagacgatgttcctgttttcggcagttactgagttaccgcataatctatatggacaaacaattttgatatcatcactgtggtctaaaagtcaagattgttatttcttttacttctgacaagctgatacttagtgatgtttcttgctatatggtaccaccttcaattaaaaatctgaaatccaacagttgctgcattttcttgtgccgtctttttcagatttacaccttcaatttcttaccataaccatttatacgtagacacctcattaagatttactccctccatcttgttatagtgtattctagaagtttagtacaattaagagagaatacaaaagacaaatatacccttcattttctaaccagatgctatcatcagcgtgattaatggagattggttgataaatggcaagtaacgatataatacctaccaaatttgtgctactacttaatgtgatcttgtcccctagaatgcttgaatcaatgttatcaagtcgcatcgcaattagccatcctgtcggtaccctagactcaactaggggccacaacttattagaccaattagttttctggtcacctgattagtaatcgactaatcaccattagttggacgactagggggtggacgatcgggaacaactagggtcgactagacgatttaataacattggcttgaatgcactatattatatgatggagggagtaagttgtaacatagctagtattctgcttttgcataatgtctctggagatcagagagagagagaggttcaagaatcgatatatatcctgctctgataattggccattctatatggaatgggcaaatgatgatgggtccggaccaatatttagtagaaaaatttgcgtgcatgcaggcaacgaaaagattgtggttgtctccagaacaacatttaatttatttgactttggctgtaggacactgaatttacaggtctatcatgaataaacactgcaaatatttctcttaggccccgtttgtttcctttcattttgaggaattgaaatcttactaatagaatagactattttttagaatgtaacattccaccactttccaaagttattatataagcctatctcaaattcatggggtgagagatggaaattgattctatagatttacatgctatttttccgatgtacaacttatagtacactcttctacttgcgccgctataacataaacgtagtatataactatctctctcatatgatttaggataatatataaatatataaacttaattagttttatctaaattataattattaaaatagaattcaattccaacgaaacaaacggggccttagtacatttacgtggtacaggcttatgttctcatgacacacagagatgcaaaaaatggtcacttttgctagacatcgaatgctgacgagcacctctgtgtttaggcatacatctcatttttttcccctggacagtttcttttcattttctatcagactttattctgctcatttgtactgtcatatcttcactgccagggctatagacgaatctaatctaaaaaatattacatttgaatcaacaagctattcacagttaatattcttatgcaggaggaaacagcaacaaaaataggatactcggaatt

SEQ ID NO: 794 - DNA, 4386 bp, Zea mays
  Intron number 1 from transcript GRMZM2G122937_T04 (locus G RMZM2G122937) derived from phytozome v7.0 (chr-ID 2; pos 2 2990744 to 22995129)
tggctgaggaggaggccaagaaggtggaggtggaggtcaccaaggagcccgaggcggcggcgaaggaggacgtagccgatgacaaggccgtcatccccgcgaccgacccgccgccgccgccgccgccggccgacgactccaaggccctggccatcgtcgagagtgagtacagcctgctctctgctctgctttattaattaattctgcccccctctatgtagtccaaggcttgcgatggaaacatggcgctggcggactggtgtgtgctttagattcatgtgccgcgaattgggagaaactttcctcctctctctaccctatgttttggttcgtcgctctgtactttctggtagctgtactgtggctggcagtactaggtacttgtgacttgtaatccttggcagtcggtttgcttctccttttcatgggttccctgatttgttgccggcgtgatcctttggtgttggttgtacttgtacacccgaacgtatttggtccgattacttctcttagacaacaaaattttcttgttagggggttgtgaggtgcaaatcacattggaaccttcgaccaagttctaaagtactctagttctgtcgtaaaaaaaaacgtactgaagtaaatctgcgagtcatcgattttcaggattatttaccagcttcctaactggtttccccctttttttagagtggtagccacgcctgctaacttgccaactactacggacgaattgcttgtcaagttccgaaagggcgcacggggtaaaaaggttttaacatttttgggatagtcgcctcacttcgaaaattggttttaggacgacgtggccatcgtaggtttttggtttgagggttctaaaagtatgctagcagttatttgatgactaggcatgtagtatttcctttgcttgcgatttattttcagcgaaaatttcagattttgattcagagaaaaagatggctctggaactttcctgaattctccactttctctccgccttttgggcgtgttcggctggctacaagccgacactgttgcagctgtttggattgctgcagctgcaatccatagagagaaaaatactgtagaagccgcagccgcagccggattgcagccgcagcaagccgcagcgaacaagctgtttgtcccttgttgcctgctcttatcgttcttccctttattcaatccctgttccctctaaaataacaaaaaaaaggccttagggcctgtttgtttcggcttctggcagcttctggccaccaaaatctgctgcggactgccaaacgctcagcttttcagccagcctctataaaattcgttgggggcaaaaaccatccaaaatcaacataaacacataaccggttgagtcgttgtaatagtaggaatccgtcactttctagatcctaagtcctatgaataactttatcttcctccacacgtaatcgtaatgatactcagattcttcccatagccagattcttcctacagtcagattttcagaaaaactggtcagaaaaaactgaaccaaacatgcccttagaatctgcatgtatgccgaccgtttttctatctcagtataatgacgtgcaggcgcagctttcgcgttcaaaaaagaataaatcctaaactctatagaaagattcgaagtttcatgctaagaggaaagtaatcagacagaaacaaaggagtatgaagaacaattttgcatactgttaagaaagttagaatttaccataaaccttattatgattcatctgtcatttgaaatctgtactcactaatctaaatcgaacaacaaagcaggaaaaaaacagaatttgtcttttctaacacccaaataattcctccatgatttgaagaaataggaagaactgtctgatacttcacaaaaaatagacatgccccatcacagcttgatgacaattgctttctgttgctgctaagtcttcaaagatgtacatcagttccttgcataggcgggcaaatgatgaaaccatgcgcttttgaagcattcagtttcactaaggttatgcagatatacaaaataagctcctgaaaattcaacttatttctattctttaaatagccaaaaacatgagcatataatcaaccgaacagagtgggtggcaaatttgagctggcgttccagttccaggcaacttgctgttatctggtttatctattttatcatgttgatccatcatccatctttagttatatgcctatattaatcctccaaagcctgcttatgcacaaccaaagccgtcttgcctggaactatatatttttctcgaggcacaaaaatttagcaaggtgccaacatacttgtatacaagttgaacattatgtctcacacatacagctaattaatcaaccaagacaccatattctaaaaatttgttaaacacagcacaaatacatagaagaatattcagttttgtagtcactagttttttttaattattttgcattaactatgctggtgacctggtcttggatcttcagaagaccaaccactttcgttttctgaacaaaaagacaagagctctgccactctttgagaagaagagcagaagactgaccattgaatacttagaagttggaacactatgtcatcatttggtaattccttcctgaaagatctagagaggtttctatggttactatcaatactatctattgctttgtagttcgtgtagtttagaataagattaatcctacgcatgcaagagtgtactagtcaaataagagaaaggaaatctacaatctttctcactgaacaagctatgtaagcagcagttacgcaggacctggatatggacacaaataagttgagcattgcaaactcaagtgcatgctcctgcaaagataatagtatagcgacataaattacattttgctctgtgatgctaatgggttggattggatcattgatcagcatacaaccacttgctagcttctttcttccatataaaattgttcagcaaaaactgtttatgaatctgaatttagtttttgcgccaaagcaggcataaattctctatttttttctgtctttccagaagttgcagatgaacctgctcccgagaagcctgcccctgcgaagcaagggggctccaatgacaggggtaattattgaataattgttgtgtcatcgagattgagtacaagttgccaattaaaacctgaaacatggtctgcagatctcgctcttgcaagggtggaaacagagaagaggaactctttgatcaaagcttgggaagagaatgagaagacaaaagctgagaacaagtatgtttctcaccttatccattcccctgaaatcgtcttcagtggaaccattatttgtctgttgcagtagatgcaatttttgcaatgctttcttcagtcatctataattctttcatcaaagcaaattggaagtttaatactggtttctgtacagccagggcagtgtggatataaaattctgctcagttcaaactaaaacaagaaaaagccataagggcaaacaggataacatagtatgtcaattggaagatatcatatttagattctcaatatccaatagaagttgatataaaccataggcaggagatgtggaaattcctaacttgaattaatacgcataactgtgacagggctgctaagaaagtatccgctattctttcatgggaaaacacaaagaaagcaaacatagaagctgaactgaagaagattgaggtatgtcattgaaggaatactcttttttatcgtctgtgcacttactagtttaagtctgtcccatattttaatagagacttgagccaccgataacaattaatcaattatagaggaatttggaaaagaatagatccagtggaactaatatgccaccccccctccccccctaaaaggtgatatcctcttagctacagcttatatggtttattcatgttcaggaacaactggaaaagaagaaggctgaatatgcagagaagatgaagaacaaggttgcaatgatacacaaggaagccgaagagaagcgagcgatggtggaggcaaaacgcggtgaggaggtcctgaaggccgaggagatggctgccaagtaccgggccaccggccacgctcctaagaagctcatcggttgcttcggagcctaagaaaccttccaagtcagaccgagcagaaagtgaaaaacgtcagccagtgattgcttggtcctctcgctctatcaagtgtgtagtgtgtcttcgaaagtttgtaaagcctactgctgctgctgtatatactgatatcgcttccaaggcaggcgtttggtggtgtacatgttgaatgcttgacgagaaacattcttgtgtgtagttaagaggtcacgctgttgttgttgttgttgacattcaagca

SEQ ID NO: 795 - DNA, 436 bp, Zea mays
  Intron number 5 from transcript GRMZM2G702490_T01 (locus G RMZM2G702490) derived from phytozome v7.0 (chr-ID 4; pos 7 9158890 to 79159325 reverse strand)
ctttgattttccttcaaaacattactgggttcgtatggtatttcatttactcttcaaattacttcttttgagctctttcctttcatatcccactatacacatagtagacagacctattattgtattgacatttttagggcaaatcaaaattattatctacatagacttattgatgatgcaaaggtactatgttcactgaaaggtacctttaagagtgcagaatatagtattacatagtttagagtgatagactgcaagattttgtacagtatggttgggacttgggatgctaaaacttaacatgcaaattagttaccttatcaagtatgactctatgagatgtttaaacttttgaaggacagtatcatgttcattgttgatttatctgctgactgctgtaggtcggatcaaagtctgaagctagtggaattgccaa

SEQ ID NO: 796 - DNA, 9262 bp, Zea mays
  Intron number 1 from transcript GRMZM2G516135_T01 (locus G RMZM2G516135) derived from phytozome v7.0 (chr-ID 7; pos 1 05069734 to 105078995)
gtgaaccgtgcaagtccctgccttgttgaaaggttgtgaaagtcgcctagaggggggggtgaatagggcgaatctgaaatttataaacttaagcacaactacaagccgggttagcgttagcaatatgaactagtccgagagggagagggtgaaaaacaaatcgcgggcaaataaagagtgagacacgatgatttgttttaccgaggttcggttcttgcaaacctactccccgttgaggtggtcacaaagaccgggtctctttcaaccctttccctctctcaaacggtcacttagaccgagtgagcttctcttctcaatcaaacaggacacaaagtccccgcaaggaccaccacacaattggtgtctctggccttggttactattgagttgatcacaagaaagaatgagaaaaagaagcaatccaagcgcaagagctcaaatgaacacaagtcactctctcactagtcactatttgattgggaatgatctatggacttgggataggatttgatctctttggtgtgtcttgtattgaatgctatagctcttgtaaggtgtgggaagtcagaaaacttggattccatgaatggtgggtggttgggggtatttatagccccaaccaccaaactagtcgtttggtgaaggctgctatcgcatggcgcaccggacagtccggtgcgccaccggacactgttcggtgcgcctgccacgtcacctggccgttggattccgaccgttggagcttctgtcttttgggccaccggacagtccggtggtgcaccggacaggcactattcactgttcggtgcgccatctggctctgactctagcgcgcactgtagcgcatttaatgccttccgcagacgaccgttggcgcgaagtagacgttgctccactggcacaccggacagtccggtgcgccatcggacactgtccggtgagttatagcggagcggcctccagaattcccgaaggtgagcagttcggagttggagtccctggtgcaccggacactgtccggtggcacaccggacattccggtgcgccagaccaaggcacgcttcggctgactttagctctctatatttgaatcctttctcggtctttttattggtttgttgtgaacctttggcacctgtagaactcatagtctagagcaaactagttagtccaattatttgtgttgggcaatttaaccaccaaaatcaattaggaaaaggtgtaagcctatttccttttcaatctcccccctttttggtgattgatgccaacacaaaccaaagcaaatatagaagtgcataattgaactagtttgcataatgtaagtgcaaaaaggtactaagaattgaaccaataaattctcataagatgcgcatggattgatttctttatttttaacattttggaccacgcttgcaccacatgttttgtttttgcaaattcttttgtaaattcttttcaaagtccttttgcaaatagtcaaaggtaaatgaataatattttgagaagcattttcaagatttgaaaatttctccccctgtttcaaatgcttttcctttgactaagcaaaactcccactcaatcaaatcctcctcttagtgttcaagagggttttagatattagttttgaagaggttgtaccaatttgaaattctatcaaaaataagatatcgattgaaaaatcaccaattgaaaaatcttttctgaactcaaatttttgaaaattggtggtggtgcggtccttttgctttgggctaatactttctccccctttggcatgaatcgccaaaaacggatatttgagtgaaatataagcccttttactttctctccctatggtaaataatataagagtgaagattataccaaagttggagagttgcatggagcgacggcgaaggatgagtaatttgatggagtggagaggaagcctttgtcttcgccgaagactccagttccctttcaatctatgacttggtttgaaatacacttgaaaacacattagtcatagaatataaaagagatatgatcaaaggtatattaatgagctatgtgtgcaaaacatcaataaaaattcctagaatcaagaatatttagctcatgcctaagtttgttaaatgtttgttcatctaatgacttggtaaagatatcggctaattgttctttggtgttaatatatgcaatctcgatatcccccttttgttggtgatcccttagaaaatgataccgaatgactatgtgtttagtgcggctatgttcaacgggattatctgccatgcggattgcactctcattatcacatagaagaggaactttggttaatttgtaaccatagtccctaagggtttgcctcatccaaagcaattgcgcgcaataatggcttgcggcaatatactcggcttcggcggtagaaagagccacagaattttgcttctttgaagcccaagacaccagagatcttcccaagaactggcaagtccccgatgtgctctttctattaattttacaccccgtccaatcggcatccgaataaccaattaaatcaaatgtggatcccctagggtaccaaagcccaaacttaggagtataaactaaatatgtcaagattcattttacgaccctaaggtgagtttccttaggatcggcttggaatcttgcacacatgcatacagaaagaattatatccggtcgtgaagcacataaatagagtaaagaacctatcatcgactgatataccttttgatctacggatttacctcccgtgtcgaggtcgagatgcccattggttcccatgggtgtcttgatgggtttggcatccttcattccaaacttgtttagaatgtcttgaatatacttcgtttggctaatgaaggtgccctcttagagttgcttcacttgaaatcccaagaagtacttcaactcccccatcatagacatctcgaatttttgtgtcatgatcctactaaactcttcacatgtagattcgttagtagacccaaatataatatcatcaacataaatttggcattcaaacaaatcattttaagtgttttggtaaagagtgtaggatcgacctttctgactttgaagccattagtgataaggaaatctcttaggcattcatactatgctcttggggcttgcttgacctcataaagcgccttagatagtttatatacatagttagggtacttactatcttcaaagccgggaggttgctcaacatagacctcttccttgattggtccattaaggaaggcacttttcatgtccatttggtaaagcttaaagccatggtaagtagcataggcaagtaaaatgcgaattgattcaagcctagctacgggtgcataggtttcaccgaaatccaaaccttcgacttgtgaatatcccttggccacaagtcgggctttgttccttgtcaccacaccatgctcatcttgcttgttgcggaaaaacccacttggttcctacaacattttggttaggacgtggaactaaatgccatacctcattcctagtaaagttgttgagctcctcttgcatcgccaccacccaatccgactcttgaagcgcttcctctatcctgtgtggctcaatagaggaaaacaaaaagagtaaatgttcacaaaaatgagcaacacgagatcgagtagttacccccttttgaatgtcgccgaggatggtgttcacggggtgatctcgttggattgcttggtggactcttgggtgtggcggtcttggaacttgttcatcttcctcatcttgatcatgggcatctcccccttgatcattgctctccacttgaggtggctcatcttcttgatcttctccttcatcatcttgagcctcatcctcatcttgagttggtggagatgcttgcatggaggaagatggttgatcttgtgcttgtggaggctcttcggattccttaggacacacatccccaatggacatgttccttagcgcgacgcatggagcctcttcatcatctagctcatcaagatcaacttgctctacttgagagccgttagtttcatcaaacacaatgtcacaagaaacttcaactagtccagaggacttgttaaagactctatatgcccttgtgtttgaatcataacctagtaaaaagccttctacagccttaggagcaaatttggatttctacctcttttaacaagaataaagcatttgctaccaaagactctaaaatatgaaacattgggctttttaccggttaggagttcatacgatgtcttcttgagaattcggtgtagatacaaccggttgatggcgtagcaagcggtgttgacctcctcggcccaaaaccgatccgaagtcttgtactcatcaagcatggtccttgccatgtccaatagagttctattgttcctctccactacaccattttgttgtggggtgtagggagaagagaactcatgcttaatgccctcctcctcaaggaaaccttcgatttgagagttcttgaactccgtcctattgtcgcttctaattttcttgatccttaagccgaactcgttttgagcccgtctcaagaatccctttaaggtctcttgggtatgagatatttcctgcaaaaagaacacccaagtgaagcgagaataatcatccacaataactagacagtacttacttccgccgatgcttatgtaagctatcgggccgaaaagatccatgtgtagaagctcgagtggcctgtcagtcgtcatgatattcttgtgtggatgatgaacaccaacttgcttccctgcctgacatgcactacaaatcctatctttctcaaaatgaacatttgttagtcccaaaatgtattctctctttagaagcttgtgaagattcttcattccaacatgtgctagtcggcgatgccagagccagcccatgttagtcttagcaattaagcaagtgtcgagttcagctctatcaaaatctactaagtatagctgaccctctaacactcccttaaatgctactgaatcatcacttcttctaaagacagtaacacctatatccgtaaaaagacagttgtaacccattttgcataattgtgaaacggaaagcaaattgtaatctaaagaatctacaagaaaaacattggaaacagaatggtcaggtgatatagcaattttacccaatcctttgaccaaaccttgattttcatccccgaatgtgatagctctttagggatcttggtttttctcgtaggaggagaacatcttcttctcccctgtcatgtggtttgtgcacccgctatcgatgatccaacttgagcccccgaatgcataaacctacaaaacaaatttagttcttgattttaggtacccaaacggttttgggtcctttgacattagatacaagaactttgggtacccaaacacaagtctttgaccccttgtgcttgcccccaacagacttggcaactactttgccggatttgttagtcaaaacataagatgcatcaaaagttttaaatgaaatgttagaatcatttgatgcactaggagttttcttcttaggcaatttagcatgagttgattgcctagaactagatgcctcacttttatacataaaagcatggttagagccagagtgagacttcctagagagaattctcctaattttgtgctcgggataaccgacagggtacataatgtaaccctcgttatcctgaggcatgggagccttgcccttaacaaagttagacaatcttttaggaggggcattaagtttgacattgtttcccttttggaagccaatgccatccttgatgccagggcgtctcccactatagagcatgcttctagcaaatttaaatttttcattttctaagtcatgctcattaattttggtattaagttgagctatgtgatcattttgtttcttaattaaagctaggtgatcatgaatagcatcaacattaatatctctacatcgagtgcaaatagaaacatgctcaacagtagatgtagagggtttgcaagattttagttcaacaatcttagcatgtaaaatgtcattttcacttctaagattagaaatgtaagtattgcaaacatctaagtctttagccttagcaattaatttttcattctcatttctaaggctaacaagagagactttcaattcttcaatcttagcaagtaaactaacattatcatctctaagattggaaattgaatcatcacaaacatttgaatcaaccttagcaattagcctagcattctcatttctaaggttggcaataatatcatggcacatgcttagctcactagatattttttcacaattttctacttctagagcataagcattcttaaccttaacatgcttcttattttccttaattaggaagtcctcttgggagtccaagagttcatccttctcatgaatagcactaattagttcatttaatttttctttttgttgcatgtttaggttggcaaaaagggtgcgcaaattatcctcctcatcactagaattatcttcatcactagaggatgcatatttagtggaggatctagattttaccttcttccttttgccgtcctttgccatgaggcacttgtggccgacgttggggaagagaagtcctttggtgacggcgatgttggcggcgtcctcgtcggaggagaagtcggtggagctctcgtcggagttccactcgcgacacacataggcatcaccgcccttcttcttgtggtacctcttcttttctctcctcttgcccttcttgtcattatccctgtcactgtcacttggtaatggacattttgcaataaagtgaccaggcttaccacacttgtagcacactttcttggagcgggatttgtagtccttccccctcctttgcttgaggatttggtggaagctttgatcatgagcgccatatcctcattgtcgagcttggaggcgtcaatggggagtctacttgatgtagactcttccttcttctcctccgtcgccttgaatgtgactggttgtgcttcgggcgtggaggaggcatcttgctcgatgatcttctttgagcctttgatcatcaactcaaagctcacaaattttcctattacttcctcgggagacattagtgtgtatctaggatcaccacgtattaattgaacttgcgtagggttaagaaaaacgagagatctaagaataaccttgaccatttcatggtcatcccatttggtgctcccgaggttgcgcacttggttcaccaaggtcttgagccggttgtacatctcttgtggctcctccccttggcgaagcctaaagtgaccgagcccccctcgatcgtctcccgcttggtgatttttgtcacctcgtctccttcgtgcgcggtcttgagcacgtcccaaatctccttggcgctcttcaatccttgcaccttgttatactcctctcgacttagagaggtgaagagtatagtggtggcttgggagttgaagtgcacgatttgggccacctcgtcctcatcataatcttcatcccctacggatggtacctgtacaccaaactcattaacatcccatatgcttttgtggagtgaggttaggtgatatctcatcatatcactccacctagaataatcttcaccgtcaaacgtcggtggtttgcctaatgggacggaaagtaatggagtatgcttaggaatgcgaggatagcgtaaggggatcttactatactttttgcgctcttggcacttagaagtgacggacacggcgtcggtccggatgtagagggcgaggaagagtcggtctcgtagtagaccactttcttcattttcttcttctcgccactcttgtgcgatcgaatgcgtgaaggggatccatccttcttcttgttggcggactccctcgatggagccttcccgtggcttgtagcggtcttctcaccgccgatcaccatcttcttggcgtgatctcccgacatcacttcaagcggttaagctctaatgaagcaccgggctctgataccaattgaaagtcacctagaaggggggtgaatagggcgaatctgaaatttataaacttaagcacaactacaagccgggttagcgttagaaatatgaactagtccgagagagagggtgaaaaacaaatcgcgggcaaataaagagtgagacacgatgatttgttttaccgaggtttggttcttgcaaacctactccccgttgaggtggtcacaaagaccgggtctctttcaaccctttccctctttcaaacggtcacttagaccgagtgagcttctcttctcaatcaaacaggacacaaagtacccgcaaggaccaccacacaattggtgtctcttgccttggttactattgagttgatcacaagaaagaatgagaaaaagaagcaatccaagcgcaagagctcaaatgaacacaagtcactctctcactagtcactatttgattgggaatgatctatggacttgggagaggatttgatctctttggtgtgtcttgtattgaatgctatagctcttgtaaggtgtgggaagtcagaaaacttggattccatgaatggtgggtggtttgggggtatttatagccccaaccaccaaactagccgtttggtgaaggctgctgtcgcatggcgcaccggacagtccggtgcgccaccggacactgtccggtgcgcctgccacgtcacctggccgttggattccgaccgttggagcttctgtcttctgggccatcggacactccggtggtgcaccggacaggcactgttcactgttcggtgcgccatctggctctgctctgactctggcgcacactgtagcacatttaatgccttttgtagacggccgttggcgcgaagtaaccgttgctccactggcacaccggatagtccggtgcgccaccagacactatccggtgctacaccggacagtccgatgaattatagcggagcggcctccagaattcccgaaggtgagcagttcggagttggagtccctggtgcaccggacactgtccggtggcacaccggacagtccggtgcgccagaccagggcacgcttcggctgactttagctctctatatttgaatcctttctcggtctttttattggtttgttgtgaacctttggcacctgtagaagtcatagtctagagcaaactagttagtccaattatttgtgttgggcaattcaaccaccaaaatcaattaggaaaaggtgtaagcctatttccctttcaggttgcaaagaagtcaatctggtagttccactgaat

SEQ ID NO: 797 - DNA, 547 bp, Zea mays
  Intron number 12 from transcript GRMZM2G000645_T02 (locus GRMZM2G000645) derived from phytozome v7.0 (chr-ID 9; pos 20398918 to 20399464 reverse strand)
catcaagaataaagattttcaataaatcgtttcaggtacatggtctgctttagtttattgtttttctatatattaattgcttaatcagatgcaaatttctcatttcttccatagttacctaaacattgcctctggttttggcatctgtaaagatgcatcctttactccttcagtattcgattgacccttgtagctttcttttctttcatcacatgtttctttagtcagtggatgcttctggataaaattctaattgtgcactttgatttccgcagcaagtttttcccatgatttgttactaaggcttacaattcatttgatattcataacttatgcttgttgcatgtcccttgcctgctcacctttattagccatatcacttatctaggagttgtagaagcgaatgtgaagtttgtgacatagcctttttttgaattgtttcacaaagaagcacattgcaatcttttggcattttcattgtattctgtgacttaaattatctgattttttaggagaagaaaactatccgcccttcattttcagcaga

SEQ ID NO: 798 - DNA, 40835 bp, Zea mays
  Intron number 2 from transcript GRMZM2G520335_T01 (locus G RMZM2G520335) derived from phytozome v7.0 (chr-ID 10; pos 48400933 to 48441767 reverse strand)
gagcagggaggggcaccgagctagaggagggcgccgacatgggctcatccctggagacgagggcaggccagggaacatctgcgcgcccccaccatggctagggaaaggagcttagggaggcgctgccagggaggagacaacctataccaacgttgagggagtagggcgccatggttgggcttggcggccaaggaagatgagagagcagaaaggggcttcagctgctggttcccctggccgacatcctatgctccacgggtctgccggagtggagggaggcgacgcccatggagcagtcctgctgccgagcgccatggagcaaggaggagagatggagtggagaaaaaagtggagttggttggtggcggctaggggggtaggtaaaaaatagccaagtgcaagtgagggggtccgtatttatagagaaaccctagggttagggtttttagtgggctgggctaggttgggctggcccaaaacacgtaatcgggtcgcgctaaattattttccggagtgaaaatgctcctgcggaattcgtctctacggagagcagagcgaaatagagttcggacgaacagaagattgagcgagtaactcaaccaagagtttgatttgatctcgcttgaaaataattcctcgcactcaattaggaacaaaatgaattgagacctattggttttggattcgtgaacgaggtcaatcgggtcggttaataagaattattgccggtgttgatttttgaattcgaatcaaacacataggtattaagctgagtcggataagaattaattagagggcgacatacggagtatcccgtttgagaatacggacccggataaaatagtcgaacctagatcaaagttcgaggatgtggcagaactgtccaaattattccagcttaagtgcctaagtcacgcctcaagggccgcaacacacttaaatcggaataacccgtcagtccctcagatctagtctgataaagccacctaaccaggatcaaataccacatactcactcgaaggtgagtcacagaagaaatacaataaaacaggaaacctcaaatttaagtactgaattattacataaatcggagtttttcaagttgctggtaagagttcataaaatacgatgcaacggataattgatatcgtcgatagcgaggaaatgggcaaggcctagcccactactcctcttgctcctctcctgccggagcagtatcccactcgaccgtccaacccggtggtagggtggtaggccaagtcacatcatcaactatatcctgaagcgtacctgcaaaaattatgccacaagcaaggctgagcatactaatactcagctagacttacccggtgtgaggaaactactcctctacctctagaccatgcagctgtttggttgaggggtttggtttgccaaaagcactagctgtttctaaaatcaattcttagcttttcaaattctagtatcattatcttagctaagtttgctccttctaagcatacatggtaacaagcatttagttcaatcaacaaattgtctcatgtaaccacatttcacttcttactcaatgtagtacaaggggtcaagcagtctcattagctgcgagaagcagacgattcgaattgagtttttatccttgcaaggtaaacctaaacacacgacatgtcagggtactctgaccccacacatgtcaaccgtccccatcgattacacgttcgcgtccaggcctcaccgccttggcatacaatgctccactgaccccggctgccgccgtgcagtgaccgcacttgtacccaccatagctagcatgggagacccagtctcaggtcgcatgagagataaagtctgcgcccggcttcactcaggtactaggtttaccggttaccatatttcccgacatgtgcttagtacgttcaaaagctcgactcaggtatccacacattaatccttaattcctttttctcgtctcatggacaaggcatcctccctggatccaagtctatagactaacatagatcccgttatcaagatgaatacaatcaattcctgacctcgcacgagtgctagaaaaatcactcgacttctaccgagatcctgattagcaaagcagctactcgacctagcatactagtatccatctcaaaaaggaatcctaagttcatgcaactagaggtgtcaagcaactcctacacttaagtgcacattacaatcctagaagcattaagtgtagtaaagtagcatataataatacgattatgcataaaccggggcttgccttcaatagctagggctgcggggagatcctcgatggcagcctcgggagcttgctcctgttcttcttcttggacagttccttgctcggggatgagcacgtactctccgtcagcgagattacaatctaatgaatgtaatgagtaagatacatgcatgatatgatatgtgctttagcaattaaactttgatggtgaatgatccacttaaatcagatagagtttaatcttgctacaaaagatttttggtggtatacttagtaatttagatcacacacagttaaactaagtggtaagtccattttggtgttccactgaattctttttaaagccttagcgagaattgtcaagatttcaagttgaacttattggggcgaggtttatctttcctttccttccctctatttcttttatgtttttagagtgggtttgaactacaagttgtcttaataaatttccaaaaattatgtaaaaattacagtggcttcttactggtgtattattctttgtcctaaaatttggggcttaaaaagtgaatagttctttctagataaaattatcaaatgttagggaagaagggttgttttgaactacaactaccatttaacagtaggttattctctaagactcatttttgctggcatttagatgttataacatgactttgcacaaatttctagccattaatatcctttagtcattttactatgatcttctaaagttcctagcaaaatgggtgctttctactaccactatatttgaaaaatatcaaacaacagatttctaatttttcctagcttcttctttgtgcaagagcaatcattctgaagtttggcatctttttgcttaaaggaaggggtggtaggaattatttggattaaatggcctttttcatgaagtattggcaataggtattattttgcatttttctctggtggcctatctcattattgatctagcaaaattttatttgcccattattgcattatgcttgggttactcatgatttgtttgagatatgactcattatcaagttttatttgtttaccctacttaaaatgatgggctggggtggttatcatttttgtagtggggatctagtggttacaagtccactggatttttattagcaattttggatttgcttttataattccaataattgttttctagttggaataatgctaaataaacatttcactttaattctgttctggactagtggtctttttatttttcctaggttctttgttacttaagtaggctaggaaaaataattgcactgactgttcattaattcctaatgcctttctgatttttcctaagttttgggcaaaaatggcttttaatatatatccctacttaaattctcaatactagggttcccactatttttaaacagtgtttaaatggggtttgaacatctacaaattttcttaggttcagcacaaaagcataactaattttctttaattaaataaagtttggtcagtttctgtatttaattctaaactctaaaatttagaacagaaagtatggggttcagtatttttaattggtagtccataatatttagaatccagcaaaattggtttgacaatttttggttaagtatttctcaagttatgaatttcctaagttctcagttcatcaaaaagattaaacagaaatgattaaaaggaaaactactttgcaacggggtccctggcggatgtttttaagtttccttacagactagtccttagatcactattcaaatgtgtcgctaacagttcagaaaaccccctggggttcctctaatcctaacccgaggtccttcccccaaattaaacagtacccgcggcggaggaaagggcagaggggcttaccggcggcgagactgctccggtgaggtggctgagggtgtagaggaggtcctgagggtcacggcgatgtgcgggtcgccgtcggggatggtcggagtcgaccggtccacgtgcgcgggcaggggagctcgtcggcggcgaggagtccggcctatctagggcacaattgatcaatcaaatgggtcagaaggcttcaccagggatcaaggaaggtgtgtgcgtgaggaattgaagaacggctcaccggatcgctcggtctacgcgcgcaagcgggcggccgaagtccggcgaggacgatcttggttctccggtgaagttctgtcgagtctgagggctggggaagcttcacaagctcttagcgaagctatccgagtggctggcgtggcttggaagcgactggagtgggctggccacggtggtcgaggctcgggtggcaatggcgggcggaaaagagctcgccggagctaaggaggggcgtctggccggcaatggtgagcacgaggtgaggtaaggcgtgctcggggaggctttataggcgcgggcgagcacggccgagggcggggctctgacaagcgctcggggcgtgcgcaggcgaacgccagtgcgcgctctagcgcctggcacggcgtcgagcatgaggtagcgtagagagaggtcgagttcaagcgtgaattggctccaaatatgagattatggccatgatcctgttgagagatctcttcctctgacattcctttgtcgtctatgtgtggaggcttgcaggttttgctgactggatcaagagatagagaggggagaaatctggtttgtctcactgctgcgcacagagagaagatcgcgggtttgacgtgtccaaggaacgcgtcccgatgccatcttctgacatgagatagaggggttagttaggcacaattttgtcaatggggtcattaggaattgagccagggatcaaggtgaacacgcttggtctttagctcaagggctgaaattgagaattctgaattctgaatttcagaaatccctattgaaccctcacttgagaagcttatttggagtttttattaaactattttggccaagcttccataatctttattgtagcttatttagtataatttaatgtttataattggcctaggccatgtttttatatctttcatggtcttttaccctttttcttcaattctacttaattagctcacttagggttggtattagggtttcaacatttctccctttttgaaaactttattttcttggaacatgattctttagacatacacttggtagatcttttattcttaagttaatttggtgctcatgcttaatttggctcacatgaaatgttaattcttgggttagcccttagagaaaccctaggtgacattgggtgtcacagaggaattagactcgggctcagatcagaaaaaaccgtcgagagtttgatttaatgagcttcagatgagatttataatacgagaatgattttcgaatttgcattcgttccgagaaataaaagttttaacatgctccaaaattggttgtttctcgcgatcgaataactccgacttcggtgagcttccatgaataatcctaataaattgagatagacacgatcgagaaataagaaattttcactgagcattcaagttatggacaaatctcctgagataccacgaaactgacacctggggtgtcacagccttccccccttaaaagaatctcgtcccgagattcgaatgaggatctttaagggtggagaagcatgtaactcccacgatagaggtagatgcaaatttataagatgggatctgacaagataatgaagatagatttggatagaatatcgcgacatgtttagacaaaatgcagcgatcactttgatagaatgttcacaaaagacagcacatcagtattgtctcgcaatggatcacgactattaaccgcgataccagcgcgtgccgagcagctcaaccatgtgtgcgcgcccacaggaggctctcggtttcgtcgcgacaccatcagtcgtttagtcataataccattaccaaacgcaaccaatgagaaatccacatagcacatatagatggagcctatgagaatacggcacagaaaatgtgactaaagttgaaacatagaattgttggcaaaaagagcaatacatgagaattttcttcaactcagagaactattttatgatcctcacgggattatccgccaaagattgatacgatatttgatatgaggaggaaccaaccatgagatccagatttataggcttttagagacatgagagatccaaagataacagcaacatccattaatccacatggatatgtcgttcagagataagttgataaaatgacgccatgatccttagagaagggggtatgagaatgaccagaaatgagagatttaggcaagatcaacatccgatacttgagaacgagttatagcagataaccagattacggtgcagaatcattaagggttccagagattcggatgataaagccacaacatgattcacaaggaaagagatcaccagatccatgcgaaaggagaggtaggcaacaagatcagctggatgatcaacaggaatgctatgaagttttaggggcaaggatttatggaaagaaacatggccttgatagggtttgtgcaactagacaccaacaacaaaaaaaatttgacactacaagtgcacaaggaagctttagtcgatttaggggtcaagctatgggaatctacaagttgtgtaggtgtaaattcaagtgtaaaacacacaagggctagaaacaccgaaacaagcacatgataatttttttaggttttactagtgaaccactaggttgtttggagaagggggtcttttatgggcaaaacaggcaacaatttttattggcaaagagggttgaacaattacaataccacctagctagcaagacaagagaaacacatagcacgacctaacaagacttaccaatctgacacgaggtaaggcatttctaacatagcagtacatcacattattcacaagtttttattattggaataaaggtgagagaagcatgttgatgcgcaagagacaattataatgtgacaatcatgatgcatgctcattctagttgtcttctcagacctaactaatatttcggatgcttctacaacatccttattaatagtagtagtagtctttatggcctatataaatagccacctagctacccatctattttcctaaggcttcacgtcctaggtctatcctgatcatcctgatgatctatccagcattggtttctagcaagttttacttttaaaaagttggtattactgacttattgacttctctgtaatggtattcgctctgataccagctgtggcagaaccgcctgaattattccagcttaagtgcccaagtcgcacctttaagggcagcaacacacttaaacaggaataacccgtcagtccctcggatctagtccgataaagccacttatccaggatcgaataccactagctcactcgaaggtgaggcacagagaaatacaataaagcataataccacaatttaagaagtacaattagtgattacattatcggagtttcagaaataataaccataaatttttaatgcagtagaaatactaacggagaaaactgagtaacatggtgaagcctggcacgctactcctcctggtcctctcctgcgaaattagtaacccacttaccgtctatcccggtggcagggatggaggccagtcactacatcaaccaaatcaaggaggtacctgcaaaaattatgccacaagcaaggctgagtatactaatactcagctagacttacccggtgtgatgagtctactcgtctacctctagacatgtaggagtttggttgaggggtttggtttgccaaaagcactagctgagtctaaaatcaagttttagcctttcaagttttagtatgatccttttaaaactagatgtgtacctagctattcatacatggtatcaaacattttatcaatcaacatcttttgccagtcacctcatttccacttattactcagtgtagcagcatggatcaagtagtctcattagctgcgagaagtagacgattcgaattgagttttaaccttgcaaggtaaacctaaacacacgacatggcgaggcactccgtccccacatacatcaaccgtctccatcgattcccgtcaatagaacagggctcaccgccttggcgtacaatgcctcactgacccagactgtcgtcgtgcagtgaccgcacttgtacccaccataaccggaatgggagaccacgtctcaggtcgcgtgaggggtaaagtctgcgggcaggttcacttatgtactaggcttaccgatttaccatatttctcggcatgtgcttagtacgttcaaacgcttgacacacggtaccacaccttaatccttattccgatttccgtctcgtagacaaccaatccccatggatcgttgtccacagaccatcatcattacgatataaaaaaagatacaaccaattccggacctcgagcgagtgctagaaaaatcactcgacttctaccgagatccctaattagtaaagcagctactcgacctagcatactagtatccatctcaaaaggaatcctgagttcatgcaactaaggttccagtcaactcctatacttaagtgcacagtacaagcctacaaacattaagtgcagtaaaatagcatatagaattggttatgcataaaaccggggcttgccttttctttaacacttagatagtgtttgctgggtggcactcgcttggcgagcatccactgatcttgtccatcgttcttcaggtcacccaccaactgcatcttgtggttggcaccacatcactagctcgatcatcatctctcgatcctaaatgagatgcaagatgcatatgtatgaatataatgaaaatatcacaagatactttaagtacatgctagcgaattaaacactaagtagcgagacatcataagcaaccacacacactagcgttagctaactatctgtcatcgagcgcacaaacattaacaccactaaaaagacgacaaacattttgtatatttacgcaacacaaatacgacctcataagtacgagcatttatttaatttgctacgacttttcattagttcttttatttatcccacaaaagcatcccaagcacaagttcaacagaggaggaattcctatccacaaccaactactcaagcaagcacattaatcatggaacgcatgttaacctatgtttagacattacaagtctatgtccgttaagtgctaactaagcatttttagccaaaagggtgaactcaaccatcaaatgtcacttgcagatttttggagagcaacacatcagttgcttgttttaatcataagtcttcaaatattaacccaaaactagcaaactaggattttctggaaagcttaaaaagtgctctacaactttggtattgtcatcacaacatgattcagcacttagcgaggtcaaaacgtgctaatacaacagcgctgtccagatttggacagattcagacttgcaaattaaaaaattcacaactaaagattcagacatccaaacagagtgatcttagactttatggaaagctaattaaatgttcttcaaattatttataaacatccctggctggtttaatatgtatcaagggtaaaatacactatgaaggctgtgctgtccagaactggacagattcagtcttcacagtttaaacatccataacttaatcttcagaccaccaaaaagagcgatccaagacattttggaaagcttggaaaaagcactacataacttttataatcaccaagaagtgattctatgtttaactgaatcaaacaattcagtttttgaaatctattctatcagtggacagaacacagcttctagtttgtaaaattcataactcttaaactatcagacctatggttatgaaaattttaacacaagtgagataagaaaagcatctacaactttcttataatgaccatgaacagattttaacattaacataagcaaacaaggcagtgtctgaaatctgtacagaatttggacagattcagttactgaatttgtaaaaagcataactcctaaacgttcaggcttatgcctgtcaacttttgacacaagtaagataatagagtcatctacaactttcttgtgaccaccaataactgatttcaatattaacttaagcaaccattgcaatttcttaaatctgttcagaaattcgacagattcagggactgggcttgtgaaaagtacaacttctaaacgatcaggtttatggttgtcatattttagtacaagcaagataataaggttatgtacaactcttttatatgacgtttctacagaaaacatgatttagttcatcaaacatacagcacgacaaaaacagcgcgtgcagcccaaaactgcaattaataaattttcagcttctatataattcaagaattgccgcgctttagagacttgaattattttaacactttaccattcgttagagttaaattaataaaatgaggactaacaagtagacttacaaatttttatacaagttatttcgtgcgctagaactaccatacacaattaatcaacgcattcaccacaatcatcaaatccggcatatatgtatatcgaaacgcttttcacccactagttcgcattttagcttagacaccacatgagcactactaatttttactcacgaccataaccatgcgcatctagactacaacaagcattttatcgtaattacgagcttaaccaaactatctaacaattcagctaactagagcaatgacatacccgctaaataacatgcacgtcggcttgcctattattatcgcaatccgagacacaacatatacatataacaatcacttaatgcaatcgactcctacttaatatgagttggctaatcacagcataagacttagcaaaccattttagacattacgactcaaaacatgggtgggagcagaataattagtgtttcttaaccattgctcaacttaaattagttaacccacaagtcacctaaaatagcacattttagggggtctaacatagaggcattaacacatgacataaaactccataagacttacattggctactgagggacctaaagcacttatgtgcatatcttatcggattgtttttcaattttaacaaggaccgacttatgaacattacccgactccaataattattgggctgcgatcacactcatataagacctctaatcaatcaataagatatttatttacccaatgggaatggaatgcaatacttgaccaagcaaggcatcgatcggtcatacaacagaaagcatgacgacaccgatagatgctatcagctaaccgtttaaaaatactaaacttacttctcgctttgccactacaccactcctcaatcacacgaccatcatgagcatccttcacacaattatataatagcgacctaagcgtcgtgttacacaatacatacatctttcctcgtcgtgagtataaccatattacggcatatacccgcacaccttaatcaaatatcttacgccaccaccactataatacaccaaggcacacacgcacatacgtgtccccatattacgcagaagacatcaaccacaccagtgactccaacaggattaatcatattccccattcacctcgactatcacaatcgccgatcatatgcataaaacaaatacacttttcacgtagacacctatcgatgcattccccaacacataatccgcattttaaaaatttatcctcgccgcaaaccacacatcaaatacattattaccgaaacttaaaaacatccgagccctctttctaactcgttttctttcgccacaaacttcattccataccaatacattttttacacatatacatacacatgcacaacatcgaccatagcttaaatagattaatccacaaaataccaagtgaacaacctggacgaatcgagattagtcacatgggttgtccacacggctcggcgttttgttgaacgggcaaagcgcgaagcgcgacgtcgaacactagctgccaaaacacacaaatttgttggcggcagttcatcgaacatcacacacatcggaaaataatcatcgaggacagtgggggtttctcaccacgggtttcgacggcgtcgtggatgggctgcacacacccggttggaggccgacgacgagtgtgacaccccagtatcacctagggtttcttccttaagctaacccaaaccattatcacatctgaaccaaatgaagggatgaacataaaaaaatttaataacaaaggttgaagtaagtctttttatctgaagaaattctccttaatcatgtcatgaacctcaaggtaagaagaactctcaaaccctaattaaccataagtggaccatttaagcacataaagggcatttgggaaaagacttgggagaaaaatacaaattttggtaaaaaaccaaataacaaagttttaatacactaaataaccaacaaaatatagtaagaaagttttgccatttgaacttttcaaaatccctaaattagcccctgaactaatgcacttgggaaaaattcagaaattcagaaatctgaatttcagcccctttccaaagatcgactgcgttctctgtttttcaaaacataaatcaaacaagtccaaatagcaaagtggcgccaaatttcctggaacccaccatgacaaagtttggaaacctctctccaccatttgacacgatcttgacatggatttacctcgggactcgaccttgtgacactgccaccttagcgacacgacaactctctatacacagccccaaaccgctcgacttccacacataaatgacaaagctctgtcgggagagcaaatcttgtgcagtgatcatgcccaaatacgcgaagatctccaacctatgagcgtttaaactcgggcagaagcaaagagccacgtgctcgacgccgtgtcaggccagccgagcgcggactggctgcggtagcgcgcgccccgtgcgtctgcacctcgccctcgcctataaattcccccagaggccttagccgtttgcactcgcgcaaccaaagtcccgctcgagccagaaatcaccggagttcgccgtggaaagcaagcaccactgcccgccatcactgcccgagcacggccgttgtggccagccccttctgttgacccccagccttgccccagcccctggaccacttccccgtgaagccatgaagcttctccaagcttgagccgaggcattgcctcaccggagaggcggattcaccctcgccggactttggtagcctgccgctgtggcagaaccgcccgaattattccagcttaagtgcctcagtcatgcctcaagggccgtaacacacttcaatcggaataacccgtcagtccctcagatctagtctaataaaagccacttaaccaggatcaaataccacatactcactcgatggtgagtcacagaagaaatacaataaaacaggaaaacctcaaattaaagtactgaattattacataaatcagagttttcaagtaaactgagatagttcataagataaaatgcagcggataatcgatgtcgtcggtagcgaggaattgggcaaggcctagcccactactcctcttgctcctctcctactggagcagcatcccactcgaccgtccaacccggtggcagagtggtaggccaagtcacaccatcaaccatatcctgaagcgtacctgcaaaaattatgccactagcaaggctgagtatactaatattcagctagacttacccggtgtgaggaatctactcctctacctctataccatgcagctgtttggctgagggttttggtttgccaaaagcactagctgtttctaaaatcaattcttagcttttcaaattctagtatcattatcttagctaagtttgctccttctaagcatacatggtaacaagcatttagttcaatcaacaaattgtctcatgtaacctcatttcacttcttactcaatgtagtacaaggggtcaagcagtctcattagccgcgagaagcggacgattcgaatcgagtttttatccttgcaaggtaaacctaaacacatgacatgtcagggtactccgaccccacacatgtcaaccgtccccatcgattccccgttcacgtccaggccttatcgccttggcatacaatgctccactgaccccggctgccgtcgtgcagtgaccgcacttgtacccaccatagctagcatgggagacccagtctcaggtctcgtgagggataaagtccgcgcccagcttcactcaggtactaggtttaccggttaccatatttcccgacatgtgcttagtacgttcaaaagcttgactcaggtatccacacattaatccttaattcctttttcccgtcttatggacaaggaatcctccctggatctgagtccatagattaacatagatcccgttatcgagatgaatacaatcaattcctgacctcgcgtgagtcttagaaaaatcactcgacttctaccgagatcctgattagcaaagcagctactcgacctggcatactagtatccatcaaaaaggaatcctaagttcatgcaactagaggtttcaagcaactcctacacttaagtgcacattacaatcctacaagcattaagtgtagtaaagtagcatatataattggttatgcataaaaccagggcttgccttcaatagctggggcttcgggtagatcctagatggcagtctcgggagcttgctcctagtcttcctcgtggacagctccttgctcggggatgagcacgtactctccatcagcgagattacaatctaataaatgcaatgagtaagatatgtgcatggtatgatatgcaattcaacaattaaacttggatggtgaatgatcattttaataagttagggctaaatcttgctactcgaagatccttagggcatattttagcaatttagggtcaagcttagttaaactaagtggtaaatatattttggtgttccactgaattacttttaatgtcttagtgagaatttatcaagatttctggttgaacttattggagcgaggttttttctttcatttctttccttctatttcgcttatgcttttaaggtggggtttgaactacaaattaacttaataaatttccaaaaattctgcaaaaattacaggggctcttactggtgtataactccctatcccaaaatttggggttcaaaaagtgaggggttctcactatataaaattatcaaatattagggcagcagggggtgtttttgaactacaactcttttttaacagagggttattctctaagacatatttttgctggcatctagatgttataatatgaccttgtacaaatttctagccactaatacttatttgttattttgccatgattttctaaagtttctagccaaaggggtgctttctactaccactatacatgaaaaacatcaaacaacagatttctaatttttcctatcttctttgtgcaagagcaaccattctgaagtttggcatctttttgcttaagggaagggtggtaggaattatttggattaaatggcctttttcatgaagtattgacaatggatattattttgcaacttttaattgggttttgtacttttctctggtggcctatctcattattgatctagtaaaattttatttgcccatcattgtactatttttggattgctcatgatttatttaaaataggacccaatatccaattctatttgtttaccctaattaaaatgatgggctggggtggttatcatttttgtagtggtgtcttagtggttacaagtccactaaatttttattaacaattttgaaattgttttcataattctaataattgtttttctggtttgattaatgcctaataaaacatttcactttgaatctgttctggactagaggtccatttattttttctaggttctctgttacttaagtagactaggaaaaataattgcattcactgttcactattttctaatgcctttctgattttcctaagttttgggctaaaatggcctttaatagatatccctacttaaatcttcaatactggggtgattattatttttaaacagtgcctaaatggggtttgaacatctacaaattttcttaagcctagcacagaagcataacaaatttttttaattaaataaggtttggtcagtttctctaattaatttcaaactctgaaatttaaaacagaaagcatggggtttagtatttttaattgatagtctataatattttgaatccagccaaattggtttgacaactgttgggggccttcgtcctccgaaggtcctcaaaaacgtgatttaacaatatcttccaagtgtaacatatgtacaggtaccgtcgaactcggaataaaactgtacacaatatgaaaagcatggtcgagatgaaggatgatgcagctccgaagttacgcgcaagggagcttcggctcagcggcacgaaaaggaaccgacttaaaggggaaaggctatttagtccttgctggattgtccttaagtcaatgataaatgtaaagggcatgaatgtaattttacacaggttgcgccctgtgcctataaatagatgaacagtacccccgtactgttcacactgacttgtattcactcgcacgtcacgcctgtacttttaccttctatcaagataaaggtaacctttgtaattcaatattatttctgtctctctaaaataatataatgagaatgaattaataatgttttatgattgtttatgttgtttcttatgttcatatacttctacttagattaacatatattacattgatgaaggtatgtccttcttaaccttcgtctgaagatcattatatcttaagggaaataatgcttcgaaggacgaagggctttaacctttaacattttatgttgccttgttcttaattcatagtatttgagaataagttcccaacattggtgcccacctccggtgaactctttcgaccatcttcggcaagcattgaccttcgtcatgccgccgaagaaagcttcagcaccagggaccgctgcactgcagcccctaacccaaatcaggaaactctttctcttcgagagactcgaagccagaagaggaaagccaccagtccaacactctaggaggaggagttggaccaagagatcagggacatggaaataatccatcagcaagtacaaaggaagaaggagaagatggcgcggctggctaatcttcaaagaagatcgatgaagccactgaggaagtgcatcatcttgctcaagatgaacaggatcgaagaccccaacacagggagcttcgtcaaggaggcttgttcaatgaagatggatggtatgatgattttaatcatgatgcctttacttttgatgatgcttctcccttggcagcagaactgcaggctaccccatggcccccgtcatacaagccacctcagcttcccatgtttgatgggcattcagatccaaagcagtttctgatgagctacgaagcaactatatcttcgtatggaggcaatactacagttatggcgaagtccttcgtcatggcagtccggaatgtagcccaaacatggtattcttctcttcggccagggactatcacgtcgtggcagaagcttaaggacatgttggttaccagcttccaaggctttcaaacgaagccggtcacatctcaggctctgttccaatgcacgcaagaccacgaagaatactttcaggcatatgtacgaaggttcttgcgatggagggcacaagcgcctacggtgcccaatgagattgtcattgagggcatgatcaagggtcttcgcccaggacctactgcccaatatttcgccaggaagcccccacaaactctggagaagctgcttcagaagatggatgaatacatccgggctgacaacgacttccgccaaagaagggaggaagcttacagattctcggaaatgaccaggggcttcggaggaagaatccacccgaggcacgtcaggtcaatccataattccactcagagtgacgacaaaggaagtcagcctcagaggtcacaatacacctcacaatcttcggggcaacaacagagctctttcagaccaccagctccaaggggcagaggcgccaggggcttcgggggaagatttggggatcagcctcgaaagatctactgcttattctgtggtgaggacaagggccatactacaagaatgtgccaaatcaccattcagaagcaaaaggagatagcagaagccgaagctcggcagaaccagccgaagcaggttttgcacactacttcgtgccactctccctaaataccagagtatgtgggcaatcatcccacagcttctgtggcttcggctagtgtcactcacaggcttcttggccacaactcccacccctgccaccactacagccgacctattctcgaggccagccagaagggcgccagtacccttagcagcaacgtgaagtctgggaggaatccgaagctcgcacagtcaatagcactgtgccagaatcaaagcacatttattgagcgatatccttacttttgtgttctatgtcattttgttttttaataaggaacaaacaatgcggaactagttttaatttcttgtaatagtttcacttttatcagaatgaaatatatcttcttcaaatatttacgaagctaaaaaaactgaagctcaaaagtcgttcctaagggaatgcagagctaaaaatcgcagtgtaaatttcgccgaagctacaaaaagtcgttcctaaggagcgcagcgtaagtttcgccgaagctacaaaaagtcgttcctaagggagcgcagtgtaagttttctgctcaaaagtcgttctaaagggaatgcagagccaaataccgccgaaatataaggcgaagaagttcaaaagacgttcctaaggggatgcagaacttacaccgaaaagtcaacggtgataccgccgaaataaaaggcgaagaagttcaaaagccgttcctaaggggatgcagaacttacaccgaaaaataagcggtgaagccgaaaaataaacggcaaagagacttcgatcgttcctaaggggacgtagagatggtgtgttccagaatgggcgtgtgggtgcgtatcttcgacattagcatcattcgcatcatatcgtcacatcatcccgcatagcatcacatcatacatcatattgcactgatgacatgaattgaatatgaagtcgaccttcggagactgctttataaaaaatgaaaatgtgctaaggcacaaagttagctgagaaatacagcttcgtcagctctattgcaaaagaagggatcctttgtttacgaagctgggaggttcttacgaagcatggatattttcacgaagcacggattttcttctttgtgaagcatgaaaagaagggaaggtattttttcgccgaaggctcaaaaatggtatgtatataaagtttcatgcatcgcaaagaactgagttacaaataatttacacattagattaaaaaatatgcacaccgaatattacagtcttgatatagcgaagctacattgatcgactaaaaatgtttttacaatatcagtcctctttcaggaccttttccgcaatttcattcaacaacttgttaacaacttcgtcggctatgttgatgatttctattgctttcttcgtttctgggtccgccagggggtcgaacggcgccggtggaggagataattcagctgcggtagaaaaaatcaatcagttcgaagtcacgaaaacaaatgatgaagctaaaggccattaaacgatacctattcgtctctcgcgttcagcaacttcctcagctttttcgctgcttctcgagcgtcatgaatatctttttcacttttcttcattatttcatgagccatttctcggccgccatttgccctgatgtcagtgtaaaattttccgcccactaatcttgcttcggccaagggatccttcgtgtcatccacggagaaggcagctttggcctgggccagggttttgacatgattgcaacccgccttctccaagatggcttaaattcctctcgcaccagagaacgcgcagacatccccgcgatcacttaaaatttcttaaaaagcttcggcttctccgcttatccactcgataacaccttcagggtcgcctcgtatgaagttatcttcgtttgattaggcgcccacgttggcgaagctagcctttatcttctccacgcagcccaatgatttttcaaaacatctttccttggatgcgtgaagttcttcaactattttttctaaatagtttttccaatattcgctggcctctcggttagcttctgcgagagcgcatttttctttggcctctgccaattgtttctgaagctcttcgatatcattcttttgaatctcagcttgagctttggaactagcttcatcttttttactttgtttaccaatgaaattaatattttgtctttttcgagaccttcgttccttaattcgatcacctctgaacgaaggttgttcagagccattgtatacccttcatcttcaatgtttttctgtgctctaagggcattgctaaggatcaagccctgcaagaggaagacaagattaagtataaacaaatgaaatatttcgttttcaaatacaaaattgacttttatacctttatgctattatatgctaaactgtcagccagttcatcctttgataatattgaaaggccatcttccaacttcggaaatccgaagcttctacctatctcccggcagacggatatctctttattatccgggagacagtacaaaaaatcttcttccccactgccattgaacactaatgcccccttcgggtatttcaatttttgggcataatgttgagcttctcgttcttcttcctgagaaagtctctttcccgaagcatggcggatgatgtaatcaatgctctcttttaaagattcgggagcaggagtggcaaccttttcaaacgaaatttgctctatggccttttcttctgttgccttttcttcaaattccgcatgcttcatctcagcaggcactgagggccccgccttggttgcagcctgggttgttgtagcttcaatatctatttgcttagggttgcgttttgtcagcttcagcaaccttccctttgggagtaagacttatggagtcggttgtttccagtacatctaatatatttaccatccttcttctcctaggagttatggcagaactcttttgtgccctcagcgctattgcttatgttgaaggacttaaagtccctggaatatttgttacctcttcagttgttgacctttcagccttatctttgtcaaccttcgtttcaactagctcaaccgaaggtgccttcggcattatagccggttctttagccctctgcctcggaggagcagtttctcttgattcagcagctgaagaggcctccccgccaaactcaggcaccacggccggttcaatataatgtggtcgggtaagtaccttcatctttttgcctgtagccttcggcacaggttcagccgaggtggccagagcagtagctttcctcttcttcccttacccccgcagcgggtagcggtagtcggggtagacgaagccaatagcgtcaaaaactctattcaatctcttctttcctcgacttccgaaggctgtggataatgcattatcttctgccttggaatatgatccaagcacttcatcacttgtaacttcgatgcattttagccagtcatcgtttggttcatcgaatttatccccatatctgaatgtatacttcagccggaccagttcatcttcgctagaattggtgatggtctccttcggcatttcccagctctctacaagcggccatactctaaatgctatgtgctcttgaattaaatctctcgtaccaataaagaagcagacagtaccaaatgccttctggcatgcttcggcggcttcatcgatttcaaccttcggctttcggaggccgaagcgggaccatatggggcgcataataacctccttgatgtcgtccctcgttatcaagtcattcttcacataaaaccattcttccatccaatttcccggccatctcttccgaaatgttggcactgggtggcttgcgttgggacaggcgataaatccataacaactgaagttgttgtgatattgttctttccccgaggccttcgtctcatacagaagttcgtgcatgctgcagaagcattttgcgcttggctctatcccttggcttcttattgcccaaacgaagactcccatccttaatatggcttcaggggtcaattgatgaaggaaaatttggaaggttttcaacacttcaaccacaaacctgctcaatgggaaccgaagcccagccttgaagaagcttcagaaaatcacaacttccttctcctcaggtgcagtaacgttgttgtctccgctagccctcacaatagacatatcccaaaagtaccttcccctcatgttttcgaggtgacttttcttgatggtcgattttctgaaaattgcatgacttggtctccagggtcgatcctcggaatcttcgcctccactttctgcatcataactgtcactagtatcttcagacagtccctctagtatctctttagtaatcttctctgtatttgattttgccattgactcgataaacccagctatgtaaggattcgcaacctttttctcctcaaaatgcttctcctcttcagttagcttcgtctcagcagcaaccttcttgtcttgagacattttttccttcagaagatggcgaaaatgtgtctttctaaccgaagctcaggaagcttgagaaactagcaagcgttagtgagcaagagctataaaattaagaaaataaagcaaatgccacaagcagcataccaaatgtggttggtgcgagttcttatttatacgctcggcacgctccatatcggggggccccgtctgtcattgactgttgctattctagcaaagggaaggtgttttttcggaccttcggcttaaggccttcgtccatgtcgcagcctgaattcgttatcttaaacaaattaatactgcgaggggctactgttgggggccttcgtcctccgaaggtcctcaaaaatgtgatttaacaatatcttccaagtgtaacatatgtacaggtaccttcggactcagaataaaactgtacacaatatgaaaagcatggtcgagacgaaggatgatgcagctccgaagctacgcgcaagggagcttcggctcagcagcaggaaaaggaaccgacttaaaggggaaaaggctatttagtccttgctggattgtccttaagtcaatgataaatataaagggcatgaatgtaattttacacaggctgcaccctgtgcctataaatagatgaacagtacccacgtacggttcacgctgacttgtaatcactcgcacgtcacgcttgtacttttaccttctatcaatacaaaggtaacctttgtaattcaatattatttctgtctctctaaaataatataatgagaatgaattaataatgttttatgattgtttatgttgtttcttatgttcatatacttctacttatattaacatatattgcattgatgaaggtatgtccttcttaaccttcgtatgaagatcattatatcttaagggaaataatgattcgaaggacgaagggcattaacctttaacattttgtgttgccttgttcttaattcatagtatttgagaacaagtcctcaacaataacttttggttaaagatttctcaagttatgaatttcctaagttctctattcattaaaaagaataaacataaaatgattaaatggaaaaagactttgcaaaggggtccctggcgtgtgttttcaaattttcttacagactaatccttgggttactattcaaatgtgccactgacaattcaaaaaaacccctgaggttttactaaatctaacccgaggtccttcccccaattaaacagtacccgcggtggaggaaagggcggaggggcttaccggcggcgagactgctctggtgaggtggtcgagggtgtaggggaggtctaaagggtcactaagatgtgcgggtcgccgtcggggatggtcggagtcggccggtccacgtgcgcaggcgggggagctcatcggcggcgaggagtctggcctaaccagggcacgattgttcaatcaaatgggtcagttagcttcaccagagatcaaggaaggtgtgtgtgcaaggaatcagagaatgactcactggattgctcggtccacgcgcgcaggcgggcgaccgaagtccggcgaggacgatcttgggtctccggtgaagttctgtcgggtccgagcgcttggaaagcttcacaggccaccggcgaagctaactgaagggcaggcgtggcttagaagtgactagagtctgctggccacggtggccgaggcttgggcagtgatggcgggcggaagagagctcgtcggagctaaggaggggcgtctggccagcgagggtaagcacggggtgaggtgaggcgtgcccggggaggctttaaaggtgcgggcgggcacgaccgagggcgagggcacgcggtggacttgaccgaacgctggggcgagtgcgcgtgcgggttgggcgaacactggcgtgccgaccagggtcgaacacgtgtgcgcgttcattctgcccaagttccggtacgtgtggtcattcatccgagcctgctctcgccttggtcagtgcacaaaacctcttctcctccctataagctactgatcttgtgtgggggtcatagggttttgcctactggtttcaaagatttggagccctgaagtctggtctgtctccctgcccgagcccgaggcaaatccttggttttgtcgtgtctagggctcatgtcccaatgccatcttctggcatgtgacagaggggttagttagacacgtttttgttaatgggagcactaggattagagctaaggatcaaggtgaacacactcggttttggttcaagggctgaaaatttagaaatctgaatttcagaaatccccattgaacctccacttgaatggcttgtttggagtttttaattaactattttggacaagctttcctaatctttattctagcttatttagtgtatttcaatgtttataattggcctaagccatgattttatgtttttcatggtctttcatcccttttcttcttctctacttaaatggcttatggttggtattagggtttcaacatttcccctttttgaaaacctcaattgttttgaacatgattcttttagatgtaaacttagtggatcttttattctcaagttaatttggtgcttcttgctcaaatttgcttacatgaagtgatggttcttgggttagcactgagaaaaccctaagtgacactagggtgtcacagccttccccccttaaaggaatcttgtcccgagattcagattggaatcctcctggggtgaagcgaagggtgagacttacacgaagtgggtgctttatttattagggcaactactcttcgaatgtcattctctttgcaacttcacaaggaagtccttttttaactttagttttataattaacttactctattttaagatcatttttcttaaatttagattcaaagggcaggggaggggttgggcatgatcacgtaccaatttccttaggtaggcaatcggggaagttggaacgcaggaactcttcagtctcccaagtagcctcttcctctaagtgattactccactggaccttatacatcttgatcgatttagcccgagttgatctttctttgcaatccagaaccttggaagggtactcttggtacgatagatctggctctatctccaattctggttctgctataatctctgtcggcaatcgaaaacacttcttcagctaggatacatggaacacattgtggatggcaaacatttttggaggtaacttcaatttgtatgccacgggtccacatgcttctatgatctcataaggtccaatgtaacgaggggctaacttgcctttgattccaaacctctacactcccttggtgggtgataccttcagatacacgaaatctcccacctcaaactggagaggtttcctcctcttatcatggtaactcttctgtttggcctgagcagcttctagattcttcctgattagtttgaccttcctttcggcttcagtcactaagtcaggtccaaaaacttttctttctccaggctgagaccaattgagaggtgccatccttaggcttgattgataactgttgttataagcaaactctgccaaggagaggtgcttatcccagttcttaccataatcgattacacaagctctcagcatatcttcaagaatttgatttaccctctcggtctgaacatcagtctgtgggtggtaagctgaactcctgattagcttggttcccaaagactcttgcagttgttcccaaaatctggcaacaaattgggctcctcggtcagaaacaatggtgtggctatcataaatgacccttttgtgtgatagaaaggcagttgacatttagcactaaacttttggctaatgaaactatgagatgcaccagaatcaaatagaattaaagtaggttgattataaaatgaaaagataccagtcatgatgggggctccctcaggtaactcctccagagtagtgaagttgagcttcccttgcctgacttgtaccttctgctttcttcccttgtcttgatttggtgctggcatctgcctctgctgatttcttgggcaattcttggcatagtggcccacattgccacaagtgaagcacttgttcccattgctctggcagaactgatgctgctgcagaggctgattgttccttggagcgaaagctggtaaacgagtgggtgccggctgctgttgctgaggtggcctgatcacccatttgcctgcctgctgctgaaatcccctgctctgattgtgagaaacaatacagaacctctgggcctgagcggatggtgctgccattggtgcctttctcttcttctctgcctagtgagctacaatacaatcctcctgggagatggccaggttgaccaactcattgaagctatcagcacagacagtgtttagacgttcccgcagcttggtgttgagacccctatgaaagcggtctctcttcttctcatcagaatctgcatgataacctgcatactggcacaggtcgttgaaggcctgagcgtactgcaataccgtgcgggttccttgattgagtgccagaaactcattcaacttgcgatcaagaattccagctgggatgtggtgccctctgaaggcagtcttgaattcctcccaagacacttcacgatcagcgggtaacatagcacggaagtggtcccaccaagtccgagcagggccacgaagctgctgcacggcaaagcgagccttgatctcatcaggtcagtctcccgtgaggaggggaaacttggactcaacgacgtggagccacacgtcggcatccaacggatcctcttccttggtgaacaagggcggctgcgtgctctggaactcctggtacattgccactgccagaggtcgctgcggctggcctccaccatactgctgagggtggggctggcgctacaagagctgtcgcagaatctcgttctactgggccatcagctcctgcactgtgggagctggaggaggtggcgggggaacttgctcgttttgcccacgacgctgcctagctgccatccgaaaccagagattgtcgccattgttatctcaattcacaatttcgaacgatatgctatgatctcatatggaaagaaattgccataatcctaatattcggttcgaaagaagataacatggttacaaacatcccatagatctcaaaagttctcaagggttacatcaattaggggaaagtacccataagcctagtccaaaatctgacattaactaagctcgcataggtttctattctcctaagacgtcaaaatgactgatcaaccctgagcggtggaagcgacactggatgcgggtgaacggggcatcgcggaggtagtctcgttggcaccaggggctggtcctaactccttgggagcctcttcttcctcgcttccggcctcattggtctccatctccaagtggtgcatgtccaggtcattagcttcttcgagttctcgctgcacatcgtggagctggttctccaagacatcaatagtgttgtctcggatctctacctgctgctccaaggtggtaatgcactggctcagcctttctacctgtagccagggtcagtgcggcattgtatgccaaggcggtgagccctggccacgaacggggaatcgatggggacaattgacgtctgtggggacggagcgcccttacatgtcgtgtgtttaggtttaccttgcaaggataaaaactcgatacgaatcgtctgcttctcgcagctaatgagactgcttgaccccttgtactacattgagtaagaagtgaaatgaggtttacttgagataacttgttgattgtactaaatgcttgttaccatgtatgcttagaaggagcaaacttagctaagataatgatgctagaaattgaaaagcaaaaatttgattttagactcagctagtgcttttggcaaaccaaacccctcagccaaacaactgcatggtatagaggtagaggagtagtttcttcacaccgggtaagtctagctgagtatgagtatactcagccttgcttgtggcataatttttgaaggtacgcttcaggatatggttgatggtgtgacttggcctaccaccctgccaccggattgaacggtcgagtgggatgctgctccgacaggaatggagcaggaggagtagtgggctatgccttgcccatttcctcactttcgacgatatcgattatccgctgcaacttattttgtgaacttatatcagctacttgaaaaactctgacatatgtaataattcagtactttaatttgaggttttcctgttttattgtatttcttctgtgactcgccttcgagtgggtttgtggtatttgatcctggttaagtggcttaatcaaactagatctgagggactggcgggttattccgatttaagtgtgttacggcccctgaggcgtgacttgggcacttaaactggaataattcgagcggttctgccacagctggtatcggagcaaataccaccatagagaagcacaataaaccatgaataccaattttcgaaaaatctaaaacttgcttagaaactagcattactcgtcaggacaagaccgctagacctaggacgaaaggccttaggaatagagggagaaataggtggccaagtaagtaggccatgtgggccagtccttagctttttaaaggatgccctaggagcacactttatttcggagaggagacgttattttcagcatgcatgcattataaaaactaaaagggattagacactaaagaagtaaaaatttgagctaacccgcttccttttaaaccatccgggctcttttatcttcttccttccaccataatctttacatctgatccccttccgcagatgacttcacccaccccctccagtggaggagacactcgtttcagctctgacttcctatctcacgatggctttccttccatcttgtgggaagtgcttaactccgccggttaccctacgcccctttgtacacggtgcagctgtacgaggagcatcgggtaccatgttgccgagtctggctgactttggaggctcatccccttcagccgggttggcgttctcttgactctgagacgattggattcaggacggacgacaccactgaagcagcagccatgaagactctaacgaccttctgtggctaccatcccctagaggtggtgatgcaccccttgggactcttccctgctgagaagaaggatgaccccatgtggtgcaaccatgtgagccatgtgaaggacgtctgggcgatgtatcccaacttggttgggagggtcactattcagggtatgagtgcgttgtaccgccttcaggctcagcagagcgacgctatggcacatcttgctaacctcgctcaaaccaccaagctccccctcgacagccgagaagactttgtggtcgacttgtcctccgagttggtggagaaggacctgcgggtggaaaggctgagccagtgcatcaccacctgggagcagcaggtggagatccgagacaacactattaatgtcttggagaacaagctccatgatgtgcagcgggaacttgaagaagctaatgaccaccttgacatgcatcacctggagatagaggccaatgaggccggaagcgagggagaagaggctcctgaggagttaggaccagcccctggaaccaatgtggctgcctccgcgatgcccccttcacccgcatctagtgtcgcttccaccgctcagggttgatcagtcgcttaggcgccttaggcggacagaaacctacgcaagcttagtgatggcagattttggactaggcttacgggtactttcccctaaatgatgtaatccttatgaatttttgagatctgtgggatgtttgtaaccatgttatcttcattcaaaccgaatattaggattatggcaatttctttccatatgagatcatagcatatcgttcgaaattgtgaattgagataacaatggcggcaatctctgttttcagatggcagctaggcagcgtcgcaggcaaaacgagcaagttcccccgccacctcctccagctcccacagtgcaggagctgatggcccagcagaacgagattctgcgacagctcttgtagcgccagccccaccctcagcagtatggtggaggccagccgcagcgacctccggcagtggcaacctaccaggagttcctgagtacgcaaccgcccttgttcaccaaggcagaggatccgttagatgccgacgtgtggctacccgtcatggaatccaagtttcccctcctcacgggagactgccctgatgataccaagactcgcttcgccatgtagcagcttcatggccctgctcagacttggtgggaccacttccgtgctaagctacctgctgatcgtgaagtgtcttgggaggaattcaagactgctttcagaggacaccatatcccagctggaattcttgatcgcaagttgaatgaatttctggcactcaatcaaggaactcacacggtattgcagtatgctcaggccttcaatgacatgtgctagtacgcaggttatcatgttgattccgatgagaagaagagagaccgcttccgcaggggtctcagcaccaagctgcgggaacatctcaacattgtctgggctgatagcttcaatgagttggtcaacctggccatctcccataaggactgtattgtagctcaccgggcagagaagaagagaaaggcaccaatggcagcaccatctgctcaggcccagaggttcaggattgtttctcacaaccagagtaggggatttcagcacagcagcaggcaggcagatgggtgatcaggccacctcagtagcagcaccagccgacacccactcgttttccagctcccgctccaaggaacaattagcctccgcagcagcagcagttccgccagggcaatgggaacatgtgcttcacttgtggcaatgtgggccactatgccaagaattgcccaagaaatcagcagaggcagatgccagcaccaaatcaagacaagggaagaaagcagaaggtgcaagtcaggcaagggaagctcaacttcactactctggaggagtgacatgagggagcccccatcatgactcgtatcttttcagtttttaatcaccctgcattaattttgtttgattctggtgcatctcatagtttcattagccagaagttcagtgctagatgtcaattgcctttctatcatacaaaagggtcatttatgatagccacacctaggggtaaaattgccaccaaccaattaaaccgaagtgtgcctatctccatgggaagtagaatcttcaaaaccacactcctgattttgggattagagggtatggacatcattctcagagccgactggatgactcatcatcgagtagtgatggatgtagttgccagagctctggagattcgttcccctacatccgtagacctggtgttatatctacccagccaagattctactcaatcatgtgcttttgctatgatggagtcacctgtgaagaagattccagtggtctgtgagtatgcaaatgattttcctgatgaattaccaggaatgccaccagaccgggacatcgaattcgccatcgagttgcaaccgggaacaacacctatttccaagaggccttaccagatgccacccgctgagttggcagaattgaagaaacaattgcaagaattgctggacaagggttttattcgcccaagtaattcgccttgggaatgtccagccctgtttgtaaaaaagaaggatgaaagcttgaggttgtgcatagattaccgcccccttaatgcggtaactatcaagaacaagtatcctttgcctcgtattgatgttcttttcgatcagttggtcggagccaaagtgttctccaagatagacctccgctccggctatcatcagatcaagatatgagcaagtgatattccgaagactgccttctcgaccagatctgggctgtatgaattcttggtgatgtcatctaggctgaccaatgcaccagcatatttcatgtatctgatgaattctgttttcatgcccgaactagacaaattcatagtggttttcatcgatgatatcctggtgtactcaaagaacgaagaagagcatgtcgggcatttgcatgtagtgcttcaacgtctgcgagagcaccgtatttatgccaaattgtcaaaatgtgatttttggctaaaggaaatcaaattcttgggtcacactatctctcaggcaggcatagctgttgatcctgataaggtgcaagaggtgatgaactggaagccaccaacgactatccgtcagattcggagttttctgggattggctggttattactgaagattcattccggatttatctcgaattgtgaagctcataactgagttgctgaagaaagaagccaagtttgtttggggtcagaagtgcgaagttgtcttccatacattgaggcaacatctgaccaccgcaccagtgttagcgcaacccgacagcagcaagccatttgatgtgtattgtgatgcctctggcactaaactgggttgtgtcttgatgcaagacaactgagtcattgcttacgcatcaagagccctcatacctcatgagcagaattatcccactcatgacctggagttgtcagccatggtccatgcattgaaaatgtggagacactatttgatgggaacccactgcaacatcttcactgatcataagagccttaagtatatctttactcaggatgatatcaacatgaggcagagaagatggctagagctgatcaaggattatgacctggaggtacattatcacccaaggaaagccaatgtggttgcagatgccttgagtcggaaattgcaatgcgactgtgttatgatggattctcgcattaacaccttgtgtgatgagttgagcaaaatgaagatcgaagtgattccttctggtgctttgtctcacatttctgttgagccagctttgcaagtccagatcatcatggcctagctcagtgacaagggagtgcaaattattaaggagaacctccatcagaagaccgagaagtataaatgtttccgccaagatggaaaaggtatgttgtggtttgaaagcagattggtggttcctaaaaataaggatctcaagatgaaaatcttggatgaggcccatctctccaaattctccatgcatctagggagcaccaaaatgtaccacgatctgaagcccctgtattggtggaccaaaatgaagaaggagatagcccaatatgtatcagaatgtgacacatgtcagaggataaaggcaagccacttgaaatcagctggagctttgcaacccctatctataccttcatggaaatgggatgacatcagcatggatttcattgtgggtctgcccaacacctctcgtcatcataattcgatttgggttattgtggaccgactaacgaaagtggcacattttctcccagtgcacaccactgataaggctcaaaggtatgcagagttgtacattgaccgaatcgtgtgtttgcacggtttgccccggaccatcgtctctgaccgaggagccccatttgttgccagattttgggaaaaactacaagagtctttgggaaccaagctaataagaagttcagcttaccacccgcagactgatggtcagaccgagagggtaaatcaaattcttgaagatatgctgagagcttgtgcgatcgattgtggcaagaactgggataagcacctctccttggcagagtttgcttataacaacagttatcaatccagcctaaggatggcacccttcgaagctctctatggaagaaggtgtagaacacccctcaattggtcttagcctggagaaagagaagttttcggacctgacttagtgactgaagccaaaaggaaggtcaaactaatcaggaagaatctagaatctgctcaggcgaggcagaagagttaccatgataagagaaagaaacctctccaatttgaagtgggagatttcgtgtatttgaaggtatcacccaccaaaggagtgcagaggtttggaatcaaaggcaagttagcccctcattacattggaccttatgagatcatagaaggatgtggaccgtggcatacaagttgaagttacctccaaaaatgtctgccatccacaatgtgttccatgtatcccaactaaagaagtgtgttcgattgccgaccgagatcatagcagaaccagaattggagataagagctagatctatcgtaccaagagtacccttccaagtttctggattgcaaagaaagatcaactcgggctaaatcgatcaagatgtataagatccaatggagtaatcactcagaggaagaggctacttgggagactgagcaatttctgcgttccaacttccctgattgtctacctaagggaattggtacgtaatcatgcccaacccctcccctgccctttgaatcaaaacataagaaaaatgatcttaaaacagaataagttaatgataagattaaaattaaaagggcttccttctgaagttgcaaagaggatgacattcgaagagcagtttgccaagaaggattttaatgaataaatcacccacatcaagaaagctttaacccttacttcaccccgggaggactccgacccgaatctcgggacgagattcctttaagggggaatgttgtgacaccccagtatcacctagggtttcttccttaagctaacccaaaccattatcacatgtgaaccaaatgaagggatgaacatcaaacaaaaaaaatttaataacaaaggttgaagtaagtctttttatcttaagaaattctccttaatcatgtgatgaacctcaaggtaagaagaactctcaaaccctaattaaccttaagtggaccatttaagcacataaagggcatttgggaaaagacttgggagaaaaatacaaattttggtaaaacccaaataacaaagttttagtacactaaataaccaacaaaatatagtaagaaagttttgccatttgaacttttcaaaatccctaaatcagcccctgaactaatgcactttgggaaaaaatcagaaattcagaaatctgaatttcagcccctttccaaagatcgaccgcgttctatgtttttcaaaacttaaatcaaacaagtccaaatagcaaagtggcgccaaatttcctagaacccaccatgacaaagtttggaaacctctctccaccatttgacatgatcttgacatggatttacctcgggactcgaccttgtggcacttccaccttagcgacgcgacaactctctgtacacagccccaaaccgctcgacttccacacataaacgacaaagccctgtcgggagagcaaatcttgtgcagtgatcatgcccaaatacacgaagatctccaacctatgagcgtttaaactcgggcaggagcaaagagccacttgctcgacgccgtgtcaggccggccgagcacggactggccgcggcagcgcgtgccccgcgcgtggtcgccctgcctcgcgcgtctgctcgtcgccctcgcctataaatgcccccagaggccttagctgtttgcactcgcgcacccaaagctccgcccgagccagagatcaccggagttcgccgtggaaagcaagcaccaccgcccgccatcactgctcgagcacgaccgttgtggccagccccttatgttgacccccaaccttgccccagcccctggaccgcttccccgtgaagccgtgaagcttctccaagcttgagccaaggtattgcctcactagagaggcggattcaccatcgccgaacttcggtcgcccgccgccgcgcgtggaccgagcaatccggtgatccattgtctaattccttgcacccctgtccttcttgacctctggcgaagctctctgaccggttcacttggacaatcgcgccgtgagcaggccgaattcctcgccgccgatgagcatctccgcctgcgcacgtggaccggccgactccgaccattcccgacggcgacccgcacatcaccgtgaccctcaggacctcccctacatcctcgaccacctcaccggagcagtctcgccgccggtaagcccctccgcccttttcttcctccaaggccactgttccattgggaaggactgcgggttcgattttgcaaaaccctagggtgtattctgcagagccttagactcatgtgaatagtgtaccgaggacctgtctgtaattcattcaaaacctttcgccagggaccccagtgcaaaacagtttttcctttaaccatttctaattaatttttttaaatgcagcaaagaacttagaaaatttatatcttgagttatattcaaccaaatttaactaaaccaattttgctggattcaaaatattatgaactatcacataaaaatattgaaccctgtgctttctgttttaaattttagagtttggaattaattaaggaaactgaccaaaccatattaaactaagaaaaattagttatgcttctgtgctgaacctaagaaaatttgtagaagtgtaaaccccaaataagcactctttaaaaataatgagcaccctagtattgaagatttagacaaggttacttattaaaagccatatgtgcccaaaacttaggaaaatgagaaaggcactagaaaataatgagtagtgaatgcaattatttttcctagtttactaaggtaatagaaaatttaggaaaaataaagggaaccctagtccagaacaaattctaggtgaaatgttttattaagcattaatcaaactagaaaaacaattattagaattatgaaaacaatttcaaaattgttaagaaaaatccagtggacttgtaaccactagaaccccactacaaaaatgataaacaccccagtccatcattttaaatagggtaaacaaatagaacatgatattaagccatatttcaattaaatcataagcaagccaaaaagtgtgcaacagtgggcaaataaatttttaccaggttaataaagaaataggccactagagaaaaatgcaaaacccaattgaaagctacaagtaacacccattgctaatacttcatgaaaaaggccatctagttcaagaatttcctaccacctttcccttaagcaaaaagttgccaaatttcagaatgattgctcttgcacaaagaagaagataggaaaaaattagaaattggttgtttgatattttcaaatatagtggtagtagaaagcacccctttggctagaaactttagaaaatcatagtaaaataactaatgagtaatagtggctaaacatttgtacaaaatcatgttatagcctctgaatgccaacaaaaataagtcttagagaataactcactgtaaaaagaaggtcgtagttcaaaacaccccctctgccctaatatttgataattttatacagagcgaaccactcactttttaaaccccaaattttgagatagaggcttatacaccagtaagaagccactgtaatttttgcagaattgttggaaatttattaagctatcttgtagttcaaacccaccttaaaagcataaaagaaataagaattaagagagggaataataaatctcactctaatgattcagctagaaaccttaataaacactcactaagacattaaagggaaatcagtagaacaccaaaataaacttaccaattagcttaaccaagcttgaccctcatttgctaagtataccacaagaatcttcagtagcaagattaagctctaccttattaatttgatcattcaccatcaaagtttaattgctaaattgcatatcataccatgcatgtatcttactcattgcattcattagattgcaatctcactgacggagagtacgtgctcatccccgagcaaggagctgtccacgaggaagaccaggagcaagctcccgagactgccatcgaggatctccctgcagccccagctattgaaggcaaaccccggttttatgcataaccgtttatatatgctactttactacacttaatattgtaggcttgtaatgtgcacttaagtataggagttgtttgaaacctttagttgcatgaactcaggattcctttttgagatggatactagtatgctaggtcgagtagctgctatgctaattaggatctcggtagaagtcgagtgatttctctagcactcgcgcgaggtaaggaattgattctattcatcttgataacgggatctatgatggtccatggactcggatccagggaggatgccttgtccatgagacgggaaaaggaattaaggattaatgtgtggatacctgagtcaagcgtttgaacgtactaaacacatatcgggaaatatggtaaccggtaaacctagtacctgagtgaagctgggcgtggacttttcccctcacttgtcctgagactgggtctcccatgctagctatggtgggtacaagtgcggtcactgcacggcggcagccggggtcagtggagcattgtatgccaaggcggtgagccctggccgcgaacggggaatcgatggggacagttgacgtgtgtggggacggggcggccttacatgtcgtgtgtttaggtttaccttacaaggataaaaactcgattcaaatcgtctgcttctcgcagctaatgagactgcttgaccccttgtactacattgagtaagaagtgaaatgaggcttacttgagataacttgttgattgtactaaatgcttgttaccatgtgtgcttagaaggagcaaacttagctaagataatgatgctagaaattgaaaagctaaaatttgattttagactcagctagtgcttttggcaaaccaaatccctcagccaaacagctccatggtctagaggtagaggagtagtttcctcacaccgggtaagtctagctgagtattagtatactcagccatgcttgtggcatagtttttgtaggtacgcttcaggatatggttgatggtgtgacttggcctaccaccctgccaccgggttggacggtcgagtgggatgctgctccggcaggaaaggaggaggaggaggagtgggctaggccttgcccatttcctcactttcgacgatatcgattatccgctgcaacttattttgtgatcttatatcagctacttgaaaaactctgatttatgtaataattcagtactttaatttgaggttttcctgtttcattgtatttcttctgtgactcgccttcgagtgggtttgtggtatttgatcctggtaaagtggcttaatcagactagatctgagggactggagggttattccgatttaagtgtgttatggcctctgtggcgtgacttgggcacttaaactagaataattcgggtggttctgccacaacgagtgcgacgaggaaaccccgcagcagtgctgctacactggagaaagggcacggaatctggatgggaataggcgcgacgggcatgaggagagctcggccaagaaggagctcggctggcgaggcgagggaggatgtcggcgagggatgctcgctgcacacgaccagcgaggacaggcagcaagtttggatgaggagatttccggccaagtggaagacgccagccgtttcaaggcaccataggggctcctgcgccgaacagagagcagggaggaggggtgcttgcggtagagagaagaggagcagggggcatcggcatggagcaggtgccagcgccatggctgccagcggccgagagtagagagaaaaaggaaaaaaattgagcagggagacgagggcaggccagtggctgagctagaggagggcgccgacatgggctcatccctagagacgagggcaggccaaggaacatctgcgcgctcccacc

SEQ ID NO: 799 - DNA, 4652 bp, Zea mays
  Intron number 8 from transcript GRMZM2G408598_T03 (locus G RMZM2G408598) derived from phytozome v7.0 (chr-ID 2; pos 4 0342080 to 40346731)
gaaaggtgtgaaagattgttctcttgatgttaccaccaccaactggttttattgaataacttcctgatcaacccaaaagagagtaacataagtattcttttcatttgaaaagaaaaagaagaaacatgcaaggttttgatttgatagacttaggccatgtttggaacctctagaactaatagttagctactaaaaattatttgttgggttccaaacaccctccgctaatatcacatctaattgttagcttcctcacagctaacaattagtatatagctcattagctggcttaacccagctaataatttattagccgactaactattagctcgtaggggttccaaacagagccttaggtagagttaaattaatttgatttaggaactgagtatcttttgatggaactcaggaactacaatataccatgctacagtcatgctgtatttatgtatattagcatcatggtttaaaaggcggctaggcggaactaggcgcccagccaccgcctgaccgcctaggcgacttaggcgggcgcctaggcgacgccttagtagatgttacaaacagctgtgagctgttacaaaataccaagcaaccaaacagctgttacagctcataaactagaaatcatcacaaattcacaatagcataataatggatatgaaatagccacaaagtagtttctaaaggaacaacaacaagtcacaaaatttaaaacaacacaataccaaatgtccaaatctgaaatagccacatagatagtttgtaatggcataattaatagtaactagctgcagttagtaatgcagcaaatatgctaaattgctaatgcaatctagcaatagctactctccctgtctctcgtcgctcaaaaatcatcatcaaactctcctgggatattgggtgcctccccttcttcaccagcattgccaccattagattcatcttcacaatctgtgatttctgcatcgtcatgtggaacatcttcatcttcatcttcatcttcctcttcagcctctgacatgttttgtgcagcaacagaatttcttcttgaatacacattatgggcccttcttggtaagtttcggccacgaagtgcttgcgatgctccaatggcattatccacaaggtcccatgtaaggtcacactcacacccacgcccaccttcagggactacatgcaaagaatcagcccactcattgtcccagttgaagtcctcatgaaccaatggatcaaagtttttccccttcttctggcgtagtttttggaacctagctttcatctttctgttgtaggaaatgaagacaatagaattcaacctcttatgcaacaatcggtttcttttctttgtatggatctacaaaataagaaaagagaaaacacttggtcatttaatcccgaaatattggatacaaaagtagccaagtaggtggatgaggacttgaggaggcacacataataacttacaaattcaaaggtactccaattgcgttcacaacctgatgaagacgcacaaagactcaccaaacgtctagcaaatctctgtaactcaatagcacgaccaccatacgaacgccaccactcaactgcaataacatcacaacaatttagcaagctactagcaacaactagtaagtagtaaactagtaacagccacaaacacttacgtggggtcatagtttgtaggttatctttggccatcttatttgaaaaagctgctcctctaagaaactcgtaatccattgcttgagaattgatcttgtctctagtttcctcatcatctaccattcttgcaagcacatcaagaaagcaacctcttagctgaccaacagtagcatcatcatcatttcttatgagaggatgcaactttcctgggttcaaatacattgcagccccatacaatgggtgatccatttgtttctcccaacgccgttcaattatagttatgattttcttgagtaaagtcttcttgctttggacagcaaagctttgattgatcttttcctttgcacatttcatcaatgcttggacctctggcatagctggcctctcatctccatctaccaccctaagtacaataagtagtggccccgaagctctaaggcaatcttctactgaattccaaaactgtgtggagaagacaatgttatacacatccaatccagtactagtctttgacaatctgttatcagtccaagctgtgcttgcaaataaagccttcaaagcatccttgtgcttgtacaagctcttcaatgtgagaaaggaagtagcaaaacgagtggctgcaggcctcacaagatcagccccaccagttttctctctcatggcagcaagaattctcccgtgtcggtatatgaaagttgtcacacgccttgcacgtgcaattggtttcttgaattccttcaagtttcctatgtcctccaacattaggtccaagcaatgtgcagcacatggactccaaaataaagtaggaatcctctccattagaagcttgcctgcagctttgtaattggcaccattatcagtaacaacttgtacaaccttgtctctcccaatctcatcaacttttttctcaagcaaatcagcaagcatgtatgcatcatgtacttcactagatgcatcaacggactctaaaaaataagtgccctctgggctgttcactaagaagttaatgagatggcgtcccctcctatcagaccatccatcagacatgagtgtgcaaccatagtgtttccatgcacgctcatgttcctccctcattgtatttgttgtcttcacagcctcttgtagcaatggctcgcctagttggtaaggtgttgggggcttataccctgaaccaaactgtgctgtggcctcaattgcaatctgaaactgcctagctgctgcggcattgaaaggtacaccgcactcatagaagaacaaagcccactgcatgtccacatagtgtttgtcctccttgctttttgcactagccaagattgtgggctgataagagcctgaaagtctctcatccaccacctcctctggtgttttccgcaacatctcaactacggacttggctgtcttttgctgtgctttactgtttgccttaaattgcaaggtcgattgtctttttttggctgctgtaccagaactaggctgcaccttggatgcttgagactccacagcagatgtatcattcgtcccatctgctgctgccacctccaccacttcatcatcttattcatcttcatctagaaacattggtctttttctcttgtttgcctccaaataacttgtcatctccttccttattccactggtagccttgggacataactttgcatctccatatgcccctgccaaatgttgctttaacctctttatccctccactaacaacctggccacatagggtgcattccaccttatctttattttgaagatctggccaaaatccatacttccaccctggatcagtagacttccgtggcttccgggtaggatcgctcttcggatcgtactcaccagccacagaagatggagcttcatttcgagaagacattatgttgtcggcttgtcgctagtcgctgcagtcttgacacttgacagaaacctactcgttgcgcagtctgaaaccaggggaagcaggggaggaggggatgagaaacatcattttgaggaggggaggagtagcagggagtagacactaggacttacagcagcagcagctagcactgcggcaaggagcagggagccgcaagaccacgcgcagagagcagcagccgcgcgctggtagcagggagccgcgcgctgggagcacgcagcagccgcgcgcgcgcagggagaacgcagcagccgccgcgcgcagagcagccgccgcgcgcagggagagaggagcagcagggagagagcgcagagagatttgcgcgcgaaggagcagccgcggcgccgcgcacgcacaatgtatttttgccgcgcgcgcacagtggaacaggcccaaaacaaaacgcgcgcctagccgccaaaaccctaaagcccaaaacgagataaggcgtcgcccagggaggaaaaggcgtcgcccagacgcctacgacgccaaggcggacgcctacctcgccaaggcggacgccatacacggtttcctctgggcggcgccgacgcctagaagatttccccgcctggacgcctaggcgacgacttttaaaccatgattagcatatgcttaagcctaatcaagctgtgcttgagtgagctcagcacagctgagctcaagcactataaaaatgccgaagtccaaggcatgggctgaaatgagcattttggcagcactacatgcatcacatgtattgagagctcagttcatgtttgagcattttttgctgcactataagtgtgtgaatacacagacttcatgcactgatgtttgctttgcttctaggcttgttagtggtaaaagtgataagtctaggacaacacttggatcatgactaaaccattcttctggacttcgtcgctgatgatgtgttcctatctagagctagttttctgatttagatttttttttgctttagaataaaattatggttgaatcttttgcatttgacttactgtgaactttctcatggcactatggcagggagacgacaaatttttcattttcaatttaaggat

SEQ ID NO: 800 - DNA, 10855 bp, Zea mays
  Intron number 5 from transcript GRMZM2G076128_T01 (locus G RMZM2G076128) derived from phytozome v7.0 (chr-ID 10; pos 46953294 to 46964148)
caagattgttcctttgtaagttccctcgcactttagtcatgcatattactgagggttcattgcctttacttttatgagctagtatatcctttgtaagtttccctgctacttcaggagtcatggatatcatatatttcacggttctctcagtttattttcaagtctttttgaaacattgaatgctttattttcattgagacgagcttacaagtgaactgtttctgatacatgagtacaattgaatttgccacctttcatcatcagcttgcgtgttgttgaattggtagtccatgactctgaacaaatgtgttttcagtatctttgctcttagtgtcttaatattcttacgagttatgaccaaattcctttggaattctcaggaacatattgaaatgtttaaagttcaagtagctgtgctcttgtcacataaaaatattgcttttattccatgttaatttgttcagaatagcttgagggcttaaatagctctcaagtgtgctgtttctgtttttcttttctaacctcaaaaccaaaaacccatgacatctcctttattgaggaaataataaactgatatggcatgacgggagtttgagagtgtatcaccaaagtaagtaggtttaaggcagggcaatagattgcccttctggaactgatggtgcttgtacccagacacccagtcatgataggaagtcaggaggctttgacttgactgaaattttgaggagttctaatcccttatctagctaagcgcatcaatctacttatctcctcttgattgtgatcaaatactcatatctctataagcttctcaacctcagaaggaactagaacattcagattaggaactcagactcggaaagatttggtgctgtaagcgcagcttttctgtttatgttgttcagataataaaaacatgtataactgtatgtacagaagcctagtacaggcatttgccgagtagtggaacctataaactaggaaaagaaatgagcaaccaccaccacgagtagcccactaactccacacgcctgttcttctgataactatgactaacaggaagcaaaacaggagacgattaagactgactcgacactagctagtgatgtgcagggattacatctagcagtgtctgcatttgtgcagctgtagctgacatggctgctgccatcctgtgttgattgccatattttgctatccaacgctgtaagattgtgattattaatttgcttttggggtaggactacaaatcatattgaccaacaattgtttggggaaaaataaggtaaaagccaaacaagccctaacttgatataacctgactaggtttgaaatgcaaatgatcagtttgggggaaaattaaggtaaaagccaaacaagccctaactcgatataacctgactaggtttgaaatgcaaatgatcagtctctatgccaaccaactgtcatgtgataaacattgatatattgtagttcagggcttcaggctcgctaccttctgagcatgacctagtctgtgcaggcttctgttgtctcctccaacaagtaataggtcatcccttttttttcgaatgaactggaggggtaaaagcccctactgataggtgttggcgccgatctaggcgccaaacacttgaacggaccacctgacgatgctctctgtggaggcgtgtacggtccgcggcacagggacggacggtctgcgacctaggcgcaggagcggctcctcctctgcgtacgtccggacggcccgcgcctagggcttggacggtccgcgatggcacagagcgtcgtcttcttcgcagcagacctagatctcgcctctcgggagggaccccgtcggggtggagacatcctagagtgtgtcttggcatcggcaggccaccaaagacacctctagtcgacgtagagccgaagagaggtgaagatttgaggtagagggagtctaaactagggctaaactagaactattcctaatgcataaggtaaaaacgacaagtagatttgatttgatcgattgtggggggttcaattggccgtagcccttcatctatataaagggggaggtctcgacccgttactactcggttctcgagttaatcccgcaggtttagctaacaaaccccgcaagaaaaccggaaccctaattgattctgcgcacgcgtgtacggtccgcgccactacgacggaccgtctggaccgcggactgtctggcctcagggccagaccgtccgccatgccattttcggttctcaatatatgccttcctgccttttggtggaggtcgatgaaccaaaaacatatgtactgctagcatcctttgggaaatactagatctcacaagtcacttttggattgcaatagccaatagggtattattcaatagagctctaatgcataaaggccgtttcagattgcatctttctcggccatgaccagctgaacaatggatcaaaaagtataaaatggaggtgcccccatcctgaataggcaaagggactatgcatgtaccaatgattcattgtcgtaccattttgtatttgaacaagacaatatatcgacgatgagtaggcgggtggaaagtatcttggcatcacaggacgaataggcgatgcttgttgtgtcgcctttcgggccgttttgttcggctgttttgttttagtgggtgattggggtttctttgttgaccgatcgcatagaatagccttcttgccatcatatttggcgagcaattggtcgaaagtaaggccgacttttaccagtcgatcatgtgcattatgtttgctttcccccgcgtctctttttttgctttgtgtggaggctaacccttctggccaggggcggactgtccggctgagtcagccagaccgttcgcatgagcaccaaatcgtccgcacgcagggagctttgctctgctgcttgattgagtctgcccctagcgcctccggacttgttagtctttctgtctggagctttccgatcaatctcttcttgtgctatattcgacgtgcgaggatcgccaatgacgatgtttttgcttttgcctttatcagccacttcgggccgaaacaagacccttttgcttgagggttctattgtattgacatgaaatggttgtgtccacttgcatctcctaaaaagccaaccgaccctcatttatggccgattgtgtccgtcgacgaaaaacattacaatcattggtggcatgggaaaaaaattatgccacttgcaataagcatgtccctttaatgcatctataggaggaatagtacgagttaatttaatgttgccatttttagtagctcgtcaaatattttatcgcattttggcaacattaaaagtaaatttaacttcttttggtcgattcttttgaaccggctgcaaagaagaacatgtagaagatttggccttcattggccaaacaagctcagcggtatatacatctgtggattcatcatcaaaactatcacgctctactagatgcatagtacagacagtcgattttgatgtctctttacatcggctttcacaagtcaaagcccgctgatgtagttgagctattgaaaagaactggacgtcatctaatttgtctcttaagtaggatagcaacccattaaaagccagccctcctagctctttgtctgcgacatggatccgaaagcatcggtttctagggtcctgaaacctccagatataatcattaatcgattcttcgcgtccctgtcggactgaggctaaatcagctaaccctaattcatattccccagaaaagaaatgttcgtgaaatttactctctaaatgtcacacccagttttaaaaggtaaaccaaatgcgaaccatgtacgtgctaggatcagaaattcacgtacacagtgattacataattggacatcatcacacaatgctcaaataatagcggaaataagtattactttattacatcatgatttctgaaacatccacatagtcattaacttaaacataaatcaaagtgctgaatgaaacatagtaaaataaggccttcacaggcagtcgattggaggtttaccgctagtctagtttagaattcctcgaagtcttgaaactcctgaaaatcctctgcgttgccttcatctcctgagcaatggttgcaatagagacaacctggtgtttggtgtttaagcaagggtgagtacacattaacgtactcaacaaatgtcctgtttggctgaagtggactagctgtatgtgtggttaagctcaaagcagttgcttttagttggtcaggtatttatcattaatagaagccaagttttattataaaacctaagttgatattccataaagtacctcctcagagaggaaagtaccagatatcataagtatagctatcatcattaaaccatcaacataaatgtatccaaagtatatctaatcaaagaggattccaaggctgctcttaaccgtgagcacgactaatataccagtttctaaccctctgcagaggttgcacactttacccacgagtcgtgatccctttgtagcctggatttgcaagacccgatcttcactaccgaggtgaatggctaggaattcattacgtagtctttacaaagggtgggtgactaacaaaaccaaatcgaatgaaccttggcacccacccttaacagagtaagcactatgccctagcccccattgacgacacaacgacgaagcaaactacacccacaggttcctcaaattaatcagctaagggtgtcccataccaccctcatggttgtactatttttccgggtggtctcttaacaaacaggtccttacagagaggtactcgggaaacatcccgagccccctaaaatgccacaagttcataatcataataagaacgaaccatcgtatcataaagtaattctcatcatgttcgttgattagggtaaaacactagcccaaactaaaaaggtaatcaaaatagaaagctagtcaatccttaggttaatcataatatgcggggcagtgaattataaagtaaatatgacataataggtcagaggacaattgtcttcactaaactgctgctactaaggggcttctcctgtaacctcctcggactccgcagatggaaagttatctaagtgagtgtgaacacgcattcaacattcttgaaacagaaaggaacagtacaccataaaagggaaaacatgtgcaatacaaaatagcgctcgcttctacggtcacacgagaaaaagaaacgacgagatcgaagctatgactgaaaagttattgcgtttacgttatacaaatatgaagtagaacatttaatttgacatacttgcattaatcgacatctattaaatggaacctagtcctattgcctagtttgaattaatctactacgctaacaactctcaattaaataagcaatttaaataacattagcgactataagcaacacgaactaacggcgcgagacgaaatgcgcaacgcgcgagacaacacggcagcacgcgcacaacacgcgcacgacgcgggccattgcgacacgcgagtactataaatagatagcacatttatactaaacaattattaataaagaatatttcagttaagattaaccacattggtgtttatttttaaacgcgcaaatcgaaaccctaaattagatttaaattgaaacgatactttaataaccattggtcaaacaaccatttaaataaattaaataaaatatgtaacaacagagaataatacttttaacatgtagacaattgtaatacaaatctaacgcgacttgaacagagtgaatcggatttaaaacgcaaaagttatcgcgattttaaattgaaacacatctctgcgtatagttttaaaattctccaggggtcttttcacaaaactgccatcttctttctctcaccatggcaaggggaggagagggggaggtcaagccgcgtcgcaggggggggggggagagcgtcgcacgcgtaggatgcgtgccgagtttggccgccgtcggggcggggtgaaagaagggggagggggcgccgccgccagggggaagggatagggaggcgctgctcgaatgggaattgaagaaacaaaaaagctccatgggcaacaatggaggaagggctcaccggagaagaaacctcgccagagccgagaagaaaaacgtcgattggggacgaaccatcggtcggaccgacgaatcgaaggcactgggacgaactctcgacgagacgaatgcataccctcggattccgctgacgacgcacggatcgaaagtaaatgctcgtcggagttggaacagtcccgaacttcggcgagcaattccaggaattatggatctaaactggagaagcggtttcgaaattcggaaagggctcggtgagagggttccagccatatatatattgctagggtttgaagatattttatttttcgtagttatcccatttttaaaattaaaaataattccaggaaaaagatgaaattgtttttaatgtccgaaaaatatcttgaaggctccaaaaatcctaggaaaatttatagacatgatttgacacccaatgaactaaaaacatatttagaacttttgaaaatgtttttaagtacctcaaataaatagatttagatttttggaaaatagaaaaatatttagaaaattatgaaaattgacatgaaacttttacaaggcatattaacatgtttcaaacactttttgcacttagaaacactatgcaacaacatgaatgcaacaaacaagacattctagggctcacgccaacatagaacaaaataactctctattgttttgataaagggaaaagaaaaacgaagaaagaaaagagtaacacctgaattttgagtatagagcaaagaatttttttataccccaaaattcagggtgttacactaaatcattccaggaattaatagaatcagaaggcagggtggcgtaccatgcaaaagcggtaccagtaagggataaagaaaataagcgaacacgaaaagcttctccattggccaattcgcataggtgtgctaggaactggcctatatgttcgtgtgtgctaccattttcatcggaaaacttagaaaactccagtatccttgccccttgtggatatgggacagtgtcaaaccagtaatcatatagcttttgatatgactgccctactctagctacactaagggcgtgtttgggcatggctccagagcataactccatagtggagctggtaagagcatgccaaacacccaaactccagagttgcaatacaattttttggagtacctcttttgctgctccaaaaactctaaaaaagcaacctagacgtggagtttgaagttattttacccaccacagccactggttatgaaaaaacaatttaaactctggagtagagccgctccacccagagttttggagtggagctgctctagattgaagcagagccatgctaaacacgccctaacttcgagcctatctcgaaatagttcagccatctcttccctaattttctccattgcgcccggtggcagaccatcggaccctgggctttggggctcattcggtcgggcattgctatgcccactttcttgccgtgatcgattgataatgttgatcgacctgtgatcgtatggtgcgttgtagtttaaatatgtagggggcggaacgtactgctgctgtggtgtgtaataatttggtgcatagtgtgcaacaataggttctgtgtatgcgtatccagtctgtccggtggtaaatccgaactgtccgattgtgttcgctactattggggcgccacatggtggtcctggtgcggccctggagtgtttggcagagaaagccggatggtccacgtaagggccggactgtccgggcaaaagctcggacggttcgaccgtgttcagtggcgtcgatctgccaagcagggacgatggtggtggtatttgccttggatatgagttcatcggcataccatataatggttgggactgcgaatccctatttgttgccgatgtattagacatagatatcctattactagtttcatatatgatggaaaaataggagcaacacatttctccaacgaacgtgttaattttctaattgattcttctaaccctccaatctgttgtttcatttgatcttgttgctgatctacataatgtttaatagattggatgtcgccgggtttacttacgttggggacttgaagcgaagatagaagagatgcgacgtcggtctctccatgtttgacaaccttctggtggcgatccaccgtgtattgtgacaagaatttctccttcgcttgatgcatgtagtcttcgtaatgttgttgcccctcggtcgctagactttcaacagccggcttcggaatattgtccgtggaaatatcggtgtgatctttagaattggccatttgaggacctgatttttagatctagacacctgttccccagtgaagtcgccaaaaagtatgttggcgccgatctgggcgccaaacactggaacggaccacctggcggtgctatctgtggaggcgtggacggtccgcggcacagggccggacggtccgggacctgggcacaagagctcctcctcctctgcgtacgtccagacggttcgcgcctggggcttggatggtccgcgatggcgcagagtgtcgtcttcttcgcagcagacctagatcttgcctcccgggagggaccccgtcgggtaggagagatcctagggtgtgccttggtgttggcaggccacccaagacacctctagtcgatgtagagactagagtcgaagagaggtgaagatttgaggtagagagagactaaactagaactactcctaatgcataaggtaaaaacgataagtagatttgatttgatcgattgtgaggggttcaatcggtcgtagccattcatctatataaagggggaggtttggactcgttacaagtcggttctcgagttaatcctgcaggtttagctaacaaatcccgcaagaaaataggaaacctaactgattctgcgcatgcgcggacggtccggcctcagggctggatagttcgccatgccactatcggttctcaacaataggatatattaaaatgggaaatagaaaaaaaaacaagtgcaagaagcctattacaacttaaaggagagctgctctccaatttttcgctgaagcgatgcttcttgccgtttagcctaaaaagaaaaagataaaaaaacctttgaagtctaaaaaacaggaatcaaccgaaggatctgatctattgaagatccaatcatttttttgtttccaaattgcccaagtcatgagaatgatgatattcatggagaaaggaaccgaaagctttgttttgatgccaacaatagaataggtcatccctttgcgttaaaaaaaacaataggtcattcttactgaggcattgcttctagttttttggcacatccaaagaccactagaagacgaatgagaggttcaccaccacatcattgtaagaggagctcactcgattcacaaattggtctgacttgtaattcacttttgacatcctaaagcaccataccattttatgaaccaattgcaagtaaaagtttggaaattgaaaaccctgaatctggaggagttagatacgtaggataggagcggagcgccccttgttcttggtggcgtctatagcgaagaagaccttcccaaacaagggtcatcccgtccctggctggctcttggaatctgacatgggtgcaataattaagacgggtacttgtgtaacacagcttctttcatatgatgaacattgatatatacaggttaaggtaactgcagaagcttgcagttttgtggttcaggatcatcctctagatgccaaccatggtcacagtctgagagtcatagggtatgatagatcatcccttcttattgagttatccttaggttctcttgtcatgtttatttgatgactatactagtagaaatatgatggtataagagttttgttattccccccataatgatggactgtttcaatgaccaggtcaatctattcccactaaaggacagattgtatttcttacaaaacctccccttgggattggaagggattgagttggaaatgaactaatttccccctcaattcctccaatctccaagggaatgtgagtttccaaaccaaccctcaccatgggatgttagcacactggatagcctttaagggttgagacttctaaccaccaagctgcatgtgcctgtcgtttgggcttgtgtggttactcaaggctcatctgtggcagcccattgttaggcgaaaagcgaggaagaggaacagacctacacactttacacgtgacgcacgaaactgatgctttaacgaagtagagatatgatggaaactgttcaatactatgactgataccactagtccatcgctgaattgtcatcacaagttttaactagtaacttgcagtttgaaataacttattctatgttgctcatatatactgtttaaacatttctggcagtcttgaagcctcaagctattataggtattccccttccccatgacataatgtagctgtttgtgttaatgatattaacataatctaatactttatggaatgttttagccatggactcagacttaatgttagtgtgagttgttcaagtataggataagtttttgattgtattacttgaagattggtttttcgttccctaatgagccatttcaattgggatatcagtgcctccttatggttcaggagatttgttagtcagaatcattgttaaaaaaggcttgatgatattgtttttctttcctgtgttttcacatttacagggtgagtgacaagagcattggcctgttcttgcgat

SEQ ID NO: 801 - DNA, 10465 bp, Zea mays
  Intron number 1 from transcript GRMZM2G040706_T01 (locus G RMZM2G040706) derived from phytozome v7.0 (chr-ID 9; pos 6 9173709 to 69184173 reverse strand)
cgtcgaggacagccttgcgcccaccgtctcctttggtaaaatttccccacccatattgttcgcctcgacctcctactcacgttgcatcataaattctcgaagttgtgggtcggaatcggtgttggccgcgcgctagccatggctctaccgcaggtatgcgcgcgccaccgccgctgtcggccgtcggggaggagagtgaatcaggatagtagatctttgatgaacgcacgagaattaatctaggtattttaaatcatggtcgttcaatcagctaacggcggctaggattacaagatgtatacccccttcacacaataaatcggtgccgttcgattcggatcgggcacgtaggattagatctgtgtttcgttaaactgtaactgttgatcttcgatcctgcgaactggagcgcataacggttagaacctaatctttgccaccggtttctgattgagcggcccagaagtaatgatacccctttggcggggacattatgctaaagtgaccccgtgttgtgttttgttagtatcaacccgcagtacgggtgtgtgtatagaatagagctattaggtccacaatattataaaaccaaccctgatcttatttacaataccatgtgttgtccatctggaataaaagaaatatagagatgaattctagtatgaaaataattattataacttgtttattttgtatcttctgcattttaactcctttttgatccattccagttgcattagatccataataatattgtttatcccctggtaactttttttgttatgaaacctaaattaaaattatgcacataatttcttttgtaccccacttctaaatcttcagaaaatcataactttataaccgtagctccgaatttagtggttctcgaacctatgatctcattacaacacgtagaatattattatgcagcttgagcttatgtttagtgtgatgttaatttttcctataccatgtttgtttgtattgctacgattagcaatgaggttacgagtcacttgaagaccaaccttgtacctggaatctcaagtctaaggcaagttgtgcccttgatcacttttctttacccaataatgttcatgttaatcactgtgacatgctcaggttaatttgatgggacataattggtttccctagacttgtttattccacaccttgtttaccattgaacttttgggtagttttgctattgctctgcattatgatcattgttccagttatactgttgttttagttattgttcgtgacaagatcattgtgttaattggaacatggagcttaacttgagatatccgtgctaccacaagggtggaatgggacgtccttcgctgactaattaggaaagctagtggagtactaccttacccaaaaggggcaagggtagtagaggagttgtcgatatagggaggttctcgggtcgatcatgctgcgatggcttgtcggacggggaattcctatattgcgctccctagaactgtagcgggttttctgaaggtagtggaaatttttaaaggcctcgtagtgcatccctagtcattcacctcagaagtgtctatgggtctagctaagcctggctcgatgggatacacgacttgtgggtaaagggcgcaacctctgtagagtgtaaaactggtatatcagtcgtgctcgtggtcatgagcagctcaggactctcgcatgattaatttatagaactaaacttaatatgtcatatgcattgcatcgcgggtgttattatcaattttgatctcttgcttaattaggttggtatctatttatacttagtaactgctaataaaattttgaccaactttaaaagcaatgctcaattttagtcgtctcctttgataagccttacacttcacatgagctcccacctttggtgagttcatgcacattattccccacaacttgttgagcgatgaccgtatgtgagctcacccttgttgtactcacatcccctatgtcaagaacaggtaccactggacaaggcgcatgaaggatgttgtgatgagttcgtgagtggtctaggctgtcgtctcccagtcaactatggttgttggttcgttgtctatatatgatgtaattatttagctattttttacataactcctattatatagtaaagatgtgacatttgtttctgtaccatgagtcatcatatgtgtgagacttggtcccagcacacttggtgactattacgcgcctgggttttggacccctaaaaccctggtgtgacacattcccttaggaacgacttcagagctttttcaccattacctaggtgaataaatcggggctctacatttccttaggaacgacttcagagctttttcaccgttacttaggtgaataaattggagctttgtgttctcttatgaacgactttggagcttttttaccattacttaggtgaataaatcagagctctgcattcccttgggaacaactttggagccttttcaccattacttaggtgaataaatcggagctctccattcccttaggaacgactttagagcttttttcaccgtaacttaagtgaataaattgtttcatcattgtactcgaaggtgccaactggttattacattaaattgcagaatggaaaagagttttgcaagtaaacgtaaatatgtaatagcttcttcttgatagcttcaggtctgcttacccaaccattgtggtctttagtatatatgcttcatctatgggaccatgctgttgacggtgcgagttttggatctctcccttctacccttttgctacaaatcttgcaccaggaacttgggataaccagcaggaacttggtcataaggagttggtcccaggacaaaggaagtagatggcgaccatgtgctcatcacagggttgtttgaagcatttgaggctgaaggcaagtgcatccttggctcttctgactgaggcggaacatattgcgggacatgcggtgaacagtaagaagatgtactgaacacctccttcgattgagaaggttgagcagccgaccaagcaagctctttttgattgttgattgtattgtgacaggttcttgttgtgtggcccttgtcctcaccacaaaataagaaaaatgacttccttggaggtgcattgaacctaccaatgaggcttcggcctcctattccccctctcggagcaggtgggtgaaacgtgttgtgggatggctgctgctgagagcttgcttgttgctggcctgactggccctaagattaggttgttttttcttcaccctgcaccgggttatgaattcttcagacatgtcttgggttgaatcttcccccgaagcccctagcggcttcgatgtatctatgcaactcctaccttctttggcagaagttgttgtcaatccttatgtgttcatccatcttttgtaacaacttctctaaagaatgcagaggcttccttgtgaagtattaggctactggtcctagcatgagccccttgaccatggcttcgatgatgatgtcatcttgaactgctggttcttgagccctatgatgaaggaaccttcggacgaacgactgaaggtattcgtctgaatcctgggtgcattggaacagagcttgagcagtaacaagttttgactagaaaccatagaagctagtgagaagcatttcttttacttttgcgatgaagtgacagtcctcgactgaagttatgaatactaggtctgagccacattcttgaccgccatgacgaaggatttcaccattactgttgagttaccaccatatgaagatatggtagcttcataactcatgagaaactgctttgaatcagttaggccatcatacattgtcaatataggatgtctgtacaatcgtggtcaaggtgttacctgtagctcttgtgtaagtggggaagcttcatcatagaggaaaccttagaagctgaatgattcatgacaaagattatcatgattgtggtcctcgtagctctgatccttgtggttgtactgatattgtgcttcaatgctacgcatctcttcggctgcttcggtaatcttttttctaaagctcagaaatatgaagcaccttatccctgcgcttctccaactgctggtggattgcttcaaggttattaatatcttgatcaagttccttgtcttgtggttataggctgacatccttcctcttttggttccttgcctccctgaggagagctttgtccccttggtttgtgtctaaggtcttgaggacattgttggatgcctgatttcaatcccctggaggcattgaaaatcatggcaacacaagttaagaatgtagatctccatccttgacttaacactaattcgaagtgttaacgtgaaggacgaaggtctttatagagaagtataaatgaaataatgcagagtgaaacaatattacaccatgaagtacgccttagaattttcattccatctcttgtttacattagatgagtttacaagcatacctttggctccttaaaataaggtgtcacgaaggtactttgaaggctaagcaacatgaagctaaggccctcgaaatggtaccttatgcagggcactgttcatctatttatagggaagatgaactgcctttgtacagaattacaatgacacccatcaaggttttacacacactgtttacaaatgacattaggacaataatgtatttcctccatcctcgactgtgtgggtttcggcattcgttgtttggtagcttcccctttggcttgttttcaaagttatagacttcggctgtcatcttcgctacttgcacgcacagacaaagcttctttgtatgctaccttggtcgaaggtcaactttgttcgccaatggaaattttcgtgaaaaacacttgtttataccaaagaaacatgttaaacgagtgatcttcgacatagaatgcccccaacaatagccccttgcgggatgagttcatttcttcgtaataatcttagatcatagaaaatataatttggaggtcttatgtcaaagatctgaaaacaccttctcaaagttcgttatgaagaagatacattcaatttaatggaaacagatggtcgtgccgcttcacgcgtgtttttcagtataaaaaagtcaagaggatgagtgcaaatcacatttactgccctcacctacacgctgccaaaactttttgtgcctccgaagcttccatgcactagtgcttcagtagccatcctcggttgaaccacttttagaaaaactcttcatcttgctcggatggccagaatccaaaccaccgcaaaactgatcactccaacctccttagagttacaacaagataccctgtatatttctgaggcaatgagggcttcatcaacatcaagacttactgcagagttgtcaaaggatagaccttctaagccaagctatattgacattgatcgatccactctaagggagaaagacttgcaacttatgaggaggcttggctatttcaacagcaaggtgaatgtgtgccttcttggagaagaaacgacgtcgaagtcgggaaaagaaaagttgttgtttataagtgcttttcaaggcaggacttcggctacccatgtacaagataattgtgaaggtactaccgcaatatgaagtgttcatgcattaattaactccaaatgccatggttcaccttagtgttttcatctaggttgtacgaagctaggggggtcataccgacattgatgcgttttgcaaggttcatgatttacattaccaaacaaaggcaagggatgaatcagaacttcataacaacttcgggtgttataacttcacgtatcacaaagatacaagtggtccagttctagcctatcgaaccaagtggcatggcaattggacaaaagaatgattctatgctgaagttgactctaagcaatgtgaggattttaagggtatactgaagagcccattggaagttatctttgcattgaagaggctgaagtgtcagatgagcgaggctactgatgaatgctacaaagccttcaatacagtcattagaaagatcggatcttgggatctagttcaagagatgcttgcttacaatatatatccgactcggactggatggaaactgctgaaggaagtgaaatagaaagatgaagaacttgttacattagcttttgacttcaaagaacagtctccatacaaggctacttcggttggatggctaaagtttattgaagagaagtgtaacaaaatgtgtgtaaattaccttactacagagcacaaagatatgcaatatgtctttgggagccaagggaaactttagctttacagagttatggatgctctagggttcgaatacccagattatgaagattcttcggccaattttagagctgggcagaaaagaaaaggagctgctaagagtgagcctaacgaagagccaccttcgggtctggtaaagaagaagactaaaatgtctgttcagaaagataaagttgggaagaagaccttggctccaaaaaagaccacagcttcccaagaacaggaaaagggtagcaccactactacttcgtcacctgactgcacccgaattctcaaggtaatgactcgaccgctaccatttcccccttttatcccttgggaccaatattgactcggtttatgctaacttcaaaggattcttagaaagtcggaaaatctttgaaggaccaagaaattttatctgaagaggaagtagagagcccgtgcattctgggccttggcagtgctgcctttgagggttcatcatcttctaggaaaggcggcacaaaatctactcaaggtgacgggtcttcgaggcacgagaaaacaaaaggagaccaaaagaccaaaatattacacttgagacagaggtgaccagtaatacccaaagttgtagaccatggaaaataggtataccactcttgtgtattttgcttctacatattatcatatgagaacactcacttttaaaagaaaataatcaacaaaagacacatgaacaacttatgcatcatattgagttttatttggttgtgcatttaataataaaataatagtaataataaaatataataattgagttgagaatttgaagttaacccaaaaggtgcactttaggaaattggaaataatatatatatataaagcaagagagaaaatactatgcaaaacaaaataaatttatgaataaatacaatttattcatactatattcaggaaaattgaacatttaatgtgaagacaaattcgccccaaactttgaatctaaattggaatttaaatttgaatttggaaagaagaaaagaaaatagaaaaaaataaaaaaggaaaaggagaaagcgcctgggcccaaaccgttgccgtggcgcattctgtcttcccccgcgagcggcccactacctcccacgctcccgcttactagcgggcgggactgacccgtcagccacttgcaccctttgagcgcggatcaaagtcgcgagcaggtggggccccggggtcagactcgtcacctccgcagcttgcgtacctcacgaacgactttctgttacgctgcgcgaattcgccgcgatctggggggaatttaactggcatatccttcgccctcatccattgcctcatcgatccgcacctatgccaagttatcgccgccatcgttgaacacggaagagcgaaagtgacgtctgtagggctaggtaccgctgttgggagggcaccaacggtgaactccgtctgcgccgctgtctcgtcctcgggcacgagctcgtgggactcgctgtcgcgtgtggctgtcttcgtgaactcgagcccggtgcaggaattgtgtgggaattgggaaattgctcaccggactgggcggattggcgcaactccgcggaccggtagtcctcgtccctgagctcatcgatccatggtacgggaacttcctagccttcgctctatcaacctcgcattaactctcgctcggacgcgtaaggattgggttgttaggggccggcgtggtgattgccagtcttgggcaccgccatgttatcgccaggtgctgcggccggtgctctatgcgaggaatccggtgaagaaagggtcgtaatcaagttcgtagttgatagggctacgcataggatcattcagatcacgttttgaagccctggtgcgcgttaatggtgaactctagcctggcgccgccgcggggcaggacgccgatgtcctggagcctccggcgtcgtggcggcgagtcatgagccgtgaattgtctttcggatggccctgattagatcctaggatatcctttcgggattgagggtggaccatcggatggcggctgatcggatgggattagatgttgggtacggattcgcctggtgcggttgtgacagtagatccgcgggcagaaagggctgatgtgatctggtggtgattaaagtcgaaccgtagattcccgatcctgcggccgtgtgcgtgcgctgatttcaggagggcttagatctaatccaaaccactcgctttagaccggatggccagaaactgatgataccccttcgcgggtacgttttactaaagagtccctgaccaaagtgaaaatcaacccgccgtccaaggggggtgtagactgagtctgggaaatcttttgagttcttctctgacgtttccaatatttggcgagcagtctagagaactaaagaaatctctactacttattaaggctgcaatagtagtctgtcgttctgcctctgacatgttctgccaacggccgttctgcctctgcctctgaaccgtgggacctgttctatcatccagatgccccctcgtacacgcctcctacatgtgggcccccacaggcaggccgagcgcaaaaagacgtacttcagtgtggcaccagagctggagttgttagaatgaggaacagatgatccacaacaacgcttataagccacgtttcgtctctttcagtggccggtatggtactaatcaaataaatcccataccagcgcctatgtgctagcgttcatgcagcccaacaattcaacgtgcggcccagcagcccagcgcccctcctcttcaacgtgcggcccagtatccattgcctcgaccgcgcaacctccaccacggctccaactccagcgacctccatctcccccttctcttcaacgcgcggcacaacggcctcctcctcccccaccggcggactccaccaccccaccggtcggcgacatcaaccgtcctcacccccgcgtgcaccgcagatccacagacagctccacgacatcgtcttctgaggaacctagatctcgcttgtccgtctgcagccgctgcctccccacatcccccatgcgagctgcccccgcgttcactccgtgcgtcggcctccccgtgcgcaaccgtctccgatggtgactgcctcttcacgacagcatggagcatggtgatccgactcgttttggcatggagcgcgtcttttccgtggaggagatccccaacccctgctaggccccaccgcaccctcaaccagtggttgctgatgatgttgctgcaccagtcactaggtggagtaggaggaggggggacgcggcggacacgatgaactggtgcctgtcggagtggtgcttccagaaatttcttgaggaggtcgtgctcaatagctcgagtcccatcgttgccgtagagtagaggtagcaatggatctagagtcgaggaggcgaagagcaagccactaggggccatggcaccggcgtcagcctggagatggttgttgaccccgtcgagtacaacatgatgctcaagcagaagttggagaaggacctcgctgccatcgccatgtggagggtacgaccacttgcctttagttgcagctcacccgtgtaatcctgtttgcttcgaatggtcagggctcataacagtttgtttgtgttcttatgtgagcaggtgtatgatgtacatgtatcgcactgcttcgcatagagatttttagtggtttagaggataagaaacaactagcagtcaagcacagtatgtcgtagctaatctttgtgtaatgggctaatggctgcttactcattgtcatagttagtttatcggttttgctactgcaggcctccagctcaggtgtttctgaatgttgttacatgtaaaatccagtttctttatcctatttatttggtaatttcatttacttatctaggcctgggacatgcaattatgttgttttaaaaatgcatcttaatgttcaatttattacataaaagatatctattgaattgatattcattaactgaaaacattcatcatgaaggagcgcagattgtacattgacttcctttacttccacttagtgcctttatcttcatattattttctttcatgcaggtgtatgatgtacatgtatcgcgttgtattgtgcactttgtcttctaaattcatatcaatttctaatatcgttattttccataggttggaagagatccaggtgacggaagccatactcg

SEQ ID NO: 802 - DNA, 318 bp, Zea mays
  Intron number 1 from transcript GRMZM2G057394_T01 (locus G RMZM2G057394) derived from phytozome v7.0 (chr-ID 1; pos 2 66913848 to 266914165 reverse strand)
aggtacaaaacttcgatggttagaaatatctacttatgaggttgtaaaactatgacgattatctttggttttatttctgtttggaaactggcctcattgtcataactttaatatgttttggtggtgatttagctgtggacatgtgtagcttatcataattttgttctattctgcaagatttgacatggctggattttagtatctcatacatgttctataaatgctattttatatttggtagcatattgttccagaatcatccttttatcttttttttttgcagagggtatatattgtatcagatcattgcagagattt

SEQ ID NO: 803 - DNA, 468 bp, Zea mays
  Intron number 8 from transcript GRMZM2G413226_T01 (locus G RMZM2G413226) derived from phytozome v7.0 (chr-ID 4; pos 9 1188502 to 91188969)
cctacgcaagtccctcactagctcatttaataaaagaatattgattgttgttggtttaacacgtgggttgttggtctcaggttttgaggcatgtgtgctaccacatcatagctgccggattgagcggataacagatacatggctacagtgacaaatcttaagaatccagtgaacaagtggcgatgtggtgtgactcctatttcagtaagatttgtgttaatatgcctaatagtttaaggaaaagtaagaatgtagcgtctaacccatgtctatccctgcagtctatgatgactgtgaagcgatgatcaagtgattgttttatgtctgttttatatgcaaaaaatatgatcaagttttaccgaagatgctaccaaaagttttttcttatgaattttaattatcgaatctaatttctgatccgccttgtgtctttactctaaatgatagtattactactttattcgcttg

SEQ ID NO: 804 - DNA, 12255 bp, Zea mays
  Intron number 8 from transcript GRMZM2G088218_T01 (locus G RMZM2G088218) derived from phytozome v7.0 (chr-ID 8; pos 1 36702558 to 136714812 reverse strand)
acacaggaagagaggtatgtgctttgtcttccttagctgtggccctttatttgttatattaccatgttttgatgatgctgagcttaacttttcacttgtgttgtaaggtcagttatctactagctgcgttataggtgattctttattcttgtttgatgaattataattttcatatgctttagggctgttacacatctgtcagtgtacttccatatgctttagggttgttacatgtcaatgaacttgctatattgtgttgtaaatggcagtgatgccatccccattatatggctagtaaatacaatgttgctggtgccatagttttttgtagaatgcgcaggagagctccatattattgtatttaaaagaagataaaaaataaattacaccacgcgcaccatgctcacacaaacacatgtagccttctactcgccggcatgctttgcaggagacgaagatgattcctggatcactcaaaaactcacaaaactcaacagaacactaggacacgctgtgtttttggtgctgccaaacgacaccgttttgataggtgtattctattgatctgtttatatacacaattacaaaacccacatccataaagggaactatttaatcaactatcgattagctaattagtctgttatcaattagctaagaaagggaactatccaatcaactatcaattagctaagaaagggaactaatcgatcaatttttaactatcaattcgctaagaaaggaaactactaagcctgtctcggtttatatgaccttgacgatgccaatcttgccacgaatttcagtgaaccgtgtgtgcccaagtgacttcgttaaaatgtccgcaagttgttcttcagtactcacatgatccatgtagatcttctagtccacattcacgaatgaaatggaatttagtgttggtgtgcttattttgatcatgaagaacatggttcttgttgagtgcaattgcggtatgattgtccatcttcagcagtggcggctggactttgatgcctgtgatgtcccccaacagcaggccagcagcacgagccgcacaacttgacatgctctagtcgtgcctgccatatactccatattctctgcttcacaagttttgagggccatcgtcttttatttccaagactgccaagacatgcatggttattaaaaaggcgcttaagcgccttttaagtgctacttagatgttaaaacactgcaacgtttcacgaattgacgtaaagtaccagttttaagcgctaaagcgtcaccttttggcgttagaacactctggtccgtaaaaaggccacgatttgtcactttttcagatttcccgcccagcacagtctcctaacctaaaacagggggcatcgttcctttgtcatgcccccaaccagccttcacggactcacgctgcgcgcttgtccgacatccctgtgttttgtcgctgaccggtaagaaccttgcctgagctcgccgcctcccttcccaccctgcgttgctccctgctcgtgccatgtagccacgctccctctcccctgcggccgcgctcgatgctccttggtccctgctcgcgctccccatggttttcaagtcgcctggttgcgaggtcgttaatggtgaccgattaggcgagtaatcgcgattaggacgtcgaccaggacgattaatcggtgactggtcgtccacctggtcgtcctaaacgcctgtactaatcaggacatatataattatatatagttatatacactatagtttatatttatatactatatcatatacttcaactagcagtcctagaactacaactacacagtaggtaatcaaagtgtgaattatcagactcagtctcaattctcaaatagcagtagcttcagatgaggtactctaaactgaaaccaaagtaccaaactgaaaccaattcttgatctaataattctaaacttgcttgatcagtatgatcacggtaccttcaaatgaggtactcatcttcctgagttgatcaagaaggactggaggagctgacacctgatggttcttgatcaggagttcttcagagaggtggagcagctggagggaattagagaggagcagggagcagcagccagccggccaggaatgagagaatgagagaggagcagggagcagcagccggccggccaggaaggagaagagacagagatgaaaacaggaaagcaaattgggatttggaaaagaggcgtcaatcaataattaaccacaatgaatatgtcgtcaaaatggaaaagaggcgcccaaaaacgggacccagacactacctttccaaattctagtttaaggtcgcaacatttaacaaacggacgattaagcacgattacacgacgataactaggacgacaggtcgtctgaccagcccacctaatcgggtcggaggtccttatctactgcatgtggtcgaccaggatgattaatcgtgataaatcagacgatttgaaaaccatggcgctccctgctcgtgctcccagctcgccgctgcctccctgcgctgcgtccgcacttggtctctgctcatgctcaacgaggccgctgccaccctgtgctgcgctccctgcttgcactccctgctctcgctcggtcagctcgtcggtcctcgcttagtcgcctccctgctcttcctctgttagctgcccttgtccccgctgtcatcctccttcccttccctgctcacattctcctctgattttggttatttgcagactgaaaatggcaaccagtaatgatgctaatgcatctgtggttgtggacattgctttccacttcagttacttttgtgctatgtttgtgattgtggactactgcacatttcattccactttgtttgtggtttttgacttgctagttgctattagttgaacacttgaacttgtgttattatggatttgtggtagtgtggttgtggacatgttatattgttacgtgaaattatgttatattcatatcttgtccatgtttaaaaagacgttttaaagctcgcttaaacgttttaaatttaaaaagttcccatgagcgcctcaacgttttatcgctttaataaccttgaagacatgtctcctacaaagaagatgatgctgccgattcatctcatcggtatctctcccaagtcacggtcagtgtactcgattagcgtgtagctcgtcaacctgctgccgatgttgcaacacttggggtagacaaggccatagttgattgtgccgacaatgtagcgcaggatgtgcttgatggtggctaagtgctcttgttgtggtctccatgaaactactcacaaaactcaccacaggcgtaatgtctggcctgatatgaaccaaatacgtagactcctaaccaaactgatacatacatgtaaggatttgatgtcgcctggggggggggtgtgaatggctacctgtaaaaactaagctccaaaaacgatgagaactacatgcggcaatgccgcttggcacccgacactaccgcgctgtggcactgccggacaatgcatggcactgcagtgcaagctaaatgcctaacttgggtctgattgacttgaagcttaatgagtaatagctacaacaggtaagcgctggtttctttgaatatgaggcccagtctagcagtttaatagaaactatgaaaactgtctaggataacaatatatatgaatatcaaatccattgattgatttcaagtccagtcgtcccagagggccgtccaggcgcctaatcgcgattagggcgacgattaggacacctaattggtcttggtcgacctttggtcgtcctatgtattttttggacatatatatatatatatatatatatatatatatatatatatatatatatatatatatatatatatatatatatatacgtatatatatatatatatacgtatatatatatatatatacgtatataactatatataacataatatatctatatacaagcaatacttcaagagccaataggctaggcactaatataagtctgaaattggaactgaaatatagagagtagtagtacaagcagtgaagcagcagaactgaaagtctgaaattggattggaattgaaatataggctatatagcagtagcaggctagcactagcagcataactgaaatggtaatgcagtacaagcactcaagcagtattgtagtaatggtaatgcagtagcggtgcctgctagtctgctacctagagcagattagcatccaagcaaaaagcagcagcagcttcccctcctccagattcagattcatcttggtccatatctgtagttgcttttggtggttgttcttgttgttgttctgcatctactgccaaccacattggacccagggaatatgacctcaacaccagcacctctttgtccacagccaccatcaaactctgaacatgtcaacagatagaggtcaagtcactactaggcagtagataactagatatgtgctggactggtggtaactggtaagaacattggtgctggcgtgctgctaaggagctaagaaatataaacattggtgcagagtgcagacaagtggtaagaagtaagaacaatagaacattggtgctggtaagtggtgtaagactgactattgactagagcagactatgaccaagaaggcaagaactagagactgcagtgcagagtgcagacatactgataataagaaagaaaagggggcgaaggaggggagcaggggcgaccattagatgacgagctcatctcgtcggtcgtcagttcactagtgcagtggtgctggtttggagccgacgctggtgacctagacattggagcagccgccattgagtgcactggaaggtcgacggtggcagagggcagccaacgggtttgagaggggcacatacatggtattgggtacaacaatgttagggtttcggcaggaggggtgcaaccaatgggtttatgctacttactatagatggaccgtaaaaacgatgaagcccaatagaaaacctagccggcactggtcgaccaggaacacactaatcggatgatttgaacgcctaatcgatgactgggacgaccagaaagtccgattgagttgtcctcctagtcggtcactttcaggcgaccaacccgactaatcaggattaattgcgattagtcgaacgacttgcaaacaaaggtcaaatcctaggtgatatgaattgagcaaagcacacttaacaacatgagcacaatagaatgtgtatgtttagaatgaatctcaaacctgctattagaaacctgcccgacactgctgcgctcagcctggcacaactgcttgctgcagaatgctcaacagtagctatgattgcagccaatacttggatatggacttggtgatatcttgtggcaagtaatgcacgaccaagtatatctagtggaaggcaagtaatgcaattcgaaatgtaagagacaagacagtgatttatcccgtggttcagctcgccacaaaggcttgcctaccttcacgttgttgagaaagctaaaacaaatttgaagtctttttcaactcactcctcttctctaaccaccgaggtgataagttgagatttccactaagagatcgggtaattacagacttttccgtggctcaccacaagcacgggagctcaccaagtgacacctagctgtctaggaggcttccccttcaagagtaatgaatgcacaacgaatgttgacaaagcccgacaagtgctcaagcttgtcttggtctagatctgctctctagctcgtaatcaactctctaactgttaatcaaacactaatcacactctcacaaagagaggagttaaagagggctcaaatatggcttgggatgagttgggactgttttggacactagcaggaccccccctggggcgtgggatgggtatatatacaacccaatccaaaactagccgttgggggtcaaaactagccgtttggggctgtacaggtccggcactgtcgcgccccggcagtgtcgggcctctgagtagcactgcagctgcataaccagcttcacgaaaaacgccataacttttgactctgaactccaatttcagtgatcttggacttttcagaaagcttgtttcgagggctatccaactcaacaaagaacaagtccaaagataaaaaacaccataactgatgtgctttgtgtttctctcatgctagcacttggggtttggttagtttgagcacttcagacttttctatgattcgtgttgcatcccccttgatagtacgacatacctatactcaagatcaagataatataactattttaaccacttgagtcttcaatgtcttcatatgccatttgttctcaatatcacttcataaggggttgcaatcaactttgtctcatctcttcaagcaaacacaccttgagcacgtgacttgaacgatttcatcacatatgagttcaattcatggcttccaaatcacttccactaatgatttgatcctcaacacaatatgactcctcgtaccttgattagttcctcaactcaatgcaagtactctcttctttaccttagccttggcatcttggtcctcaagttgttgcttggccttcacctttgcttagtaccttgaagccctttccttgctatcttcaccttatcaatccatcctcaagtcacatcatattgatcatccattgaaaaaccgtttcttcaatattgtgatccttgcttgattgtcatctagatatgcatgttaagatcgatcaagctttaggttgattctcatagaaacatacatggaccaacatcagtatggtcaagccaattcacgattccttatatcctcttcattttggcttgacacttcctattattcacttaatctttatcttcatattctagcttgatcatatcagtgcatagagattttcctaatctttatccatataagcaaactaatgtagagaccatgttatatccattgtacagtgtctcctttgtcatttaatctttgcttcatatttcctcacttatgtactcttgatctatttttcaatagaatatcatcaagtttgacttcctgctgaacctttgtatactattcattatacaatattcaaaatactcaatttcctgttcaacacttagcaaacttgttagacctttaaatgtgttgtcattcaatttaccaaaacccacgaaagggctagatgcacttatagtagacttttaactaaacttttgtacatcgtcacatcgacattcggtgttgagctctttgtcaagagcttcagtcggacctccattagcatgtggcatgggttgcaattctccatgtcgccttctccaatagcttgctggcatacaccgcttgcctcagagtgatgtagtgcccttgcttgacctctagcccaagataggacaagagaccaaggtcactcatctagaacaaacgacacatgctccttgaatgcattgacgttcacgacctttatttaatgatgattaggtcatcgacatataccctgaccaccacatgtgatgcaacgacgcccttggtgtacatctcgcttgttgacacatctggtgaagctcagtttgtgcatgctgctgtccatcttcgcgttccacgcctgtgtcatttggtgaagttcgtacaaccatggtttcaaaggtgtcgcctaggcgtccaggcggccaaaaagtctaggcgtccccgtcgcctagccaagagtccgcaagaggggagggggaagaagcctagagactggggagcgggattggcagcgcagaactcgagggagtgccgagctcggtggagcggcgacgcagatgtcgggggagcggcggtgcagagctcgggagagcgacgacgctgagactcgggggagcgccgccgagcttggggtgagcaggagcagcgatgcatggttgtggacgagcggcgacagtgagatgggagcaaccctaaccggaggatatatgggctgcctgcctggtgggctgggccatctcttctaccccttccttcttttttttttctccctttttctttttcttcctcatatatgttgatgttctgtcttttctttaattggtaatgcgtcgccttgctcgccttagtaaccgcctaggcatcgcctaggcgtccaggcggtggcccaacgccttgtctcgccttaccgccttaagaactatgcgtacaacgcctttagtcgtaggaccttcgcgttgtgcctagcagtgtcaaagcccgacgactgtcggacatacacctccttgagctcgccatccaggaacgttgactttacatccgtgtgatgcgtaagacaactcctctgtgccacaacaagaagcaacatctgcacatgttccatccgttcgatcagagcaaacaccttattgtagtctatccctgattgttggatgtatcccttggcaataatccaggccttgtgtttgacagcgacgccctgctcatcacgctttaatttgtacacccacttcaggccagttgggcgatggctcgaggaaggtcgacaagagcccacatcttgttcttctcaatggatgtcatttcttctaccatctctttgcaccagcgggcatcgccttgagcctcctcgaacatggtcgattcatcatcatcgatggtaaggggcaagtcctcatccaccacgaactcccattctgccaagatcagactttccttcagctcgagcacaccgtccaatgttctgaaccggagatgtgtctcaccatcgtggtcggcgttgccggaccttggtgtttatggcaaggatctctacatttacggtggctagagttgagactgctggggtgttagactatgtaattagcctgatcatacctgccatatgtgctgaccatgcctgctatatgtgccttggtgtttatggtagttgatcatagattaagcaagggtttccattgattggttgctttactgctttctataaaccttagacgatccttgcctatattttgtacacctcttgtatctctaccatcaatccaatatctgttagttcatattctatcatgaaccttcaggtatattctatcctttcaaggcttcctttattgcctcttcccatatcaacttcggtctttctgttcctctcttcctattgctatcgcgccttaggatcccactacgcactggtgcctctggagtacacataaaactaagcaaacctgtaaaaaactgtcaaagactcactaatcctaaatgttagttgataaaataggcaagaattcaatctgcatgttttatccagtgctaacaatactatttgtgtttatgtgaatcttgataccaaagatgaatgctgagttggatttctcaatgtttattggaagatttcaaaatgttgggcatgttggttggcagcttcaaaaaactgcctagaccaaggcaggcttcttaggcggcatcaatccaaactggcccattgtattgttgtattttcactattagtccaataatccagtttgctcgttggtagtatcgaggatgtagtttgagtctcctggtaggattgtgtgtttatttctgtgtaacggatgatttttgtagctgaggttcagcagccaaaaattatctcctacatgaggtatttagtgtgtttggttgagttgtgccttttgaaaagttgtgagtatagtcacaaagttcccgaattgatagggtcaaggaacgtggtatgctacccgtgagagattgttacatggtggtaacgaaaatgaccccacgtattaggtcggggacgatgttttcgggtcgagggttgctaccactgtacccgtttcttgtggctatggttgagttgtggcctgcgaaaaaaaattagttgtggtttactggtttacgagttgtgcgaaagctgaagcctgtttacttcaacaactgtggcttttggaaaaaaacccgatgatgtcagcctaccgcagtgacaactgaacctgccctttagcctcatattctacctccggatgaatctttggccaaggttgtgctcgcctgcagcggcgaacccatgtgtggtggccaggtcctgtgcggtggccgggacttgcccatagccgaggtaggggccggagccgcgcatgctcgagggtatggcctcgccttgtcttggggaagctagagagggaggggtcgccagagccgaatgcgggagaggatagagtgccgccactggctggaggacaccacacgagacgagaaagtggccatgttctcatggatgggaagaggtcggagacatgaaagaagaaaaaaaatcaaactgatatcttcataacttgtggcatgtgtgtaattttttaaacttgtccaccttcacgacaagtataaacatgtggagctacttttagggttaggcacaaatgaccgagacctgaaaaaccaaaccgatttaaccgaaaaccgaaccgaagtaatcgacaccgaaataaatagttcatagttcgcactaaccgaactaatctgggtttattcggttctcaccctcggttaaccgaaaaaatcgaatgatcgaaccagcagcccaatacgtttcagactaggctgacccaaatagcccttatatctaaccctatgtatataactgtcagggcctacggaggcccacggaggggctgcggcagcagcagccatgggccctccaagggggattagataaggatagttagagataagattagaagattagttgagattatctaggagattagttgagattatctaggaaggttatcaattagtagttgttgagagtttttaggagagttttaagaagataaggatctctagctagataagggcggccagctggcctatttatgtaatcaatggatgagaaataaagtaggcaaaattagaagggagaaaccctcctcttgctcggccgtgggcagaggcccccggcagacgttcctgctcatcgatacccctctccaatccctcaccgatctagcgaccataacaataacacttagtcccctctcgctcacgccgaccctcccacccgcttcctctaacccttggtccctcgcgccgctcacgtcgatcggtcgctccctttgacctcccgttccttctcgtgccgctcacgccggccaagtctacaagatgacgagcgacaacacgttattccctgtggcgggctcgatttgttttctatccattggaatttcataccctgcctgttagttccctggtggatctacatcttgcgatttttagtgttcctggtggattggttagttcggtccaaaccgaagaccgaaccaaattaatctaagaccgaaattctcggtttcaaggatttgaaggggccgatcggtttgatgtggtttactaaccgaattttggataacatctaagaactgctcggttcggtataagtgaatgcccacccctcgttacttttagtcttgtactagagtaaggctattatcaatggtagtttcatggatatttaatagtatacgtcacatcaatttttttgatgacatggcaatgccatttaagaagattaattttcatgggacgaaatagtttcatagggatgaaaccatgtcaactcgtttccaaggtcttgaatagttgaataccgtgtgaaacctccattgagggtgatttgtttcatcttcacatattttattaacttctattggtcattgagttgcaacatttagttggtatgttagtctatgaaatagtgaagtgaaattttgtattgagaggcattgtttcatttttagtttcatgacacttttgatgatgtgggagtgttggaaaaagtgctaccaaattttcattgagaatatcctaaaagaagcttttggcctaaagcaactgttgattacttgattttcacccatttggttggcttttgcaaaagcaaaagcacgttcaaaagcccaaccaaagggagccttaggctgccttgtgtgggcattcttttcccttttcttctctctttaatataaagatgtaccgctctcctgtgtgtttgagaaattttattttggctctaggaccccttttcatctccaaaggcaattcctcatgttaaccatcggctatggttgatcttgagaagattttatgatgatgatgtatattttgtgtagtgagtagctatgtgcatctgtattctgtggtcatttttctttccgatcattcaatctaacagtgtggctttgataggttgacacggtacaagaacttcaaggaaggacaca

SEQ ID NO: 805 - DNA, 1470 bp, Zea mays
  Intron number 5 from transcript GRMZM2G168166_T04 (locus G RMZM2G168166) derived from phytozome v7.0 (chr-ID 10; pos 112048500 to 112049969)
ctcaaagtgatacaaaaaaggtatgcatgactcataatgcgtctcttgatatgttgagtatttgattctgcttgatcatatctagtttcttgattgtgcgctatgctcactaatttgtattcatggatggtgattatcctgagatataatccattgtgatgctgatggctaatctattttacctcattgcaacagttgtatcatgtcaactatctttaatgtctacctttcaatgctatcttttcatgtgtgccttttttttctcgtatcgagtagttcggtatttttttcattctgctgttttatttagaaaacgaaatgcaagcaatgggcagctcctgccggagtcctacttttctgggcttgtcaagcaggtctgcttgatatactggtataaatggtgtcccaaatgtgtgcataataggaattaggaatgaacattatattatactaataataaaacatgttttgggcctttttattaggctttcaatccttttatatttgttgccttcatttatatcaaaagtttgttgctagtatgccctttcttaatcagggtgaaaactaacattgaagggcgggcctggtgcagtggtagagcctaccgtctgtaaccggaaggtcccgggttcgagccccagcctctgcatattatgcgggtaaggcttgacgcttaaagatacccttccccagaccccgcacagtgcgggaagcctacggcactggctacgcccaactgtttgttggtctgctgggattagttcattaaaagaggttttcacttagcagaagtacaaaatgaagtacaacagatgttcttgaaaattgtcggagaaacatcaagtccgtctttgttttacaattagtttagtgaaacacagttatattaatattactttaaaaaatgtagtggaactgtgtgcatgtaatctatgaggtagtcgtagtctgctattgctaactatccaatacctccaaaaagactgccataaatgtgtttctaattaagctaatataaaacgcgatgccagacaaaactaagttagtagtcatgtgttactgcaataattcttgaatctgctcttagcccatgtcttttaacacttaagatgttacctatctatgcactatgcacttctgttgttccagaaccctttcacatatacttgattcaggttatcctttgtggttttgtttattgtattggtaaggctaagaatttggttatcttttgtagttatgtttattgtatttgtaaggctaagttttttcttctcatagtcctatcttgttcattcctgcatgctgaaccccatgtgtccagcttcactaagatttgattctgggcttacctctgttcacagttgtgccaaaatattttaattttgttaacatatgcatctctctttgctttgtattttttccttgtcagttggagagtagaagtgctcgtcgcaagaaaaatta

SEQ ID NO: 806 - DNA, 8955 bp, Zea mays
  Intron number 1 from transcript GRMZM2G127598_T01 (locus G RMZM2G127598) derived from phytozome v7.0 (chr-ID 4; pos 2 2614330 to 22623284)
accgtgcgcgcgccaccgctgctctcgtctgtcgggtgagcgattcttcgcaactcctgtcctcctgctgcattacgttgctgccgcttcatttttgtattgaatgcacctgaattagacctcacagcttttatgtcataaactcaatgcttgttatttccgcatctacattgtactttacatcataaactctcgtgtcagcttggaattctcattgttgtgctaaagctattatcttttgaacaaagggtgatcttgcgttgtgaacattagttcaaagtagtctttgttgtgtctaatctctaatgtttgtttgatgcacacctctcagatcgtgccgctaaaacatggtactaaaataggtgataaaaggcgctctttgctgtttttctaggctcgtgggtaagcatggtattttataactgtgtttgattctcaatagttttagctgcagatcatctatagtttttcttcctttcaatctttaacatggggccatgggcagccattcccctgtcagttcaggaatgcatcggtctttgaggaagactgaatgtagtcttcattgtatggaaggttgtcctttaaggttgcacacattgtcttataccctgataattgtacattttttatgttttctggttgcaaatcacagctagttgatataggcacttctgtgattaatgggtgagaaagcagtttgtttatcttccatgccagttttcttcccattttatttgattattttccacattggacaagagattatcattcatttatcttttaaaatattttttgttttgctggaatttgtctgaagggtctggttgtgttaatataagggcgcatctttagtgaatgtggaaaaactttgaaaaatggttaactttcatccgaaagcgtactttgaagttctggaaaaaaaacttggcatattgatagaccatagtcattcatagatgtactttgttggaaacctgagattccaactcattctatattagttcgtacaaaaacgggtgccaaaatgttcattttcatatgaattattctataatgagtttgagtctcaacttttttttgacaaagtacatcataacatgaactatcaacacaccaagtttcagattttgtcgaaattccattgtatacttttagacagatcttcatcattttcatatctgtgccattttaaccagagatgcacccacagacagtatggaccacataacactagcatgaacagagaatcttctgtatccaatgcatcttaacctgaaatggatgcctgttgatacagcttttgagcatctgttgttgtctttctgtaatttaatggtacctaatttacaactggggggaaaatatgctttctgctgaacaatacctcctaggactctaggaatgataatgctaacatgagtgcccggctcccacatgactggggtttgggtaagcaataaacgaggcaagcccccacccaggtggagcggttatttcgaacccgtgacctggtgacttagtgagacagctcccatcactgcaccagatctgctgccgttcaacaggaatgtctttaacaaaagaatgaaataacgccgtggaagaaagttacgatttatattacattaggaaataatgatgtggaaatgctctgcatgcagagattcaatgcttttgcatgcttttagtgggtttggtagtaaggctgcttaggggtgttctaaccttgttactgtcctcctggtcactatttaatcctttagtggcatctgtttgcctttgttaaaccggtgccagctgtgttgttgtgtgtaagcgttgtgttggatgtatgagtttcatttgcatggctttttcttcttcttaagtgaagtgatgtgcaactcttctccatatcgagaaaaaaatagtaggtttggtaaaaagcgctagtagtgagtgagatatgagagtaccgattcagtggttaatataatgctggacaagacagctgatgcgtctaacatccatgctacactgctactgcatatggtggttttcttcttggagagtgcacatcttatgcaatatgcattcctgtttatgtccatttgtgaccattgcacttgtttaccgtgtcaaccttggaatcattatggttgtttattttgtcaaccttggaaactatgtccttactgggtgataattgctcttcttgcagtagaacaaaaagattatcaaagatgttccttagggatctggaagaaaagtcatgcattgtgcatttataatatgaatcgtttttcttaagacaaatcctcattccttaaactgtgttccgttatttcagatggctactgctgcatggtttagctctgcaagccattctactgaaaatatcatcaaaatttctagcctttgttggtacctatctgtcatgtttgggcgcacgtacactaggcgtcgccgagccagggacgtgcgccgtgcgcaggagcgcgccaaacagctggccgacgttgagaaggaaagaggacgctgagaaggaaagaggatcagcgcatgactgagaaggaaagaaagggaaggaaagagtatcagcgcaagaaggaaacaaagaataaggaaacaaagaagaaggaaataaagaataaggaaacaaagattagcttgctattttagtcctaaattagaggagcctgctgctttggtcagttggacctcaggctatttatatcgtgtaaccgtactcagtcaagtcaagcagaaattaaaccaatctcgcctctctctcttctctaaccgtgagccagggggcataacccggtgagcgtgtcagcggcacgggggcataaccctgccggagttatcacggagcgagagtacgagctccggagtagaggtccggcatccctgccgaacactgctcttgacaacctggtatcaacgtcgcgtcgatcctttcgatccaccgccgctgcatccccacccacagcgccaccaacagcccctccaccgtcaccaccaacctcggtcgcgtccccctctgtgcatccggccatggctgacgaagagccaagcctcgctgacgttgtcaggatgttgcagaccctgtccgccgatgtggcgggcctcaaggcgaaggcagccttgtcgtcggaagctgatagccgtcccgacggccagcaccacaccgatccgccgcccaggttccagaagctggattttccccgatatgacgggaagacgggtccgctgttgttcatcaatcggtgcgaatcctacttccaccagcagcgcaccatgccggagaaggtatggatggcatcctacaatttggaggacattgcccagttctggtttatacagctccaagaagatgaaggcacacctccttgggggcgattcaaggagcttctcaacctgcggtttgggccagccgttcgttcgacgccgctgttcgagctctccgaatgccgccgtacagggaccgtcgaggagtactccaacaggttccaggcgctccttccacgcgcaggccgccttgatcaagaacaaagggtgcagctctacaccggcggtctactgcccccgctcagccaccaggtgcgcgtccacgcatcggcatcactcgcggcggccatgagtttggctcgccaactggaactggtggagctggatcgcctcaaccaggcggcccctaaggcagcggcccgagcgtttctgccggcgcccgttccatggtaggcgccacccgcggtggccgtacttccagtgcccgcgcagccagcactggccgctccaaaggcgcctctggcccttccagcgccgccgaccagagaggggggccaagccaccaagcgcctctcggtggaggagcaagcggaacggcgtcgtctcggcctttgctataattgcaatgagccatattcgcgcggccacaacagggtgtgtcgtcgtatcttcttcatcgacggcttcgaactcgctgaggccgaggcaagcgaggaggcacccgtgttctctctacacgccgttgccggggtggctgtcgccagcaccatccaactccgcgtgcacgtggggtcggaggccttcaccgcgctcgtcgacaccggctccacacacagcttcatcggggagaccgcggcccagcgcgcagggatgcccgttcagacgcgccctcgcctaacagccacagtggccaacggggagcgcatctcttgcccgggcgtccttcgtcaggcaccggtcgtcatcgatgggctggaattccgcgtcgacctctacgtcatgcccttggcgggctatgatatcgttctcggcaccaactggatggccccattgggggacatcgtctggaacgtcgcggcaggcaccatggccttcaaacatgcagggcaggacgtcagctggcgcggcacggcgcctccgcccactctccgccttcatgcggccactccagtgaccgaacccctcctcgatgagctgctggacgccttcgaggacgtcttcgcggcaccgtccggtctgccgccggcccgggggcgcgcacaccacatcaccctcaagcccggctcggcccccgtggcagtcaggccatatcgctatccagccgcgcataaggacgagctggaacggcagtgcgcgactatgatggagcagggcatcgtgcggcgcagcgactccgccttctccccggtgctcctagtcaagaagccggacgactcgtgacgtttctgcgtggactaccgcgcgctgaacgccatcacagtgaaggatgcctaccccattcctgtcgtcgacgagcttctggatgagatccatggtgcgcagttcttcaccaagctcgacttgaggtcggggtaccaccaggtgcaaatgtgggtcgacgatgtccacaagacggctttccgcacccatgacggtctctatgagttcctcgtgatgccgtttgggttgtgcaatggcccggccacgttccaggcactcatgaacgacgtgctccgccccttcctccgacgcttcgtgcttgtgtttttcgatgatattttgatctacggcaaatcttgggcggaccacctcagacatcttcgcaccgtcctcaccgagctccgtcgccacaccttgttcgtcaagcgctccaagtgtgcattcggagttccaacggtcgcctacctcggccacaagatcttggcggcaggcgtggccatggatgcagccaaggtgcgggccatagtggattggccggtgccacgttcaccgcgggcggtacgcgggttcctcggcttggcgggctactaccgcaagttcatccacaactacggcttcatcgctgcaccactcaccgctctgctcaagcgggaaggcttcgcatggagtgtcgaggcggccgcggccttcaccgagctcaaagccgcggtcaccaccgctcccgtgctgggcatgctagacttctccaagcccttcatcgtcgagtgcgacgcgtcctctcatggattcggacctgttctcatccaagacagacacccgatcgccttctacagtcggccagtggcgccacggcacagggcgctcgtggcttatgagcgggagctcattgggttggtccaggcggttcgccattggcggccatacttaagggggcgcagcttcatcgtccggatggaccactacagcctcaagtacctgctggaccagcgcttggccaccatttcacaacaccattgggtgggcaagctgctgggcttcgatttctcagtggagtacaagcccggagcggctaattccgtcgcggatgcgctgtccaggcgggacactgaggatggggcactactggccatctctggcccgcgcttcgacttcattgaccgcctacgccaggcacagctcgaggacccgaccctggtggccatgcacgccgagattaccgctgggactcggcctgcgacctggaccatcgtcgacggtatggtgctgttagggggcaggctgtacatctcgccagcctcgccgctgctatcggcgattctacgagcggtccatgaggacggccacgagggcgttcagcacaccctgcatcatctccgacgtgatttccacttccctaacatgaaggagttcgtgcaggactgggtgcggtcatgtgcagtctgccagcgatacaaatccgaacacctccacccggcgggcctcttgatgccactaccggtgccgcagggtgtgtggacggacgtcgcacttgactttgtggaggccttgccgcgcgtccgcgggaagtcggtgatcctcacggtggtggatcgcctgagcaagtattgctacttcatcccgttggcacatccctactcagcagagtccatcgcccaagcattcttcgtcgaagtcgtccgcctccatggggtcccacagtccatggtctccgacagggacccggtcttcacgtctctattttggcaggagcttatgcggctaatgggtaccaaactctacatgacgacaacattccatcctcagtcagacagacagtccgagtcggccaaccgcgtcatcatcatgtacctaaggtgtcttacgggcgatcggccacgccaatgcctccgatggctgccgtgggcggagtacttggtcaacaccgcataccagtcctcgctgcgggacacgccattccgcgtcgtctacgggcgcgacccaccgtcgctccgctcttatgagccgggcgacaccaggctaccagctgtcgccaagtccatgggcagagcgtgcggagttcttggcccgacgtgcggggccgcttagagcaagcacaggccacccagaagctgttctacgaccgcaatcaccgtgcggtcagctaccaagttggtgattgggcgcttcttcgtcttcggcaacgctcggcctcttcgctgccctaggccgccggcggcaagctcaaggcccgtttttgcggaccgtaccgcgtcaccgagctcatcaacgacgtcgctgttcgcctcgccctgccagccggcgcccgcatccacgacgttttccacgtagggctgctgaagaaatttcgaggcgagccacctgcagcaacaccaccgctgcctcctctgcgacatggagccatcgaccccgaaccggcgcgcgcagtgcgctatcgcgtcgtcagtggtgtgccccaagccctcatacagtggcaaggagctacgcctgcatcggctacatgggaagacacggcggcattccgcgctaagtacccggcgttccagctcgaggacgagctggttcttggcgggtaggaagatgtcatgttcgggcgcacgtacactaggcgtcgccgagccagggacgtccgccgtgcgcaggagcacgccaaacagctggccgacgttgagaaggaaagaggacgctgagaaggaaagaggatcagcgcatggctgagaaggaaagaaagggaaggaaagagtatcagcgcaagaaggaaacaaagaataaggaaacaaagaagaaggaaataaagaataaggaaacaaagattagcttgctattttagtcctaaattagaggagcctgctgctttggtcggttggacctctggctatttatatcgtgtaaccgtactcagtcaagtcaagcagaaattaaaccaatctcgcctctctctcttctctaaccgtgagccagggggcataacccggtgagcgtgtcagcggcacaggggcataaccctgccggagttatcacagagcgagagtacgagctccggagtagaggtccggcatccctgccgaacactgctcttgacatatctgttgtggattacgttccataagtcgccttggcttctgataattagttgaaactaaatcaattgagatgttgctgcttgcctactgctatgagatattttttggaaacttttgttacgtagctatttctacatacttgtttctaaccagtctaactttgtagacctaacaataccttatatgattataccatgaaatggttattcctcaaatgcagatatatggaagttgtctattggatttggttatagatggctaaaagggctgggtcaaatgggtgccatgaggcatggcatggcctgttgaggtgtgccgtgcttgacctttgcttgtggtgtcgatgtgagcactgtctgtttactggccgtcctgttaagtgtctgtttcatgaaaaccctaactaccatatcgcccctcctgtttgcctaccctgtttgccaatgtgctcacattctggtacgattacccttccctgtgggctttggtatcgccccgtcctcccttcggcccttctactcccagcctctgctcccctcctcttctggccaccgctcccctcccctcctgtcaacggctggatggtgcggcatcgttgcggaatcagatggtggcgcacagcagtcagtgagatccaagatggctgtcatttgtgtatatgtggtgtatggatgatggttttagtgagtctggattggatctgtgtttctgtgtatctgtgtataatagatatgtggcttggttttggcttgaactttttggtgttctcaaatagatcctttttctagtatgtggttgaaatggatttttgctgattttagtgcaatgccctagtgcgcatgtcatgcaaacaacagttgcatactattttcggcagaactcattctttttatatcttcacttacatggcatatgtgtatctaaggatggaaatgggctctaaattttacactttgggatcggatcggattaggatcgggctctatttctattcatttttgaactaaaattatttaagggcttaaacaaatagtgaagaaacatttggattgtgattcattaccaaccctatgtgtatctatatacactttacttttcattttaactgtgttgaagtttgtaatatatgacatgttatcctgcaggaacttgatttcccagaggagcagatccaactatc

SEQ ID NO: 807 - DNA, 7710 bp, Zea mays
  Intron number 2 from transcript GRMZM2G023008_T01 (locus G RMZM2G023008) derived from phytozome v7.0 (chr-ID 4; pos 7 4202688 to 74210397)
aggtgcgaccctctggcataccattgctataccctcatgacaatttgactgtgattgcaaactgtgggtgaagtcgatcctctggcataccattgctataccgtggtttagctgctgcaatctatgtgtgctcaaccgtagttgtgataatagtggtttggcaggaaacattatcatgcagaacctgtgaacgacaaaggttacatagacctcaaataagtgatctgtttagcctacacctttcgactatggtactatacatagtgacaaggttcccggaacgttgggaacgaggaacgggaacgaggaacgcggtacgtctgttaaagcaacatggaacgttgaggggtatacagctgatcgacgttcattcgatgcgtggaacgtgttcccaacgatttcggaacgaagttagggaacgattgtaatggaacagggaacgatgcgtaattaaaacaagcaatgacacatacataatatataatatatgtatatataactgataatgatgggatcccgataatgataagtcatagtgtcttagcttatttatttatatatatatatatatataacggtaacaataattactttcttgcaaagcctagatagaagagtcttctggatcaatgtcccatttagcatgtgcgccatgtttgtagccatctgttgatcttgacaaaagtcgcaaattggatgtctcgtaccagtagccgcagccccatcttcgtcaccgctgtctgcgtctgcaccaccatcttggatatctacaggcacctcttggacgacttgcacatcatcatcttctaattcatctgcacactttcttttgcttgaagaaccgaaaaccatgtttgaagtttgagttgtgcttggctctgtggattatttaaataacagcggaccagccaccagctacgcgtggacggtgggccaccagccagtacgcggctccgccgcgccgctatcccttcctacgcgccgctatcccttcctcttctctaacccactgcaacgcgccgctattcatcttcctacgcggctccctgcgacccactgcaacgcggcggcgcgattcctcttccacgggcgacgcggcgctcgattcctcttccacgggcggactgcaacgacgcggcgcttgattcctcttccacgggcggcctgcaacgccgcggcgcgcgattcgtcttcgtcttccccactgcgcgaagtcgcgaacggtcagtcacccagtccagtcgaatcctcttcccttcctcttccccttcctcttcccttcctcttccccttcctcttccacgcggctatcctcttcccagcgcgacacaacgtccggcggtcgggcggcgcatcatcccagcgcgtcccactcccagcgcggcggccggacgacggcagcgcggcggcacggcctcctcaaggtaagcgttcctatcttaggtatacgacgttccgctagcgtttcttggaatgttccccatcgttcccgttcctcgtttcgggacgaagttcccggaacgcggaacgcgccatcgttccacattccctgtcactaaggtactatactactattattcttgtgcaagtctgaattcgctcactctactgttaccatcttctatcaatgaatccgaattatttgtcacagatcaagcaacatttaatattataaacagccctccgaaagtgttttttcttgatgctatggatttaacttctgttcgtatatttttttcatgtaagaaattattagtttactatgcaattgggtttattagggatgatagttggtacaaagatctcaatggaattacctttcatgggatttttatagcttcactgttctgactaacatgtccttgatgtcaccatttcttaggggcttagggctactcttttgtgtcactgtacataaggttaatcaagggtattagtcctaccaaactaatattcatgagtacttttgacaaacttaccatattcttttcctaataatctctgggacattctgtggtactgttatagttatgcaagtcttagtttactggatacacgcttatcatcctttcttagctaagccaagtttgtcatggatgatttggtcttgaaggcaattagtatgccttaactagggacacaatgagagtgctaagagacttttctgtgaagacgtagatgcatggctagatatatgcctattagtgagaagctttcataggggagagagttatcgagaattgtctgagaggaacaacaaggatttctttgaaccgatctggtttcatgtctagaaggtcaactatggaagccatttttcttaaaaagataagtgatggagcagtatagtaagaaaaatgacctacacatggttctcattgaattggagaagggttatgatgaaataccaaagaatgttatgtggtggtctttggacaaacataaagttttaacgaagtacattggactcattaaggacatgtacaacaatgttgggactagtgttcgaacaagtgatggagacacaaatgattttccgattagagtaggactaaatcaagctttgagcccttacctttttgcctttgtgatgattaaggtcacaaggggacacacaagggaatatcccttggtatatgctttttatggacaatgtagtactagttcacgaatgtcagacgtgagtaaataggaaactagagttatggcaggacactctagagtccaaaggttttagattgagtagaactaaaaccaaatacatgagatgtgacttcgacactattgcacataagaaatgaaatgttagtttggaaggtcaagtagtgcctagaggataccttttggtatttaggatcaatattacaaagagatggggagattgatgaagatgttagccatagaatcaaagtagagtggatgaagtgccatcaagcatttggcattagggtaccacaaaagctagaaggcaagttttgtaggacggcgagtagacctgctatattgtgtggtgcagaatgttggtctaacaaaatacatcatgtttagcagataagtcttgcggaaatgtgcatgttgtgttggatttgtggtcgtacaagaaatgattaagtccggaatgaacatatacacgataggctaggggtagcatccgttgaagaaaagcttgtccaacatcgattgagatggtttggacatgtctaatggagacctctagagacactaatgtgtagtgggatcctatcagcgcccaaagaaggccataccctcgattgctttcaagacacactcagggataccggcttgggaactgactttaggacctatcatgatgggaccaccacacctggggcctagagttgtaggaaactaccctaggcttggtacagggagaggccctactctaaataacattatatagaagtatccagatgagttagcttagctcttagaaggtttggtggccttctagcctccctacacgctatgaggcttcggccccttaggacctctatggttaaaatattctaagtctccaagcaccttgtgccgcaggcaactgactagagaataagtcctcagggcccctgtgccctagggcacccacaaggctttgtccttggggcatctcgtgccctggacgcttgtaagcataagaccatgggtcttctcgtgttctggggcacttgtaagcctaactctttgggggcacttataatcctaagtcctcggggcagttataagcccaagtcctcgagcccatcatgtctcaggacacttgtaagtataagtccttggggaccctagtgtccgagggtaataaagtaacaggtgctcggggcagcctgtccctcgaacactaacgacacttagttgttggcgccctccattggcctcgaggtccctagaatcactgacctcgtactgctagggtgactgggccccacggctcccgaaggtgctaagggctcagggcagttaaatgtaatctatcacatgaaaaaggatgtgacgagtccattggggacggtacgaccctaagagataaagcccacacctaggtgaccgaggataagtccatagcgaaagcttaatggataagtcttgggtacaacatattaattatgtgattggcgacattacaagcctaacaagcgtgttgcggcacgacttaggttgcagggcactgaagatcgctataatgtatgagcatcaatcctgtaggcacgcgtgcatagggatggcaatggggaattccccgtcgggttttagctccccattcccgtccccgcgacgaaaaacttcttccgcggggatccctacgaatgctttcggggacatttctttcccatccccgttccccgcggggataaatccccatccccacttaaattgcaatcatgatgtacttcctttgttattattgcaaaacattatcagatgtaaaaaatcattaagtgcacatcaaaataaacacatttgtacaacgagtgatctcttaacaaggtaattatttatttctatcattaactattaaatgaaaatatcgtcacatgtaagtttaacaggtccccgcggggaacggggatgggaaatgcttccacatccccgtttacccgctgggggagatattttcctcgtttacatctccatggggaaaaatttccccatctccatctcctaatggaagaattccccgcagggaatcggggatcggggccccattgccgtctctacgcgtgcacatgcgaagtgtaccatgatccatgaaatacaaataactgcaaaaggctacattggctaccaattgcactgtactaggcaacgcgagccccagtactatatatgcaacttatcatacttgccccttcgactcgtatggcgatcaccttaggaaggaactattgcagataaggagaacaataagggtcccaaatactgcattaaatgtgactgatgatcttgcaatcacgccttcaccctgacatgctcttagactgtaggtgtattctctgccattgtgcatgcgtgttgtcgcactaaaagtacaaggaatggtaaaatcactatagccatgactatgtagtatgactatacttttacatattaaaagtacaaggaaccatactaagctcttatcacgacgtaccaactccattaaggtacttgtcctcactgattaggccctcatgaggtcaccttaacaggatgattaacacaggcgcatccctcgcgaatgttgcatgactacaatgtatagggtctacactctatagtcatgtaggtacaaggctgcgatgatacaggggtagttggctcgatgatacgtagggcccacaagttgaacacacgtgtaagctctaccactcccttgaactataaaagcgagcagatgaacaacatttaaggggattcagtggaggattcattctaggtccaacatctcgactccaacgaaaaacagacatatcatagggcaagcaacacatatagagacaagtagagtgatcttggcttaagttctccctggttgtgtaacttgtccctccgaagcaaatacatccaccaaggaggacgtagggtattacgctaccgcggcctgaacctctataaaaatctatattaaggctttgatgtcatgacttcatggacgtattatatggtgctacgacttatgttatgcttcccttgctatcttttgtttggtccccttggtaccctaatgttgttccgacttatagtaaggggaagagaagtaggggaacaccgaattgacatgggaagaggtagtaaaaggagacttgagaagatgaaatatagccaaaatttagccttgaataggagcgcatggaaaacagttatccaggtgtctgaaccttgacttgtggtttatgttaggtttcaactttagcctacgttaacttgcatgaaactaaaaggctttgttgttgtactactcttatcatcctttctttacaatttttgaattatttattgcctatcaagcaatatttcataggtcaatttaagacatgtcctgatttggaaacaaagttaagctttgcaatttttgaccaacaacagttgtctgaattatttaatagtgtagagcaatgttttcgagtcgagtcatgcagctactgactagtagactagtcgagactaggacagactagtcgaacataagttggtgattacatttttataactttctatatatgctaagactaaaaacatgatggaacactaaaaaataccttgtttcgtatattttcatccatctccatcttctataatatatcattaaatattgaatatagtcttgtagcaagtcttctatcgttctctctggtttcaaagaacttgtttggattcaaaaacaaagttgctctatatagattggtatccatctgactgtcccacctcttatcaacaatagaaattacttcatccattattgttctttgtgctccaaagcttttttgatgctcttttttgcatggtccatggttgcccacatttcagcaattgctgttctctcatcaccatcaagtatcctcaagaatattagaatatattgtgaagctcttatgcaatcttctactgcttgccaaaatgcaacaaagtgacaaacacatgcatttcctacttcagtgttcttcaatttgctgctctcacaccattcattactaacaaggaaagctttcaacctttgtctttgtttccacatattagccaatgtaaagatgatgcaaacagagtagttgcatgcctcacaagatctctatcatttgtcttggtcctcatcaagtcatgaatcattccatatacatagataaataaggtagaaaacttgtccaatagcatcctacctactagggttgagatgggtgggtgggctcacatttttatacctgggcccaaataagttgcccgactcaactgctgcgactagtcgacgagtcgagcgactactagagaaagtcgagtcgttcagatcgactatcacctctgcaacaacctctcgactagtcgtctactagtcgcctgactttaaaaccttggtgtagagttgaatgaatacttgaatatatttttatattaaaaggattgttaaattgatattaattctgtagcaattgacactattgctaataattttaaggtcaaatttagttgacaagacttgtttaagatggagtgagtttatatttgttcaataaaaaaattggcgtgcaatgggatttagtagggattgatctgcaggcccagtagtcagtaggtatggagatctcaaccaaatcaccagagaaggcttctaccgagttatcctttgatggcagcatttgctacggatatgttttcgttagttcattagttatgaaatatacaaatatctcattgaatggatttctgtctgataatatatcgtcacttgcatatgcaaatcagtgctacaggatttttaatgttttgttgcaattcgactgcattgcagtgtttttttttcaagctgtcaagcactgctagatgcatcttctcacaaatttcaatgagtgcctctggatttgtaacttctgttgcaatctaactgcattccattttttgaagtcgtcaagggttactggatagtagatgcatcttccattacttctttaggcatctcctccctctgatacaaatatattaacaatacatccattttgcaga

SEQ ID NO: 808 - DNA, 8207 bp, Zea mays
  Intron number 15 from transcript GRMZM2G114162_T01 (locus GRMZM2G114162) derived from phytozome v7.0 (chr-ID 5; pos 11356463 to 11364669)
gggcttcagttgttagaggacagggtataccggtaaaatttacttcactccattgcttctgtgttcttatataattacgtgtattaggttcatgaaggacagacttgacacagtggtgagaagcctttccactgagccaaagattctaggttcgacacaacctctctgcaaaatgcagggttaagggttgcctcagttattctttccctagaccccaccaatgatttcaagtcgggcgacttgctagtcgatacacctgggcgaccaggcgactaatcgcgattaggacgacgactaggtcgactaatcgggtcctagtcgacctggtcgtccctacagcgctcctgcatatttgcaggacctatgtatataatattgatatatatagcaatatagcatatagaaggcaacaccaaacataagtacataacaaatatgaatactggaactggacaattcagatttcagaacatgaacatcagtcactaactcaattatatatagcaatatagcatataggaagcaatatcaattaccaaacatagcaaatatgaatactggaagacagaattcagattgcaggtttcagaacatgaacaattgaacatcagttactactcagtagtcactaactcactaattcatatgatgcagagttgcagacttactagttactacataaatgccaagtacagacttactattgacctaaactaggagtccagggcaactaatcgcccccacccaaattggacgactaatcgtatttagtcgatgactaatcggacgaccggacgattagtcgagcagatcgggtcggcctccctagtcgtgctaacagaaccgactagcccgactaatcgcgactaatcgcgattagtcggacgacttgaaatcactggaccctactcatgtgggaaccacatgtgggagccaccaacactaggcctgacctttttaaaatcaatgtttcatcatatgcatgctacaatgtttcatacatcgctttctatgtctcatctgtaaaatcctgatattttgaatcataaggtagaacaaaatgaagagctcaaagttgtatagaaaatcttgaattacaatgataggaaaaaacattttttctcgaacacgcaggagagcttcatatcattatatcaagaagataacagggtccaaaatagaccaaaagaaacaaattttgcaagagattaattgcaaaactcatagttaactaatgaactttgagtgtgatttcttagtaatttggtggtttggtcaaaactcaaaagggatacctatgtaatattaccaatcaccaacaacaccaattcatcaaatgcttgccttgaatctgcccaaatggtttttttttctcgaacacgcaggagatctgcgtatcattccattaataggtagaagaaggtacaacacataacaacacaacacacacgacacacacatgacacgacacacacatgacacaacacgatacaagacgcaacacaacaaccgcacacaatcactcagaacaagacactagactatccccctgggtcgaagcataaacataagagttgaaagcaggttcaaccctctcgccccggcactacaccacatcctgagctcatcgccagcgagggtgagagcactcgccagacacggcgacctcccattgaacacacagtcgttgcgatgacgccaaaggctccaagcgccaaaaataactagagaattgaagcccgattgaagatcacagggaatcttctccacagccctgctccaccagtcatcaaggctgcaaacaacattatctggtgaaagattaggcaacccagacctgctcaacaaggaataccagaactgtcgtgcaaagacgcaagagatgagaagatgctgtattgtttcctcttcttggtcgcaaagggggcacacactagggtggggtagccctcttctagcaagacggtctgcggtccaacatctgttgtgcatgacaagccaaaggaagaaactgcactttgaaggtgcccaagattcccaaacgcactttgaagtcggcttatgatatgttatttctaggttccacttcttttggtgcccaaatggtttttaaggctgttgataaaaggaggaggggtttactttagaaagggcaagaacatgcaaatggaggaaattgtctagtctcatgggccaaggtgcaaagaccttacatgtttggcgaccttggtgttcatggtttggaagatgagttgagccctgcacatctgctggttatggtctatggaaactgatccctcaaaaccgtggattagacttcctgtctatattcttaaacaagcccaagcattctttcaaatgttcgtaacggtaaatgttgggaatggtgtttcatccaaattctagacagacaattggttacaaggaataaatgtggctgaccatgctccacatttgctcttggcagtcccgaagagagcaattatgagaagtgagccagttcctgtcagccagagtaggtagttaatgtgttttttctcatgaactgttttgtctattccaagttctggccaccatgagttggcccttcagtttcaggggttcaggtctttaggacctaagtccatttgagactttgtaattgtttctctcttcttattataatgaaatcagctctcatgcgttttcgagaaaaaagccaggcattatccaacagagactgggtggcagatatcaagggggctctaacagttcaggttttgatagaatttctcaaaagctgggagcttgttgagggtgtagtttcgcatcctgatgtcccagatcgtttttcttggaagttttcatcttcggatcagtatagcagaaaatctgcctacaatactatgtttatctgctccatcaaattcccagcttggaggaggatttggaaaacttgggcccttgcaaactgcaaggtcttcatttggttggccattaataatcgatgttggacttcgaatcgattggccaaacgtgggctaccacatcaggccgcttgccccctttttgtgatcaagatatggaaaccatcaaccacattcttgtctcctgtgtgtttgctagggaggtctggattttattgcttagtggagtcaccccggcagttagacctcccaggattgatagtcgttttaactcttggtggtgtcgagcttttgctgccttccccaaggaagagaggaagggatttaattccttagtggttctagttgcctgggagcctctagaaaaacataggaatgcatgtgtttttcagggtacaaggcctgctgtccaaagtgttgtgctagatgttatagctgaaggtcggctttcgagtctagctggggctgctgtccttcaggatttggtccttaggactgaacctcctatggccgtgaatggggctggtagtgtgtaagtgtgggttgtaacccacaccccccgggtgtataatcttttttgggggaactttttccttcttaatgaaatgatacacaactctcgtgcgtggttcgagggaaaaactgctagttgacaagttaacaaaaccttaaaatggtatccattttaatttagacacccaattgaaacaaaacacttttgtcttgtgtttcatttccgtatgagtggttggttgggtgttccaagcctatcacaacccctccctctttctgggaagggattctttctccatctaggtttgggcccggcaatgtttaaacaacacaagtggagtaatgtttatttccttcctttaccccgatggagtaattatgcttcaactatctcttactgttatggtggcgactagggctgaaggagcgcaagggggtcggctgggggccttgcccgcggccttgcaagagggaagaattttccttcttaatttttgcctgcttacaattgatatatttttttcgaaagcgcaggagaactgcgcatcattttaattagagaagaaaaaaggtccaaaatggaccaaggtacaaagccctaagcaggcttaccaaaaacaaaaaaacacaaaacacacaccactccctaaaccctgtgaaggttacgcgcaagctctaagccaaagctctgaagatgcttggcaccagccgtaatccaacaccgatctcatcaaggaagacgcatctgatagagcttagcgaaggggtctccccatcaaagacagctttgttgcggtggatccataaacaccaggcccctaagataatgatgctgttcatgccctttctcttgcttttatgaatcttcttacttgtttttcgccaccaatcagcaaaggagatctcatctccagatggagagagattaccaatattcaatccaaacagaatggaatgccagaactgtcttgcaaagacacatgtacacaaaatatgttgtatggtttcctgctcttgatcacagagtaggcaagacactgggtggtccagacctctcttctccaatctatctgaagtccaacatttgttccgaatggccagccataagaaaaacttgcacttagggggagcccaagatttccaaagcctcttccaaggttcaaacgtaatagctcccataaataaagccctgtaacaagacctagaagaaaactgaccagaggaagtatgcagccaggtgtgaatatccgcctcctgagttaacacaatagtgctaacagcatcccaaatcagcaaaaattgttggatccccatccaggaaagaggtgtcaagatgtcactgatccattgctgtcctccaagagcctgggccactgttctagtggagacaataattttatcaaccttggaaatgacatcaggagcaaaatcattgatgcagccgccatttatccatctatcagtccaaaataaagtgttgtttccgttgcccaccgcagtaataaccgaagcatgaaagaacttcctgacctgtaacggcacaggcagcataagcccatgccagggcctgtttgaatctgttttctccagccacagccatttagcttgcagagcccagctctgataatacaaatttgggaccccaagcccaccaaatagaagcggccttgtaacgacatcccaagagactaaacaattacctccattcacgtcctttctgcctctccataagaaccctctgcgaatcttatcaatcgatttgatcacccacttgggaatactcatggcaatgaggagataaatagggatggcagagagaacaaaacgcaccaacgtcgtcctgccagcgagattaagtagccgagccttccaattggggagtctatctgctatcttctcaacccagtccataagatctgcctttctgagctttctatctgatattggaagacccaaatatatacaggggaaggacgccgagctgcaaagaagaaggttgcaaccctgctgcacagcctggtcgctacatttaattgggatggcgcagctcttgttcatattacacaccagaccagacgctgaaccaaagcagtccaatattaccttaacacaattcagatcttccactataggtttaacaaacagaaccacatcggcagcataaatagaaattctgtttcggacattcccttccagaaggttatggagcagccccctatcttctgctagcagaaacatactactaaggacgtccattattagcacaaatagcattggggaaaggggatcaccttggcgaagccctctccgatgcctaataggaataccaggagacccattcagcagcacctgagtggaagatgaagccaacagattcgaaatcaaatttcgccaaatatttccaaatccaaggtgagaaagcacctcaatgagaaaagcccaagaaacagagtcaaaagccttggagatgtccaattttaaaaataaacttgagactctttttttgtggagagatttaatagcgtgttgcaccatcatgaaattatcatgaatcgatcttcctttcacaaaagcactttggttagcagccactaacttctgaaggtgagggccgagcctattagcaagcaacttggtaaccaatttagcgaaactgtgaattaggctaataggccgaaaatccctggctgacaaggcctccgtttttttggggataagcacaatatatgcagaattcagcagccccaaactgtgagcatttccaaaacgaagatagtaggttctatcttttatagagatgagatgactgacttgacccctaaggaaatatcctaactaaatcaatctaacttatctcgtttcttatcctaactaaccaaatcaatctaacttatctttttctttatcctaaccaaacctatctctttcctaacaaaccaaaccaatctaatctgtatggcactgttcacaaggcactattcactgttcgcaaactactgtttatgcgctaaagtgtcacatgggcccctgggccaactccacttgccataacactacactcctccaagacatcatcctcgagctgtgctggtggtcatggctgcagatgtcaatgttcccatggagacgcgaggcttagaaggacaccatccagacgacagagttgcatgtggacaaccacttggatcccatggtgtagtgcgcaccgcacagggaagagaggagggatttcgatggagaacgacaaggaggggcgtgcctctccgattgtaaccgttgtagactattggttcgtcgcccatgaggggtcaatatgcccaccgcccgtagtagcatgcccaagattctcgacgcggcgaatgagattgaggtcctccgtgcagcgaagcacaacttggaggagctgcgaaggggtatggtgttgaatcaactgcatatctcgcatctcccgcacccgccaatgtgctaggaggccatgcgtagcagcttgcagccgcaccgccgccgatgcctggagatgacgcatctttcgtgcttgcagccttgcaagctccatcatctcaatctactgcaaggttgctactactacagatagctggtctgtaggggtgacatgccgccaccgttgaagatggtgcgctgctcatgccgcatgaaggactaacagcggcaaaagttgtgccatcggcatgaagcatgcgatggaagttgggatagagctgcaacagaagctaagcatgaagacagtcgtcgtcccatagccagacaggatgtaatggaaccctagcagcatgatggtggctagcgctggtggcagctgcaccactagggccaccaggatggacgacatggctgccatcgactttgctaggtccttcaccatggcgtcagccagcggggcggatggagccagctggtgcttgtcgccgtcgttgtaacctgacatcttcgataccggatgttatggcggtggctagggttgagggaacacaaggggctcacggccgggcagcaaggaagggcgttcctttttagttcttgcttgattacaattgatataagttctctcttttatagagatgattgacttgacccctaagaaaatatcctaactaaatcaatctaacttatctctttccttatcctaactaactaaatcaatctaacttatctctttcctaagagcatctccaacaatgtgccctataaaagtgccattaaaatttaaaatagacatattttatagaatttagggcaccaacaaaaaattaagctccatcagtaaagccccaaatcaagtgattaatcgaaatctgttaatctactccgtttgtttggaaaggaaagttttgtgaagcgtctgttaatttaaatctagatatggggcagcccaataaggtgcagtatatttgtggcacttcaggaggtgacctatattttttgtaaaataggcaccattggagctgttttttttgtagcttgagccctataatttaatttgggacactgagataagtcactgttggagatgctcttaaataaaaccaatctaatctgtccagcactattcacaaggcactgcttactgggcgtaagatactgtttacgcgctacagtgccacatgggcccctgggcgggctccatttggcataacgattactgtcaagtagagtatgtaattgtttcttatttttcatgcttgtttcggatgcaagcttgcatcttctttgctgtcttttgctttgctgatatacttttttgtcctgtcttttcagtgctgctttggg

SEQ ID NO: 809 - DNA, 40352 bp, Zea mays
  Intron number 1 from transcript GRMZM2G171561_T01 (locus G RMZM2G171561) derived from phytozome v7.0 (chr-ID 2; pos 1 93675002 to 193715353 reverse strand)
gcggcattttacgagatcgagggaggggagagcaggtgccagagcttcaaatacgggcgacttggcgatcggttgctggcgtgcgccatggccaattcaagcaggagaagcagattaaggaggggattacgagtgaggccacgatgccgagcaatagctgggtgcccgggctctacgcgcgtgcccgcacaaccgctgggccgagccggccgcaggggtaggggtgggaatatgttagttttttccctttttgttttatgtaattatatgtgtagatgtgtatttatatttatatataactatatttatttatattagatcatccaaatttaatatttttcccaaatggaaacgccaccaaaaccattttagcaaacaagaaattatctctcgacataagatgcaacacacacatatatatgtgtatatattcaaaataacacctgaatttgagggatattagaaaagaaattttacacccccaaattcagggtgttacacacctggagttggttatcccgcaggccctctagcgtggaggttgttaatacccgcgggagtggaaccggagttccgtttgtaatggcaccctgagtgtgggtgtatgttcattgtggctgtcggggcctgaacatctgagtattttggcgtgaagccgtgtttcttcctcatttcgagcaccaggactcgcctgtcggctagctgaaccgcttaaccgagtgtgagttgctctgcgcggaaggtgacaagtgaggtatccgtatcccggaggagtaggagtccctcggctcggtcggccttgtcgctcagggcttcccttgctcagttcgagaaccttcgaccgctctgcgatgagctggagccggaggctgcgatgtcggtgtggacagaggcggagtcggctcgagaagaggcttcgtcggcccaggagcaggtggcctcccaggccaaggaggtgctgcagcggcggctggagcttggccaggtcacccacgagcggggccaaccccggagtcacgctgccggggccatgagctgggctgatgtcctcgggggacaactggctgaggctacgaagcggccggtcaaggtgtctgctcgggccgggacccttgtggagaccccggctgcgatggcccaagcgcagtgctggcgtcctccttcgaggtggagatccttccgcccgtgtcgccgtccgaggctggtccagatcccgccgaaggcggaaatgacgccgagggtgctgttgctccctctgtcgatgtctgaacctgcaggaacagtttgtctatagtatgcgtatgcttgttgcggccgccgaggcccaaacatcttattgtcgtattataaagctgcgttttctttcctcttgtttcgagtatcaggacttgttcgtcagtagcagaatcgcttgtctgagcgagagttacttttcgcggaaggtgatgagtgaggtattcgtatctcggaggcataggagtccctcagcttgaccggccttgccgcttacgtgtactcttactcgtccacatgattctgttatcgatatagtcgagaaggcacgaaaatcgttctggcgaaaagttttcgagcgttaggactcgttcggtagcggaatcgcttatccgagcatgagttacttatcgcgaaaggtgatgagtgaggtatccgtatcccggaggcgtaggagaccctcggctcggtcggccttgccgcttacgcgtactctcatcgttttcaggatcccgctatcgaggcagtcgaaaagcgcgaaagacgttctcgcagaaagactttttctgaggaaaattttgacgcagagggggtccctcccttctagcccccgagggagggtcgggctttgccgaggcaaggctgacccttccttgacggttagactttatttgtgtatgtatagaaaacgaggtatatgaacgacttgaaaacatcttaagggtaaaagtgacgtagctgtcggatgttccaagcgttgctgtagacctcaccttgatcgttggccagcttgtatgttccgggcttcaaaatcttggcgatgatgaacgacccttcctagggaggagtaagcttgtggcgccctcgggcgtcctgccgcagccgaagtatcaagtctcccacctggaagtctcagggccgaacccctcgggcgtggtagcgtcgcagagactgctgataccgcgccgagtgtagtaaggccacgtcccgagcctcttccagttggtctagtgagtcttctcggctggtctggttgcttcggtcgtcgtacgcctttgtcctcggggaaccgtattctaagtttgtgggcaagatagcctcggccccatagactagaaagaacgacgagaaacccgtggctcggcttggcgttgtcctcagactccagaccaccgagggtagctctttcatccatcgcttgtcgaacttgttgaggtcgttgtagatccttggtttaagtccctgcagaatgataccgttggcacgctccacctgcccattcgtcatggggtgagctacgacggcccagtccacacggatgtggtggtcctcgcagaagtccaggaacttcttcccagtgaactgggtgccattgtcggtgatgatggagttcgggaccccaaagcgatggatgatgttggtgaagaacgccaccgcctgctcggacctgatgcttgttaggggtcggaacttgatccacttggagaatttgtcgatggcgaccagcaggtgcgagaagcccccgggtgccttctgcaagggaccagcgaggtccagaccccacacagcaaacgaccaggtgatgggtattgtctgtagggcccgagcgggcaggtgcgtctgtctcgcatagaattggcacccttggcaagagcatacaatcctaggggcgtcggccaccgcggtcggccagtagaagccttgtcggaaggcgttcccaacaagggctcgaggtgctgcatggtggccgcaagccctcgagtgtatctcttgcaatagctcctgcccttcggcgacggatatacatcgttggagaatgcctgaggggttgtggtggtagagctccttttcatcactcagtaagacgaacgacttggcgcgccgcgccagtcgccgagcttcggccttgtcgaggggtagctctcctcagtggagatattgcaggtatggggtctgccaatttcgattaggcgtgaccctattccgctctccctcgatgcgcagtgcctcaccctcggcggccgagaatacctcgggctgggccaaggcctcctcggggtgggccgaggcctcctcgggcttgggcgtgtcgtcgatcttgacggagggttgatgtatgtctctggagaagacgtccgggggaaccgttgtccgccccgaggctattttagccagctcatccgcagtctcgttgtaccgtcgagcgatgtggttgagctcgagcccatagaacttgtcttccaggcgtcgaacttcgtcgcagtaggcctccatcttccggtcgcggcagtgggagttcttcatgacttggtcaatgacaagctgcgagtcgccacgagcgtcgaggcgccaaacccctagctcgatggtgatgcgcaacccattaaccaaagcctcgtactcggccacattgtttgacgccgggaaatggaggcgcaacatgtagcggaggtgctttccgaggggtgagatgaagagcaggcccgcgccagctcctgttttcttcagcgacccatcgaagtacatggtccagagttccggttggatcggagctgttggcagttgggtgtcgacccattcagccacgaagtccgccaagacttgggactttatggccttccgaggagcgaacaagattgtctcgcccatgatctccaccgcccactttgctatcctacccgaggcctctcggcactggatgatctcccccagggggaaggatgacaccacagttaccggatgagactcgaagtagtgtcgcaactttctccgcgtcagaattactgcgtacagtagcttctgaatttgtgggtagcggatcttggtctcggatagcacttcactgatgaagtagaccagcctctggacgagcagtgcatgccctttttctcgtctctcgactacgatcgcggcgctgaccacttgagtggttgcggctacgtagatcaagagggcttctcccgcagcgggggggcgggcaccaagatgggcgcatttgtaaggagcgcctttaagtttccgagggcttcctcggcctcgagggtccaagtgaagtgctcggtcttccttaagaggcggtacaagggtaggcctttttcgccgaggcgcgagatgaagcggctcagagctgcaaggcatcccatgaccctttgtactcctttcaagtctttgataggccccatgttggtgatggttgtgattttctccgggttggcctcgatgtctcactcggagacgatgaaccccaggagcatgcctcgggggactccgaagacacacttctcggggttgagcttcacgcccttcgctctcagacacttgaatgtcgtttcaaggtcagagaggtggtcggaggctttcctcgtcttgactacgatgtcatcgacgtaagcctcgaccattcggccgatgtgctctccgaacacgtggttcatgcacctttggtatgttgcacctgcattcctcaagccaaatggcatagtagtatagcagtacatgcaaaaaggtgtgatgaaagaagtcgcgagctggtcggactctttcatcttgatttggtgataccctgagtaggcgtcgaagaatgacagggttttgcacccagcagtggagtccacaatttgatcgatgcgaggcagagggtagggaaccttcgaacatgctttgtttagaccaatgtagtctacacacatcctccatttcccacctttctttttcacaagcacagggttggctaaccattcaggatggaatacctctttgatgaaccctgcagccatcagcttgtggatctcctcgcctatggctttgtgcttttcttcgtcgaaacgacgcagaggctgcttcacgggtcgggcaccggctcagatatccagtgagtgctcggcgacatccctcggtatgccgggcatgtccgagggactccacgcaaacacctcggcgttcgcgcggagaaagtcgacgagcactgcttcctatttggggtcaagcttggagccgatccggacttgcttgcaggcgtcgttgctggggtcgagagggacggacttaaccgcctcagctggttcgaagttaccggcgtggcgcttcgcatctggtacctccttagagaggcactccaggtcggcgatgagggcctcggactcggcgagggcctcagcgtactccatgcactccacgtcgcattcgtacgcgtgtcggtacgtggatccgacggtgatgaccccgttggggcccgtcatcttgagcttgaggtaggtgtagttggggacgaccatggacttggcatagcacggtctctctagcaccgcgtggtaggttcctcggaacccgaccacctcgaacgtgagggtttccctgcggaagttggagggagttccgaagcagacgggcagatcgagttgtccaaggggctggacgcgcttcccggggatgatcccgtgaaagggcgctgcaccggcccggatcgtggacagatcgatttccaagagcccgagggtctcgacgtagatgatgttgaggttgctgcctccgtccatgaggaccttggtgagcctggtgttgccgatgacagggtcgacgacgagcgggtactttcctgggctcggcacgcagtcagggtggtcaccctggtcgaaggtgatgggcttgtcggaccagtttaggtagactggcgccgccacctttaccgagcagacctcccggcgctcctgcttgcggtgccgagccgaggcgttcgccactcgcccaccgtagatcatgaaacagctgtggacctcggggaactcctctgccttgtcgccctccttcttgtcgttgtcttggcctttgccaccttccaccgggggcccgaccttatggaagtagcgccgaagcatgacgcattcctcaagggtgtgcttgacgggaccctagtggtaggggcacgactccttgagcatcttgtcgaacaggttggcccctccgggaggcttccgagggtttctgtgctcggtggcagcgataagatctacgtcggcggcgtcgcgctttgcttgcgacttcttcttggccttcttcttcgtgccacgttgggcggacacctcggggacgtcttcctgctagcgtccctgaggctgcttgtccttccggaagatggcctcgaccgcctcctgaccagaggcgaacttggtggcgatgtccatcaactcgctcgccctggtgggagtcttgcaacccagtttgctcaccaggtagcggcaagtggtgcaggcgaggaacgccccgatgacatccgagtcggtgatgttgggcagctcggtgcgccgcttcgaaaaccgccggatgtactctcgcagggattccccgggctgctggcggcagcttcggagatcccaggagttcccagggtgcacgtacgtgccctggaagtttccagcgaaggctttgaccagatcgtcccagttggagatctgcacatgaggcagatgctctagccaggctcgggcggcgtcggagaggaacagggggaggttgcggatgatgaggttgtcatcgtccgttccacctagctggcaggccagccagtagttcgcaagccacagttccggccttgtttccccgagtacttggtgatggtagtcggggctcggaaccgggtcgggaacggcgcccgtcgtatggcccggctgaaggcttgcagaccaggtggttcgggcgaggggctccgatcctcctcgctatcgtaacgtcccccacgcctggggtggtagcctcggcgcaccttctcgtcgaggcgggctcgatggtcgcggcggtggtgctcgttgccaaggcgacctggggctgcaggcgtcgcgtcccgcgtgcgcccggtgtggaccgaggcctcccgcatgagtcgggaagttgttgcgcgatgctccggggggcacccttgccttcgggaggcagagctctcggcccatcggaccgcagcgtcctccaggagattcttgagttctccttggatacgccgcccctcggtggtggatggctccggcatcgctcggagcagcattgccgctgcagccagattctggccaacccagctggaggccgggggcagccttgccctggcatcgtcaacgatacggcgctggacgtcccgggcctgatgacgcgcttctccggccagtgctcggcctgcccactcctgctcgatgttttgccggagctgcacaagttgtcctgcttcctcgttgagcttggtctgcatctcgcggatttgctcgagctgtgtgtcctgaccccccgcagtgactggtaccacagctagctcccgcaggatgtcaacgcgaggcgcaggcccagggggatcgtcatcctccggcataccaaggtggttgccttcatcgtgaccccctagatcgacgtggaaacattcgcgacttgggccacaaccttcgtcgtcaaggctgtggccatcatcggagcaatcggagaggcaatagtcacatgcagtgatgaagtctcgcatagcactgggattaccgagcccagagaaatcccaaccagagtcgggctcgtcttcttcctcgtaacccgggggcccataggtcgagacgaccgtcagtcggtcccaggttgaccacatatggtaccccagaaggttaggatatgcctttatgaaagcgctcaccgaagcggggtcgcttggtggattgaagctgaatctaaaaggcacagggtggaaaacggatggtacctctcgatcgacggacggtgacgaagtcgcgtcggggacgaactgcaccattatctcaggtatgaggctaacgcccagcaagtccttcgcgagtgtgctggcgtcatctgtccgcttggagctggcatattgcggggaaacgacacctgtcgtcgtctcaggcgcgaggacaacgcccgacatgtcccccactggggtgccggcgtcgtcgactcgctcgacagccgacgaggtgccgcctcctgcctggccatggttgccccgcctccctcctcctgcggcgaggaaggtggcgggacaaacccggatgctgctcttctaccacagggggaagacgtcgtcgagtttgccgccgccgggcgagctgacggccgtcgttgtcgctgtcgcgctgcggaggaaggagtaccatgtcgtagctgccgtcgagggacatgaactcgaggcttccgaagcggagcagtgtcccgggctgaagaggttgctggagactacccatctggaactcaacgagaagttgttcgtcaacacgcagcaggcccctacctggcgcgccaactgtcggcgtttcgactccgggggggtccctggaccgtcgagtaaaattgtcgctgcgtgttccagcccagatgggttggcgcaagatggagcacaaggggggaaacgcggctcgtgttatcctgcgccagggggatgcgcttgcagtaggggttacaagcgttcgcgagggagagagagagagcgagcatgttcgtcagcccgtcctcccgcatgaccaccctcctgcatgagggccctggaccttccttttatagatgcaaggagagggtccaggtgtacaatgagggtgtagctatgcgctaacgtgtccggcagagaggtgcctgagccctgtgtacatgccaacgtggctgtcggagtggtgctagagccctgtgtacgcggtatcgtggccgtcgaaggagcgccgagtcctgtagaagcacagctgtcggggctgctgggatgttgctgacgtctccttgcttccatagggggctgagaaccaccgtcgtcatggacgcacgcggggagccatcattacttattaccggggctagcctggatgggacgccggtcttgttcccccgtagcctgagctagctaggggtagggtaatgatgtatccctcgtggcgtggtcggtccgagcccaaggtcgggcgaggcggagactcctcttgaggccgaggccgaggccagggtcgggcgaggacgcgattcctcccgaggtcgaggttgaggccgagccccggggtcgggcgaggcggagaccaccctccaaggccaaggctgtggccgagccctggggtcgggcgaggcggagtcctccttccgaggccgaggttgaggccgagccctggggtcgggcgaggcggagaccaccctccgaggccgaggttgaggccgagccctggggtcgggcgaggcggggcttcctgttgcgcctgaggctaaacttggctgttgccagcctcactctggcgggtggcacagcagtcggagcggggcgagcggcgctgttttcctgtcaggtcggtaagtggaagggcgatgtgactgcggtcacttcgaccttgccgactgaggcacgtgtgtcaggataaggcgtcaggcgatcctcgcattgaatgcgcctgcgatacggtcggttggtgaggcgatttggccaaggttgcttcacaacgaagcctgcccgagctggggttcaggcgagacgagggtgcgtccgttgcttgaagaggctctcgggcgaggcgtgaattcgcctgggactactgttcctgtccgaggctgggctcgggcgaggcgagatcacgtcccttgagtaggcgaagccttgacctaaattgcgcccaccagtctctgcagcttgcgctgatggtggttaccagccgtgtttatgagtgttgggggtacccctaattacggtacccgataatagtacatgacacaaatactacattgttactttaccattgtaaaatcgtattgttgtttaaaactgagatatgtttggttccatttggaaatcaaagtatgttgagagagaacaaaattaaactaatatccctccacatttttttaaaaaccttgatatttgtgtttcaaatatcttttagcttttcaatactacagttagggatgaaaacggttttggaatttttcgatattccggaaaccgatttcaaaatttttcgatcggattcactggtaacggtatttttcgaaaatggaatcggttttcggaattttctatcggaatcggcgtggagttttaccgaccgtttccttcggttaccggtttatgtcggaaattaccagatttgtgtctcagaatttttcggaattgtgtctcggaatttttttcagaatttttcatcatgtgtttttttcgcatcgcctgtacgtctctggataaggattacttatttttgtattttttggacgccttaagattatttttgtggtagatggtgttggaacgcagttgaaattaatgatttggtccctcaaacgaatccatctttttctatgcacatgttatgtattagtaatatataatgatagagagtcaaccgtctgtctttttcacaccctagattttagggttttcctgtgaggttgtgaaaaaactctttatgtgaggaaaaaatatttcatgagtaagcatgtcatgtcagctaaatcgagtggatattgtgaattgtgaacttttgagtctgtgaacttgttatgctgtgaacttgttatattgtgaacttgtgatctttgtaactttttatattataaatttgtgatacttgtgaccttgttatatcatgaattgtgaacttttggtctttgtgatcttttgttaactttgttgtattgtaaagtttaatatgtttaccgatcgtattttatatttcgaccgttaccgatatattttccgcactgaactttcgtttccgatgtttccgaaataccgatatcgtttccgtttccggagttaacgttttcgattttatttatgataaaaaatataaaaacggtaatatttttaatgtttaccgaccgtttctatccctaactacagtccatactattgatttagaactgtaaaaaatctaagcttccaaacaggacccagtctttcaccgcaatctgttttaaaagaagtcactgttgtaataatggagttgtgccacgacgaaaggacatagtaccggtctacgtacgccgccgatgcatatcatcatatccggcattccggctgctcaactccaagcaaggcggtcgccggtccgcatcggctcggctgattccccgtcgatttggttttcaccaccccgttgtttccggccgagccccacgttgccgcacgcacgacgacgacacaacgtatggtctggtctggctggtcgctaacttggcacacctgcagtcgatcaggctgaggcaggcaattttagacgatgctccctgctcatttgtcatgtccacggatcaaatgacaatctctttcagtctttatcttgatcgatttgatttctctatctgccccgctggacctactttactgccaatctctgtcaccggacccaggttgattggccagtagggcgagttagatcggttcgactcatccgtccgaattagagctcggctcggctcgttaagctaacgagccacaaaattagcttgactcggctcgtttacgagctcgagctgacttgtttagctcgcgagacagaaaaaaacaatatatatatatatatatatatatatatatatatatatatatatatatatatatatatatatatatctttattactattaagactgtaagggtaggctgcctctctggttctgccttcagccaatctgcactgtccatctatatgcatcaaatcatcaccgtccgtctcatcgcctccccttcaagtctcctccatccttcgatcgcaactgctcctctctccgctcccctcttcctcgacagatcctccaacaggcttcatccgcggcgtcgtcggcaacggctccggccttcccacgccatcgtccaacctccccccgactttcctcccaacaccgccgccgctcccacgtcccaccctccctgcttgcctccacaggctacaccatgcccccccactctcgccattctcgcgtccgcgccgtgccccagcccatccccgaagagctcgcgtcggcgccattcctccgcaatgccctgcgccctccccgcacgccatcatcacgtaggcgccattccaggaaggctcgcgtccgccccgctccaggaggcatcgcgtccctcgtccgcgcgcggcccacatgctccaacctgcgccctcctcgcccgccattctcgcatcggcgtgccgctccagcgcccgagcccgcccacgcccagcgccccccgcctgccgcaccttgaccctgccccgttggtcgtccgtccgtccctcactctcccgagattgtcgcgtgatggcaaaacaccctgctcctgagaccaagattgcctctgccatcgcctgtctccacccccacttcacgatcgtcctccccttgcagcgccatctccggagaagccacaggcaaagaccgaccgtgcgaaggtcgaaccgaaggtccaagctggcgctgtccccagcgaagtcccccaaattaccagttgtgatcactcaatttgatgtcgtgaaggagaattctgtcggggaccataattagggataccctcaaggctcctaattctcagctggtaacccccattagcacaaagctgcaaaggcctgatgggtgcgattaagtcagggatcggtccattcaagggactcgatcacgcctcgcccgagcctagcctcgggcaagggcagccgaccccggaggatctccgtctcgcccgaggcccccctccagcaacgaatatatttccggctcgcccgaggccctgtcttcgccaagaagcaaccctgaccgaatcgccgcgccgaccgaccaaatcgcaggagcatttaatgcaaaggtgacctgacacctttatcctgacgcgcgctcttcagtcgacagagccgaagtgaccgccgtcacttcgccgctccactgaccgacctgacagaaggacaacgccgcctgcgccgcaccaactgcggtgccacttgacagagtgaggctgacaggcagtcaggcccgacctcaggcgccataggaaactccgctccgcccgacccagggctcggactcgggcttagccccggaagacgacgaacttcgctccgcccgacccagggctcggacttaggctcagcccccagaagacgatgaactcctcttcgcccgaccctagggctcggactcagccctagcctcagccgacggtctccgcctcgcccgacccaggggctcggactcgaccccggccacggaagacagactcgacctcgacctcggaagagcctccacatcgcccaacctagggcgcagaccagccacgtcgacgggaggcgccatcattaccctaccccaagctgactcaggctacgggaaacaagaccggcgtcccatctggctcgctccgctagagaggcaatgatggctccccgcacgctccctgacgacggcggctctcagctcccctacggaagcaagaggacgtcagcaaggactcgacagctccgacagctgtccctccgccaaactccaacactcctccgacggccacgacatcacacgaaccgggcgccaaagcctctccagccgccacgatggcgtgtacttagggcgctagctgtcctccgctagacacgtagcactctgctacacccattgtacacctagatcctctccttacgcctataaaaggaaggaccagggccctcttagagagggttggccgcgcggggacgaggacgagacaggcgctcgcttgaagccgctcgctccctctcccgcgtggacgcttgtaatcccctactgcaagcgcacccgacctgggcgcgggacgaacacgaaggccgcgggatttccacctctctcacgccggtctccggccacctcactctccccccttcgcgctcggcctcgcatcgacccatctgggctggggcacgcggcgacattcactcgtcggcccagggaccccccggtctcgaaacgccgacagttggcgcgccaggtaggggcctgctgcgtgttaacgaacagcttcccgtcaagctccagatgggcagtctccagcaacctctccggcccgggacggtgctccgtttcgggagtcttgagttcatgtctttcgacggcagctacgacatgatactccttccaccgccgtgcgacagcgacaatggcggccgacagcccgcccgccggcggcagaatcgacgacgtcttccccgcgtggtggaagaacaacattcgagctcactccgtcctctcccccgccgacggaggaggaggcggggcaaccaaggccaagcaggaggcagcgcctcgtcggctgtcgagcgagtcgacggtgccagcaccccaatggggggtgcgccgggcgtcgaccttgcgtttgagacgaagacgagcgccgtctccccgcgacacgccaatcctgagcaaatggacgacgccagcacgctcgcgaaaggcttgctggacgtcaccctcgtacctgagacgacggtgcagtcagtccccgacgtgacttcatcaccgcccgtcgaccaagaggtaccgaccgattcccatgtcatgccccttggtgtcggcgtctcgagaccggggggtccctaagccgacgagtgagtgtgccgcgtgccccagcccagatgggtcaagcgcgtgggcgagcgcgaaggggggaagcgaggtggccggagacgggcgtgagagaggtggaaatcccgcggccttcgtgttcgtcccgcgcccaggtcgggtgcgcttgcagtagggggttacaagcgtccacgcgggtgagggaagcgagcggccccaagagagcgcctgccccgtcctcatccccgcgtggccaaccttctctaagaaggccctggtccttccttttataggcgtaaggagaggatccaggtgtacaaatggggtgtagcagagttctacgtgtctagcggggggagagctagcgccctaagtacatgccaatgtggcagccggagagatcttggcaccctgctggtgtggtgtcgtggctgtcggaggagcaacggagcctggcggagggacagctgtcagagcggttgggtccttgctgacgtccccctgcttccgtaagggagctgagagccaccgtcgtcacagggctagcggggcgccatcattgcctatctggcggagctagccagatgggacaccggtctcgttctctgtggcccgagtcggctcggggtagagtgatgatggcgcttcctgttgacgtggcgggcctgtgccctaggtcgggcgacgtggaggctcctccgaagccggggttgaatctgtcttccatggccgaggccgagcccgagctcctgggtcgggcgaggcggaggttgttcggcaaaggctagggcggagtccgagccctggggtcgggcgaagcggagttcgtcgtcttctggggctgagcccgagtccgagccctgggtcgggcggagcggagttcgccgtcttccggggccttagcctgagtccgagccctgggtcgggcggagcggagttcgccgtcttccggggccttagcccgtgtccgagccctgggtcgggcggagcggagttcgccgtcttccggggccttagcccgagtccgagccctgggtcaggcggagcggagttcgccgtcttccggggctttagcccgagtccgagccctgggtcgggcggagcggagttcgccgtcttccggggccttagcccgagtccgagccctgggtcgggcggagcggagttcgccgtcttccggggccttagcccgagtccgagccctgggtcgggcggagcggagttcgccgccttccggggccttagcccgagtccgagccctgggtcgggcggagcggagttcgccgtcttccggggctttagcctgagtccgagccctgggtcgggcgaagcagagttttctatggcgcctttggcaaggcctgactgcctatcagtctcactctgtcaagtggcactgcagtcggagtggcgcaggcggcgctgtccttctgtcagaccggtcagtggagcggcgaagtgacggcggtcacttcggctctgccggggggcgcgcgtcaggataaaggtgtcaggctacctttgcgttaaatgctcctgcgactcggtcggttggcgcggcgatttagtcagggctgcttcttagcgaaggcaaggcctcgggcgagccggagatgtgtccgccgttaaaagggggggcctcgggcgagacgaaaacccctcggggtcggctgcccttgcccgaggctaggctcgagcgaggcgtgatcgagtcgctcgtatggactgatccctgacttaatcgcacccatcaggcctctgcagctttatgctgatgggggttaccagctgagaattaggcgtcttgagggtacccctaattatggtccccgacagtagcccccgagcctcgaagggagtgttagcactcgcttggaggctttcgtcgcacttttttgcaaggggaccagcctttctcggttgcattttgttccggtgggtgcgcgcgagcgcacccgccgggtgtagcccccgaggcctcggaggagtggtttcactccttcgaggtcttaatgccttgcgtaatgcttcggctggtctggttgttccctcatgcgagcaggccgtagcccgggtgcacggtcggggcccaagttctcgagctggtatgctgacgctgtcaacggtttggccggagccgggtttgcgagagcagcccccgagcctctgcacagagcgagagggcgatcagggacagactcggcttttttacatacgcccctacgtcgcctttccacaaggaggaggggggagagcgccatgttaccctcgatgggcaccgaacatggtgtctccggtgagctgcaagcgggtaatccgagtggacgtccgtgccccgttcgttgggggtcggctaggggcccagaggcacgcccaaaagtacctgcgggtgatctgccggacccggtcccctggcgacggggtccgagggctcgatgcctccctccgatgggattccgttacaagatcgctcccgctggtctcggaaatgtcctagggtacctcgggagcgcagcccgagccttggttatgtattgaacgtacccctggtcatccctcgctcggcgtctgaggcgactgtgaacccttcgagggccagccttcgaacccctgatcagtaatgggcgcggagcccgagtagcctgaggcggccgtggaacccttcggggggccggccttcgaacctctgaccagtagtgggtgtcgggcccacgcgatctgaggcggctgttgaacccttcggggggccagccttcgaacctctgatcagtaaggaggctcggagcctggttccttcacggggaaggatccctttcggggtatccccctttcccggtccctgtcgcaagagatagagaaaagagggaaaagggaaaaggatatgaaaccgaacgacgcggcgtaccttttttggcgcggttgtttcggcgaaggggaagcgccgcccgttgctcctgccagaagtgccgcctgtccagtcgcggagttaatgcgacgcggcgagtagttggcggggctaccgttgcgcgtgcgcgagccgttcgaggagcggccgtttcgcttcgcgtttttgaatcccgcgtccggtccgggcagaacgttggaaccgtcttcgccttggtctttatataccccggagagggtccggtgacggttctttgctccgcttcctgcctgccccttaggttttcgcaacccgagagatctagccagagaagagagaaccgcccttcctgcccttcgcgccgccatcccctttagcttggtgatggctgagtgggtgaccatcattccgccgcgtgatccatggcccctttccacggtgacggcgagcgacctggaagatctggtcggcgagggtttgctccgtcccctcaccgataagcagcgaccggaatggattcctcccgcgggtgaagccgctccgtccccaccgccggggtacatcgtgagctttgtctccttccacgagcggggattcggcgtgccggcgggccgcttcatgcgggcgatcctgtaccactatggggtggagttgcataacctcacccccaactccatctcgcaggccgccatcttcgttgcggtgtgtgaggggtacttgtggatcgccccccattgggatttgtggacccatttcttttgcgcggagcttttcgcctcgccgacgggggagaggaaagtccgtgcagcggtgcgggctggcggctgtacccttctgctgaggcagttgcgggcgtcgctgtatattcctgccatccttgcgtcctcgaataaggggtggcagcgccggtggttctacctctggaacgacggcgagttgctcccgccgttctcccagcgagtaatctccgctgccaccgacgcctggcgccacgggaccccgcacgaggggcagaagaacctcgagccactcctctaggccctggaggcgttgcaggaagggggactcaccgctgcgggagtgattgccgccatccaccgtcggagggtgcttcccttggcggagcggcggctgtcgctttgggagatgaccccggaggccgactgggagggctcgcggatgtcccctgatcctcttcccttcgacgccctccaatggcgggtgtcggctgcgatggggaagccggactcccacgccttctcccagcttcggatgcgccccgaccaggggtgcgtaactctggtgagtgttcgctccttccttcttcatacatcgggttgctcctggctcttacgattgggtttctttccccccttctttaggaggtggggtggcacaagccctccctgccacgggtcccggaggacgcggtggaccgagcagcgcggcgggtcgccgtggaggagaagaagaagaagaaggacgcggagaaggcccgggcccgcgagcggaggcgggctcgggacgccttggagaagcgccgtcgccagcaggagagggaaggactcccaagggagccgtcgccggagacacccgacgacgatgatgacgacgatgatgaggaggaggacgacatggccgcccgtcttggcctcagccccggcttggggtgtggccaggagctgtcgagccagcccccgagcaggccgacaccgtcagtccccggagttggggcgtcggggtcccggcccgaggcacggggacgacccgagaggtcacctgacccctcggctggaggagctgaggtggccgcggagtagagatggcaacgggtataaacctgccgggttttgctatcccaaacccgtacccgtgaaaaatatttacacccattaaaaaacccgtacccatgacgggtttgaaattttgcccaaacccgtacccatcgggtttgcgggtacccacgggttacccgcgggtttttatctccaatatgcttattctttttataatcaataagtatcgtaatgattaatgagatcatggtccaaaatttatgtaattaacaacgagttcatgatttggtacaaaaaatattagtagagagaattaaatacaaataataagttgtataatcaagttaccttgcactaagttatacatccaccacatatataacgctagtaataattataatagcaagcaagcaacactatcaccaactacttatacattcactatttgataaaaattaggaagtaaataggtagataacaagtttgttattcatttataaaataaaatgacaatatgcactaggtttggtcgggtttaaaaacccacgggttcacgggtttgggtactataggaacaaacccgtacccatgaacccgtcgggtatacatttatgcccattaacaaacccatgggtatgaaaattgactcaaacccgtaccctaatggagtaaaaacccatcgggtttcgggtttcgggtacccattgccatccctaccgcggagggccaggtcagggcgtctgctccccaggggccgccgctcgtaccggcagcgcatgggggtgaccctcgagtcatcgcgaccgtgcccgggccatctgctccccgggcgtccaaagcaaaggtggcgccgaagttgccggcgaagcggacctcggtggctgtttcgggagccgggatccaagaaacctccccccaggcgcggtggatcatgtcccgaagtgggtaagtatctcggaatgtcttcgtcttggcttcccattcataggtctcggccgtgatttttcttttctcctcatcaagcgaagccatgggctgaccgacctggcaccccggaaggcacttaagaagacgccggcttgtgcggccagcgccgcttcgggccttgccattcaaccgaccctctcgcacggcgttccacctcagggggctcagacggtgccggtcgccgtggagcaggttcccgaggccggctcctctaccgaggcggccattgcgataggagaggcagctgacgccgacgtggtcctgagcccaccggtggtgccggccatgccggcgcctgtcgctaccgaagtcgccgccgtcccggttgaggagcgtccggtggctgtcgacgccgagtcggttgatgtgtcggcgcctggtgtctcggaagaggcgggtggggaggctcgattcgccctgccgggcgacggcctcgtcgctgtgcggcggagccccgaggtccggcgctagttgctccggttccggacccgtgaggcctcggaccccgtcttcgttctcgatgatgaacgggaggaccagtcctgggacgagctccgcgagcgtgccgaagcaacggtggggtcgctccggtcgttgctggaggttttctgcggggacgtccccaaactcctccaggtaacggtttcgggcatacctttgtttttcttctgtgaccgaggcgtttttcgtgacgccccgcttccttccctcaggatccgttgggtcggagcgccgccaagtcgtcgttcatccgccgcgaagtcgatgtctggggctcgctgcggtccctgaggacctcgcttgccagggccactgcgcgcctttcccagcagggtgccgaggtagcggacctccagttgctctgcgctgacctgagagccgaggcggcagcggcgcgcacggaggcgaccgcggcgcgcgcagaggtgcaacggcagcggtcggagctcgtccaggtcgtcgaggagcgggaccgatctcggggccgggctgccgaggccgaaagccgggccgacgccctcgcggccgacttagccgcggcccaggccgcgacctcggagcagcgcgcccgggccgagggtaagccttgaccatccttggttcttgctcttgtttgtttcctctgcttgtgtttgaggtttttcttctggttgttcgcagagctcgagtccgccctcgaggagtccgccaaggcgcttgccgaggcgcttgccggggcggccgagcagagggaagccgacttcacggccatgtccgaagccatctcggatgtttatcgggtccttggctccggcgacgtcccctcaggaagctcccctcaaagccgccttcaagccttaggcgatcacgcgcgcggcaggctccacgaggcgctacaccacggcgtcaggcgggccttcgccgtgctcgcttcccactacattgtggacctggagcaggttagcgaggggtattgtcttcttgacaaagatgaagctgccctggcggaaatccagcgactcgacgcggtcgccgcgggtccgagcgtagtgctggcgaccacctttgaggcggaaatcctcccccctgcgccgtcgccggaagccgagatggacctcaccgaaggcggagacggagctgaaggcgcggctccttcccaaggcgacgcctaactcttgttggaccagtttctgttggatgtgcgcgcgtcctcctgtggccgccgaggcctgaacactttgcttctattgcatgaagtcgtactcttccttttattttgcgtgtccgactttgttcgtcaataacagggtggctccccgagcaggggtcattcttcgtggcgggtgacgagtgagggtgtccttaacccggaggtataggaatccctcggcccagtcggccttgccacttacatgcacccacgtttgctccttggggccctgcttctgatatagccgggagaacgcaaaaagccttttttgatcaaaaattttggacgtggagaggtacacccagtcttgacgcagggaggttccccctttttagcccccgagggagggtcgggctctgccgaggcgaggccggcccttccttgatgactgagacttgcgcgggagcgaggtgtacgaacagcttgaaaacgtcttaagggtagaagcgacgtagctgtcagacgttccgagcgttgctgtagacctcgccttgaccgccggccaacttgtgcgttccgggctccagaacgtcgacgatgacaagcggcctttcccgggggtgtgcgcagcccccgggtgtcatccgcgcagaggccatttgacggatcaggctcctgcccgaatatccggcgagtgctcggcaacatcccttggtaagccgggcatgccagagggactcctcgcgaaaacgtcggcgttcgcgcggagaaagttgccgagcactgcttcttacttggggtcgagctcggaaccgttccggatctgcttagaggcgtcgccaccggggtcgagggggacggccttaaccgtctccgctggctcgaagttgccggcatgtcgcttcacgtctggcacctctttggagaggttctccaggtcggcgatgagggcctcggactcggcgagggcctcggcgtactccacgcactccacgtcgcattcgaatgcgtgtttgtacgtggggccgacggtgatgaccccgttggggcccggcatcttgagcttcaggtaggtgtagttggggatggtcatgaacttcgcgtagcatggcctccccagcaccgcgtggtaggttcctcggaacccgaccacctcgaacgtcaaaatctcccttcagaagttggagggcgttccgaagcagacgagaaggtcgagctgtccgaggggctggacgcgcttcccaggaatgatcccgtggaagggcgcagcgcctgctcggacggaggacagatcgacgcgcaggagcctgagggtctcggcgtagatgatgttgaggcagctgcccccatccatcaggaccttggtgagcctgacgtcgccgacgatggggtcgacgacgagcgggtatttccccgggctcggcacgtggtcggagtggtcagcttggtcgaaggtgatgggcttgtcggaccagtctaggtagactggcgccgccaccttcgctgagcagacctcccggcgctcttgcttgcgatgccgagccgaggctttcgccgcatgccctccgtagatcatgaagcagtcgcggacctcagggaactctcctgcttggtgatcttcccttttgtcgtcgtcgcgggccctgccaccctctgcaggtggcccggccttgtggaagtggcgccgaagcatgacgcactcctcgagggtgtgcttgacgggcccctgatggtaggggcacgactccttgagcatcttgtcgaagaggttagcacctccgggggggcttccgagggttcttgtactcggcggcggcgacaaggtccgcgtcggcggcgtcgcgtttcgcttgcgacttcttcttgcctttcttcttggcgccgcgcggagtagacgcctcgggagcctcttccgacgggcggccctggggctgcttgtcctttcgaaagatggcctcgaccgcctcctggccagaggcgaacttggtggcgatgtccatcagctcgctcgccctggtgggggtcttgcgacccaacttgctcaccaggtcgcggcaggcggtgccggcaaggaacgcgccgatgacatctgagtcggtgatgttgggcagctcggtgcgctgcttcgagaatcgccggatgtagtccctaagagactctcccggctgttgccggcagcttcggaggtcccaggaattcccggggcgcacgtacgtgccctggaaattgccggcgaaggcttggaccaaatcatcccagttggagatctgccccggaggcaggtgctccaaccaggcgcgagcagtgtcggagaggaacagggggaggttgcggatgatgaggttgtcgtcgtccgttccacccagttggcaggccaggcgatagtctgcgagccacagttccggtctcatttcccccgagtactttgtgatagtagtcgggggtcggaaccgggccgggaacggcgcccgtcggatggcccgactgaaggcctgcggaccgggtggttcgggcgagggacttcgatcctccccgctgtcgtagcgtcccccacgcctggggtggtagcctcggcgcaccctttcgtcgaggtgagcccgacggtcgcgacgatggtgctcgttgccgaggtggcccggggccacaggcgcggtgttgcgcgtgcgcccggtgtagaccgaggcttcccgcatgaatcgggaagtcgcgacatgaggttccgaggggtatccctgccttcgggaggcagagctctcggcccgtcaggccgcagcgccttccagaagattcttgagctctccctggattcgccgacccttggtggttgatggctccggcatcgcgcggaggagcatcgctgcggctgccaggttctgaccgacctcgctggatgcgggtggcggcctgaccctgacgtcgttggcgatgcggtgctggaaaccctggggcaggtgacgtatttctctggccgagggttggcccacccatacctgcccgacgtcccggcggatcgactcgagcgctcctgctccctcgttgagcctggcctgcgccccgcggacttgctcgagctgtgggtcgtgaccccccgccggaacggggaccacagctagctcccgcgggatgtcggcgcgaggcaccggcctagggagatcaccgtcctccggcatgccgagatggttgccttcggagggatcccctagctcgacgtggaaacattcgcggcttgggccgcagtccttgtcgtcaaggctgcggctaccgtcggaatagtcggagaggcagtagtcacatgcggtcacaaagtcccgcatggcactggggttgccaaatccagagaaatcccagcagatgctgggatcgtcatcttcctcggacccagagggtccgtaggtcgagacgtccgtcaaccggtcccaaggcgaccgcatacgaaaccccagaggggttgcactcgcctcaacgagagcgcccgccaaagcgaggtcgctaggcgggttgaggccgagtcaaaatgatgtaggatgggaatcagtcagtaccttttggtcgacgaggagcgacatagtcacgtcggggactgattgcgccgtcgtcttaggtacgagggcgacgtcctgcaggccctccgcgagcgcgctggcgtcgtccacttgctcgggattggcgtgtcgcggggggacggcgctcgccttcgtctcaaacgcgaggtcgacgcccgacgcgccccccgttggggcgctggggacgtcgattcgctcgacagccgacgaagcgcggcctcccgcttggccttggttgccccgcctcctcctccgttggcgggggagaggacggggcgagctcgaatgtcgttcttccaccacgcggggaagatgtcgtcgattccgccgccggcgggcgggttgtcggccgccattgtcgttgtcgcgcggcggtggaaggagtatcatgtcgtagctgccgtcgagggacatgaactcaagactcccgaaacggagcaccgtcccgggttggagaggttgttggagactgcccatctggagcttgacgggaaactcctcgtcaacacgcagcaggcccctacctggcgcgccaactgtcggcgtctcgagaccggggggtccctaagccgacgagtgagtgtgccacgtgccccagcccagatgggtcgagcgcgtgggcgagcgcgaaggggggaagcgaggtggccggagacgggcgtgagagaggtggaaatcccgcggccttcgtgttcgtcccgcgcccaggtcgggtgcgcttgcagtagggggttacaagcgtccacgcgggtgagggaagcgagcggccccaagagagcgcctgccccgtcctcatccctgcgcagccaaccttctctaagaaggccctggtccttccttttataggcgtaaggagaggatccaggtgtacaaatggggtgtagcagagtgctacgtgtctagcggggggagagctagcgccctaagtacatgccaatgtggcagccggagagatcttggcaccctgctggtgtggtgtcatggctgtcggaggagcaacggagcctggcggagggacagctgtcggagcggttgggtccttgctgacgtccccctgcttccgtaagggagctgagagccgccgtcgtcacagggctagcggggcgccatcattgcctatctggcggagttagccagatgggacaccggtctcgttctctgtggcccgagtcggctcggggtagagtgatgatggtgcttcctgttgacgtggcgggcctgtgccctaggtcgggcgacgtggaggctcctccgaagccggggttgaatctgtcttccatggccgaggccgagcccgagctcctgggtcgggcgaggcggaggttgttcggcagaggctagggcggagtccgagccctggggtcgggcgaagcggagttcgtcgtcttctggggctgagcccgagtccgagccctgggtcgggcggagcggagttcgccgtcttccggggccttagcctgagtccgagccctgggtcgggcggagcagagttcgccgtcttccggggccttagcccgtgtccgagccctgggtcgggcggagcggagttcgccgtcttccggggccttagcccgagtccgagccctgggtcgggcggagcggagttcgccgtcttctggggctttagcccgagtccgagccctgggtcgggcggagcggagttcgccgtcttccggggccttagcccgagtccgagccctgggtcaggcggagcggagttcgccgtcttccggggccttagcctgagtccgagccctgggtcgggcggagcggagttcgccgccttccggggccttagcccgagtccgagccctgggtcgggcggagcggagttcgccatcttccggggctttagcccgagtccgagccctgggtcgggcggagcggagtttcctatggcgcctttggcaaggcctgactgcctgtcagtctcactctgtcaagtggcactgcagtcggagtggcacaggcggcgctgtccttctgtcagaccggtcagtggagcggcgaagtgacggcggtcacttcggctctgccggggggcgcgcgtcaggataaaggtgtcaggctacctttgcgttaaatgctcctgcgactcggtcggttggcgcggcgatttagtcagggctgcttcttagcgaaggcaaggcctcgggcgagccggagatgtgtccgccgttaaaagggggggcctcgggcgagacggaaacccctcggggtcggctgcccttgcccgaggctaggctcgggcgaggcgtgatcgagtcgctcgtatggactgatccctgacttaatcgcacacatcaggcctctgcagctttatgctgatgggggttaccagctgagaattaggcgtcttgagggtacccctaattatggtccccgacacttggattcagcctcgacccgccaagcggcttcgctttggcggatgctctcgtagaggcgagtcaaaaccctctagggtttcgtatgcggtcaccttgggaccggctgacggacgtctcgacctacgggccctctgggtccgaggaagacgacgtgcccgacttctgttgggatttctctggacttggcaaccccagtgccatgcgggacttcatgacctcatgcgactactgcctttccgactgttccgacggtagccgcagcctcggcgacgaggactacggcccaagccgcgaatgtttccacgtcgatctagggggtccctccgaaggcaaccatctcggcatgccggaggacggtgatctccctaggccggtgcctcgcgttgacatcccacgggagctagctgtggtccccgttcaggcggggggccatgacccacagctcgagcaaatccgcggggtgcaggccaggctcgacgagggagcaggagcgcttgagccgatctgccgggacgtcgggcaggaatgggcgggccaacctccgaccggagaaatgcgtcatctaccccagggcttccagcactgcatcgccgacgatgtcaggatgaggccgccacccgcttccagtggggtcggccagaacctagctgcagcagcaatgctcctccgtgcgatgctagagccatcaaccaccgaggggcggcgaatccagggagagctcaagaatctcctggaaggcgccatggtccgacgggccgagagctccgcctcccgaaggcaggggtacccctcggaacatcatgccgcgacttcccgattcatgcgggaagcctcggtccacaccgggcgcacgcgcaacacagcgcctgcggccccgggacgcctcggcaacgagcaccatcaccgtgaccgtcgggcccacctcgacgagagggtgcgccgaggctaccaccccaggcgtgggggacgctacgacagcggggaggatcggagtccctcgcccgaaccacccgatccgcaggctttcaaccgggccatatgacgggcgccgttcccgacccggttccgacccccgactaccatcacgaagtactcgggggagacgagaccggagctgtggctcgtggactaccggctggcctgccaactaggtggaacggacgatgacaacctcatcatccgcaacctcccctgttcctcttcgacaccgctcgcgcctggttggagcacctacctccggggcagatctccaactgggacgacctggtccaagccttcgccggcaatttccagggcacgtacgtgcgtcctgggaattcctgggacctccgaagctgccgacagcagccaggagagtctctccgggactacatccggcgattctcgaagcagtgcaccgagctgcccaacatcaccgactcggatgtcatcggcgcgttccttgccgacaccacctgccgcgacctggtgagcaagctgggtcgcaagacccccgccagggcgagcgagctgatggacatcgccaccaagttcgcctctggccaggaggcggtcgaggctatcttccggaaggataagcagccccagggccgcccaccggaagatgcccccgaggcgtcaactcagcgcggcgccaagaagaagggcaagaagaagtcgcaagcgaaacgcgacgccgccgacgcggaccttgtcgccgccgccgagtacaagaaccctcggaaaccccccggaggtgccaacctcttcgacaagatgctcaaggggtcgttcccctatcaccaggggcccgtcaagcacacccttgaggagtgcgccatgcttcggcgtaacttccacagggccgggccacccgcggagggtggcagggctcgcgacgatgacaagaaggaagatcaccaggcaggagagttccccgaggtccgcgactgcttcatgatctacggtgggcaagcggcgaacgcctcggctcagcaccgcaagcaagagcgtcgggaggtctgttcggtgaaggtggcggcgccagtctacctagactggtccgacaagcccatcaccttcgaccaagctgaccaccccgaccacgtgccgagcccgggaaaatacccgctcgttgtcgaccccgtcatcggcgacgtaaggctcaccaaggtcctcatggacggaggcagcagcctcaacatcatctacgccgagaccctcgggctcctgcatgtcgatctgtcctcggtccaggcaggcgctgcgcctttccatgggatcatccccgggaagcgcgtccagcccctcggacaactcgacctccccgtctgcttcggaacgccctccaacttccgaagggagaccctgacgttcgaggtggtcgggttccgaggaaacctaccacgcggtactgggaaggccatgctacgcgaagttcatggccgtccccaactacacctacctcaagctcaagatgtcgggccccaacggggtcatcaccgtcggccccacgtacaaacacgcgttcgaatgcgacatggagtgtgtggagtacgccgaggccctcgccgagtgcgaggccctcatcgccgacctggagagcctctctaaggaggtgccagacgtgaagcgtcatgccgacaacttcgagccagcggagacggttaagtccgtccccctcgaccccagcagcgacgcctccaagcaagtccggatcggctccgagctcgatcccaaataggaagcagtgctcgtcgactttctccgcgcgaacgccgacgtctttgcgtggagtccctcggacatgcccggcataccgagggatgtcgccaagcactcgctggacatccgagccggagcccgacccgtcaagcagcctctgcgccgattcgacgaagagaagcgcagagccataggcgaggagatccacaagctaatggcagcagggttcatcaaagaggtattccatcccgaatggcttgccaaccctgtgcttgtgagaaagaaaggagggaaatggcggatgtgtgtagactacactggtctaaacaaagcatgtccgaaggttccctaccgtctgcctcgcatcgatcaaatcgtggattccactgctgggtgcgaaaccctgtctttcctcgatgcctactttgggtatcaccaaatcaggatgaaggagtccgaccagctcgcgacctctttcatcacacccttcggcatgtactgctatgtcaccatgccgttcggcttgaggaatgcgggcgcgacgtaccggcggtgcatgaaccatgtgttcggcgaacacattggccggacggtcgaggcctacgtcgatgacatcgtagtcaagacgaggaaagcctccgacctcctttccgaccttgaagtgacattccgatgtctcaaggcgaaaggcgtgaagctcaatcccgaaaagtgtgtcttcggggtgccccgaggcatgctcttggggttcattgtctctgagcggggcatcgaagccaacccggagaagatcgcagccatcaccagcatggggcccatcaaggacttgaagggcttactgagggtcatgggatgtctcgcggctctaagccgcttcatctcacgcctcggcgaaagaggtccgcctctgtaccgcctcttaaggaaggctgagtgcttcacttggacccctgaggccgaggaagccctcgggaacctgaaggcgctcctcacgaatgcgcctatcttggtgcccccagctgccggagaagccctcctgatctacgtcgccgcaaccacccaggtggttagcgccgcaattgtggtcgagaggcaagaagaggggcatgcattgcccgttcagaggccagtctacttcgtcagcgaggtactgtccgaaaccaagatctgctacccacaagttcagaagctgctgtacgcggtgatcctgacacggcggaagctgcggcactactttgagtctcatccggtaactgtggtgtcatccttccccctgggggaaatcatccagtgccgagaggcctcaggcagggttgcaaagtgggcggtggaaattatgggcgaagcaatctcgttcgcccctcggaaggccatcaagtcccaggtcttggcggacttcgtggctgaatgggtcgacacccagctctcaacaactctgatccaaccggagctctggaccatgttcttcgacgggtcgttgatgaagacaggagccggcgcaggcctactcttcatctcgccccttgggaagcacctacactacgtgctacgcctccatttcccggtgtccaacaatgtggctgagtacgaggctctggtcaacgggttgcggatcgccatcgagctaggggtccaacgcctcgacactcgcggtgactcgcagctcgtcatcgaccaagtcatgaagaactcccactgccgcgacccgaagatggaggcctactgcgatgaggttcggcgcctagaggacaagttctacgggctcgagctcaaccacgtcgcccggcgctacaacgagactgcggatgagctggctaaaatagcctcagggcgaacaacggttcccccggatgtcttctcccgagacctgcatcaaccctccgtcaagatcgacgacacgaccgagcccgaggcaccctcggctcagtccgaggcaccctcggctcggcccgaggcaccctcggttcagcccgaggtacccctggcccccgagggcgagacactgcacgtcggggggggggggagcgaagcggggtcatgcctgatcaaaactggcagaccccgtacctgcaatatctccaccaaggagagctaccccccgaccgagccgaagctcagcggttggcgcggcgcgccaagtcgttcgtcttgctgggagatgggaaggagctctaccaccgcagcccctcaggcatcttccagcgatgcatctccatcgccgaaggtcaggaactcctacgagagatacactcgggggcttgcggccatcacgcagcgcctcgagcctttgtcggaaacgctttccggcaaggattctactggccgacgatggtggccgacgccactagaattgtccgcacctgcgaagggtgtcaattctacgcaaggcagacccacctgcctgcccaggctctacagacgatacccatcacttggccttttgccgtgtggggtctggacctcgtcggccctttgcagaaggcacccgggggctacacgcacctgttggtcgccatcgacaaattctccaagtggatcgaggtccgacccctaaacagcatcaggtccgagcaggcggtggcgttcttcaccaacatcatccatcgattcggggtcccgaactccatcatcaccgacaacggcacccagttcaccggtagaaagttcctggacttctgcgaggatcaccacatccgggtggactgggccgccgtggctcaccccatgacgaatgggcaagtagagcgtgctaacggcatgattctacaaggactcaagcctcggatctacaacgacctcaacaagttcggcaagcgatggatgaaggaactcccctcgatggtctggagcctgaggacaacgccgagccgagccacgggcttcacgccgttctttctagtctatggggccgaggccatcttgcccacagacttagaatacggttccccgaggacgagggcctatgctgaccaaagcaaccaagttgatcgagaagactcgctggaccagctggaagaggctcaggacaaggccttgctgcactcggcgcggtaccagcagtccctgcgacgctaccacgcccgaggggtccggtcccgagacctccaggtgggcgacctagtgctttggctgcgacaagacgcccgagggcggcacaagctcacgcccccctgggaggggtcgttcgtcatcgccaaagttctgaagcccggaacgtacaagctggccaacagccaaggcgaggtctacagcaacgcttggaacatccaacagctacgtcgcttctacccttaagatgttttcaagttgttcatatacctcgctcccacgcaaagtttagtcatcaaggaagggtcagccttgcctcggcaaagcccgaccctccctcgggggctaaaaggggggaaccacctctgcgtcgaattttttcctcgaaaaaaaagaagatcctttctgccagaatgtctttcgtgactttcgactacttcgaaagtggatcccgaaaacaacggagtacacgtaagcagccaaggctgaccgagccgagggactcctacgcctccgggatacggatacctcactcatcaccttctgcgataagtaactcacgttcggataagtgattccgcggaccaaacaagtcttcatgttcgaaagctcctctgccgaagcgattctttgagccttctcaactgcgtcggtgacagaaccctatggacgggtaagagtgcgcgtaagcggcaaggccgaccgagccgagggactcctacgccttcgggatacggatacctcactcatcaccttccgcgagaagcaactctcgctcacacgaacaattctgttaccgacgaaaaagtccggatactcgaaacaagaggaaaacaaacgcagctttaaaacacggcgagggtgtgtttgggcctcggcggccgcagaaaacacacactacaagataatccgattctgcaggctcagatcttgacggttgaagggagcagcagcaccctcagcgtcaactacaccttcggcgaggtcggacctggtctcggacggcgacgcggtccgaggatctccactctgaaggacgacgtcatcaccacgcccgggccatcgccgccagggtcttctccgagaatccggcccgagcaggcggctcggctgatcaccctgaggcctcggccagctgtcccccgaagacatcagcccggcccgaggcctcggaagatcaactccggcgtcggtcccgctaacggacgacccggccaggctccgaccgaccaggtcttcttttcgagccaactctgcctctgtttgtgctgacaccgctacccctggcctcggctcatcgaagagcggccgaggggttcctttaactaagcaagagaggcctcggacgacaaggctgaccgagccgagggactcctacgcctccgggatacggatacctcactcgtcacctttacacggggcaactcacgcttggtgaagcggttcagacaaccaacaagcgagtcttagtgctcgaaaatgaggaaaaacacggctctgtgcccaaaattacatacatgttcaggcctcgacagccacaatgaacaaaaacactggcattcacagtgccattacaaacggaattccggttccgtccccgcgggtatgaactacctccactccgaggagcctgcagggcgacgagttccgggtgactcgccagcgacctctgcagcagcagccatggtcctaggacggacgcggccgccggaaggctctcgttcgtgttcccgctcaagggacgcgaaccagccatcaaagctaaagagcgggccgctccgaagcgcaccggcaggtcctcgttcccgtcctcgctacgaaagcgaggaagagggcggaatgttgcatcctagctgggcagcaacagttcgccttccccggcatggctggaggacgcctcctccgcagagctggaggatggttgccaccaccagaagctggaagaagaggtggctagccggcccgcgcgggaggtagagccccggctcgcctcgctctccgccccagcaaggatgatgaacatccttgaagttgagggcgggaccaagatcacagcccggcttgcctctccccatctaggggctggaggtcgccgtcttgggtgaccgccggcggaggggtgcagccgggctgcatgatgaaaatccttgaagccgaacgatggctgaaaggtaccaactcccacggagttgcgttccccccaacgacaaggcggaaggactgcagacatcccccatccgagggctcggaaggtggaaagacatgatgcataagggagcgcgaaggcatgatcgcctttcaagggggtcaccctccttttaaaggcgactctccctacttgcgtccccagccgtcgtgggctgagtcttctccaacacgctccaaggtcctccccctacggcgagggggctgggtcccacacgtcatgcaaggcggcccagagcagaagaagccaaaccgccgcgcgcggtgcatgcaacccgcccagcggttacaagcggccctccacttttgcccagaccagcgggcgaaagggcgggtagccatgtaggcggcatgcaaccacgccaagtgggcgcacttctccgacttccaacacgcccagcatggaggcccaggcccacgcgtcatgcaaccggcgcgtcggatgctgcgtgcgagcaactgcaccgccgcccgcgcctctaccgcgcctcctcgactatggaaccaataccgcgactcgaggcgatccagcgcacgacccagcagcgccagcctggcgcggcggtcaatgcggccaaaaatgggccgacagtaatggcggtggcaggcgggcaggagcagcggtcacgtcgtcagccaagcttacgtcccatccgggggcagcgagagaatcctctctcacggcgtgaagacgacgcgcccgtgttccgttcctcgaacgacccacgcacgcgcaacggccgccccgcgaaccactcgccccgtcgcattaactccgcggcgggacaggcggcgcctctggcaggggaagcgagcgacgcttcgccttcgccataatgaccgcgtcgaaaaaggtacgccacgttgttcaaattccatatccttttccttttcctctttctctctcttacaacagggactgggaaaggggggataccccgaaaaggatccttccccgtgaaggaaccaggctccgagcctccctactgatcagaggttcgaaggctgccccctcggaggggttcaacagccgcctcagagcacgtgggctccacacccactactggtcagaggttcgaaggccggcccctcggaagggttcaacgaccgcctcaggctactcgggctccgtgcccactacagatcagggttcgtaggctggccctcgaagggttcacagtcgcctcagacacagagcgagggatgaccatgggtacgttcaatacataaccaaggctcgggttgcgctcccgaggtaccctaggacattttcgagaccagcgggaacgatcttgtaacggaatcccatcagagggaggcatcgagccctcggaccccgtcgacaggggaccgggtccggcagatcacccgcaggtacttttgggcgtgcctctgggcctctagccgacccctagcaaatgtggcacggacgtccgctcggattacccgccagcagctcaccggagacaccatgttcggcgcccaccgagggcaacatggcgctttcccccccccctccttgcggaaaggcgacgcaggggcgtatgtaaaaaagtcgagtctgtccctgatcgtcctctcgccctgtgcagaggctcgggggctgctctcgcaaaacccagctctggccaaaccgttgacagcgtcaacataccagcccgagaacttgggacccgaccgtgcacccgagctacggccagctcgcatgagggaacgaccagaccagccaaagcattgcgcgaggcattaagacctcggaggagtcaaaccactcctccgaggcctcgggggctacacccggcgggtgcgctcgcgcgcacccactggaacaaaacgcaaccgagaaaggctggtccccttgcaaaaaaatgcggcaaaagcctccaagcgagtgttaacactcccttcgaggctcgggggctactatcagggaccataattaggggtaccctcaaggctcctaattctcagctggtaacccccatcagcacaaagctgcaaaggcctgatgggtgcgattaagtcagggatcggtccattcgagggactcgatcacgcctcgcccgagcctagcctcgggaaagggcagccaaccccggaggatctccgtctcgcccgaggcccccctccagcaacgaatacatttccggctcgcccgaggccctgtcttcgccaagaagcaaccctgaccgaatcgccgcgccgaccgaccaaatcgcaggagcatttaatgcaaaggtgacctgacacctttatcctgacgcgcgctcttcagtcgacagagccgaagtgaccgcagtcactttgccgctccactgaccgacctgacagaaggacagcgccgcctgcgccgcaccgactgcggtgccacttgacagagtgaggctgacaggcagtcaggcccgacctcaggcgccataggaaactccgctccgcccgacccagggctcggactcgggctcagccccagaagacgacgaactccgctccgcccgacccagggctcggacttaggctcagccccagaagacgacgaactccgcttcgcccgaccccagggctcggactcagccctggcctcagccgacggtctccgcctcgcccgacccgggggctcggactcgaccccggccacggaagacagactcgacctcgacctcagaagagcctccacatcgcccaacctagggcgcagaccagccacgtcgacgggaggcgccatcattaccctaccccaagctgactcaggctacgggaaacaagaccggcgtcccatctggctcgctccgccagagaggcaatgatggctccctgcacgctccctgacgacggcggctctcagcccccctacggaagcaagaggacgtcagcaaggactcgacagctccgacagctgtccctccgccaagctccagcgctcctccgacggccacgacatcacacgaaccgggcgccaaaacctctccagccgccacgatggcgtgtacttagggcgctagctctcctccgctagacacgtagcactctgctacacccattgtacacctggatcctctccttacgcctataaaaggaaggaccagggccctcttagagagggttggtcgcgcggggacgaggacgagacaggcgctcgcttgaagccgctcgctccctctcccgcgtggacgcttgtaatcccctactgcaagcgcacccgacctgggcgcgggacgaacacgaaggccgcgggatttccacctctctcacgccggtctccggccacctcactctccccccccccttcgcgctcggcctcgcgtcgacccatctgggctggggcacgcggcgacattcactcgtcggcccagggaccccccggtctcgaaacgtcgacaaattccctatcgccaaagaggtcctaaaccctagctgttaaatctgacacctagcctcctgctgaaggtgttgtctggcacaccgatgggaagaaggggtcaccctcaccgaccaaggctaaatgccaggcttcccaaacagaggagaagaatcgggctacttcacccaagaaggtcaaaatcacggatttcctgaagatagagaagaatatcaccctagagctaaagaagaaagacactgagttaagcccgatggctgttcaataatcttttgaagaggtaactccctgttttgtgcatatttacactcctacatttattttgaataggatcagattgaaattatcctattgcttgcacattagatttttgttagtattttaatcatctatacagtcagatttcctaaagatagagaagaatatcaccctagagctaaagaagaaagacactgagttcaacccgatggctgttcaataatctttcgaagaggtaacatcatgttttgtgcttatttacactcctacatttattttgaataggatcagattgaaattatcctattgcttgcacattagatttctgttagtatttttaatcaactctacagtcatggtaggatgcaactgtgcaatacacgttttacagggttctacatgtgttcttcaataaccttaattctaatttattgatgattgtttgtactgtaagaaatggtgctttgcaaaatttagaataaactatgtaataataatattatactgttactagggttttatcctcctatataagaagttcaaatggataaacaataaaggcagtgagttcaatcacctttagaagatcaatgtttactttgctggtatgatactcttgttgagtagtttattgaatatatgtgaatagataaggttgtttttagttaacaaaggaggccacatttcatatgtagtctcgacatatgatcattctgtgttcagtttctacccagagaaccgaccctgtcgtggctttg

SEQ ID NO: 810 - DNA, 7385 bp, Zea mays
  Intron number 9 from transcript GRMZM2G041732_T01 (locus G RMZM2G041732) derived from phytozome v7.0 (chr-ID 9; pos 6 6916657 to 66924041)
cacaaccattaattgatctggatactaagaaaaaggtattttgaagctgtctctgaagtccacattacttttggtctgttgatgtgttaacattggcttttttttgtctacaactctgcttgatttgatcaatgcatccttgacatatttaaacaatcagctagcacttcaaattcggtaattatttgtcatgtcacatggactgcatatcatcattatgatgactctccactccaaaggtctaacagctgggctaatctgaatagtacagttgtatggatacatgttcatataaccaatttactgaaaaagctgagaagtcaacatttccctgagacatattcaatgttgttgaggctatcattctatagtaatatctaggggtggtaacaggtcatggccctaatgctctttcataatccagctcagactatctttgttaggtcacaaacatatacaaaattcagcccagcccttttcaggcctgaatctgatacttaaaatttttggcccaaattttcagtccttactgttactaacatcagttgtggtctatttatggggatactttgcttcctggaggatatgtatgtgtattatgctacatattctttgacatgatcacaacagttgaccagtttctggttagtcggacccttcaccaaatatatgttttggatctgatttgggaattgggataagtataatgtaaatgccaaatagaaattctgaatgccatcactacagtattagatccaaaacttggacggatgtattacttagttaaatgatatgctgattatccagcatcaataaatttatgtaagctgcctatcattttaataatgtttagtgagcaatatgtggtcatttgttttgttccacaatggggatccttgaattttgttactgtgaaaagcaacataattaaagagttaaagacttgatgtctaaaagcttttgcactaagaagtctaccaaacagcaggaaacctagcttgcaacgaagcacccatggttataactgttagattggcattatcctaggggttaattgtattcctgccttagctattactggccttaatagcagatcatataggattttataggattctttccttgtatgtacactcactattgttgatacgacgtgtacgcctaggagtgtgcagtggtgaattagcggcggggatataggacttggttggaggtgagaccgttgttgctcctaggagcagtgtccgccagggtgaccgagtagcttaccccaactattgaaaacttctttgataatcttctaggtacttccaccgtcctagtttataagtcgtaaccacctctggtttaaagaccaagaaatgtatttaattctctctatatattatgggactagaattaaaagtggttacaccttatatactaggcggagggagtacgtactacgacacctttatagcacaagagccttaggacaaacccatcgctaacgaaccagggatagagatgactccttgttattctcatctactaactaattaggataaggataagctgcactactaaatcgggataaggataagctgcactactaaaccgggataaggataggcctctccctcctattctcggctaagcaactgactaacagaacctgtgtaaactctcagctagccacaatggcgctttgcataatgccgtcccataaatgagttcacaacatttccccccttgtcgacaaaagtgctcgttcgcgagctccatgtttgggtagcacaacttgaactccacctcttcccatgaagtgttagtttcagaacgaccaacccatttggtcagcacttcccaaatgactctgcagtatggcgaacaacaccttttctggaattggtatcacacgaccatggagcaactcttgaaggggaacaactcgagacagagcagcacccttgaacttctttaggagagaaacatggaaggcgtcatgaattttggttcgtggagggagctgtagcttgtatgagaccatgcccactcgttgcagaatctggtaggcttcgaaataatttggctcaagcttgaatggtgttgttgctgtaatacctattgcagtgttgctacaaacgcggccaaatccaatcgccatccttgaactccacctcacgcctcttcatgtcttgttagcatttcatggtcccttgagcttgaattaactgctcacgaatctttgactcgcgagcttgcagttgattgtctacaactgcaatacgagaagtcctcgactgataggatagtagcgccgaaggcttgcgaccatataccactttgaatggagagcgtttgagggcagtctgatatgacgaagtgtagcagagctccacccaaggcaaccacctgagccattctcgtggcctatcttcagcaaggcactgcaaatcatggtgataatgatgttcactacctctgaccgttcgacagattgaggatggaatgttgatctcatgtgaagcttcacgtcgaccagcttgaactatttagtccataataagctggtgaagatcgtgtctttatcactgacaatggagcggggcagaccatggagacgaacaataccatcgaggaaagctttggccatgtatgttgccgtataaggatggctgagggcaataaaatacacaaacttagataatcgatcgacaacagtgacaatcgtaggcttgtcacctacttttgggaacccctccatgaaatccatggagatgttgctccacacctgtgaagggaactcaacagttgtagcatggcaacatgatggaggtgtactcaatcttgttcctctagcatactgcacaaccacagatgagctctcgagcatgctggaggatgtgggggttgtagaatgtcgcctgccaatgagtgacgatcttctgaatgccttcgtgacttgtgtcatggacatgggacaacaactgtggccaaaggatagaggtgtccgacatagattttgccactgaaactgaagaggcgttgattgtcaacctcggcccaaccttcctttgcagttcctttggctagattgctgctagaaccgccaccatgcaggccatcaatcgtagccctcattgccactgctagcacccaagctgcccacgccacccaagggctggtcgtcggccgtgtgagcagaggtatatgggcatgtcttgccagcagtgttggctgcatttgtcgtcgatgttgtctcgtccgcaaggcccttctccaggagcgctaggtgctgatcatgggaatccgggcgagaattcatggtggtgagttgtgccagagtcctttcaagtttggcaaagttggacaggagccaggatcatcctccacgtcggacatggtggtcgatgtgtcgttgcgcaccaatatcgaattgataggcgtgtatgcctaggagtgcatggtggtgaacgtatgggagtcagattgtgggggagagcggagaggatatgggaatcgactggaggtgagactgttgtcacttctaggagcagcgtgcaccagggcgatcaaagtagcttaccccaacgagggaaagcttctttgatgatctcttaggtatgatcttaggatgaacccattgttaactaaccagggatagagatgactagctgttattcttatctactaactaactgtggtaaggatatgccccaccgggataagtgttagactcctgtttagggttttggcttgagccctcttgtatttacctaactaccctgtgtaatgggcttggcccacctatttggtctatataatatactcccaaccctgattaggattagggtttccaataataaggataagccacactaaaccgggataaggatagacctctccctcttattcttgactaagcaactaactaacataacctgtgcaaactctcagctagccatggtggcgcctggcataatgccgacccacaaatgagtgcacaacaattgtatatgtacaccctacaacaatagagcacaatgtataagtccatctacgagtacaaaatccacatccttaaacttttaaatctctttcatcaattataggaagactagaactctcacagggtaacagtcacagaatttatgccattggacttcaaaaccacaggacctacgccacctgacttcgaaaccggtttcacgaaaggtgttaggtttagtcccacatcagtacttgatggtgggagagcacagtgtataagatgaggtagccctcacctgtcagactagtcttctaggttgagttaggtccagtgccttggaatgttgtgggctttggtggacttgggcctaaggggcgctggttcacgggtatagtcagtgggctggatctgctgcgcatctaacaagtggtatctgagccaatggtcagaaaacctcaagggtcacatggtgacggcggagcttgttaagacggcggagcttgttaatgtcttggaggtcacatgggttgtgtgtgacataaagcattggacttggggctcggagaacgccttcttgagatcacacagggttgtgtgatgtgaagagttggtttggtgtgtgacgggggacattgtcaggtttagtcccacatcgataattgatgatgggggagcacagcacataagacaaaggcaaccctcaccttaggccccatttggggcagcttttcacccgctcatggtgggaaaaagccgcttctgcaccccaaacgactaggtttgggagcaacatctttccacaacgcttctcttccccgcgggcattacacgtaaaagttaaaccggccgcctgcccgaagcggtaaaagccacaatgcgagcaaacagctcagtcctgcatgcttttttacacgtctagaccctgaaacgagcggccccaaatatctccgtctgctcctctaatttttctactcagtaaaaatgtttttagagagaaagaacttaaaacagaactggttacttaaaaaacttaaaatagttagtaatagcgaaaaatttaaaatgctacctagtaataatgtagctacaaaagatgacattgacagggtctagaggcattcaggtcatttctcactcagcatagacagtctcttaacaaaaaatcaagatcgccaaacactcatattatacatccagtagattctcatgacagctggattatccagaaagctagtttcttataaaaaagctcttcagaattaagctgtcccaaacatgccctagtctagtcttttgtgttagagtggacgcactaaccagttcaacacaaaagcttgctaatgggagaaggtagtcaatccacatatacacttcaacacccccactcacgtgcagccatagggaaagacgcaaacgtggaaataaatggatgcatgcacaaataaagcttctgccaggattcaaactcgagacctctggttttgatatcatgttagagtggacgcactaaccagttcaacccaaaagctttaagctaatgggagaagatagtcaatccacatatagacttcaacattttgggttgagttaggtccagggtgctgactcgggtatagcagctgggcctgatctgctgcgggatgccatctttcaagtaccaacacctgccagtgctcagcgtctgcctgttggccatgatctgcttcctgctggtggaaatgtagtgcttcccgtttcagcatctctgcgccttgtgccagcatcaccttgttctctggcaattgaagacctgcccagtattgaatgagcgaacaagaggaacaaacaatctctgtaggagacttgattcttttcccctctcaaagctataacttaactttattcctcactttctagagaccccagcaaatagctgcaagccctaccatgtgaaagccttttttccattacttatatattaatttactcaaggccatagttaatcagaattactaggccaaccaaactccgaatatattttggcttagagcaccccaaaataagtgtctccatttctttttctgaacaaaaaacacacctcaggatccagttctttttcaacatgttatctttggttaaaattatacttcgaaaaattatccacatgaagatcttggatttaatggaacgtttatctttccaatttttcttatctgggagatcaatttcatccctgcgttgatggttatacattgattcaacagaggtttctattcttttgataaacccatctgggttttatcttcatcagcagacatgaaggttactcattgccctccctccctccagccatcttctgagtatcaggttcatattgagaaacgggcacatagccagcggtagcggcttcaggtgcgagcactacctgatttcaatcctggttggacctgggcgtctcaccagggaattttttctcaaaataatcttgcaggtgctggataagtggatatactggcacgtgcctgttgcttgggaaacctgttgggactttgtttatctccaaaaggacgtgtgtctagtttgtaggtctagcattcgcatggggtgtgcattgtgtgcgtgtgggtgtctttgtgcggatgtttaaatactttagccttaggaatccagcctaaaacttctcgcacccatttctgccactgctcattacagaccacaaatagttcaggaaagcggtctaactaaaagtcagttctttttctattaccaaccaatagagatcctccttttaagggcctgtttggaagcacccagttttttaaaaactggagtggttccaaaaacataccactatgccccagtttatagaacatggatcccttaaaagcgaaaaagctggcctctcccagctaaaaccagcttgtccatttaattacatcatgtccttgttgatttctcggaatgtacatatattgccactgtttttaaatagaggaaggttaggttagtcattgtgtatctaagaaactgccttcttagaaaccgggttcgaaacaccctcacccacttttttttacaaaccagtttctagaaattggagatagaaactggtttcttaaaaactgtggtgctttcaaacaagcaataaatgtaaactggggtgcttccaaactgtggtacaacttcatggagttgtgatatggttttctttgtaaactggtaaccccagtaaatatatttttgtttcctataaattaggactgaggtctttggtctaaaaatacaacttcatatctggtcagtgctttattttaaaatatgtactgtacctacaacttcgtaagtctatgtagaacaatatccaagtcgctgacttgcattatgctacattgtgtattttgtaatcgtgagtaggtcgataaggctcttgcac

SEQ ID NO: 811 - DNA, 4694 bp, Zea mays
  Intron number 1 from transcript GRMZM2G074091_T01 (locus G RMZM2G074091) derived from phytozome v7.0 (chr-ID 1; pos 7 6610548 to 76615241)
tgctcaaacccgccatagtagtccacatcattgaggtacctatttggtcaaagacagagctgaattggtgagggtaaatacaagatgctaactggcaaaggagaataatgtaaaaacttcatacaagtctaatgaggaaccacaccccccccccctaaaactttcgagagagaaatatagaagatacagttaatatgtgaacaaatccagaaaagatagaacagaatagagatccaaagagcgcgaccaattcgagaacaaagtcctgggacaaaaaaaaaagaggatatttcagatattcagatgctgttcactaccactagatgacaaacatggtcttcagttccatttgcagtggaagatgaattgcagagttcagatgatggtcacgacactagcatcttttcataagaaatgatgcatcatataaaaaagaaacttatcgagtagcagaagtgaaattcacatctaggttttaccatatctaaggaaggttcaaatgaagctgtgacttgagacaaaattgtgatttaatgcctctgaaacctaactttattgcaaagaacactggcatgtaatcatataaggaggggctaccctagtgcaatatgatgttaatttatagatcaaatgccaatgcttcactatgatctgaattttgttgcaagacaatcagctcagaataacttcagaaaaatgacccttgtggcatttgcaaattactacacaagtaaatcatgttgtttctcaatagaattgcagtttagacactatgcttgcacatttgtgtacttgagaactaaactgttggaaactatatatgtatcagggattcaagccaggcaaaagggtttccaacttgagaacttcagtatttcactcaagtaaaatgtggaaactgtggattactaatcaaaataaaaggccacgaaaattattacgaaggttatatctgttgtatccatgtaaaatctggaacttgaactcccattcagggatcagttagaaataattcctaagagtttgctaagagcacaagttcattggcttccacacatctgaagttgttattgtctcctccaaaaagcgcataatttctaattgagagaaattaaatgaaaggaaataaatgttagtagtttttcaggaaaacgagacatgagacagagagcattctaaaaggattcagttattgcgttacacaataaaatgaacttcaaacatcaatgtatcaagaagtgtgcactcttgcgtttttcttgcttgcaagttagtataagtcgaacttaaatcacaaatccaatccatatgatttcctattttgtttctatgcaaagaaaatgctaacatgaatggattgagagaacgtgacaatttgtaagctgatcattgctgtggcagtgctatacatgaaacaaaattttgcaaacatacagacaaaattgattactcaactaacactttatttcaagaacgcagaagttcccatttcataatctaattttgcgttgatttccataagaacttaggaagggccagttttctgccttgacatataaactatctgtgttttaactatatatgtgtttttgaagcactatacctgaagcataactaaatgtatcacaaatgattatcaacaacacttccttttgttgcagttatatttccacatgtttcaccgcggacttggattcgttagagtggacgcactaaccagtccaacacaaaagcttaaactgaggggagaagttagtcaatctacttatacacttcaacacccactcacgtgcagccagagagaaatgagcaaacgtagaaataaatgggtgaaggcataaataaagcctctgctaggagtcgaactcgagacatctactttgataccatgttagagtggacgcactaagcagttcaactcaaaagctctctagctttgataccatgttatagtggacacactaactagttcaatcaaaagcttaaggtgaggggagaagatagtcaatccacttatacacttcaacagggttgactgactgtcgtgggctaaatactgctacaacacggtgttccatatggcattgcgcaccacaccgttgtaggtaagggtgataatgggtcacgatccaaatgtttcttcacaataagttagggccttaattaattctagtttaaaaataaatagaaatagcatccgatcctaatccgattcgatccttaatttttatagtgtaaaatctagagcccattaccacccctagttccaggtggtgtatggtcgcgaaccattgtgcccttcactgcaggcacggcgcgcacgcggacggttgatgacctccttcgtgagcgggacctctttttggaaaacggccatgaccggcttctctaggctcaaacgtacacccaacaccagtatgatgaccaccattgcgacagggagtttgcggtgagcgactaggtctggttgcaccttctccacatccaggccgcgtccttggtacatcgccccaacgtcaagctgggtacccagtatgctagaccgtgctaggtgttggagcgtgttgcagtggcggactcaccgcccggctagccctggcggctgctcgggctccgctgccatatgttgtggaaagatatacatattctaaaggtgaaacacagtttggtgtaggcaacaatggccaaggcctgactcacaatgcaaacgtccaggctctccaaattttctaggtccgccactagcgtgttgggactgtggcatatcgcctacacctgcccgagggcgcccgtctacacgacgtgtttcatgttagtctcctcaagccatttcatggtgcacctccggagggaccccttcccttaccgatactggaacaaggacgactacttccagttccccagcaggtgttgtgcaccaagctccgccgcggcatatggcatggagtcattcactaggcaggactgtcaccagaagaagctacatgggaacctttggagcaattcaaggcgtcttatctcgttgtccagctcgaggacaagttgtttttggaggccaggagagctgttatgaccggcatcccatatcagcatcgccatcgcgatacaagtggctagaaatggcgtctaggagcagtagttcgggagcccagcagccctagttagaattagttagtttgtttggataacaattggtttgttagtcttggatagagttggttagtttgtttggttggataagcattggtttgttagtcttggatagagttgaatagtttgttagaggctgctatctcagccatataatatactccttcggttaatgaatgaatcaagcagacaagtatcttgctcgtgctttcccccttcgcctactattcacctgcgatgaacagtaccatgctttccccaagaagcagccctaaccctaggacgatggcgcccaagcgctagggtcaccacttgtactacctctgtaaccctagttccaatagttatataatgatacaaaaaaattaatgcattgtttgtaataccaaacaacactaaaatggttgggaaaattgaatacgaaaatatcattagagattttattttgaagaacactagaagaataatgctttctaaatgaagattatgtaaccgatacaatatttattcgccattatattatatgtacatgtatacatactattacttaatactttttgctgcgttttgggcaggccacccaaaatacccggagtccgggatggccctgactgaattatggtaactaccaattgcccacttgtttaaaatgatcgatctacaactaggactaggatttcagttctgtaaattttagtgacaagaccaatcgtatgctagagaaaaaagtaaccttgcatatattgtctactgcaccttatccttagttattatgacagccctatttccttctcaacacaactgttgaatttcagatccaacagtagaacactcaaatctgcaaccacatttaaattacagatcatgttaacagctctgagtacttgtagatgattgatcaccatcatccacaaatgtatcaccatcagggcggcccatgccgcaccacctgatttggaaagattaatccaatatgcgttcctcatgttctaaatagtgcgatgataagtgacagagcacagtcacagctatcaaaagttttcgagtatcgataagagtggatccttccagaaaagatgcccacacgctactctaggaggtcctactctagtcgcagacacagagtggaccacgagccatacatgttgacagccatatacagtacaggatttctgttccacgtccttcacagggctctaattccccgaaaccgaaaagttgccgtcatggggacggggctagggggggccgtgctggtaccttagttcctagagtctagagagcgtaatatagctcaactcaccaaaattaaagcacaacaacagggaaatcaggagctgccacagtggattcgttcccctgttcccgatcgtgatagtatggattgtgagcagagcaggaagcataacaatacaggtaagaaaaaacaaaggggaatttagcacgagcgagcgagcgagcaaggaagcaagcgggggggactaaattgaacgaacgaattggataaagttaccttggggacgcggagaggagcacgagcttgg

SEQ ID NO: 812 - DNA, 2003 bp, Zea mays
  Intron number 1 from transcript GRMZM2G125175_T03 (locus G RMZM2G125175) derived from phytozome v7.0 (chr-ID 7; pos 4 4363832 to 44365834)
tctcttgcaccatcaccgtctcgcacgccgtgactgtgagcgcctactgctactgaacttcccgttgaaatttctctgctgcttacctacctagtttccttgcatggacttttcctgcagaacacgtacaacacgctccacggcggcgcggtggcggccgtagccgaggccgtcgggatggcgtgcgcgcgggcagccgccggggatcgagagatgttcctcggcgagcttagcatcgcgtacctcgctgcagcgcgatgcgatgtgatcttctaattaaattctctgcacctcgcttttccagcatccatttgttggtcgaatcccacattgctatgtactcttggggcaactttgtgcagcaattcaacacgtcaggataatttgggggattggggagtctagctactgcttttgaactggttattattattatgtagttacaccacagttctatgatgttttagaagtaaatagctgattgtaaataagagttgttgggcaagcattgcagctttgccagaaagggtgtgtatttgattgacatatagtagaacctctagcaatgttggaggtgaacattctagtagaatgataaatgtgaaatatatcaggcctgccaatatctggtttaccgggagaaaacttaaatagttttaaacctggtgattaatattgcgatgctaataggtcttgcaaagttttggtccatttgtttcaagtttcaactttgaagaatggtaagtcgttcaatacaagcataccatacaagtgatatataataattaatctacctagccgctgaatgtttcatacatgggcacttaaaaagcgaaagtatgggagcttaaaaatgctataccgcaaagcattagatacagagcgcatgacattctggagaccccaaatggtagtagaatatgattgatgtgaaaagttattctggagatcctaaatggtatattgccagtttgaaaaaaaaatctacaaatgatatcagagcgaaaagtttttgtagtttgattgcatcgattgtactggtgtcataagtttggaacagaggttctaatatggatttttggcctatataaatgaccatacgagggatttcatcctcaagagatcgaagggtttaatagttttggtttgaaattgcacaaactaaacggttttagcttctctgtgattcacaaactagaagcttgagactgtcactggtaattttttggtcattcactagtaatgtatgttgtaatgttgtgttcttgttgggaaattggattatgataaaatgacccttaagagtggcatgtcatatacctctatttatgattttgatttggaataatctaatggataccagttttataattccatgctcttccacatgatacttgctgcgatgccccatgtcagtgcgatatcagtagcttacatttaactcacataatcaattaatttcagttgagtccatttactgatgccccattgacattgctgctgtcatagtacttctgtcattatttgccaattcagtaaacttaggaagggcgctatagaacccatttcttcacttgtgccatattttatttcctgcaccctcttctttgcacttatatcgctatgtttttgtcactgaatttgggcatgacatactccctccgttcttttttatttgtcgtgttttagtttaaaaatgagctagccggcgacaaatatttgagaacggaggtagtattttcttttgaggcattagaaattaacttctgaggaatcatggttctgctgctctttgctgatgccaaatctctaacatatagtactgctaattggaacacaaactagcgaaccataggaatagtgagacatatagacatccgggttcttccatctcactgtcaaagattttatcatggcagatttgaagcatgtgttctgtcctaatgcgcattatttatctccatgcagtctgaagtggacgttgaagcgcagatactgaggaa

SEQ ID NO: 813 - DNA, 4301 bp, Zea mays
  Intron number 3 from transcript GRMZM2G046558_T02 (locus G RMZM2G046558) derived from phytozome v7.0 (chr-ID 8; pos 1 59256877 to 159261177 reverse strand)
attttggtgtgggtaaggaacgaaggattctaactaagataatattgctataagttttgcattttgtacaaatatatggtctcttgactttgcaaacttcattaaatgtccaacttgacaagttaccctatgatgatttcattatgccatcatctgcctcccttaattgttatttcacaaattcagcagcagcttataggctacactactctgcattatgccattatctcactacatatatatataaaaacttgacctgcgcgggggtacaacccttgggcattacataagaagaccttctcacataggtcgagaaaaccccccgaacacttgctgcactcatacacagtggcatcgtagcccatgtgagaacgaatggggctggaccttagacctgcactttggcgtgcatcagacattcagacgaggggattttgttaacttctgcctaaaattcgctcctacggggaatcaaacttaggacctaaagagtgctactcagaccacctaaccaactcagctagagacactttcgccattacctcactatatgatggtactttttttttaggcaatgcatgatatttgttatgactagtgtgacatgtataaggacgttgcactgaacagcactttcactagtccaatctctactaaagttaatggtgaaccatggcatgatagattgccacatgatatatgatttgtgtatgttaatatcgaatctcatgaacataaataccgttcaaacaaaggctaaattagtcatatattctatagtctactctaacttccatggagaatggttgctaagtgcctaacctaaagccacttccatggagaatgatatacatatacatttacttttttaaaataaaattaataacacacattaaaactgaataacaataaaatattgcaatatactcaactacataagttatattattacagcacagcaggtctcaagtctgaagtctgttatcaaagtctcaaatatagtagcctcaaatataggaaattaatgaaaggcattcaggcttgcaactcaggctcgcatcaagttcctatttctccattgtttcatttgttttattctcatccataacatcaagccgtagatcatccaaaccaaaagacacaacttgcgattcaggctcatcaagggagatgtcagcacttctagaatgccaataccaccaagtgaatcaaaagaatctcctcctacatccttgcctctcctgtcttgtacgcatcagttcttgacatatgcctctgtcatggaccttcggtccatggggatagttgtcttctccggcgaggttatacccctctgccgcaggcttggttctagggtagcagccctaggcgcttgagagagtcattgcaagggagagagattggtttgataatgatcttgcttgatttattccctgctgccatgcggcttataaatagccctatggctaaccaacttctcctacaaactctcaactaactcctactttcttggacttatctgatgctaactaactctccacaattctctcatctcaatcttattatctagccttatcccagctcgtctcaatcttattctctagccttatcccagcctggctgttgcctctcgctccctatgatgcccatgacatctccccctcccttgaggaccagctcgtcctcgagctgccatagacttacctgacatgacttaaggttaagccttttacatctcggcttacctttattatttaagacgaaaatacaaaataattgtggaactaaaatataaatttgaactgcagctatgtcctcctggatcccaaggaaagagctgaactgcagacttcacgttggatgaaaggtgaaggagaaaccaacccgtccttatgttgggtctgtccagcaccaaggcagttgcccgaatgaaggagacgaccctctttggccgtgcaggggggctgcatacccagatctcgacttctgcagggggttcaaaaagtatagacgagacctggtggttgggcgcgcaggctgcgatttggtgcagcgatgagctgatcagcaagtgcagcttccgcaccgcccgcctaacaaggaagccgcgcactgcggcttgcaggcgcaccacagcctgctcatgtgatgacggccatggggtggccctggaggccacaacaaggtgcttctccccacgaagggactgtacctggcggcgtgccaggaaccctcgcgctgccgcctgaagccgcaccgctgcttggagttccttttctgtcttctccttgtagcggtggaacatcacaacgaattgatcccacttctcttcgagccgagtgaatgcatctagagttgttgagggcgggtgggagggcgttgcggcggcagatggcgcggcggctggtggtggtgagggatgggcggctggtggtggtgaggataacctggagctgataccaggtgtcatggaccttcgttccatggggatagctgtcttctccggcgaggttatacccctctgccgcaggcttagttctagggtagcagccctagacgcttgagagggtcattgcaagggagagagagattggtttgataatgatcttgcttgatttattccctgctgccatgcggcttataaatagccctatggctaaccaacttctcctacaaactctcaactaactcctactttcttggacttatctgatgctaactaactctccacaattctctcatctcaatcttattatctagccttatcccagctcgtctcaatcttattctctagccttatcccagcctggctgttgcctctcgctccctatgatgcccatgacagcctcagatttcagtgcacaaagaccaaatcttcagcacgctctggagttaaggaatttcattggacactatggataaagctataggaggctgatgaatgaaggctaggcgtcaccaaacacgttcgttggaggtggcgcaaggtgcgggcgggtgcatgttggggcagagggagataagtgagcattacttgctgtactcaatattcatggtggaattaacaaaaaatcaaatactcccaagatacatattggtcgtgtattcgtattggatacgtacccgatacgcgatatgaggcctcagccacgttttcacacaacacagtgcattagtacatctttcttcacctatttatctgcagtgatcttgttatgactccaggcgcagggacattagtggctaggagggctaggcccacggtcaggccataggccacatgcggccaggagatcagctaggatagattagataaggattagctaataaaaaggagagattatttctagttagttggataaggattagaagagatctcatagctcttaaccttagatcagataagcatcagctgggatataaatacttgtaagaggtcatctgtggaattaagcagaatcagattattctggcttccctgagggagccaggagttagaatcaatctctcttgcccgcgcagcctaggtcagccacggcgccccagcgccgccgcccccatctccctcgcgcagctgttcatccttataggctaagggagatccctggtaggatccgcaatcctaccagatctacatcagcattttgtcgaatcattcgttacaagaacttatagaatttcaaaaggaggataaaaatcatgcaaaataacatttgggttcattacagtggaccgaactgggtaacctattgataaagtaacaatagaagcaacattcaatttgccagcagcccagcacggcttccatatctatgcatctagtgatctggataagaacactgcttacttcctgtagccctgatggctaatatatttatagttctagttatacagtatactattcatttgtgccttctactaattattgtgatcttgtaacatggttaccctgtgttaacctaggtagattttagcatatttgaaaagcagtgtgcagtgtcgcttgtttgtagtgccttgtttattctcatggtgatacagtagctgtgcatgatgagattcttttatgtgttttgaggaagagaagggaatttgcacccttattatagcaagtaggttataatagtgctttagtagtaagtggaggttcattacattctgtcaaaacattactgctgcaacattgcggaaacaccgcttgaattttgtatacactagcagcttggatgattttatttctgcacactcattcagatatcttaacatttcctttttgttactaggtgccgggttttatttga

SEQ ID NO: 814 - DNA, 7928 bp, Zea mays
  Intron number 6 from transcript GRMZM2G151237_T02 (locus G RMZM2G151237) derived from phytozome v7.0 (chr-ID 5; pos 2 11915371 to 211923298)
tattgctcgacttccatttgctactattgcttgtggtgagaatcaccaacaaatctatgtgacactctagcggagcgctagcatttatcattattttcttttacttattacaaacatcagtcgctttgtgaagaaccatttttcactttattgctttataccttttttctcgaaagcgcaggagagctgcgcatcattatattaagaaaggaaaggtccaaaatggaccgaattacaacaccaagaccaaaccctcaagcctcccccacaaggggaagcctgaagggccctacgagaccctatttaaagcgacaataattcccaaactgtctaaatgcttcgctcccgccttactccaactaatcaactcatctagaaacaacctctttgtcaaattaatggaagggctcactgcatcaaaaacagccctattacgagagagccacaagcaccaagctccaaggataatgacactattgaaacccctcctcttgcacctatggactcttttagagaccctctcccaccatgcaacaaaggactgttcagcagcaataggagtgaagttaccaaacccgatggacgacaaaatgagatgccaaaaatccctagaaaaactgcagttgcaaagaatatgctggattgtttcctgctcctgatcacatagggggcaactcgccgggtaatgtaaccctctcctctgaagtctgtccgcagtccaacatttattccttatagccagccaaagaaaaaatttgcatttagggggggcccaagtcttccacaatcgtttccaaggctcaaagaaaatggaccccaggaagaaggcattatagcaagactttgaggaaaactgcccagaagtcgtgtgtctccaaacaagcctgtccgcctcctgtgaaagagtcacctgtccaatctcatcccataattttaagtactgctgcagcccaagcatagaaagatgactcccaatatccctaacccaacgccagttgtccaaagcttgagcaaccgtccgggtcgagctgactctactgtccaccagacagacaacctctggagcaatatcaaagatagccttcccattcaaccatttatcaaaccaaaagagagtgctagttccatctccgaccacatgaaagaccgaaagattgaaaaactgtctcacttgctgctgaataggaagactcattccctgccatggtctggacggatcggttctttgcagccataaccatttcacctgtagagcccaacttttgaattgtaaattagaaactccaagaccgccatactttagaggcctagttactatctcccaaggaacaagacagcttccaccattaacattcttccttcctttccatagaaaacctctcctgagtttatcatgtgactaacctggattaggtgagattatcatcccctcggggtactgtagcatatatataggcagtcaataatatatgggccttatgggccttaacaccccctgtcaaactcaaggcggaagtggaggatttgaagcattgagtttgagtagatgaaactgatgttgtgccctagtttgtgcttttgtgaagaaatccgcaagctgtaattctgagggcacatattgaagatcaatggtcttctgatgacaatgagatctagtgaatgagacatcaacaccaatgtgttttgtgagttcacgcttcactggatcatgacagatttgtatagctccagtgttgtcacagcgaagaagagtaggcgagtcacaagaaacacctagatcagccaagagccaacgaatccagataatctcagcagtagtagtagccagggctcgaagttctgcttcagtactagatctagatacagcagcttgcttcttggatttccaagcaacaggggatgatccaagaagaatacagtaaccagtgatggagcgacgatctgtaggatcactggcccatgtagcatcagagtaagcatgaagctgaagtggggaatttgagtcataaaataaacattgtgtttttgtcccccgtaaatatctaagcacacgaagtaggtgcccataatgaactgatgtaggagcagagacaaactgactcaagatctgaactgcatgagcaatatctggcctggtgacagtaaggtaaactaagctgccaacaagatgtctatatcgagatggatcctccaaaggtgtcccatcagtcggacaaagagataagtgaagatccataggcgtggcaacagtgcgagtgtcactaagaccagaacgatcaagaaggtcttgtatgtacttggcctgagaaagataaataccattttgagtctgcaaaacctcaatgcccaaaaaataactgagtgcccccaagtcagacatttgaaattccttactcaggtacgtcttcacatgagcaatatggtctggatcatcgcctgtaatcaacatgtcatcaacatatagtaatagcaacgtgcggcctcgtgaagacacatgaatgaacaatgcaggatcatgatcactagaatagaaaccacaagccttgatgacagaaacaaatctctcaaaccaagcacgaggagcttgtttgagaccatacaaggctcgacgaagacgacagacatgtcctgagggaacctctatcccaggaggtggatgcatatagacttcctcatgtaggtcaccgtgaagaaacgcatttttgacatccatctgagagatactccaagaagatgaggctgcaacagcaagtaaggctcggacagtagtcagatgggccacaggtgcaaaagtctcatcatagtcaataccctgagtctgttgaaaacctctggccacaagacgagctttatatcgctcaatagacccatcagatttggttttaactttgaagacccatttgcacgtgataggtacaacaccagcaggtaacggaacaacatcccatgtacatgtgcgatgaagggcatttaattcatcagtcatagcacgctgccactcaggtataacagaagcctctttataagatgatggttcagcaatgactgcaccggcacgggaaaacccataacgttctggagctgcaatagtgccacggtcacgaagatgatacccctgattaaaaacaacatgagagtcatcattgttagtacaagtatcggcaacaggatcatcagcaggactggccgtgggattagagcgaggacgacgaatgtaagtctgagtaacaggtggtttggaagagtaagactgagatgatgtggaagtggaaggtggtgtgatgggaataagaacatcgggtgtagaaacagtaggtggtaatgctgatgaagtttcagaaatgggaggaaggctcatgaaggcggtagactctgtggaatgaaaagaagaatgagtggaagagttgtaaaagaagggtcggttttcattaaagctcacatctcgagaaatacgcatgcgacgagaagatgaatcataacaccgatagcctttatgttcagggctgtatccaagaaaaacacactcaacagattgagcagtcaacttagtacgttcacgaggtgataatagtacataacacgtacatccaaaaactcgaaggtggtcataacgtggaggagttccaaaaaggacttcaccaggtgttttgccagagagtttggatgacggttgtctattgatgaggtaaaccgcagtagaaactgcttcaccccaaaaatgtgaaggaacaaaagaagatatcaacaaagtgcgagcagtttctataatgtgacggtgtttgcgttcagccacaccgttctgtgcatgagcaccaggacaaagaaagctgagcaagagtgccctctgaagtcaaaaactggcgaaaattatcagataaatattcaccaccagaatcagaacgaaaggttttaatatgagtggaaaattgagtgtgaatcatgcgagcaaaggttttataaatagaaatcagctcagaacggcgtttcatgaaataaatccaagtgtagcgagaatgatcatcaataaaaatgacatagtatttatatccaccttttgacacaaaaggtgcaggaccccaaatatcagagtgaaccaaatcaaacggttcaacagaatgagaattactagtaaaatatggaagttgtatttgttttccaagatgacaacccttacaatgaaaattagactcaaccgaagtatgacctaagcaacctgactttattagagtagacaatctagagccacacaaatgacctagacgatgatgccactgggcaaaagacgcaacagaagcaagggtagctgaaaggacatgcgctggagatgtagccaaggaaggaagccgcaaagagtccaagatgtagaggcgaggagctgctctacggcgacggccagtcccaatcacttcccctgtgcgaaggtcctgtacaaaacaagatgagtcatcaaatccgacaaagcaattatgatccgtaatttgacctaccgaaaggagatccatagataggtcagggacaaagaaaatattaggtactgtaaagtgaggatcagaaagagaacccttatgagtaatgtggcatacagtaccatcagctgtctgcactgaagcaccatctgtgacaggtgtagtagaagccaactttgactgatcagacgtgacatgaaaggaggctcctgaatcaagtacccaagccgactctgaagtagaagcggacgaagtggcagcaacagcaactgaacctctagtagacggtcctggaccacgaccacgagcagcacgtcgtgcacgaaaatcagtcaacttctcaggaaacttgacaaagcaaagctcagatcgatgattggtcttgccacaatgatcacaaggcttaaaaacattcttaggtttctgggcagcagccaacacactgtgaggattaccaccagtagaggaaagtgagtgaagacgagtctcttcagcaagtaaatcagacaatgccttagccattgtgagagtgtcagagccctgaagtaaacgagcacgaagagaatcaaactcggcccgaacacccataacaaatttgtaagtgaagaacttctcaataaacttatgagccggacatggatcagcagtacaagcaggcaccattgatgtcaaagcactcatcaggcgatcaaaggctgagtaatactcatcaatgctcatatcattttgctcaataacatgtgtctgctgcatgagggtgtgtaatagagcaccactatcctgaacaaaacgctccttcaaatgagaccagatggatttagcagttttgaatttagacaaactcataatcatagacggtttgacgctgttcaccatagcagccatcactttaccatcattaagttgccacgttttgatatcagcagcattgcgacgatcatcagcaagaacaggtgccgcatcagtcaaatggaagagtaatccatgtccccggagtgcagtctcaacacagaaagcccactccggatagttttgaccatctagagtgatattgaccacaataacatttgtcgccatattgaattcaatggagataagtgaaaccaaacaaaccagaagagccgcagctgacagcagtccgacttggacaagttggcgaagatcctgggcagcagaagctgagatggacagcagttaatgccctgctgcagagaatcgagatcactggcagccacctgcgcagaagcagcgacagcagcaacggtgtagagttgcagtcctgctcggcacagaagtggcgagggcgcagatccggatcagacggatcagacagacagcgcagaattgctgacagcgcagatccggtgaaggcgccctgcagactgcagttcgactcggcaggcagctggccagccgccgagccggcggaccaccaggaaggagatggcgggctcctggcaggcacagcgacagcagcaacggactcctggcgggcacaggaagagggcggcggacggcccctggcggcggacgtgacagatccgcgcggggcgaccaagatccggtcctggcgggcacaggaagagggggagctcgatccacgatgaagcagcagatggggcgcagaccgagacggcggatccggcggacggtggatgcgcaggctggatccggcggacggcagacggcggacagcaggccgcgacggcggccgggaaaaggaggcccgcggccgcgacgacgagcggggagggagggccgcgacagcaaccggagaaggggaagaagctggctgtgagggcagcacagcgacggcgcgacggcgccgaaaaaaaattggatcagggttgggtttagatgtaaaccctaaccctaacctgctctgttaccatgtgactaacctggattaggtgagattatcatcccctcggggtactgtagcatatatataggcagtcaataatatatgggccttatgggccttaacatatcaatggacttgatcacccatttaggaacactcatggccataaggatataaactggaattgccgaaagcacatgcctcactaatgctgtcctaccagccagactcagcaaacgagccttccagttgggaagccggtcagcaatcttattaacccacaccataaaatcccttttcctcagctttttatcagagataggcagccccaaatagctgcacggaaaggatcccgaactgcattgcaagatattgcagccagcctgactctccagccctccacatctaattggaatagcaaaacttttacgcagatttgttaccagccccgttgcttcaccgaagcaatccaaaatcaatttaacacaattcagatcatccaccaaaggtttaacaaaaagcaccacatcatcagcgtagatcgagagcctattccgaatcccagctgcctccaatccttgtaacagccccctgctttcagctgccctgaacagactattaagaacatccatgaccatcacaaacagcataggagaaaggggatcaccctgacgaaggcctcgccgatgagcaatacgagcaccaggcgagccattaagaagtacttgcgtagaagacgtgaacattagggaggaaataagattccgccagattggaccaaagccaagatggacaagaatttcaataatgaaggcccatgacacggaatcgaatgcccttgaaatatctaattttaagaatagacccgcaatcttcctcttgtgcagcgacttaatagactgctgaaccagcataaaattatcatggaattgatctccctctcacaaaagcgctttggttggctgccaccaactcatgaagatgagggcccaacctgttggccagcagcttggtgaccaacttagcaaaactgtggatgagactaatgggcctataatatgaattatgtgtaaaaaaactcagccggtaggggaaagaccgcccccacggtagggaaaagaccgcccccatggtaggggaagccccgatcgagaaaggtcacgaaagctagtccccgtgcaacatgagggtcccctataggctagatcgtgcaacatgagggtcccctataggctagatctttactcgtgctttgtgccctctcagcccctacacgaggatgcacccccataggtcagtacatctcgtgtgaccttttttaaactcagcctgaaattcgctcccactgggatttgaactcaggacctaagtagtactactcagatcatctaaccaactcggctagaggtcctttcacatatggtgtgtttctaagttttatctagctttggctcatttaagaacatgttaggagaacagatttatactagaacaaacaatatattcattttcgttttcgattttcacacttgttacctgaagtcaaaatggcaaccggtaagtggtaatggtctctattttttgcagggactgctttg

SEQ ID NO: 815 - DNA, 6871 bp, Zea mays
  Intron number 1 from transcript GRMZM2G124288_T03 (locus G RMZM2G124288) derived from phytozome v7.0 (chr-ID 9; pos 4 832796 to 4839666)
cctgttcctgactatcgctacccctccacatccaggtatgtcgccccctccctcggtcgctccgcgttgttagagacgaccatacgttaggttttcccggaatactatttcgaatcggttagaatcgtataatttcccccaaaaagtccctagttaggctattgatcaccctaaatatcttcgttgatccgattaaatcgtataaccctccccggaaatattcgtttattgatccacccgtccgcaataactgtcgattgctgtggatctagttctgcttttgtggtaatacttctcctttacttcccgaatctgcaccgagcagtggccatggtgaagaagcccaacgacgttgccaaggccgcggcgacctccgccgacgcggcagccaggccatccaaggcgaatccgtccacccctcagtcggtcaagacctcgaagtttaagaagcggaaggtcaaggccaaccgccagaagccagcggtcgctgctgcagctgttgacgatgtcgccccggtaggcgcaggcactggggatggcgatgcatctgcatccgcggttttaccgcagccatccaatgttgctgaggcatcgcctgtggtgcaaacgccaaagtcgaccacttttgttgaggcgtcacctgtggtacagacgcagaagacagccactgatgctgaagtaccggtgcattcaccaatgccagccactgctgaagcatcagctttgtcgccaaagccaaagccaaaaccagctcatgctaatgctgatgctgcagctgcaatttctgtcagcaagggcaagggcgtgggtgctgataatagcgggggtgatggcagaatgaagagcagaaaagagagggctaggagtggcaaggggaaggaggttttgggggatggaggaagtaagggaaaggggaaggggaaggggaagaaggctgtaggcaagaaggaagaaaggggtgaccataaggttgcagggtttatatttatgtgcaatgcaaagactaagaaggagtgctaccagaatcgcttgtttgggatgcctggtgggaagattggaatggtcaagaagataaggccaggggtgaagctgttcctgtatgattttgacctcaagcttttgtatggtgtgtacaaggcagcatcacatggggggctaaaccttgtccaaggagcatttagtgggaagttccctgcacaggtaattctgctcttccatttcatagattcatttgcactgaattcagtagtcaggcgatgtattttgttttgagctgctgtacgtgtgagaataggattcacacatggtttcagtgtgctaaagaacagtggacatgggtggatatgttgttctgctggggctatgacatctatgcattataggtattggtcaatttatttagttttaaacctgtgctggtaaagctttagaaatgacagtagtaagaagtgtttatccttattagaaaaaatggtgttttaaaatgtcatagatggattccactatttattaaaaatagtatgttgctatgcactcatgtcaatatacattgagaaaatttgttgcgtgcttggtatagaggtgtcaacggggaattctccatcgggtttggataccccatccccatacccgtcatgggtataagattcatcccgtatccatcctcatcccaattcaggtatcgggtctccaatggatccccatccccggcaagaaaagcatggtcacattatattttatatgacattaacaaccacacgacacccaacaacaatacgtaacaaatagggctgggcattcggtagaatcgagcacttcggttcggtttcttgggtggaagggaagttcggttttggataaactgcaaaccgatcggtgtaaacaaaactaagaaactgatgattttcgatgtctgtttattaggttcggtgtccaccgaactccgatgctcctcgccatctgagcgacttgcacgcgcagtgcgccatcgcccgaccgtggcctataaacatgttgacttctttggttgtaagagcgttggcccgttgggctgaaatagccaatggcccatgtggtctatggacacatacagaaatgtaagagcgttgactcgttcggctcttttggtagttcagtgcatggagtcctagaatcgaagccgatgttgacagccggttttcacaaaaccaaaaaccgaagccgaaactgaataccgaaaaaaccgagatttcagttcggttcacgattttcggtgcaaaagtgcccacccctagtaacaaataaatctgtcatgtaacaagcaaaacattgtttagccatacaaaacagtaaaaacaaagtgacacgttctagaaatagtaacttaattaatcccaacacatacatgtttttgaactcatgcagagtatgaaaaatgaaaatgttctagaaatagtaacttaattaatcccaacaaatacatgtttttgaactcaagcagagtatggaagataaaaacttgcatctctcaaggtggcaaactggtcggcggggcggctgacgactaatcgcttgggttgacgagtgcttaaaagggttgggagaggtagggttagttgttgggcttactgtctattaggcagcacacctaattttaccagatgaatatttacccatgggtaattgggtttggattctgcttcccaaacccatacccaccatacccagtgggggaagaatttcccccaaatctgtacccatggggattaaaatctccctacaccctaaccctaatagagaattcccgttagatttacgggtatcgggtccccatcgacacctctagcctggtatatgtagttaaaggggttaattgtggttctgcctgtccattatcaaataatgcttcgttctgccaatccgagggcaacatttaaaaaggacaacagtacaacacacacacatacgtgtgtgtgtgtgtgtgtgtggaaaaaagcctccccttttttaaatttagtgtccctgtacattactctagaccgttagggttttgaatcgagaattaagcaaggactttattgctttgctgtttccaacaggtgaactttcgtatcttttatgctttagcttttttgcattagatcaaaatgctcttggtttgtagagatagatattttgtgctattcttttacttcatttgatgaagtttcttctctctctagcttttctcattatcttttattgtacaaaaaatagaaggctatcatattcaaggttattaaaacgataaaacgttggaacgctcatgggtgaaattttgacttttaaacgtttaaactttgtttaaacgtagttttaaacaacataggaaaataccaatacatcataatttcagacaataatatgtagttaaataccaaaacaaagaggttactggcttaccaaaacttcacccatgagttggattgaaccccaaaagtaactaatagactgggcccaaaagtagctaatggtctaaaatgcataaaacactgcgttttacagtttagaacgccaaaacgctaaaacgtggtttcaacctctaattagagttttgacgtttaaacgtagttttaataacactgatcatattttttgcaatcttttaagcctttttggataattgaacccaatatgagctagcccaccttcattcttctttttggttattttaacttcttaccagtggtaacatcatgtgaattaatgtatttttattgtctgtagatgcaagtatacaacaacttttagcattgatgtatctcattttaaacatgttaggacctttctgtttattaacatcattgccttatgctgatagacatgagcctggtgatgctttttttgagttcatgtgttatcctagtctagtatgatgcatatgcccttgcgagcaacttataaagatggatcgatttgtacctggtgtaaactcatttttggggcttagtaaggggtcttttataggtatttggtgccaactcatatctaggtcattttggtaaggcaacaaattccttataaggttgtggccatcaggtcgtgcatatggtcgtgcaaaaaactgttttgcactgtagattgcactatttacaaagtagagtttgaaataagagacgggatgagaaagattgccggagatagcctaacaaggcctcagaaattagctacctttcaaatatgattccaatgttcatgcgaaactagcatctttaggctatctccagcatagagcgcaaatgggcttgcatgcgtttttttcgcactcacgttcaacgattcacccttctagcagagtgtggatgtgaggacccgcaaaatgagcgctcatcctcccctacctcaaatctatgggtttatctctccgatgttctatatgcgcatacacatgcgcgctctgctagaagtgtccctctttttttgcgccctcaaattcaccttctggacgactactttgcgcatgcgcatgcagtcgctactagggatagccttggtgacatcaaccactagtaatgtttgcggacattggaatgtagttgttggtgaacacaacattgttagcatcaagatcctaggtagggtgtatgatagtgttaggaatagtcccacattgtgtggtgagggtgagaaagcatgctttataaggttgagggtgcaacccataaaaagctagctttttggggagtgttggcccaagagacctaaagcctgctgctatacgtgcgggcgcgtgtgtcgcggcccaacagcctgggtgggcgcgccgtgtgtgcgggcggccccgacggacacgccatgtgtcggcggtccggttccaacaattggtatcagagccaggttgacccagtgcattctcagacaaatctcggctcacaatgtgtgagggggagattgttaggaatagtcccacattgtgtggtgagagtgagaaagtatggtttataaggttgagggtgcaacccctaataggctagctttttggggagtgttggcccaagagacctaaagactgctgctatacgtgcgggcgcgtgtgtcgtggcccgacagcctgggtgggcgcgccgtgtgtgcgggcggccccgacggacacgccatgtgtcggcggtccggttccaactgatagtggtagaattgaatatgttgggatatggtagttgagttggtatgttatatagttgaatgctaggaattctttaatactaactgtgtttttggtaatttgtcccataatatttttcaattttgcttgaatatgaaaagctcatttttagcttggttgcttttaactagattttagactcaatttttcagattttgatgtcatgtctacatggttacttcttactcaattcaaattggaactcttttttagtttgagaaccattatgtagtatttagttgtttttacataataatgattgttccaactttttttgcattcctaattcgatgattcaaaggttgccatgagtaatattgtgtaaagcagaccaaagatttttcaagttttagtacgccctcgacatcctggagtgggctggcatgtctggctgcaaggcctactccacgcctgtcgacactcacgcgaagctctctgaagacgacgggccctcggtcgccgacgcgatggcctactggagcctcaccgacgctctctagtatctgaccttctctaggcccgacattgcctacgccgtctagctagtgtgccttcacatgcacacccacgagagccccatctcaacgctctcaagcagatcctttgctacctccgtgcctccatcgactacaacctactactttgatcctcccaaacgtcggagctcgtggtctacattgacgctgactgggctgtcttcctcgacacgcgccggtccacctttacttatgccgtgttcctgggcgccaacctcgtcttttgggccgctaagcggcagcccgtcgtctctcactacttggttcacagtcttgtatactatagagtatagaacctcaccttgtgttggaatggggcggtggttggatttggacaacttgagtgaattttggcttgaggccacagcaaactcggagaaacttgttggcttgcttgtcttgacaagtcaaagttaggagacaaaggttggttatgtgcatgacataagtttaatcaatgggtatcaaggggaatttgaagggcgtacccagtgccgtaggcttcccgcactgtgcggggtctggggaagggtatctttaagcgccaagccttacccgcataatatgcaaaggctggggctcgaacccgggaccttccggttacagacggtaggctctaccgctgcaccaggcccgcccttctatcaaggggaatttgaaaatgcctaaaatttacaattgctagactgtaaggaattgagatgtaggtgagttttgaaagcacacctaacttgcaattggggttttcaatccttagatatttattggcatttagctgacttcattaacacaaagctatagacattttgacgcagaattggatgcttggctgttgcatctctaaattttcccttttggagtttccatgatcaagagcaatgttgcccccactttggcctgcttcagcttttgtaaaagccaactcatagggtttcttagttcaatcctatcttctgcttcccggcaatattgcagatagtcgtagtatttagcagtacttgctcttttgcatatggagaagataaagcggaagatgttctaaggaggcctccttaaaagatgtttctgttgaatattcatcattactcttgtattaaaactatgttatatgtgttatgcaggttaagtttaagattgataaagattgccgtcctct

SEQ ID NO: 816 - DNA, 6465 bp, Zea mays
  Intron number 3 from transcript GRMZM2G080889_T02 (locus G RMZM2G080889) derived from phytozome v7.0 (chr-ID 8; pos 1 05569008 to 105575472 reverse strand)
ccagaagcaataaggttatgcattatgcttgttgtgcactggtatttttattttacatgcatatgtcgctattaattttcaattgtacattctctaccatgtcactgtcatgtgtgcgtgcccactagcactggatattagaacattcatttggattgatggtggcttctctctttttatcttgcttgtttggcctcccctgagaaataatgcgagtatcttggactaataagtgcatgaatacatgcctaagctatttcatttcatcatgttgtttttgtggcaagtatttgagatgcaatatgctcaatttttctaaaaaacaccacatgctcagtttttactaaacatgtcatatgctcaatttttctacaagcataaaagacctgtacaaacaccatattttactagttgggtttatttggtttgtcacaagtacacaaaacacacactaagcacggccaattttacatagaagaggatagtctactgtgttcttctgcactaggttaatagatagatgtatatgtgtgcagcaatcaaagtatgttgagataatcatattggattgtggttaattcattaggtgtactggctgactggccaatccagttgttgtctaggatgaaaaaaagcacgatatcaccacccattggattgacgaccgaattttttatattttaatctttttttcgaaaaataccacgtttagactttttgacaacttaatatcgtttttggaccctttgctcggtgtcatgggccatggcgccgaggtgcctgctgctgcgttggcctacgagggctccgctggcactgacgaggcacagacctcgttatggacgtgcgtgcggtgactgaacaagacaggctccagtctggacaaataaagaagtcactcgacaaccgcttgcactcgatccacaaacgttggggcctagacgtcttgtcacgtcacacttgatagcgatgtgatatgtcggggcagccacaccattgagtcgtcggtcgctcatattcgtgtctactgccacgaggctgtacgttgtttgggcattgggctttgagagggaaagctgataatagaaactaggtgagtgcccgtgcgttgcaacggagacatataatacacacattttatatataagtcactataatattatatgtccccgttgcaacgcacgggcactcacctagttaaacatgaattttgaattgatactgaaaagagtcgtctaagaccaagaagaatgagggtgtaatgttaaagaaaagtataagatggaccaatacaaagcaattttctaatcctaaaaatatttagataggctacatgcctcgctagcggctgtttcattcccgttgtttggatagcctgctggtacagatccagccaaacgtcagtggtagagctgttcaggccatttcaggtacgcgtgtttgtacaagctcatgcacacaacatcatgctgctgttgaataagcatttcatggcggaaagaaaacattagcaagaggtccagaaatagggatatataatgataaactggatctaagctgtcaaaaagcatttgattggtgaaccgacgcaccatgagtaccaacggtctcctttatgcgtccacaacgaccatgttttgtccaccactcaataggctgcaaaaataacattgtcgttgcgtcgaaaatggataaattggatatgtcaatggcgcgcagaaatacttgccttgaaccattttacgtcgtcgggattgtggaacatataccgcacgatcgatttcagtttcgagactctgtggatacctgcacataatatatcctggaaaactccacaaaacattacagtgattgtgtacagatagaaaaccaaacccctccaacggaacataaaagggtgcaggattctgcataagtaaaattgccttgtgaagatggatgcacccaagcttacatggtcagaacaattttcttcagaatgatccgatctggatccatactttttagcgaacctacagctacaatggcaggttgctcgccatctctgttcttcaaaactattagaggaagtggagggaaggaaattggagcatatacagaggcaacataaaacctgccatggtgcagaaatctctccatcttatgtttattgcagttgatgttgtcggacagcgactccagcgtggccttcagcgacgtcgaggcgtcgccgtactctggcggcggggcgttcgaccagccggccttcgccgggctcggcacggcgttcctggacacgtcggtggcgccgacgggctgctcgtctccccccgtgctcgagaccaagtggcagcacgggcggatacagtatccgttcccattcgactcgtacaaggcctgcaccggctatggcttcacggaggaatggctacggcggcacagcggggttcttctccgaggatcacgcatccagcctcaacttcaactggtgcacgagtggcatccaaggctgggagtgagaggagtttttgatctgcacggctggtgtaaaaaaaccgatgttacggtggcatttgtacatgcattgatgcatggaactggagtctagtgacctggcgagtgtggtgtggccaaagctagaggacatccagcgcaaaaggcaggaacaagagcagtagtagcatgtaacaataacgaaataacttgagccaggctagtaaaaaaaagaggatgtaaatgtagtacaaggtaaaaagaggctgtcataccactacgacactatcacttggatgcaatgcagcaaatcggcgacgagagcgtctgaagttggtaagcaggctgcaatttacggtgtcggatgaaaacaatagcataaatatacaaaggagcagtgagtcatcggcatgctctgcccacagtcgctgtacatgtcaggcaaccagctgacgcgagcgacgagcaaggctgggagttcctggaccatcttaccaactgcggcagcctacaggtcctcgcccttgacgacaacaagctcggtggccagttgccaggctccattgcccaactcctgagggagattcaagcactggacatagggaaaacccgcatctccgggtctattccaccggccatcggcgacctcatcgggctcacaacgttgggcctcgaatccaacctcctcaacggcaccatcccagcagggattggggacatgaagaacctcacgaagttggcgttgcaggggaaccggttgacgaggccaatcccatcctccatcagcgacctcacccagctactggagcttgatctgagcagtaacgcgctgagtgggttcatccccgacactctagccaacctgacgtctccatcctcaccaaccttgctcagctagcgctatccgggaacagattctccggtcagctaccagaagagctggagcattgctagagcctagagtttcttgatctggatttcaattccttccatggaagcatccctccgtcgctgagcaagctcaagggtctcaggagactcagcctggcgagcaactggttgtccgggagcatcccactggagctcggccacatgtctggcctgcaggagctgtacctgtccagaaatgatgagccgtcccggaggaacgggatgacctgagctccctggtcgagctggacttgtcctacaaccatctcgacggcagcatgcccctgcgcggcatattcgccaacactttcgggctcaagatcgcagggaacgcgggactctgcggtggcgtcccggagctcgacctgccccggtgtccagcttccagggacacacgatggcttctccacatagtggaacacggcgaagaagccatcatcgatgcgcgtagaacgccgccgtcacctcgtcccccgcgcacgacaacaccggccgcacggcctccacggaccacgtctgggatctccagcggggtggggcgacggacaccgtaagggatggggtttagggagctgagcagggcgacatcgttggggagagagcagcggcgttggggagagggcggcggcatgggcgtctggaggacgacgaagagcggcgggcagtggtggctcggatttgggggccgaggtgagcgacaaaacaggtggtttgaggagggcgccgatggaggggcacggatggggcacagcgcgtgaatgggatcgccgatggctgtcggcgggtgggggcgcgaatcacggacgcaacagctaggattgcgtccttgacggctgacaaaggagcggagacgcgaaccacgggcgcgagagcagcggagagcgcggatcgaggccgcaatcccgtctgcgagcagtgattccgctcgacacctcctgccgaattgccttccatgtagagcgcgggagcaggggatggtcacagagaaaggggaggtgcgggagaaggtggcggaccttccatcgacgctgcgaggacggcgggtttggagatctggcttccattgacggcgcgacaggaggtgaatgtgcgaaccttccgaggactgcgggcgaggagatttggctttccttccgttgacggcgcgggcatgggaggaggtgaggttgaggactacgggtttgccgttgtggcttccattgacggcgcggcaggaggaggagatggcggacgcaacggcgcggggcaggtagagagcgcgggaggaggggcgatgatggcggggtggcttgagcacgacgtacagggcgatgatttctgggattgtggagggcgcgctgtcgattgatggaagctgcggcgccatggatggaagccgcggctgcggcgctgccgcggatgcgggcggtttcctgcggggcggctgcgggttgcgccgcggggcggctgtggatggcagaacgctctgtgtgcacgcctacactgctaacatatagagtagtagagatatacattctcttcaatataaaaaataatgtataatagttttatatttctagccgccgtataaaaaattcttcatgaaaaatacagtaaacaataaattatatctaaataaatgtatatgcaacaaagatatgcaaatctaaactactgtccgggactcatttccaaatgctataggagtatttgctaagctagcagccatctctaaacattcatttacttttggtagaaaagatgcactgacactgcccatgccatcacaggaacgtgctgcccatgccgtcgtcctgatgctgttgctcggatttgaccgcagacgcctccaagtccaaggtgacactgtacagtacggctgtagtgtcgagggtgctgttctcggctcctttgatgtacgtagttccgggtcataaaactgcacacatggttccggcttgtgcgcctgacctggcacgctggcctatatcacagacctcggcgccaagatctatggtgccgaggtctgccacgtgagctgcaagttcgatccatgtacgtcaccggggccagcacctcggcgccaagatctgtggcgccgagacgtgttacctcggcgtcacagtttatggcgctgagcaacgggtataaatttggaaattgtttctacaggagtctaaatgtgaaatttcttcattaaaaagggctaagatgaaaaaaaatcgggattgacgacagccactccaagccatcttgcacattaatcagtactctgaaccctacgtaattacatacccccattccaaattataagacgtttggcttatttagatacatagcctttatgcacttaggtatatatcactgttcatctacatggccgtttagcccgtgtacaaaccgtgtaaacgctacacaatggcttaccgtgttcgtttaatcagccatttgccccgtttaatcaccatttagtctgtatggccgtttgccctgaataaatagacaaacggtacatgatcatttaaacgtttaggctaacattggtctatattattatagtaaaaacaacatatatagaaaatccaaagcgtcttataatatggaacggagggagtattttatttaagttgttgcggtatatttttccaaaagatatgttgggaagtcatttatttagtttcctactaggatctgtttctttgtcatgagcctgaattttctgaataacgaggactgccaattatagttcctcaaaagaaaaacttctatgcaatgtatatttcttcttgcatatatgtacacaggggcaagcctagtgcagtggtgagagctgtctcacttagtcaccagtttgcggctcgaagtagcctctctgtatttgcggagagaaggcttgcttcagtttattctttccttagaccccactcatgtgagagcctctggcactgagtcaatccctttactttctgatgcttcctcaatttttaaagaccactttctatgtacgatgtgtattccaatgattgactatcatattgttgttgatgttggtttctcattcttgtgcgtttgatgtaatacaga

SEQ ID NO: 817 - DNA, 7772 bp, Zea mays
  Intron number 1 from transcript GRMZM2G047042_T02 (locus G RMZM2G047042) derived from phytozome v7.0 (chr-ID 3; pos 9 6221957 to 96229728)
gctcgctgcgactgcgcgcctcgcacaacaccaaagtacggcctctgattgattgcgcacctttttcctcatcaaattttgttgctgaccttggtcttggcgtgtcgacgtgtcgtgatgaattgggaatgataccaacgtggttcaattagcactagttttccaacatttggaagcaaagagaattgataggactgtgtaattatgaaatatgaaaacgaaacacaaatttgtctgcgaatgaaatttggcagaaacaaggaccatatacagagggactttgtccagagctcacctgtcaggaacaacagaatcggaatacagggttagctgatatttagtgttgtacttgtataaatatgaactttaaaagttaaattgagctcttatctattgggaaatactcttggaatgctagaaaacactagtgggctagacgttcttgatttttgcgaaggaagaataaaaacacttctcagttctttctttattgaatggttctactttgtaagaacaccttcagggattgatgtaggtattgattattgaaagccatgagcccatgagacaacatttctttctctgaaagtatgttcctatgcggttatgtcagttctactgcatttaggctgaaggttgttgagggtctttgcttctgtggtgtgtcagtgtcagtgctctcttactcgtggtatgccttcacaagttgtatgttgagagctatttccttgattccacagcatgttggatcatggacactgtaaacaaagttgctgtcgggccatatgttcatttgagaatatcaacgtttactgttgaaaatgtactttgaaatagtaaagtgtgtacaattcactgacaatttccggctcatgaaatgttaacaggggattggagagcccctgctctatgttggaaatgtagtgggaagtagttatgcatgctcaacatactgatttaactgtcatgttttttcaaatactcatgtcatgctaaacaaagttattctattcattaaatagctgatccaggcatataggtagaaaagcaaagaattgaaaatcatatactagcttgaattatgtggaatctttaattacatgtcgttctatcaggagtggttcaaaaggctgaagaactgaatgctgatatgttacctttactccttgagtaagtacgatctttgattaatgggaacatgtggttttgttacttaaatactggtccatataccatacctatcatgtcttgaaacatcagtttggtgggattttgtgattctctagataagcggtgaacttgatgcaaactattgtttcaccacttttctaacaaagctgaatccaagttcataaggtcatagatcagctcaggaataccataagcctattctctattgtaagtgcatgcggttgcagcatgttttagttgcctgtactttatccttactgtaaacttcagattatagagacattttaggtctgtctgacacaaattattttccatgttatgtttattttctgctgaaaattgttatgaaaattttcatagtaggagttcagaagttggaaataacacctgttgtttgtatatggctccatatagcagtaccatgtgattttctgaaactggcttgtgtttcagaactgccagactggagagcaatcatattatattcatgtcggctgttcagcactctgtttatctatgtcttgcaactatgaatatgacaaatctattgtttcttgcattcaattggataggtgctttcaattcaagtaccacagtgtaaaggtgtgttctattcattgagatgttttggttaccactgtcaatttgtcatatttcctaggatgaaaattttaggagtattttctatatttcattttatccattcattctatatattatttctcttcaccttatctccatgtgcttcctcatgtgttttttaatcaaatctgaaataaatcatatagcatatcatgtaatttgtaacaaaagaaggccttttcacctgttcttagcatacattagttatgtgctgtacctgcaatgtggagttaacttctatcaaagtgaaaactttgaatcatggatacttatcagttgtgaagagatgatattttggttgttactgagctttaagttcaatttttttgtactaaggttgaatccactggaaaaccacctcattcttttttgaaaagagtactgcatgcattaggatggtttctcatgtaaaaaataactgttttctcccttttctacttggacatctcattgacacctctggaatgcacaataacttgatagtttgcgtcatacaatgcaaacaaataaggtcaagaatttacctgtattaaaaagttcattttcacttcttcaacgggtgtattgttcattcatcttgctcccgatctttcgatcagtggaatcgagtgtaaagctatgtttcctcactcccattaggatataatgcaaacaaataaggtcaagaatttacctgtattaaaaagttcattgtcacttcttcaacaggtgtattgttcatttatctcgttctgcaatatatttgtgttcaaattgcaacttctttatgggccaccaaccaaaggaagaattgacatttcttgagcccatgatttccatggctccaggttaatggatcctataaaaaaaatgcttgataggccatcttagctgaatgctatccatctctgtcttggcctgaaccagtgatgcggcgggagaaccctgaagcaagtagctagcagtagagtgtgtgtttgaatcactgttttcaagtcgtccgattaatcacgattaatcgtccaagtcggtttggaccaatcacgattaatcgcccaagtcgtccgactaatcgtgactaatcttgattaatcgtgattaatcgcgattaatcgccctagtcggtcagccagaacgactagcaaatcgtccgacttgaaaacattggtttgaatgtaatggcattagggcgtgtgggccgtgtagcttggtccggcccagtagagtgcctataaaggctagattttttactctctaaacaactaagaaataacataattcaaaatatccctacctcgcatgcatacctgagtccttcaggttgttcgtggcaactctcctcgccggagttaacctcacgtcgcgatggcgacgccgtgggcacggggaggcgttacagtggtatcaaagcctcttcccttccttggcgtgggtcgtgtttggtcccggcaattctcggcgagggcgcagaggttggagtcgtgtgctgcagaggttgcatacatccctgggtggaggagcggctccggctttatcgctacggtgcccactaccacaccttcggttcagtcgcggctcctgctagaggcgatggtggaatggaggaaggagaacgaggtgagatggaaccaggtgatgaatcggttggatcgtttgactctgttggcttgtccaaggatggagacagaactggaggtgtcgcggttgaggttggcagccatggccatggacatggaggtggagcctgaggaacggggttggggggatccacgatctggagaacgagggtgtcgttgtggacttgatgcacaggttgatggaggtatggttcttcctgtgtttgatgaaacgcctcacaatggcagcgaggaggtgattgccctgttctctgaaggttctgattcctcagtgttcgatgaaatgccattggagaatgtgatttgggatgaggaatctgggcagcgtgacttgttggatcagctagcacaagatgaggattacttagttgttgccgcgatgaaaccaactgtacataccatcattgtggacaagcagttgcagtatgggctcaatcagggctgtttcgagatgcctgccaataccgatgggtctgaagatttgttccaaaaccatgatgctgttgtctcagatgtcaagatcattgaggaagatgaattcatactcactggaggcaaagatggggctgatagggagatgccacaggcggatgaaaccagtgaagaagatgtggaagattacctcgctgaatctaaagaaggggctgaggatgaggtgctgcaggttgagttgacagatggtgaagttcagtgggatgaggagttttcatctgacatagaggcttacttcagcacacagttgtgggaatgggatgtctaattggtttcaatcaaggagaagtgataccggtcatgacacaagcccagaggtgccaccctttagatccattatatactgctgaaattgcagttgttatagtaactgtaagaagtaagaactactggaagaactcctgagggaagatacaacatgcactgtgttgaagttgtgctgttcgagtcagagaagaaggttgtggcattagcggattcctactcctttccacctttccagccattgctgctccctagaagcaaaggttctgctgtcagaccaagtaggttacttcctaggaggaccagacttgttggctacaacaaacaatccaatgggactagcatttggatcgtggaactatctgaagtgcatgcagttattatggctggaccacacagagggaaggtggtagcctctgaagttgttccagatgttcaatctgtaatggatgctatggattatgctgaaggtgaggctacactcaacaattatcctccatttattgaagctatgaagggaaattctaatgtggatttggttagcaaaaatatgccaacaaatgtgaatagctctcttctggaacttggtggcatggtggatataatattcggctgtgatcatggcttactagatctcagtttggtagatagtgccagattatgcactgcgatgttcttgcaggtcaacagtaacttgctgctgaaagaacatggggctgattttggtattgtcttgtcaactgctgagtgcgtggcatgatgcttatccccacaaagtcttaaccaacagggtgaagatagtttcagcattatcctatatgaagtatgtactggacagaagatgagatgtgaatgcaagtttgggttgctctttgatgggatgcagaacaagggcagtgttcgagaggtgatacttgaactaacacaatggtggctcaatgctgctagtctaggaaacaatgatatggaagttcagttacaacctgatatccaaagaaaagccatgaacaagttaatgggcttacaattcataatggtgtatgagaaaggcaaggagaatatattggctgatgcattgtcacgagtgggtccgtttatggctctgtattgtggcattcgtttccaaccagtttggatacaagaggtacccaactcttcgatgactgactcttatgctcagaatctgttgccaagagtgaccattcacagtccacatggagttgtgttctcagtacagcagggcaatattagaagactccatcagctttgggtgggcagaatttcagcactcagcactgtgttgatttcaacctttcatgattcaactgtttgggggcattctagaggggttgcatcttaccttgagatggcaatgggtacccggtatgtaggtaggtatggaatgatttctatatctgcgggtatgttaatgggcaacaacctctacccgttaggtagatgggtatgggtgggtactacccatacctgcataaatatacccatataataccactattattatctaataaagtcaatcttagttaaaataaaaccttttttcggctattgtttattaaactatcgaattatgtaatcatatggttttttatacttcaagttgaaattatttttgtgtatttatttgacattttgagtgatcggagtattataatttgagatcttagcgggtacgggttacccgacgggtaaaattacccgcgcgggtacgggtatgggtaagattttatactcgcgagcgtatatgggtaactcgacgggtataattttttgtgatcggtatgggtatggaatgctactatccgacgggtatatacccattgccatccctaatcttaccatatagtgaagagggtgttttggtggaagggtatgaattctgatgtggagcaattatttaggcattgtgcaactagtcagcaggctaaaggatagcagtcctttccctctggactcctacagcctctttaagtaccagagggcattttggaggacattacaatagattttgtggaaaagctacctaagtcgaaaggctatgatactagcttattttggaagcaccttttcacattgatggatggcaaattgtctttgaacatggcatatcattcacaaacggttggccaaagtgggaggattaaccaatatttggaaatgtatcttaggtgtgatgtcaatgataattctcacgagtggaatatttggttgtctcttgccaaagtatgtttggctgctccaaattttaaaggcaatgaggttctagtgtcaactgattgggagcagcagaggactgtctacagcacaatgttgcaggaacagctgtccagagctcatcagcgttgcacagaggtcaggggttactctaaagcgagttttgatccatggtcgggtatggcacttgagttttctacctggcggacttcaatgttgtgaagagtcattttcttactgcacttgcttgggggcaagcaagttctggcgaaggggcagatttcatggcctgaatcagtgatgcagcgggagaaccctgaagcaagtagctagcggtagagtgtgtgtttgaatgtaatggcattagggcgtgtgggccctgtagcttgggctggcccagtagagtgcctataaaggctagatttgttactttgtaaacagctaagaaataacagaaatcaaaatatccgtacctcgcgtgcgtacctgagtccttcattttgttcgtggtaactctcctcgccgcagttaacctcacgtcgcggtggcgacgccgcagccacggggaggcgttacaatatccagcacatctccacattgtatcatgttggagctccacctgtattactaaatcccagttatcaagatatttgaacagggcagctaccgatggagcttcctgtatatcttgaaccagcagcgatcaactgaaacttcctgtaccatccactgattggttttgcataatatatgcgggcaaataaatgtgggccaggatcagcagtgggctctcccaattactgcaactattctctttttcttagatgttactcattcaaggttgattttccgagtttacacattgacctgtattatataatatcatcatgcaatggtcatataatgcattctagacttgatttggttttcgatttcgatctgcctactaaacgttataacagtaaagatttaccattatatgaggtaaatatagtgttgaatctgattcttatcttatattcatgagatctctgtattgattcctttctcttttaaatatgagaaattgcacttctttgctaatactccctccgccccaaaatataattcgttttagactaatgatacattcattaagtaacatatgaatgtagtttgcatgtatgtctatattcattatcatttgaatgaatgtggatgaaaaaagtggtctagaaagaactatattttgggatggagggattatgtgacatacacttacgttactgcataacagatgttaatgtgtctgttttctcaggagcaacaaggagaagtggcaattactgcaaattt

SEQ ID NO: 818 - DNA, 1408 bp, Zea mays
  Intron number 5 from transcript GRMZM2G425265_T01 (locus G RMZM2G425265) derived from phytozome v7.0 (chr-ID 3; pos 2 14875817 to 214877224)
gtgttgttttagcaagtcaactaggaaaagaataggtaaattaaattacttccttcccttctactgtgtgagtgatttcatcaattggatgccttgctatttaacctttttcccaaatgtggatttatataacatacaatgctattttcagttttagattgatagaattgactttcaagaaacacctctttacggaatcaatatgataaaatacattgacatttaaaaacactaatttccattgcccacctcgctacttccctcttctctccctcgctccctccgtcttccttgtcactccctctccaccggcgctacagagctctctcccacccagtcaccctttacctatccagatctcctgactggttgcctcgactgaacctccctcagagcagaggtcgttcactcccttctccagatgaaattttccttttgtcgtgcgaactgagaatgcttctaggatcatatatctcatccaacaacaaacggttgacaaggtcttagatgtaaactacaacctgcagatcacatgtaaactgcaagctgtcaagttgggaccatatttaactacaaattttagatataaactgcaacctgtagattacttgtccaggaaactgaaaactaaaaacatgtcaagtttcagaagtgttcctgtaaattgaaaacttcacagaaactgctttatacaatattgatagcgagttgcttgataggcaatgtgatgttctagatagttcgtagtagttagttgttgtatggttcatagttgtatgccctaggtgctagatgttgtaaggttaaatgtgttgccattatctatgtatgaacatgatttgtttctatgaacatggtcagtttctatgataaacatggcagcatatttaaccacgaaccaccaatatttaaacacattagaggcatgactgcaataatcaagaaaagtgatatttcaataaaatataaggaaagtaacaagttctttattaaaccagaaaagtgatagaaaaaaatgacttgtaactattgtttcataacttgcataaattaattgttctgtctggggttgctgaccgcctgaccatcgcaccttgatattaggatgccattcgtaaatggtaatgattgctaccatgcttatgacaaaaatatgaatacctttatgatggtgtactttaaagaatgtgcccctgttatcctggatttttttttctcttgtttaacatagatttgattctaagttgtagaaagtatgtatcacatctagatagtgtttcctgtagaaaattttccctgcactgattttacttttcactttttagtcttctggtttataacatacatttttcagtaactatctcttcttgcagcactggttgcactgtacctttaccctttcttgaac

SEQ ID NO: 819 - DNA, 32340 bp, Zea mays
  Intron number 7 from transcript GRMZM5G874366_T01 (locus G RMZM5G874366) derived from phytozome v7.0 (chr-ID 9; pos 7 6641803 to 76674142 reverse strand)
tcctgatcttggagatcatcacaggaaagagggttgtaagcttccactgtcacgaggactccttgaacatcgctggatatgtaaacactggtggttaccaagataattagagacaagggggcaggttgatgtgcttgcaagtatctgttgcagatgttgttcatgcctgatgctgatgccccctttttcatactgttgtgtttggatggtgtaccacccgtgttttacaacagtttggcctttggaattgctactgctaaaacttcgtttctctgagaagaccttttgtttttgcattcccagccgagggacatctaagtacttgtattattacgaaatcttttcttagtataacacatatttatacataagttatcatggtattatatgtttccgttgcaacgcacgggcactcatctagtcatatattaaagagataagaataaatataacaccttatctaagccaaaagattgagaaatgtatgaattacataagagctcgaccctattttaataggtcgctcggtcacttgtcctcttttagatagcgatgttgtactatgtgggagcgctgcgctgcatggatttatgttgagttgggattatgtggtttctcaatgcccatttgttaggcgagaagcaggaaagagaaataggcctacgcgcttcgcacgtaacaccagtagaaaagagctcaaagcctgccggtgtgttttaatttttacaggcagtttcagttatcaagcgccagtgctatttctagtggcagtttcttaagaaaaccgtctatagaaatcatatttctacaagcggttccttaagaaaaccgccactagaaatcttaggatttatacatacggttttcttaaggaaccgccactaaaaatcgatttctagtgtccgttttcttaagaaaccgccactagaaatcatttttatcttgttttttagtttttcaaatgacctcgtatgaaaaaacaaacataaaagttgtagatctataaacgttatgaaactttgtagtcgataacttttttatttgaaaaaaatggctctaacaaattgcatctaaatttgtcaaatttaaaatgcaactttgcaaacaaactcagatggaaaaagtagcaaaataaaagttgaagaacttcaaaagctatgaaactttatagtcaacaacttttttgtttgattttgtttacaaccacaaatagtcaatttatacttagattgttctaatacgttggcaacaaaactgcaatatagacataaagtaattaatgggcgcgtagccatgaattttccgtgaaaaatgtcggagacggacgagcagggcctggatcaggcctcccataaaagaaataaatttttactatttttcaacctcattttatgttttctgaaaaaagattttcgctagcggttttattatctcgaccgtcagtggaaatcgatttccactggcggttgtcagtacccgtacccgcctgtacaaataattatttgtactagattctagcactaatggtttaaaaaatgccagtgcaaatgggttcacaaccgcctgtatagagcttctctttactagtgtaacacacgacacatgaagttgatgctataatatagtagagaaaagcagcatggaccctcaaaagcgtcagacctagaaaatcagtcaattttgttgctcggctaggctgacttttacatgtttttaatctattcatttctaaattattttttgaatttaaaaagctttctaaatatgttttatagttgtttgctactaggataagacatgtatcctctttatacatgagaaccatagttgattagggtatccaacatccaactataaaaaaccaatttaatgccttttttcaaccacatgttattgttcattgcttgatccaacgattaagaatgacactttacacgtacaggccgacctagagtaactagccgacgttcttgctgtaccaaagtccctccatagtgagggcttcgacgaaagttttctgttgatttccataatgcatgtatttaccacatttgggtaagtgagttggaagttatgaatgaaacaatgtaggtatagaaatctatcctcagaaaaatatagtttactagaggttatgtttgtaagagttttattttagttttcaaatatgaatctgtcatgagatggtttatgatggtccatttgttgaataaattatagtacgaagggtggcgagagcatgacgcgaggatttcgtcaaggttaaggggagtttaatgatgaatcacttgtcataagatcctatgaatgattgttcattttgaccctctagattttatgattatatttgttagtgcccctagatatgggtagcctaggcgcaaaaaataaaataggcctatacggagaatacatgctatggaccacacctttgagatggattaagatggcaagaccccattgcatagtcattaatatgcatggttagggcccctgccacgcgacaagcgtaagtggggcctcgagtccttagggtgggcccctcatggtcctgctccactagctactatatggaacccaggaaatcctagcctcctgggctatagaagcgccacatgtcacctgaactgccacagcagattcagatggaagggctctaaaggtgtcacgtgggccagggaacctaatgtcctcaagagccctatgcacctatactctatgtgtgccacatggctcccagacctccgcaatgacctcggccagggggctccaagggcgtcatgtgggaccgggggccaaatattcctaggggctccgggggtgccacacatttggaccgcccatgctgtgtacctagtcaaaggagttaatgagggacaggagacttatgaaacaatattcgatggaccgggtgttggttaaaagggaaatgtgccatatggacatttctacctgttttggtgattaagtgttcaacacaccacattggactaactactttgatgtgagtatgagcacatgttcaagttaaggaaaattgaaggcactgagtccaaatgagcaaatctagaggccaaaagtgcaactttgggcaaaacaacatacacatgaggtttaagtgtttaaataagttggacatatcctattatatgtttatagcactttggtttggctactaactcatttctgcaagaaaagtgttgtttggacttgggtttagccatattaaaaatcctggtgaaactatagaaaagaggtaacttccccacacttagtcaattgaattacatgctaattatgtttgtctaagtcatagggaagccctcaaagaaagccaaaaatgtttgtaggagataggctccaaagagccaaacttggtctggtctgtgtcgcaccggaccgatccggtggtgcaccggactaggactgtgtgacctggccatactgctcgatctcgagaattttattataaaattaatcgggccgtgaatagtactgatccagtgtgcatcagactgcttctccaatagctaccccgatgatcaatggctagctgacgtcactgaacggtccggtggtgcacagacccggttcggtgccacccaactaaggaaagacacccatcagatctcagactaggggcacatggacctggtccggtgcgcccgcagatagcctagatctgcatttttacaaacaaggatgcaacgactcctcagccttttggggctataaaagcagcccttaggcatctccatttagtacccaagtaccccaagagcacaccaacactctgacactttgcaacaaagtgttctagtgatttagtgagatctgagtgacatttttgagttgttcttgtatatttgtgacattgtgcactcatgatcttctttctttcttgtgttgttgtgatttgctcttatgtgtgcactttctctcccgaccttactctaagttgtaaatgtgatcttgtgtaaggctgcaagagactccaacttatggatattccttgtgaaacaggaacactcttgatataagtaagaactatggcactcaagtttgatctatgtcttttcttgatgagaagagttgagtgcaacccttgtccaaaggaggacatcacaacgtggatgtaggctatgccaaaccataggataaaaatcgcgtgtctcacttgtcttttacttcttgcaattttccttcttcccaagttctctctattcacttgtggtattggtcttagcataattcatatcttggaagggcaatcaagtgaagggaacttttctatcttcttctcgtcccaaacttggttttagtttatactaacttcattttaagaccgattttgtattgttttaagtcatttttgcagcatcacatattcaccccctttaggtgctctcaattggtattggagccgatctcttccaatgggtctaacaatccgaagagatggctagcaacaacgctaaagggaagggcaaggtgaccgacgagaagaagtagatccccatcgacgacgatcacaaggatgatgtacccatcgactttggatcaaacaagaaggagggaaagaggaggaagcacatcaagaatattatgtactatgacagcgacttctcatcacacaaggacaacgatgactcctccaaaaagacagctaaacaaaattactcaaaaaattcttttaattattcttgcattccttacaagttgaatgcacatttgctctctattcctcttggcaagcctcatttctttgatggggaggattattcatagtggagctacaaaatgcatggtcatttattttctcttcatcctagtatttgggacatgatggaaaatggaatgcatattctagatagcaatgatgagaactatttatgttcaagaaatgattcacaaaaatgcccaagatactactatgttgtgagcatctttatgagggagaaatacaacaaagtgagcagtccggacaatgcgaaacaaatttgggacacattgaagatcactgacgagggcattgatacgatgatgattaccaagatggatctcataaaaggtgaacttgggaggtttgccatgaacataggtgaagatccacaagaaacgtaaaacaagctcaagaccctgatgaaccaaatctagaacaatggaagcacaagatggacgaatcatgacattgtttgactcatgctaaggtcatttactgttcttgattctaatcttgtaaattgattcgttagaatcccaggtagaccaagatgacacctgaggagatccttggaaaattcgtaaacaggagaatggtggcaaaggaggctagatatatcaacgacatcgccaacgggagcctccccaactacaacaactacaacttgtcgctctcaaagcaacaaacagcaaggaggcactccccgacaaggtggcgcaagttgaggcggtcagcctaaatgaaggggagatgtcgcttgtgatcaagcatttcaaaactgcactcaaggggcgcaaggacttctccaacaaaggaaaatcaagggagaagcgtgcctacttcaagtgtggtaagtctagtcattttatagcacaatgtcttgatactgatgaccagatacaagacaagaacaccaacaggaaggaaaagaataaattttacaagaagaagggcgaggcacacattagtaaggagtgggactcagattgctcatcctccgactccaacgacgaaggactcgccacttgtgccttcgattagtcaacgctattcccaatgaacgtcatacatatctcattgctaatgagaagaaggtatttactcatgatacacctaagtacacttcttctagcgatgatgaatctgatgacgatgatatagattatagtgatttatttaagggatcaaaagctgataaaatcaatgaattaattgatgctttgattgagaagaatagattaatagaaaagcaagaagatttaatctatgaggagcatgatatgtttgtagaggtagaaaagtcccttgctttagaaattaagaagaatgatttgttattcgctgagttgtcttcctgcaattcttccatttctagtctttaaattgccaatgataatttgagaaagaaattggatgaatgtcatgtttctagttcttctcttgagcatgtatctatttccaatagttgtaaattttttgatattgatgcttgcaatgatcatgtctctaccattgttaagttgaatgatgatattgcaaaactaaatgctcaacttaaaacttgcaaagatgaaagtgataaaattaaatttgcaagggatgcctacaccattggtagacatccctacattaaggatggtcttggcttccataagggagccaaagacacaaagagccataaggccccaatttcaataaggagaaggggaaagcgcctatggctagtagttcacattcttgtcataatagtaagaaccatgtttatttatatgctcatgttaagaatgtttgtcgtaatgctcatgatgcttatgttgatcatattgtttatcctgcgcgttatgatgttgtttttgcttatcatgccatgatcgcttctagttcatcctatgctcatggtagaagtagacctaggaaaaaatgttcatcatgctggttctcatgtgcctaaggctaggaatgcatctcatggtcattctgtttcatatcgtacgtttgatgcttcctatattctttattgcaagtctggtcatgttgttgcttccaatgtggcacctaaatgcaaaaagggtaagacatgtatttgggtaccaaaatcttatgtgactaacctgacaggacccaacactagttgggtatctaaacccccaagcctaaattaaccttgcatgtttatgcatccgaggctcaggttggaccattgatagcggatgcacaaaccacatgacgtgggagaagcgtatgttctcttcctacgccaagaacatggattaccacgacacgatcatctttggtgactggaaccaaggcaaggtaaaggggttgtgtaagattgccatcactaccgagcattcaatttccaatgtttttctggtagaatctcttggctataacctgctttccgttagtcagctttgtcatatgggttataattgcttatttacaaatgttgatgtaacagtctttagaagaagtgatggttcattagcttgtaaaggtgtactagacgacaagctttatttggtagattttacaagagagaatgctgatctagatgcatgtttaattgctaagaccaacatacgttggttgtggcatcaccgtatagcacatgttggaatgaagatcctccataaacttataaaggaagaacatgtgttaggactaactgatgtctgttttgagaacgacagaccttgtgcaacttgtcaagcaggaaagcaggttggtacaagttatcctaacaagaacgtaatgacgtcatcaagacatttggagttttttcatatggatctctttggaccctttgcttatcttagcatcggggatagtaagtatggtcttgttatagttgatgactattctcgcttcacttgggtattctttttacaggataaatctgaaacccaaggaactctcaagctcttcttaaggttagctcaaaatgaattcgacttgagaataaaaaataaggagtgataacggttctgaattcaagaaccttcaagtggggaaataccttgaggaggaaggcatcatgagttctctgcccctacacaccacaataaaatggtgtggtgaagagaagaataggacacttatcgacatggcgagaatgatgctttggagagtacaatatgtcggatcggttttcgggcggaagctgtgaacacaattgtaatatcccaaaaaaaatgttgccaaaggttgatctttcggtgcgtggatgtggggaaaagggttgtggggccgttggatgctaagtcggagtcatatgtgggcgtcgcttcatttctcccgcaaagaaaaccctagtggtggccttttcccccttttgcccctacttggccgccacccctttcccccccccctcccacactttggccgcccctctctccttttccctttgggctggttgtcctctcctccctccccccgtgcagcaaggatcgagaagaggaggagcacattgagttgaaggggaagagaggatcaaggagatgttcttccccatctcttcttgcagaatttcttggggaaaccctaggtatggatgagatccttgttcctccctgtaattatgtgcttttggaggttgtggatcatgggaattaaaggattagaggttggattagatgtggggttaggttttgatctcgaatttagttttctgcagaatggcagattcgacagtttctgttaatcccagttttctgtggtcttagaggcctcaaaaaaataaaaattctatatataagtcgtagataatttgtagatcgttccgtggccgcaaagaacacctcaatcggacatccgatcagagagttattgcagtttgattataacattttttcagtctcttaattctgtgcagaatctgttctcttaagatttaggcaattttatcaacagaattaaaccttgggtttgtaagaaaagatgtagataatttcataggctttccagattgttaaagagtgcattcatatgaattatgaaactccagttatgtttgttttactgtggctgtttctgttagcctgacagaaatgagcgggtctgttcactggtaggtttcatcaagtaaatggtcgaattggctctcccagctatggagacttttgtagagggataaaagttcttattttcagaagaatttcatgatttttggttgagtagtttgtgagatatcgaattttgaaagttaactatgctgctgtctaaaacagattcagtcagttatcttgttagatgttttagaacttatagatggcagaatttaattatccatcgaatatcaaagttgtagaatattttgtgtagatactcatggagtatttgtttgatatcaccactgttataattttaaagatacaaaattaacaaacaacattgttgttgtatggcatgtggttcagagtgggaggttttccaccaggtcttggtttcagttgtaggatcgatttgttgattgttggcaaatgtttgtgaaatatttgtactaagttttatgcccgctagcaggtggctacactccagatcatgcctagtacatttttcttcttcgatgaaggcaagtgaatgtagcggtggttgcttccgttctgacatgttatttttattgcctacactctaatattcagaagtattggattctttcataattggactctatggtgatgctttacttgcttgcattatactgatgctcaatcatatattgatgatgattatgattcgagtatgactcataagattaattcacacccctgaaggtaaatgaagtattatttgaggttggtattgtatctgaaggtaaatgaagtattatttgaggttgtattgtatgtgaaggaagtgaagtatattgataaatgcaacatgccatatacattgcatgattcacttgcatctgaagttggtcgtgacctatggtctgaccgtaccggtacaacttagcatcgtacgttgcccgaggaggggtacgatgcggcttcatacccttagaggtatgaaggcagaggacatatgcattgcattcatatgcattcattgaagtgatattttcatatgatgtggttttataccctcagaggtatgaagacagagtacctacactttgtgttcctatgcatacattgaagtgatatttgcaggtattgttgacgcacggaagtgttatacgaactattgtggttgtttaaggaaatgagatggtattggttatattgagactactgagttctatatctacaagaatttctgatcttaattgtgattcttttaaaatgttgattaattcaatttgtggtttaaatatcttgtcaaaacaattcgcttgctgagatgtttcatctcactcttgcattactcaatgcaggtgcttgttgctcatcaagggaagtgggaagtagcagcacatccaccttcactctcataataatgctccttaggcgcagtcatgatttaattagaaacttcttgtcaaaggatgttgtttctaactagttgtgcgcactggttgatttagttcatgccgttatggttgtctttccattgctagcagattattaatgtctattatgttctcttatcatgatatctatttatattttgttgcttccccatttatgtaattttcaaaggggatgttgttgaaattttatatatgaatgttagatgtgtagtttagtagcattctgggtgtttgaggatcccggggtgttacagttggtatcaaagcataggctttagattcttggcaatttgaagataaatttgacacactcgcacatataggaagggtatgggtttaaatatctttgatatatgttagtgtctttgaagtgcagatgacaataacctcacccctccctattcctttacggtgatgtggtaagttgtttatggcttaatgcttgatataatttatttctgaaattttaatattgtttgtttaatgctgtagatatcgctggtcatttgtgagaatgaagttgttattatgcttgtgatatacaagtatgcctatcttgttttcaccatgtttttcatggttgagttttattacaataatattgttatatatgccttattgaggatgtttctaagaggagtgtgaattgcatgttttggggtacaaggtaatcatcaatttgaatttaagttgttgagcggttggtggatagctccaactatctttgcaaagaatgattgtttatgttgagaaaccagttctcaaagaaatgaatattggtacttttatatggatttttgggggaaggctttacatagccagaatggcttacatgtctctctcttctatcgtgtgttttagtagccacaaagcctagatgtggtttaaagtggttgcatgttagtcatgctaattgtagaataaatctttgatttttcttgatccattgattatgtattaatacgttgaggatttgatggttctcttcccgatgcatgtttgtggagccattgtcggaccacttatctattggtttgaatgaagtcattgcctagcctagagttggttgtgtgtggttagtcacctattcctagatgatgtggttttaacatcagcttgggatgttttccaaatgtgtgaaggattacggggctagtattgaccttttatgtctggtactcggagtgcatcatatgatagaatgaaatgtaagtttctgaactacagtagatgaagacttatattatgtgtaggttaaccttactagtttggatatttttcttagttgagttgttggatgaagtatagtgacatgggttaagcaagtattgtgttgtcgttgggctgttagtgctctatgtggagtttttggcatttcttcgatgaactgtgccgcgcataatgttattggcttcttgtcggttttatttctccattagttctgtagattttctccctttcggtggggtgcaaagaatgttagattacatgattatcttttcattatggcaagaacaaggtttaggaagattaggagttttgtttcaatagaactaattgtttcgtggtgctgtgaggtgaggtgtttgatcttcttatacattcatctggtgtggatgtttcaccagtaaattaaaatgaattgttgaagttggtaaaggttgtgcttagtgcatattaccccttcatcaaagagtgtcgttttaagacattgatgcggatgtatggctgcatccaaattcgatgttgtgaaatcgtagtgttgattgcatctatgacttggtttgagcttcattacatgttggttcatgcttgatgtcaggtggtgtagtttccttagacatttagtctgaggtcgaagttcttgtgttaattaagaccaataatggacccaagttttggaatggtggtgttatatggggtaccatagatgttttgtttggagtggacgaattcgaggacgaattctttttaaggggggtagagtgtaatatcccaaaaaaatgttgccaaaggttgatcttcggtgcgtggatgtgggaaaagggttgtgggccgttggatgctaagtcggtgttacaacaacctaccacgccataaaccggttatatctacatcgcctccttaagaagactacgtatgagcttcctaaccggtaacaaacccaatttatcttactttcgtgtatttgggagcaaatgttatattttggtttaagagaggtagggtttcaaaatttgctcctaaagttgtagaagggttattgtttggttatgattcaaataccaaggcatatagggccttcaagaaatcctctgaactagttgaagtcactagtgatgttgtatttgatgatactaatggctccccaagagagcaagttgattttgatgatatagatgagaatgaggtaacgacactcgcactaaggaacatggcgattagagatgtgcgggtgtaggaaccataagaacaagatcaaccatcttcctcaacaatggtgcaatcctctactcaagatgaggaacatgtacctcaaaatgatggcattgatcaaggggagcacatgatgaagaagacaatgaggaagaagatgttccacaggcacctccatcccaagtctgcgccaccatacaacatgatcatccggtgtacctgatcctaggggacatcaacaagggagtaaccactcgatattgtgtcactaatttttgtgaacattactcctttgtatcttctattgagcctcctagggtagaagaagctttgaaggatccagattgggtgatggccatgcaccaagagctcaataacttcaagagaaatgaagtctggagcttggtgccgtgtcgaaagcaaaacatagtggcaaccaagtggggattccacaacaaacaagatgattatggagttgttacaaggaacaaggctcgacttgtggcaaaagattatgcccaagtcacaggtttggactttgaggagacttttgctcctgtagtgaggttagagccaattcttattttgttggcctatgctgctcaccattcttttaagattttccaaatggacgtgaagagcgccttcctccatggaccaatcaagtaggaagtgtatgtggagcaatcacctggcttcgaggatgacaggtattcagatcatgtgttcaagctctctaaggcactctatgggcttaagcatgcaccaagagcatggtatgaatgccttatagattttattatttcaaatgctttcgaggtcgggaaagctgatccaactcttttcacaaagacatgtaatggtgatttatttgtgtaccaaatttatgtcgatgacatattatttggttctactaatataaaatcatgtgaggagtttagcaggctaatggtgcaaaagttcaagatgtcgatgatgggtgagctgacattctttctaagatttcaagtaaaatagctcaaggaaggcatattcatctcccaaacaaagtatattcaaaacatcctcaagaagtttgtgataaaggatgcaaagcccatcaagacatcgatggtaacaaatgggcacttggaccatgaggagaaagctaagtccatcgataaaaaggtataccggtctatgataggatctttgctttatttatgtgcaagtagaccggacattatactttttgtatgcatgtgtcctagatttcaatctgacccaaggaatgtcaccctgtggtcgtgaaccagatcttggaatatttggttcatacgcctcacttcaggctctcgtatgctaaggggtctacctttgaccgaattgggtactcagactctgattatgctgggtgcaaggtagatagaaagagcacaacatggacttgtcagtttatagggaggtccccggtgtcttggagctcaaagaaataaactctgttgtcctatccacatttgaggccgagtatattactgcaggccattgttgtgcgcaattgctttagatgaggcaaacactaagggactttggctacaatctgagcaaagtcccactcttatgtgataatgagagtgtaatccgcttgtcggataatctcgttgaacacagtcgcactaagcacaaagacatctgacatcacttgctgagagaccaccaacaaaggggagatatcgatatttgccatgtaagcaccgatcaccagctagccgattttgaaagttgcctagagggggtgaataggcgaaacctaaaatttataaactttgaacacgaacttcacccggggttagggttagaatgaaatcagaatgtggaagagagttcttcttgctatgagttgctcaattaatgcagataactttgggagctaactcaaaaagattgcaagcaagagaacttagagagaggggagaggaagaatcaaatcgtaaggtaatgatcaacacaaatgaacacaacgatttgtttcccgaggttcggttccaaagaacctactccccgttgagtaggccacgtagtctgggtctccttcaaccctttccctctctcaaatggttacttagaccagttgagtgcttctccttaatctcgagtgtcacttagaccccgcaaggaacaccacacaattaggtgtctcttgctagctttacatgtcacttgacaatttagaaggagatgaacaaagtacgattaagaaagccaatcaacaagagcaacaagaaaaacacaagatcatactctctccagactttccagggcactaatcactaatgatcactagtcacaattatggcacttggaagagcttgggagcttttgaatgtgtcttgggatgaaatgcttgttcttgaattgaatgaggatgaatgaaatgcttggatgaagtgaatggaggtggtcggggttgtagttatagccatcaatcacttcctagtcgttacccactttctgccaaccgcggatggtccgcgcttctggcccggacgatccgcccctgcacatcaacgactgaaatcgcaacagtcagcagcaacgactatatcaacacctataagtgcattaaatgtgttattagatgtcaaataaagcagtcatagacggtccagccgtgcaccccggacggtccgcgaggacgctataattatttttaccgaacttggcacgtttgggtttctctagtttccaatgggtggacggtccgcgcctgaggctggacggtccaagcttggtcctagatggtgttcttctctccttcagacactccatagtagaaatgtgagttttgcatagttcctgtccgaggctcaccgaggtgtcgcgaactgtcccccgaaagggcttggacggtccgtgcacaggtgaaatttccaaaagcttctcatgtctgaaataatctacggtattccagaaagtcgacttagaatttagatggttgaacttatgcacctgagaattaagcaactaggcaaactagttagtccattaggttgtgatggtcatcaatcatcaaaatcaatttagagaaaatggtgaaggccatttccctttcaatctcccctttttggtgattgatgccaacataaaccaaatcaagtataaagtgtagaaaaagctcatttggagactttctaagtacatatgaatgttttgctatagttaaaaattttggaccacatttgcaccacttagcttgtttttgcaaatcttttggagaagacttttcaaattcttttgcaattagcctaaggtataagaatataatttttcaaaagcattttcaagtttgaaagattctccccctttttcaaatgcttttcctttggccaaataaaagctcaccctaaaaaattatctccttagctgtcaagagggtttttgctaatacaatagtaccaatttggaagataaaattttttcagaaaacaggttggtggtgcaatacttttgctttggcctattaatttctctccctttggcattaagcgccaaaaacaaagaaacctataggcctataataagaaatatatgaatgtaagtacatgagtagggcaaagggtatttgataccgactggagatgtagtggaagacttgcctttgcctacaactccattttcctttcaatcttagactaagtatagaaatacacttggaagcacattagtcttagctgtggcacaagaagaataagaaatatgcatttgtaccaaatgaaagagacattccatgatcaaaggtataaaatgagtaatgtgtgcaatatttcaatcaaggttccaagaattaaagacatttagttcgttcctaagcttacaaaaatcttattcatccaggggattggtgaagatatcggctaactggttgtgggtgctaacatgttcaattgcgatacctcccctttgttagtgatgtcttcggaagtgatatcagatgtctatgtgctttgtgcggctgtgttcaataggattatctgccatgcggattgcactctcattgtcacatagaagagggactttgctcaatttgtagccatggtccctaagagtttgcctcatccagagtaattgtgcacaacaaggtgctacaacaatataatcggtttcggcggtggatagagctactgagttttgtttctctgatgcctaagacaccagggatctccccataaactgacaagtgcatgatgtactctttctatcaatcttaaatccggcataatcagcgtcagaataccctattagatcaaagacagatcccttggggtaccatagcccaaacctaggagtataaactaaatatctcatgattcttttcatgagccttaggtgggcatccttaggttcggcttggaatcatgcacacatgcatactgaaagcataatatctagtcatgaagaacataaatagagtaaagatcatatcatcgaccggtataccttttgacctacaaatttacctctcgtgtcgaggtcgagatgccaatttgttcccataggagtcttgatgggcttggcattctttattccaaacttcttgaatatgtcttgagtatactttgtttggttgatgaaggcaccctcttgaagtagcttgatttagaatccaaggaaatacttcaactcccccatcatggacatctcaaatttctgtatcataattctactaaactcttcacaagatgacttgttagtaaactcaaagataatatcatcaacataaatttggcatataaataagtttttgacaattgttttagtgaagagagtagggttagtttttctgactttgaaaccattagcaataagaaagtctctcaggcattcataccatgctcttggggcttgcttgatcccagaaagcgcctttgagagattatagacatgtgaaggatactcactatcttcaaagcccggaggttgctaaaaatacacctcttccttgatagggccattgaggaaagcaattttcacatccatttgatacaatttaaagccatggtaagtagcataagcaagtaaaattcgaattgactcaagcctagctatgggtgcatatgtttcatcgacatctatgacttgtgaataccccttggtaacaagtcgggctttgttcccagtcaccacaccgtgctcgtcctatttgtcacggaatgcccacttggtacctacaacattttgttaggacgtggaactaaatgctagacctcattccttgtgaagttgttgagctcctcttgtattgccatcacccagttcggatctctaagtacatcttcaatcttgtatggctcaatggaagacacaaaagagtaatattcacagaaatgagcaactcaagcgccagtgatgacccccttttgaatgtcaccaatcatggagtcaatggggtgatcttgttgaattgcttgatgaactcttgggtgaggtggtctttgatcttgaatctcttattcatcctccttttcttcatcaacttcatatcccacttgatcgatgccatcatcttgaggtggctcattgttttgaacttgatcttcttcttctccttgagcttgttcctcattttgtgttgatggagatgcttcaattgaggatgaaggttgatcttgtgttggtgtaggctcctcgggtactcgtgggcacacatcgccaatggatatgttccttagcgcgatgcacgaagcttcttcatcatctaactcatcaagatcaacttgctccatttgagagccattagtctcatcaaacacaatgtcgcaagaaacttcaactaatccagtggacttgttgaagactctatatgcccttgtgtttgagtcataaccaggtaaaaaaagccttctacagctttaggagcaaaatttgaatttctacctcttttaacaagaataaagcatttgctcccgaaaactcgaaaataagaaacattgggctctttacctgtgagaagttcataatttgttttcttgaggattcagtaaaggtagaactggttgatggagtagcaggcggtgttaatcgcctccgcccaaaaccgatctaatgtcttgtattcctcaagcatggtcctcgccatatccataagagttctaatatttctctccacaacacgattttgttgaggtgtctagggagaagagactcattcttgatgccctcctcctcaagaaatccttcaatttgagagttcttgaaccccgtttcattgtcgcttctaatcttttttattctcaatccgaactcattttgagcctatctcaagaatttctttaagatctcttgggtttgtggtttttcctgcaaaaagaacacccaactgaagcaagaatagtcatccacaattacaagacaatacttactcttatcgatgcttatttaagcaatcaggtcgaataggtccatgtggagtaactcaaatggcctctcggtcgtcatgatgttcttgtgtggatgatgaactccagcccgcttccctacttgacatgcagtacaaatcatgtctttctcaaaatgaacattggttagtccaaaaatgggttcccctttataatcttgtgaaggttcttcatcccaacatgggcaagtcgacgatgctagagccaacccatattagtcttagcaatcaggcaagtgtttagttcagtattgtcatcagtgaaatcaattaaatatagctgtccatttaacactcccctaaaagctagtgaaaactatcacttctgctaaacacggtaacatcaatatcagtaaataaacagttgtaacccatttccataattgagatacagaaagcaagttgtagcctagagattctacaagaaatacattagaaaatgaatggtcaggtgatatagtaattttacccaatccttttaccaaaccttgattcccatccccgaatgtgattgctctttgcggatcatcatttttcttatatgaggagaacatgttttctcccctgtcatgtggttttgcactgcttgttgggggtcttcttatccgctgaaggtcctcaagacataaaccatcggcaaagtggtactgaggatctcctttttctctaccgatgctctttaagacgaagatctcgtctagaagcaacaatggcaagcgccgaagttgccactagcttcggcttaaaccaaatagaggatgaaaagactagctagtccctagtgatttatgtcacgattatgaacaaatgttgaaggccataaatgtaattttactcgggctgcgtcccgcgcctataaatagatgaacaatagcaccgtattgttcacgctgaattgtaatcacccccgcgtcaacaccttcgagcaagccgaaggtatcaatgtaatatagattatgttaatactcatatatactttatggaatgcaaatacaaatggataatgagttgtatttattatatttttccttatgtatttttatttatctatgaaatgatgaaggcatgccctttgtagccttcgtccgatgatcattatatccgagaggagataatgcttcggaggatgaaggtctataatgcttaacgattgtgttgtcttgttctcgattcacaatatttgagaacaagtgaccaacactgttgtctattatccaacttgttcctccagatgcataatactacaacacagatttagaccttgtccttaggtacccaaacggtcttgggtcttttcacattagaaacaatcaccttaggtacccaaacataagtctttggactcatgtgcttgcccccaacatatttggcaactattttacatgatttgttagtaagaacaaaggatgcatcaaaggtcataaatgaaatgctaggttcatttgatgcatcaacatttttttcttagacattttaacatgagttgtatgcttagaactagaagcctcatttttgtaaatattagcatgatgagcaatagagtgagatttagcatgaattcttctaatcttatgctaaggatagttatcaggatataaaatgtagccttctatatcttgcaccatgggagccttgcccttaacaaagttggaaatttgtttccaactgtattgagtttgatgttgttttagctcccagattggaagacaatgccatccttaatgtcattgtgtctcccattgtaaagcatactacgagcaaatttaaatttctcattttcaagctcatgctcatcaattttggcattcaacttagctatgtaatcattttgttctttaatcaaagcaaggtgatcatttgtagcattaacatcaacatttctacatctagtgcaaatagtaacatgttcaacggttgatgtagagacatggtaagcattcaattctttaatcttagcaattaaacaactttcgaaggatgatgtcggtgcctggttatgtgtggacaaacctggctagtattggtgtataaccgtcctgaaaatttctgcaacgccaacttcaaaaccggcaacttaaatagtactccctctgtcgggtgccgtaattaggggtacccccgatgctcctaaacacggctgaaacacatcttcagaacaaactgcaaaggctgataagcacgattcaagtcagggcctcgtctaccaagggacgcgacctcatccgagcccagcctcggcctcgggcaggaacagtagtcccggacggattcacgcctcgcccgagggcctccccaggcagtgggcgcaccctcggctcgcctgaagcccagcttgggcaaactttgtcgtgtagcgacctcggccggatcgccttaccaaccgaccgtatcgcatgtgcatttaatgcggggattgcctgacaccttatcctgacacgcgtgcctcagtcggcaaggtcgaagtgaccgcagtcacttcacccctttactgaccgatctgacaggaaaacagcattgttcgccctgctccggctaatgtgccaaccaccagggtaaaactgagtcacgatctcccacgagtttggcctcgggcgcaacagggagctctacctcgcccgacctcaggcctcggccttagcctcggcctcgggagaaggtctccgcctcgcccgaccctaggcctcggcctcggcctcggcctctagaggagtcacatcctcgaccgacctcggcctcggcctcaggagaagtcttcgcctcacccgacctcagcctcggaccgactacgctacagaggatacatcattaccctactcctagatagcttcctcaggctatgaaggaacaagaccggtgtcccatctaaggttactccggtaacaggtaatgatggttccccgcgtgcgcccatgacgtcggattgctctcaacctcctacggaagcaagggaacgtcagcagcatccatgccgcaccgccagctatgcttctacagggctcaaggcacttccccgacagccacgttagcacccgtacagggctcaaggcgcttctccgccagccacgttagcacatagctacacccccattatacagctgggcatctccttgtatctataaaaggggatgtctagggccttcctaaggcacgttgagatacgtggacgcagcacgtcaacaaggggaacgcagggacgcggggcagacgagacaggcagcacgcagggactctctctctctcactctcgccctcgctctctcgcgacgcttgtaacccctactacgagcaccccggtgcaagataatataagcctcattcccccgcttgtgttccatcttgcatcaacccatctgggcagggacacgcagcaacaaattcactagtcggtcgagggtcctcgcgggtccaaaacaccgatagttggcgcgccaggtaggtgctcgctgcgtgttaacgaatactttcccgttgagttccagatgggtagccttcagtagcctcttaagccggggacggtgctccgctttgggagtcttgagttcatgtcccgcgacggcagctacgacatggtactcctcccctcgcaacgcgacagcaacgacggccgtcggctcgcccggcggcggtgaactcgacgacgacttccccccgtggcagaagaggaacacccgggtttgtcccgccaccctcctcgccggaggaggaggagacagggcaaccgtggccatgcaggaggtggcacctcatcggctgtcggaccagagcgagtcgacgacgccggcacccctacgggagacatgtcgggtgttgtcctcgcacctaagacaacgacgggtgtcgcttccccgcaacgtgccaaccccaagcggactgatgacgccagcaccctcgcgagggacttgctgggcgttagcctcgtacctgagataacggtgcattccgtccctgacgcgacttcaccaccatccatcgaccaaaaggtaccatccgttttccaccttgtcccctttagattcagcttcgatccaccaagcgaccccgcttcggtgagcgctttctcgagggcatatcctgaccttccaggataccatatgtggtcaacttgggaccgactgacggccgtctcaacctctagacctgcgggttccgaggaagaagatgaccccgacttcagttgggatttctccggacttcgtgatcccagtgccatgcgagacttcatgtccgcatgtgactactgcctctctggctgctccgacgatgaccacagcctcgacgacgagggttacgacccaagtcgtgagtgtttccacatcgaccagggggatcatggcgaagacaaccacctcggcatgccggaagatgatgactcccctgtgcctgcgtctcgcgttgagatcccacgggagctagtcgtggtcccagtccctgcgggggggtcaggacacacagcttgagcaactccgcgaggtgcaggccaagctcgacgaagaagcagggcggctcatgcagctccggcagaacatcgagcaggaatgggcaggccaggcactcgctggaggagcgcgtcattgggcccgagacatccagcgtcgtatcgttgatgatgccagggcagggctgcccccggccatcagcggggccggccagaacctagctgcagcagcgatgctactccgaacaatgccggagccatccaccaccgaggggcggcgtatccagggcgaactcaagaatctcctggaagatgccgcggtctgacgagccgagagctctgcctcctgaaggcaagggtgaccctcggagcatcacgcaacgccctcccgacgcatatgggaggcctcggtccgcaccgagcgcacacgggacgggacgcccgtggccccggatcgcctcggcgacgagcagcaccgccgcgactatcgagcccgcctcaaggaaagggtgcgctgaggctaccaccccaggcgcggaggccgctatgacagtggggaggatcggagcccctcgcccgaaccaccaggtccgcgagtcttcagccgggccatacgacgggcaccgttcccagcccggttccgagccccgactaccatcatcaagtactcaggggagacaaggccggagttgtggcttgcggactacgggctggcatgccagctgggagggacaaacgatgacaacctcatcatccgcaacctcccccttttcctctccaacgctacccgggcatggctggagcatctgcctcctgcgcagatctccgactgggacgacctggtcaaggccttcgagggaaacttccaaggtacgtacgtacgccctgggaactcatgggatctccaaagctgccgccagcagccaggggaatccctgcgagagtacatccggcggttttcgaagcagcgcaccgagctgcccaacattaccgactcggacgtcatctgggcattcctcgctggcaccacttgttgagacctggtgagcaaactggggcgcaagactcccaccaaggcgagcgaattgatggacatggccaccaagttcgcctctggtcaggaggcggtcgaagccatcttccggaaggacaagcaaccttagggaagaccaaaggaagacgcccccgaggcgtccatccagcgaggcacgaggaagaaggccaagaagaagacgcaagtgaaacgcgacaccgctgacgcggatctcgtcgctgctgtcgagcacaggaaccctcggtaacctcccggcggggccaacacgttcgacaagatgctcaaggagtcatgcccctttcacaggggtcccgtcaagcacacccttgaggagtgcgacatgctccgacgttacttcaacaaggctggaccctcggcagaaggtggcaaggaccaaggcaacaacaagaaggggggcgaccagctggaagaggctcgggatgtggccttactacactcggcgtggtatcagcggtctctgtgacgctaccacgctcgaagggttcggccccgaggcttccaagtgggagacttggtacttcggctgtgacaagacgcccgaggacgccacaagcttactcctccctgggaagggtcgttcatcatcgccaagattttgaagtccgggacatacaagctgaccaacgatcaaggcgaggtctacaacaacgcttggaacatccaatagctacatcgcttttacccttaaaatgtttcaagtcgttcatgtatctcgcttttctttacatgcgtaaataaagtctaaccatcaaggaaggatcagccttgcctcggcaaagcccgaccctccctcgggggctagaaggggggaaccccctctgcgtcaaaattttcctctgaaaagtcttttactagaacgtctttcgtgcttttcgactgcgtcgataacagaaccctaaagacgagcgagagagaccttgaacggcatggccgaccgagccgagggactcctacgcctccgggatacggatacctcactcatcaccttccgcgaaaagtaactcaccctcggataagtgattctgctactgaacaagtcctaacgctcgaaaacctttctaccaaaacgactttcgtgctattcgactatatcgataacagaatcctaaaaacgacgagagaacacataagcggcaaggccgaccgagccgagggacccctacgcctccgggatacggatacctcactcatcaccttctgtgagaagtaactcacgctcggacaagggattctgctaccgaacaagtcttaacgctcgaaacgagaggaaagaaaacgcagctttataattcgacgattaaaatgttttggcctcagcggccacaaaaaacatgcgcatacttagaacaaactgttcttgcaggctcagacatcggcagggggaggagcggcaccctcggcgtcgtttccaccctcggcagaatctggcacggcctcagacggcgacacgggaggaaggacctccacctcaaaggaggaagccagcgccgcgcttgggccctcgacagccgcgtcaaggctctggacctcgggtaaggcagcctcctcttcatcgggtaagcagtacccctcgctgacccgctccagatatacatcatagtgagaagcgagcactgcgaaggcccgcctgacgccgtggtgcagcgccccgcggagtctgctgcgcacatgggccgcccaaggcccgcaggtgactttggggggagatacccgaggggacgtcgtcgaggccaaaggcctgacagagggccgagatagcctcggacatggccacgcgctcggcctccttctgctaagccgcctcggcaagcgccttgcagttcttgacggcctcgttaagagccgtctcgaacattgcaggcagcaggacaacattcttcagacgcaaggagaagaatggagacataaacaaagtcacagagcgggcaaaacataccttcagcctgggcacgctgctgtgaggccatggctcgggcagaccgggcagacccgacgaccacggccagaccctccgcaagggtcccggcctgagcagtcgcctcgggtctaggaagggggaagccccctctgcgtcaaatctttcctcggaaaagttttccgccaaaacgactttcatgcctttcgactgcgtcgataacagaatcctaatgacgagcgagagagaccttgaacagcaaggccgaccgagccgagggactcctatgcctcccgggatatggatacctcactcgtcaccttccgcgaaaggtagctcacgctcggataagcgattctgctaccgacgaacaagtcctaatgctcggaacaagaggaaagaaacacggctttatacccgaatgttcaggcctcagcagccacaaaggacaaacacacctacttggggtaacaatggtacctaaacttagacgtcggcagcgccctcggtggttgtcccgacctacggcagatgtcttagtacttaaagctattacatcttgctctcaagagggtaccattacaaacgggactccgggtccattcccgcaggaatgaacaacctccacaccagaaggcctacgggataacaaactccaggtggctcgccggcgaccactgcaccagcagcgcgacagcgacctctgcctcgggcggctagacagcagcagcgatggcctcagggcaaacgctactgctgaaaggccctcgttcgcgtccccccacgggggacgagaactagccattaaagtcaaagagccggaggtccggagcgcaggtggcactgacggtctcataggcggaagcaaccaccgctgcggtgggaagcctcaccagcggcggccaccacttcagcaccggcaacagcagccacctgcgcacggcatgaccgtcgcccgggtggaggacggacagctacaccctaaccaagcagcagcagttcggcttcccccgcatagctggaggacgtctcctccgcagggctggaggatgcccttctcccccaaatgctgggaggaagaagcaggtcaccggcccacgcgagaggcaggacccaactcggcgcgccctcctcccaagccccggatgatgaacatccttgaagctaagggcggggcagaggccgcagcccggcttgcttctccccaccacaaggctgatgatcatccctacggatgaccattggtgagggactgcagccgggttgcatgatgaaaatccttgaagccgagcgatgactgaagagcgccaaccccatgaggtcacgctcctgcaacagctgcagggagaaggcaacacgggtgcaccccatctgggggctcggaaggtggaaagacgcgatgactgcgaggagtgtgaaggcatggctaccgcccggggggtcgatccctttttaaaggcagatctcctcactcgcaccccaagcatcacgggcaaagtctccaccgacgtgctctagggttcccaccctacgacacgagggctgggtcccacacgtcatgcgagctgacccgaaatgcgaagaaggcaaaccgccgcacgcgaagcatgtaaccgccccgcggttataagcattccctcatcctcgccaaaaccagcgatcgaaagggcggaccgccacgcaggaagcatgcaaccgcaccacggttgtgcaccctgtcggcttcgtcgcatccagcggtccagcatggaggctcgggcccacatgtcatgtaaccagcgagccggttactacgtgcaaggaaaccgcaccgccactcgcgccaatgttgcgtctcctcgactgcagaaccagtgccgcaacttgaggcagccctgcgcgtgacccaactgtgccaattgagtgcaacgatcatgggtcagtcagctgcggggataggcacgacggttgatatgaccagaggcgggccgacagtaattgcagcaacaggcgggcagaagcaccggtccaatcacctacaggatcgcatcctctcctgaaacggcaagagagccctctcccacagagtaaagaccgcgcgcccgtgttccgttcctcgaatgactcgcgcacgcgcaacaaacgccccgcgaatcgcccgtcccgttgcattaactccttggcagggcaagcgacacttccggcaggagaggcgagcgccgtttcacctccgtcatgatgaccgcgtcaaaaaaggtgcgccacattatttaaatgcatatccttttccttttcctctccctctcttgccacagggaccgggaaaggggatattccgaaaaggatccttcttagcgaaggaaacgggccccgagccctcctactgatcaggagttcgaaggttgcgccctccggggttcggcaaccgtcccagagcactcgggctccgagcccattactgatcaggggttcgaaggctggcccctcggaagggttcgacagccgccccagagcacgcagagtcagggatgaccctgggtacgtctgttacatggccgaggctcgggctacgctcccgaggtaccctaggacatttccgagaccagcgggaacgattttgtaatggaatcccaccggagggaggcaccgagccctcggaccctatcgaatgggtccgggtccagcaaatcacccgcaggtacttttggagcgcgcctctgggccactagccgacccttatcgaacggggctcgggcgtccactccgatcacttgctagcaactcactggaaacaccatgttcggtgccctccgagggtaacatggcgctttccccccttcctccttgaggagaggcgacgaaggggcgtacaataaaagtcgagacagtccttgatcgtcctcttgctccgtgcagaggctcgggggctgctctcgcaccaggctacgaccgaaccgttgaccacgtcaacaaaccagcgtgaaaactcggagcctgaccgtgcacccgggctacggccaggccgcatgagggaacaacaaggccgaccgtggcatcgcaaaaagaattaagacctcagaggagtcaaaccactcctccgagacctcgggggctacacccgacgggtgcgctcgtgcgcacccatcggaaccaaacacgaccgagaagggccgatccccttgcaaaaatccgacagaacctccaagcgagtgcccacactcccttcgaggctcgggggctactgtcgggtaccgtaattaggggtgcccccgatgctcctaatcatggctgaaacacatcttcagaacaaactacaaaggctgataagcacgattcaagtcagggcctcgtctaccaatggacgcgacctcatccgagcccagcctcggcctcgggcaggaacagtagtcccggacggattcacgcctcgcctgagggcctccccaggcagtgggcgcaccctcggctcgcccgaagcccaacttgggcaaactttgtcgtgcagcgacctcagccggatcgccttaccaaccgaccgtatcgcatgcgcatttaatgcggggatcgcctgacaccttatcctgacacgcgtgcctcagtcggcaaggtcgaagtgaccgcagtcacttcgcccctttactgaccgatctgacaggaaaacagcactgttcgccctgctccggctaatgtgccaaccatcagggtaaaactgagtcacgatctcccacgagttcggcctcgggcgcaacagggagctccgcctcgcccgacttcaggcctcggccttagcctcggcctcgggagaaggtctccgccttgcccgaccccaggcctcggcctcggcctcgggaggagtcacatcctcgccctacctcggcctcggcctcaggagaagtctctgcctcgcccgacctcagcctcggaccgactacgctatagaggatacatcattaccctactcctagctagctgcctcaggctatgaaggaacaagaccggtgtcccatctaaggttactccggtaataggtaatgatggttccccgcgtgcgcccatgacgtcggattactctcaacctcctacggaagcaagggaacgtcagcagcatccatgccgcaccaccagctatgcttctacagggctcaaggcacttccccgacagccacgttagcacccgtacagggctcaaggcgcttctccgccagccacgttagcacatagctacaccccaattgtacaactgggcatctccttgtatctataaaaggggatgtcgagggccttcctaaggcacgttgagatacgtggacgcagcacgtcaataaggggaacacagggtcgcggggcagacgagacaggcatcacgcagggactctctctctgtctcgctctcgccctcgctctctcgcgacgcttgtaacctctactacgagcaccccggtgcaagataatataagcctcattccccccgcttgtgtttcatcttgcatcaacccaggttgagggtcctcacgggtccaaaacaccgacaccctccgtcccaaattaaatttcattttagccttttaatatattcatacaataattaatatatgtgttttgtatatgcgtctagattcattatcgtcaagatagacataaaaaaataagtgctaaaatgacatataccaaaacaaaccttagaaaacagagttgatcctggatcttagccatcctatgcccctgcatcctcacacacagtttgccaaaacgaaggattcatgctgcaatggtgccaatattaggaggacagttctaaaccatctatgcacgttttaaaattttattttaattgcaaaagttcactaatcatttcagcgtattttaagcgttttatttctcaataactctacaccggtttgttgtccaattaaatgtgctttaacaacaacacgagaaggaaaatattgagaatggaaaaattaactacatatggctagccaatgaagaataatggctgattccacggtggcctgactaaacagccaactatgttttgatggacagctgggtggaaatgaagacgaatccagagcccttgacatacttctttcatctcatgccctcaacccaattcccaatcactgtgattaatatgcacagctggaataatatgcacgatcatcctaccatacgaaatacaaaggtggattaccctgtcttctgactattccaccttccaatccatacgtacaaactttctgaaaccataatcttttgcgttcttcctttagagctagtttggaaatccgaaattttcattttttttcaagaaaaaatatttattttttctttaaaaataaatatctcttagaaaaatagagttcccaaactagccctcatacagaagaaaaacagctgaattttaggtttgatacattctgtagacacgtattatccaaagttattgtggctccaatttccactaattattatctactgtaaactcgctaaccctgccatgaccaaatcctttgtagctaatgctgagctcggcatcattgtaccatacggaaaaacaacccatatattctccataatgagtttccagataatgagtttccagataacaacccatatatgcgcctcatcgtacgtcgtccttatggcaccgccaggattagtgttgggtcatctgtccacagtgttcctttatctgcctgcagcttcttttgtgcagaacttacagccacttttgatccctacatcttctccatattcattgtaatgccttcattgtaggatattcattgtcaatctttctttctgtttcgtttacatcgaatcatcacaggtagtctggtctgccaaccactacccgactgtcaa

SEQ ID NO: 820 - DNA, 5642 bp, Zea mays
  Intron number 2 from transcript GRMZM2G099907_T01 (locus G RMZM2G099907) derived from phytozome v7.0 (chr-ID 1; pos 2 76417458 to 276423099)
aggacaaaattgggtgtggacttgacgctatagttagtcagccagccactagtaacagttcgacaattttattcactactagagtactagttgttattggttttctgttgaaaacatggaatacctgccacgtgttagtagcacctcacaaaaaaaaaatacagaatgaattaatgatacgctgattgttctagttactagttagtgtcttagagcatctaagagactctttattttttactctctatttgactctttatttgtctctctataaatattaaactatatatataacatcacattccaacagactctctaaaatgcaatttagcttggctagtgagagttgctggccaaatttggctagtgaggaagttaatttagagagccagataggttagcaagttaaatgactactctgttggagagctactatgctattaattagctaaaatttagcttgacatgatatttagctagtctcttggagatgctcttattaggccagttttattttaggtggagccttgcagctaatccggttctttgcctcatttgatttgtgctgcccctgatcaaaccgtggtggctcagacaaccagcacttcattgttgaagatctttgtcatgttggtcagggccggggccagccattgaatctgttatgttcatctcgtttgtaccaatggggtcattgctagtgctgaacagtgattcccataggattagcaagattttatagggatcagctaaccctgttaacccacctagggtagcctcttaagtcttaactagatatatacccgtgcgttgccacgagagttaaaaattagtattaaacataattttagaggaatcatacaagaatcagttcgttttcacaggaaaaacgcaagaaacgggaaaatttcctccgctccaaatgagcccttaaaataattaattactcacgtaggtcactatcaaccattttgcaaaagggaaattgcacaatcatactacaagagatcgagcataatgctacttacgaacaatgaaactgttttacaagcgattgagcatactgctaatttctgaatagtgtatgcacctcaacgcagcaatcaatcctaacctggtagccaaactctcgccaaggcaccacactaacaagcatcagtcacccatgatcttgacaaaagcgagaggagaattgacaaaagcgagagagaccgagaagcaggcagggaaatcgtaccttctaggcctcgttcgatccacgagctgctgcagcttctcactctggcggtgctagagcacgtccagccgatgcacgcgcgaaccgctcgacacccatgatcttgcgcagtgcacaccagacctaacttgcgaactaccaatgagaatagaatagttggatcaattgacaattaaggaaaacccagtagaatatatggataattaaggaaaccccatcatagataaacattgcaatagaagtttgtttcccaaatgacaaccattctagttatctagcagagaacatcttttgagccacgggcattaaggaacaacaacaacaagaacagaataactcaattcacattctagttataaaatagagaacattgttttttgaaccacaagcacccagtagaatagatggataattaaggaaaacccatcatagataacaattgcaataggagctgatttcccaaatgacaaccattctggttacctaacagagaatatcttttgagaaacaacaacaagaacaaagtaaatcacttcacattctagttatcaaatagagaacattgatttttgaaccacaggcattaggaaatatcatcaacaaagaacatattaaattgcttcacatcacatgaggcacaatgggcagtttggattgcaacctcccaggcagatgcctgccaggcattccatcgtagccatcaggcgtccaaaatcaatggcatgggatgctgcttgggcctgacaggcccatagtgcataagcatgttttctatccaagaattcaatgtgactgatgaacttgaatagccgctacaggcaccttgcattttaagcttaattattcctatttctctgaaaggatagtgttctagtaaggcaaggaaaccaaaatcttcatatcagcagaccagaccacacataaggggaggaagggaaagacacacagatcgaatattcaatgtcaccactgtcatcttgaatagttggtcgaatatgagtctccaacaattttttttatcatggcaactatttttaaatcatcctaggggggacagtgcaggtaaagaaatattgtgggcactgacttggaaacagtgtgctggtcacaatttctacaaaagcttggaattgcctcgacctggtgttgatgggtgcgcaccggattttgtctacaactgcagcagagggtctcagaaagaacacatgtgacaccaagcatgcttgccgcacaatagtgatgaattcacatgcaagggagtcatcctctctttgcttcccaacctcgtcgttcccttgatatgcaagtatacttttggcgcgagtggtgcaaacaggtctgcagtaatcaacagaaaagataatgagaataatttggagaatatacttgctctaccaagctctaccaaatccattccacggagctaggggtcctctattggggagcatgtagaatgatcatcgttgacccaacaacacagagatcatagcccaccacgcccatccgatgcaacttgcaacttctcattcaatgtgaaatgtgctagaacagtactgcacataacaaaactaaaaaatgactaactattaaaaaaagatgtagtgactcggcattgataactgaactcataacaaggaatgaccggcacaaaaataaactgcaataactgaatacaatgaattactaaataaaaaatgatagagcatacatcagttgtaaatctcactatttttcccttcttctcctctagtgaagttggaaaatcactgtcatcatcagaaattggaacaactgctttgccttttgatttgatttttgaaattactctgctgatagccgtagcctaaaaatgtaaaaaaacagaataactgactacaaaaattgtaatgtataatatgttattagaatggctgactacacaaattacaatgaaaaatactcaacacgcttacaatgactgacaacgactaagcatagtttacaatgactaactgcacaattacaatgacttagcacaccaaaaaacattcacaaataacatttatgaagtcaaaaaacaaattgatcattaaaaaagttcatggtaaaaaccctacacacaacaatgactgacacactaaaaaacaaatgtctgagtacaaaaaaggcataaaaacacatacaaaaaacctgcaaaaaaatatgtagtactgctattccatttagttgtcccaatctgcacacatttcaagtggaaccgaagcaccagaatgattccattgaataaaagaaacttgctagggttcaaatactgagacaaaactgaagcactcactgaatgctcccacctcctcgcttggatagggcgctggagatggccaaccagatcgcaatccctgaatacacaagtttcaaccgccacccccaccccccccccgacgaacctccatcggcgtggcttcctccccgtcgatagatgagagaaaacagctgcgagagagcgaggagcccgatgagcaaactgcaaaaacaaggaacaaaaggcgaggagcgcgaggaacaaactgccagtgtttaagcatggaatgaatctaggatggcgaacgaacgagatgaagctgaggcagcagggtcgcgcgctgacctcggccttcgcggagggcgcgccgccaaggtcgcccatgtggatctcgctgccctcggtgtccatcatcacggcgaccgcgaaccctttctcgtcgttgagcctccgtacagcgcggatggcttcgcggtgccactcgcggtgaagagcttgcggctctcgccggcctcctcctcgcccccgccaccaccattgccgacgaaccgcagggaggagttagggatcggatgtagggaggggaatgtagcctggtgctagggtttagggttttacctggtcgatttgggagtgagaggagcccgacgccattacggaaatgcagcaaagatggggacggggccgggggcagatggcaccggatccaccttcgcggcgatcgcggcggccgtggcgggtttgcggcgggctgtgcgggcgtagggagcggcatggcggcgggtgttcgtaggggcatggcgtgcagatgtgtggcaggatttgtagggacggcgcggggggtgtgggcggccgtgcgcgtgatccgcggggtaagggaatcggcgggggcagtctacactgtgctcttaatagttagtagagatatataagtggggtataaaacctgctccggtgcaagaaggtggccgactagccgagcacactgtaccttcagtagacctgggctagagtcattgatcattgttacggtcaggttgtctggttgagtatgtgaaagaaggtcaggttgagtatgtgaaagatcttcagtggacctggttgagagtcattgttagttcaggttttgttcgtcgtaggttagtggaaatgcatctttagattgagccttagtttatcagattcaggtttgttaagggaggcattaagcagtgtggggttgactggttgaacgacctatctttcctgtcccttcttcaatccagccttgttggtggcttggggtgagcctaagccacgccgatcaggcttagggccagatccattggcccacataggttccagcaccgattccatcttatacatgctatttgctgagattttgcaatgccactgaagctatttgctgacattttgcatcaagtatgtataattgtatatacggaaaaacaaatgaggcaatgccacacacatcttatgctgccaaggctatttcgtgtcattcttctctaaaatctaaataaatctgtattaatagtagttgccaatgtattagtctagcttattatgagaaaaaaaaactcgttaagaaatggttcttaattttgtccattaaactcaaccactaaagtaggaaagtacaaaaccacataaaaatgtagagctggttggctatgcacatttgcccgttagacccacctctgcccctgggaagtgttcacatcaactctgcatgtaaggaaacataaactccatatctgatataggttttagtttgatgctatattgaagttgatcctcctttcaggatcaatcagtatcatgcactgtatgaatcatttatgctgtagggtgggcatagacattggcatttggaaacgctttctcagtcaaagtgctatgtgcttatatgatactgtattatgaagcttttgtgctagatacaaagaagttcgcgaaataatactactataatgggctcatatgggtatattttgggtactttgcaaatacctgacaggaaagttcaaatctagtacttataattcagggctgtttatgtaatccattcatttgacttggattctccttgaaggttgataggcaccctgagttcagaaagtcaag

SEQ ID NO: 821 - DNA, 18445 bp, Zea mays
  Intron number 3 from transcript GRMZM2G178319_T01 (locus G RMZM2G178319) derived from phytozome v7.0 (chr-ID 3; pos 7 7018530 to 77036974)
ggtgagtattcttttgcaacaattgattctcttatattttaattgtagcataccttgtgtacatttcattcaattgtaatggattgtttgtctgttaccttgtttattgttcctttaaatggatttcccatcagcgctagaatattagtctattaatcgcatgttgtaattaattgaacaacacagaaaaaagggtaaaacaatacagtttttttgagagaattttgaagaatcctttgccaaggccaattaagacatggaggtagtatgtcaaagtgttgctaggtgcctaggtgtctccagtgcgtagttttaaagaaaactttatattgcccatcgcattctacttcaagaaaactttatagcactcaaactgccaaacacacaatcaatatagtcttactaaacctcatggtccttcattatttatttaagaattgaggtatgtttcaaatttttaatcaagcaaatcattagaagtcatgaaaagaaaatataccttctaagggttctggacaaaccatcaccttttacttccatgtcgacagagtctatctaacgtaggtgatataacttatttagttattttctatgcaactttgtcatccaatttttacattgacattactctattttaattccatttttttatttgtctcaccatggaataaggagcaaaaaaaaatctgttagtttctcttctttccattgcatcctgaaggaggtttctacactgaggtttcaataaaattgctttgggtgtaagttgttacaaaatatctacctaaatccagagaagaatcattagggaacacctgtatgtttgctttttgataggccgtcacggactattagggtgtgtttggttgaggagtggaggagaatagagtgacttcattccaattttctggacgtttggtttccaacaaaataagagtggagcggctcctggatctccatatggaagtttactataagtagttggaacgctcccgctccgcaaaaatgaccggatgcgagcgctccagtgttcttaaggcgtcgcctaggcgatgcctaggcgtccaggcgcccgggcaaaactggccgccttgctcgccatacccgcctaggcgtcgcctaggcgctaaggcggttggctggtgcacttgctcgcctaggcgccgtaagaacactggagcgctctcccggatgtgagcgctctccctcctctcatcccctctacacttatacggctctcgaaccaaacaaagaatggaacggctccaatctattctactcttcaaccaaacaaaaaatggagtgactctgttctatttgccaaacgcagaatagaacgcttccattctcaaaaactagaatggaaccgctctatcctagttggctctccaaccaaacgcacccttaaacccagcatgttggtaaaatccatgcttcaagtagccgcagtttgttggtgtcaattttttatatgaccgcacggagtactgtttcaaggagtccatgcttcgagtagccacaatactgcttcgaggagttgagacttttcagcccaacttgctgtgtttaatagcccaacttgcttcactgcttcagcatggtgaggagagaccgagagagaattatggatttttctgttggcgtcatttttatataatggcagtggtgttgggggcaccaacttcgccatgggttgagttgatggctccaatagagactttttaatagtgtataataactaggtgactgacgaagaaaacccccaaacccctgcaccacccatacacagcggctccgaagcccatgtgagaacggccacgacgcgaaagggcctctagcgtaatggttaaggcttccgagtagcacctccaggtcctgggttcgatccccctcgggggcgaatttctggcttggttaaaaaaatcccctcgctgtgccccgcccgctcccggatgagaggacagtgatcagaatcttgggaggcagtactttgaaggaggacatttggaaataaaacttcccagtccactgagcagaacaccctatccagcttgaccagaactggatttacttgctggttggaccaagtatatcgtctcccatgcaagggaattttttcagggctaggtcttcaattaatcttttgaacctattcatcatagctctgttgaaatgattggtattcttgtcagaagtcctgtagataagattgaagtccccagccaacacccaaggccctaagcaagcagttctgatatctcttaattcctgcataaatagcagcttctcagcatccccttgcggcccatacacacaggttagccaccatgcagtcccattctctttacaaaactgaaccgacacactgtgattatcaattctgctctgcccagttgatttaagatggtgtctccacgcaaccaaaatgcccccactaactccaacagcagggaggaaaatgtaatcgctgaaattagaacccagcatggaaagaatggtttggtaagggatattctgcatttttgtctcctgtagacaaacaacatccatcttaacagtttcaacaaaatccctcacagagtcttgtcttacagatgagttcaagcctctaacattccaaacaaggatttttgatgggtccattaaaaaataacagcaagggagcaaccagcgcaagaccctactcaaggctccaaaacagaaggagcactccagccaaacaaggctgcaagggcttcaacatgacactgagacaggggttgggaaaacagtttggcgtatgcatcaatagcttcctgactgatgtcctcagtttctgaaataatgtgcagggttgccatagcttttttcatagatcgtcttcctaggtcctgcatgataaattcaactccaaccccagccactctacgacttcttcggggagcagccagcgatgagagtggagaagatgctttcttgtgtactttgatgcaaggatttggcagtaaagcatccggcctgatagcaactctgttcaggaaatactcagcgcttggacagctgatctgttttgccacatctgagctaacaacctccaattcagtcaagttattcagaacctgctcagcatctcttcttccatcaacaaacgcctggacagcctccgtatcctggcaaaccttgtttcttggcatttttctggtatataccttcagggaggtggaagtctgattcttcccaaaggtcgcagaggagtaagaaacacttggcggggcttcactgttcgctgtaattttatggggaattttatggggcgagccagaaacaattctctccagcgtctcctcaggctggttatgagtaggcgaagagaatttattctggcccagcgtccctatcacattgtcattaaatatgggagataactgatgaggcgagttcaggttggtcaattccagcggcccatccaagggactgtgatggggcgaagatggaccaaacgaacccagcggcccatcaagggttatagcttcatcatatggttcctggtggggcgagtcatggcacaaactctccagcggccctgagacaaaggttcccaggtgcggagaagtagtggcctgacccagcgtcccttccaactgaatgtcaactcccggttcactcccaggcacaatttccacatgtgcgcgacccaaaggaagtcgtgggcccagtcgcaactgaaccggccgccgtagctcaacagggactggccgccgccgatgcaggggatcttgatcctcagggtcatcatcatcaggttcccttcccgacggagttggaggaggaggtggtggggtcgccgatgtcatctgtagggtcttcgatggaaggatatcaatggaaatcttataagttaagaatctcttttcctgatcatcgatccagcctccaagatgtgtaaatccattttcctgaccagtttttcaggatcaaaacaccatgctttcactatcaaggctgaaaaatccctcatttccaaggcatctgaatgcaatgcttcaacccaacatgagtccctgagcaactgttcagctgtagatctacaccaagcatgttgaggaatgcctgttaatctaacaacaaccaactcagccattgacgatgaggacgcatgagcgaatctggaccatcttttgagcagcaagctgaaacggggtcccctcagaggtcttccttcgttgagaacctttgttgccgtgtcttcatccggtagaaacagcaggaaatcttcagggtaggtctgatgaatcctcatgtcctccaacttgacaccaaaacaatgtctcacttccttcagcacgtcagaaccagaaaccccaggacgtgaaccagtcacagagacgaacatagcacgtcgaagggcaatttcctccctagcaaggtcttcagaaaaatccagaacgcaggaggaggcagagggtggccaagccacctcagatctgaaacaatccagctgggggggggagggggaggtgggcatgtctgagtgggacccaaattctgcgcagctgtatcttttccatgtttggaccgtctttttttcctcatgggccgagtacacatcttgttgtctgccacaacaattgcttccgacgttgcatggtcctgtgaagaaacaaggcgcttccagactgaagcctttctgcgagacggttcctgaaaattatcctccggagaaggaaccaagtccatgttggaaagcctctgccacaccggaggtcgcacaggagcccttgaccacaccagagccttctgggaggtttcctgccgcacctgaaggcgcgtcttgacgcagcccagacgctgccacaccgtcggcttcttcgtttcaaccggaggggttgagcactttgccgcccggtgtccaaagcagaagcagcgcaggcaccgagtaggccgccgacaggaagcaacgaggtgggaggtagagaggcagttgtagcaccgacctcggaggtccacacgggacccttgacgagggagatggacaccccgagacctctgcctacgaccaactacttgccagccatcctcaaccaccgggagggtcgcaggggaaggacagacagcgcagagacctgccgagggagaaggggtggcggcgcaatccgagctggagaggacagcctctttaaaggaacgtggggatgaagaggaacctccagccgaggagtcgccgcaccatctctgagccttggaccgcccttcctgggagagaggccgccgtgacagactaggcccagacgccgagggggtggaagacgaggaggtggtcgccggtgctggggtggtgaccggcgaggggctggtggagaggggagtggggaggggaaacgtccggacggggtgggagaccgaggaaggagacgacccgccagggcagggagccgaggcgtcgccagggcagggagccgaggcgtccatctcccgcggacttggatatctcaatattatctagagtactattggagttattatcgactacctttcattgtgggatttgattcactcaattcagttaagacaggatgttgcacacatgcacatatctttcgtcttgctgctaattgcaaatatacaacaaaggcagcatgtgaaagcttctttattgggtcgacgccttttgaaccttttcacagaatatggagaacatgggcaccaccaaagacaatgttcttatgctggttagcaggtttaaccaccggactgaaagtctcttcaaaatcaatacaggacgttgggtgaatccacgaagaacccaacgagcgttgtaggctcaagagacccattgacattgaacttatgcttgaacacccatttgccagtgaccacattagacctaggcggtcaggggatgagatcccacatgttgtggacagaagggtagagaactctgccttcattgtagctcgctaatcaggatcagcgagggcgacacaatagcttgttaggacagtggacaagacacctaaaatagagcaggaaaccaaaaccagacttgctgcgtgtacacatgttgtgctaattgtccactggagtaacaacggcaacgtcgagtgggagtggaccgacagggctggccacatgcactggaatctggactggggaggtacgattagtggaatggatcggatcatgaacccgccagcagtacaccggcctagcgtttatgctgagaggaggcaggcatgccggtgctgcacagggcgtagcaacgacagcagccgcgcatggcgcggtggagtccatgggcgcggttcgtgcctccaagccaagcaagtgggatgacccatgcgaggtcagggtcgggcgagcgtcaatgtcgaccggaagcatgctggtgccggtcggagacccactgcgtgtgggggaatcctcaggtgccgaggccgtgtgtggcgcgacaggggtgctagaggcggcataggcctaggtgccaattgagattaggcgaaagcatcagggggagtacttgcaggcataaaaaatggtgacggtggaaggggcaatgcttaataaaatcctccaagaaatcgaagtttgcttgtgttggagaggggggggggattttcgagaacgggaaagatgtttcatgaaaaaatacatgtcgggagatgatgatccttttagtgtgacgatcaaggaaaaggtagcccttgtggtgtgtagagtagccaaggaaggcacacaaggcagaacgaggagcaagtttattatcggcgatggcagaaagatttggatagcacttatagctaaacacacgcaagtgatcatatgacggctatttcccgaagagtgagaagtgcagcgtagagaagttgagtgtcttggttggaaggatgttcaacagatatgtagcaatgcttatagtggcaacccaaaacttaggaggacgctggcctagaacataatggagcgaacgccattgttaatggtgcgaagaatgcgctcaagtttactgttctgagtggaggtttagggataggacatgcgcaggcaaatgccgttggcgaggaagaagatgcacgaactggagttgtcagactttgtgccattatcgcaccgaattccctgcacagtaacaccgaactgtgtgcacacatagacgaaaaaaacatacaaggtaggaaatgtgtctgacttgagatgtaaatgaaatgcccataaataatgagaaaaatcatcaagaatcacaagataatatttataccctgaaacactagtggtagttgaggtccaaagatcacagtgtattaactcaaacgggcgcaaagtgcaagatgaagatgcaggaaagggaagacgaacatgacgaccaagctgacaggcatggtataagtaattattagctctcttggtacatctgatagtagaggggtgcactaatctagaaagaacttcgggaccaggatgcccaagacgttggtgccaaagcgacgcggtgctagcaaggagcacgaatgctgggagctgcaacgaatagagtggaccaaaactattacacttgacgatcctggtccgagtgggaagatccttcacagggcaaccaaagggatcaaactccacaggatagtgattatcgatagtaaattggcgaacgaaaattggattattaataagattaggggaaaccaaaacattatttagaagtttataaggatggtggtgccaggggaggtggtaggaaggagattccaattaacgataataatggacgagagagtgactggaagaggggggaattgaaagggtacatgcgtcggatgcgatgtgattggtggcgactgtatcaaagaactagtttttttgtggaggttgttggagtgtcgtggtttggaagttggttgctagagcctgctgatcccagccttgagacagagagggatggatggatgcagggggagggacgccccactgaccagcccattggccgggaggaccgacaacgtaggactacgacgcctgtcgcggctggtagggcacgtggggatgtggagctgttgaaacttgtggacccgaccacatgtagatgttgccggttcatgggttctggtaggtgtagatgacgggaggggagcacctaggggtgttggcgccacccttgaagcaccctgtgcaccaagggaggaagaggtggtgtccttgtatctcttgccaccatgcctgccatgtggttgctgctgtggaagtcgtggaggctgctattgcaggggcttggctggtggtttggagccaccaacaccaccaccagagtcaccaacaccaccactagagaggacaacgagagcttcaaccagaggagccttagccatgttgcgctcctcgagccgtaggtcgtaccgaacctgcaagaatgagggatgtggcttggtgcatcgaaggtggagtccaagagcgttaaaacgctcattaagcccgtggatgatgttgaggatgagcatctcctaggtgataggctggccaaggtcctagatgtcctccaccatgcacttgaagcgacgatagtagtaaatgacggacatgttgccctggagaaagcttgaaactcctggtcgacatagagcgtgggttgtgtggttcccaaggaattgtgattcgatagcgagccagatcatgcgagcagatgtgccacgcttagagacaatgtcttcgaggttgtcggagatggcaccaagaagccaggtgcggacgactctgaagccaggaagacgtgagaacaatgtcttcgacgtagagaaggtgtccgccttggcctcaacaaaacccagtgagagcaagaaagtggtgaaacgactgtaccaagctcggggcgcttgcttgaggtcgtagagggatcgattgagcttgcagaccatgtcggggtgaatcgggtccgcaaagccgaccgactgagtgcaatacaccgtttttgtcagagtgccatggaggaagtcatttttgatgtcgagctgatgcactggccaaacctgtgagagagccagagttagagcagttcggatgataataggcttcaccacggggctgaaggtcttgtcatagtcaaccccaggatcagtggcgggcccaggatttaaaacatgggtattccaaattattaaggggtaaaaaaattggtatgtatactacttccgttcacaaatatgtgacactgttgacttttttttgaaaactttgaccactcgtcttattaaaaatatttattcaaaaatgtaaaattttaaatcaagcacaaattatcttaagtgataaaacaaatcacaacaaaataaatgataactcattatttttttaataagacgagtggtcaaagtcttttaaaaaactcaacggtgtcatatgaacgtagggagtaccatataaagtcttacaatttgatacgtgtaataccacaacatattacatatttatatatcaacaattttataacatatgcattaaaatggagtcttagatgagcataagattgataaaaattgaaattattttttgtgtttatcttttgtattgaaatcttgggtattcatttgaatacccttataactatattaggcccgcccttgcccgggatgctgggggaagcctcacaggaaccagcgagccttgtaccgtccaaggagccatccgccttcaacttttgcttgaagatccatttctcggttaccacattggcgccaatggggcgtggcaccaggacccaagtgtggttcgcctgcaaggcctcgtactcctccatggcacgtcgtcggttagggtcggcgagcgcactagttacggaggatggctcgggggagagcgccagagaggacgacgctgtgagaaccgggcggtcgataggctggaggacatcggcggctcgccgggtaaccattaggtggacgtgatcggggccccggtggagggcaaaggggtgatgcactggtgtctcatcgcgagagggagccagtgcatcgcctagccaggccgctggtagatgtgaacaagatctgcgaagcgtgacaagaaggttgtggcagcgcgggagactccaaggccacgcgtggcggcgcgggagacaacgatgccgcacggagcagcacgaggggcgtcggggctgcgcgaggcgcggtgggggggggactaatagggggagcaggaagcgaaggagcaagaggaggaaccacaaagttagcctcgaggagggtgtcctactcagaggaggaggcagtggaagaggaggcggagacggggaagttggactcgttgaagacgacgtgatgggagacgatgactctgtgggtggattgtggagagtcaaggcacatgtaccatttgtgatcaggagagtatctaagaaagagaatgagtggagcgaggcgcaagcttgtggatggaagtggtagagagattaggatagcaggcgcacttgaaccctcgaaggtggttgtaggagggagaggtgccaaagagagcaaagaagggggtggggtgacgaaccgccttggtagggaaacagttgagcagataggtggcagtggccagcccctcggtcgagtagcgagtggaaagggaggcctgaaataacagggagcacatgaacgccgttcggggaagaagtgtaggagcacgacatcctcagctgaacgccgtgagaaaggaagaagtcgcgggacgcggagttatcaaactccccgcctgttgtcacactggacactctagatggtacgtccaaattgagtggaaacccaagcgaagaagtgaaagggcgtagggaacgtatcatggaggagtgtagacacatgtcaaaaagaataattaacaggatgtgcaagaggccatgttaaacgaaggtggatttcagatattaagggcgctttgactatgggagccctgatagactatttatatatatatggaattctctttctcgcccgtgtctgcagccgaacagggaggatagacacatctttaccagggcctctgatggcaaatactcaacgaaagctgcctataatggcctcttcttaggctcgaactcctttggtcatcacaaaaggatttggagatcttgggcccctccaaatgtcggttttttatgtggctggtggctcaatagatgttggactgcagatagattggcaaaaagaggcatgaatcgtcttgctagctgtcccctcattttccaagatcctgaatccatcaaccacctgctggtgtcctgtgtattcacaagagttttctggtatcctatgctaagaaaatttggtcttcacagtctagcccctcagccggatgctacctcctccttgaactggtgggaaaatcttaagacattgtttctgggatggttaagaagggcctggattccctcctcatcttgggtgcttggatggtttggaagcaccgaaatagggtggtgtttgatggagccactccagacctcacccttcttagatcggttgaggaaatgcacaaatggcaattggccagtgccaaagtgaaagttccctttgcccgggaacatgatctggatgtcgcctagagggagggggggggggtgaataggcaaataaaaataacacttaaaaactggaaattcttactctactcgaagactggatcacagtggaatgaaagccacttcgagtagatcacagcggaaatgaagttcctgtttcaaaatatcctgcactacaagacaacttataccacagataagtattgaaatgcaagtataaaaagcaattaagacagagagacaacacacatgacagagcagagcacacagatataaggatttatctcgaggttcggccaagcctgaaatgcttgcctagtcctcgttggagttagccacaccttggcttggagtctatttcaactccttcctccgtttgctcagatctgtcaatgcgacagatagagccttccactatgctgatgactgttacaacgacgccacggctgcttacagtcttcttgacagcactccggtagagtaacaacgatcaagatcttgctcttagcagcagttcccctctctctaaagtcttataactgcacctttacacaaactagagagatacacaacagagggagagagtatgatcacttgatgtatggacttgttggctgcacatctgtttgccaaatgggcgtctagggggtctttttataacccaattgagcccctagtcgttgcctctttccttgtgaagatctcaatttccttctgtccgcggtctgtttccttctacgaccgagtcaaccgttgcgtgccttcggtcgcctggcacaccggacaaggcacgagggacctaagtcatgactcgctcgaggccaacgacacgcccgaggccacagctcgctcgaagccatggctcgtccgacaccatgattcgcctgaggccatcctcagacgagcgatgtcgtcacgactcgcacgaggacagtcacgactcgcccatgggtgtctcgggtgactgcccggggaggtccagacagagccaaacttctccaactcttctcttgatttcaactcttgggaggatcttcctgtgacttagacaaacatattcagagtataattcaattgactaagtcccagaagatgacctcttctcctagcttttcggtttcacctcaaacggagcttcagatgacactttctctgcatacttaaccttcttcaccattttgcttttttagcttgtttgaggtcgatgttgggcttcaaaactccaagtctccaagacctgattcagattgccatctatgagctccaacaccctgcataggtcacatagaacatatccaaatacaggaacaacccaaactcagggtcaaagctcttttgggttgcttccaggttctggctttgacactactcctcctagtgatcttgctctatgtcttgagcttgatcttcagttttatgacttacaccacataactatagatgttacctcattggttgtaagtcatgtccttagtgattctcgatgcaccatatcttctcccgtgcactcggtacctcgaagctcttcttgccttcatccttggcttgaccagttgtctccaagatatgcataccaagttttacataagcaatgttcttcacttgtgatgtccacaaccataaccaactcagcctcgaccattactcttgaacacttgtgttgaacttaaaagctttatactaagcacctgtcaacacttaacacacctgtcagccctttaattgggttgtcatccaaaccaccaaaacccacaagagagctttcacaaagcgctttccttggcggcgccaatgtctaatgtttaggggaggtgttgagtgttgttgctgttcttaagtgaccagatggatagctttttgtatgcttgtttttggcctccctaaggggaaggctttgtatttttgggtcatctacagacctgttcctttcttctaatatatttataaggcgtagctctcctactcttttcgagaaaaaacgtatcaaacttcaagcgcaagggaaaaggccacatgaaatgatagtaatcatccaaaatgagcaagtaatatttattgccagaaatgttgagaacaggggatgtccaaacatcacaatgaaccaaatcaaaattgcttgctgctctagaagatgtgggaaaaggaagccgaacatggcgacctaactgacaagcatgacacagatgctcaaaagagtgtctactacaggagatgacggaactggtagacaacttggacatcacatcaagcccgaggttgccatggcagcagtgctaagtgatagacgaggtagcagcagtcaaggcatgtgggatggaggtcgggaagaggaggcaggcaggcagatgaagtgtgtacagcggcccgaagctgtgtcacaacgcgcaagaagggtcctggtagcaagatccttcattaacagaccaaaggggtcaaactccatagaacaagagttgtcagtcgtaaattgacgaacgaaaagaagacgctcaataatgttgggagaaacaagaatgttcttgaggcggaaggggtcggggagaaccgcgtcacctactgaggtgacggggaggactgacccattgccgactacgatgaaggaagagaagggtggggaggaagggtggaggataaagcaccgacgtcaggggtggtgtggaaggcaccggagtcagccacccagtcagtgatcaaggtgggaggcgtcaatgtaatcgtgtcgaacgagctagcaagagactctcacccgccaccccaagggccgcacgaggccatagaggggaggcgggagagtcaagagacccgactaatgctgaggtgagctggtagcgccgacaggggcggagcagtatagaaggctagctgaggggcgacaaggcgtggcgaaggagtacccacaaacagtctgggccacatggagatggagttggtctacgacttgtacaaggatggccacgagtcgcttccccagttcgctggtggactacctgggccactatcgtgatcatgaccacccagacgacgatgacaaccaccgccagatctggtagccggacaaggagcgccagtggccggtgggggcgcactcggacgagggggcgcacccccggtggtaacaggggatgcccgctagggctgccagtgtagagggccgtcacggtgtcggtggtgacggcggccatagacatgagttcctcaagcaggggatcatcgtggacctgagcgaaggatggaaatggggtgatccatgtgaggatggcccgtgggtgcgcgtatcgaggattgagcccggcaggaggttgagaacgaaagtctcgtccgtgaccggagaaccaaggtcacaaatggtgtccgccatggtcttcatcctccggcagtactcagtgacgaagagatccccttggatgagctggcggaagaccgtgtccaggtggagaatttggacctggcggttgtcgaggaactgagcctcgatacaactcaggcctagcgaacggtgccccccacttgtggactacatcctgcatctctactgtgagggtgccgaggattcaagagaggaccacattgtccattcggcaccaggactgcgtcaacacagtaatgtcctatgaggacgtggtcatcgagggcgtagtagtgaagggtcagtaggacctggtcgctgttagagtatatggttaggcccatgtggcccatgtacaaacactatatagctaccctctagggttagccctaataatccaattcattaccttaacagtcgcgccagcggatgtactgggccgaagacgtccgagacgagggaccagatgatgaggaggccgaccgcttgagcgtgaaggtggatgatgaccgacatgtcgggtgtgggggagtcgtaggcttcgtcagggtcgagaacggagtgggagtcatcgcctaggacttcctcgaaccggtgggcggcctcgagaagctggcgctctagggcgtcgtcagcctgtgcgcgctgacgggcggcgacgagggtggtgggaacattgtcgggagcgcggcgctgggaggaggtgagtgtggacgagtgactgcagatcggtgcatccaagagagtccaaaacccccttgctagggagtaggacccgacagtgataggcgcatccactggctgcgacggtgtcggggtcgacgaggagggcgcgcagggctgcatctgggccgcatctacgtcgtggagagcatcttaggcctgtcccatgctggtgagggcagtggagagggcggcgagagggggggtggcgtggaagtctctgaaggccgcgacggtgctggcgagagcacgggaggccgggaccgtgtcgagggaaaggtcggcggcctgggtggcggtggcgctggatgaggtgctcgtgcttgcactgctaggggggaggaagcgacatcggcggctaggggcagtaggaacagtaggaaccccgcgcccgcgcggaggggggaggcggttgcgcccgcatctagggaggtgacggtgccaacagaggggagtggaggggcgccgtcgaggggagggaaggggacggcggtggtgaaacaggggggttgcctgccatggaggaggggtgcagcggcggcgaataggggccggacggccaggggagtagagactagagaccgacgactggggatgggagggaggcaaagaaagaaacctaacgtagctagatactatgatagaagtggaaaacctttgggtgatgtattaataatagtgtttggtgggcctaggcccaatacaaatgacagccacacaatacatcagcacacacacaatacatctaacagataattcattcgcacccaggaaggagatgttggggcgacgatgtcggagtggatgtgtggttctagtgagtacttgctgaggacgtcgaggaaggacttgtagcgagcgtagaaggtggagttgacgttgaggacgagcgggaccagggaacagatgttctggacggagaccacctgctgggagggtctacctgcattagaggcggtagcgtcggtggccccatagggagcgagatcctcgatctgaagtggtgcagccgcgacccgctcacgagttgcatgttcttgatcggaacgaagttgtgcggagatcgtctcgatctccttttgcatggcggtggcttcatagttggcctcgagggtgcgcgccaaggtagcatcgtgggtttcctgttccgcgcgctccttagcgctgcaatgggcatcagcatcagcgccgggagcggagggagagttcttggtggcgacgtcatcgatgatgaagaaatggcgcagggccggcgggcgtgcaaaggcagcactggcaggcagcgtataggctcgttaggagcggcgccggtggagaaggcatgctaacagcagtgcggcatgagaaacaaaacctagactcgtgataccatgaaagagattgaatctgtgtggaatattgattaatgagagatacaaaggttacaatatatagggctgcggagaccttgggcaaaagaaaacccataatgaagatctcctcagtaaaggaaacccacaattagggatccaaatgccacaaccaggggatcccctgaggacactctaacatatatatctctacaacaccaaatatggggcggctggctatggagccaggcgcaggacctctacacacaatagtctaacagtgccttgctgccgtgtggccacatgctctttgtcctctgcattgccaggggggggcgtgagcagtgaaaacagtatagtggtagcgtaggcacgatctcagatccagttggtgtggccctttgagacatagactggcaccctccgcttcacctactgcattgccccaagggatgggcccgacctcatcctcggtggcaacagtgtcagtgtgtcaccatgaccccacagctaaactagatagggtccaggagtggagcaggcagacatgggacatggtggtggttgggtttgcgagatgggagatggagatgcggatggcaggcgccaagggagaggagatgaaggagtttgtgggcacttggaggtgtggaggcaaggaatataatctcttcatcgtgtggaggcaaggaatgcaagtagcatgcagggcatgaaggcagcggacaatcaggcagaagaaaaaccctctgagttggatgaaaacttttggcagacgtggagacacttcatatagtagagatataagaggtgcagaatgatcactattcactatattgtggttttctactaagagcttgaatcttgaagtatactagtcaaaacaatataatctgttggttgtaatggaacattaaagtcagtttgaatttcataattgtgtttgttactggtagagagattaatacagtaaaaagcagatgtgtctctttagtcaatgtcaaaaatataaaattaagcttttcaatcaatagactatcacaaactaatgaattcatgagcgatggccgcattagggcagtttaggatagcaggctcacctgaacatgagcggggtctggaaaagagataaactgaggtgtgtttgtgtgtgtttgtgggtctgtctgtttcggggtatttttcccctttttcttcttaatatattgatgcgcagctctcctgcgtgttcgagaaaaaaaaagtttccccccacaaatgcaaatctggaaaagggatcaaccaaggcaggtttcccccaccaattcagagtctgcttccaacctgtgactgatagttcttgtcactgcaccaggcatgccataaacatataaattgctttacttttttctgttggatttgtcttgttgaatgaggagaaatgtgtgctatatgatggcttgttctggattactggcagacattgggagcttttttcttatcatttccccatgtttacctttttacaga

SEQ ID NO: 822 - DNA, 812 bp, Zea mays
  Intron number 1 from transcript GRMZM2G344167_T01 (locus G RMZM2G344167) derived from phytozome v7.0 (chr-ID 1; pos 2 41339432 to 241340243 reverse strand)
ggtccgaacacctgcagcgagggctaaaccaaagaggagaagccccctacctgactagtacccaagggtcccactccgtgacatcacatcaatcgtaaaggtggtgacctatttccctagactgtatttggatgttccataaatttctttaatattctgtatgttctgtgctaatattatgccataaacttcaccatgctagaactaatattgtgtaacaatgatttaattgaggatgacagtagcatgaaattgcaggctaagcaagtcttttatgcttaatccagtgattaacataaaaattgttgtagttcaaatggattagcaatgattttgttaggccaatcagcacccttttgttttatttgattggattttgctgttctcagtttatgcagtcagcaatatgaatgtgcttaaaaccagagaaaggtctaatgctcccctctttcaaaatttaagttgctttagttttgacctaagccaaactcttctaactttgctcaagtttatagaaaaaatatttaacatatacaatttacgatactgaatgaatgcgttatttaagacttattttttttctcgaacaacgcaggagaactgcgcgtcatttcatttaaggaagaaaagaggtacaagggtcaagagtgacccgaaacataataaaggtaaaaaaatatcctgtcactttaccccagccaccaagtattatgaaaaagaaaacaagaataaatatcaaagaagaaaaggggatacttcaatgtcttctgttgctaacttgatgcatcttcaatttgtccagagagtcctca

SEQ ID NO: 823 - DNA, 14136 bp, Zea mays
  Intron number 9 from transcript GRMZM2G463891_T02 (locus G RMZM2G463891) derived from phytozome v7.0 (chr-ID 4; pos 2 40422468 to 240436603 reverse strand)
atcccaatctcgagcatcgatatcgtaagtgccgagaagaatgtcaacagaaagacaaagatgttattaaacaattagttggcatactccgtggaaacccgtactctgagcaccttaggagcatgggccatgttgagaaccttgatgactatcgtatcacactgaaccttgaccagacgttgaaccaaaagacatataacatgcctctcacttcagaggtcgctgctgtctggatcgaggggagcgaacggcgaggccagtttagcaagagtgttatgctacatgggaaggataggtcaagccacggcatccgctcataccatggatgctatgatgcactatcgtatccactgttcttccctagaggtgaacttggatggcatgcaaacataccaaaggtcggtgtatccatgggcgaagtggatgcataccgtgcgacgcatagggcaagtaatgcaaacgatgaagatgcaggttagttgtttctttgatatttcttacataacccattgttaactatcctttcaacatcacaaaatgatcaatccttacgtatgcagaatctcctaatcatctatgtgtgtccgtacgtgactattactgctacaaattccagattcgtccagggatattcaatccaatactctatggtaagcggcttttccagcagttcgcagtcgacacgtacatcaagattgagagctcccgtttagatttcatacgtaagaaccaggaccggttacgggctgacctgtaccagggcttggttgatagtatgttagatggagacataagagtagaaaaggttgggaagcgaactgtgttgtcaccgtcgtttattggtggtactcgtgacatgcgacgtcggtatatggatgctatggcactggtccggaagtttgggaaaccagacatctttcttaccatgacatgtaaccccaactgggatgagataaggacagagcttctccctgggcagacaccgcaagatcgtccggatcttgtagtgcgtgtctttcacgcgaagctacaagagttaaagcataggctgactaaacatgatattctcggtaaggtccgggcctacatctatgtcgtggagtttcagaagcgaggtttgccccatgcccattttctactaatcatgcagaggaagtacaagctcacgtgccctgagcagtatgatcttttgatctcagccgagatcccagacaaaaagtaccctgaactacgaaagatggttatcaagcatatgatgcatggcccgtgcggatcgctaaatcctaactgcccatgcactaagggtcgtgcatcgtgcaagaatcattacccccggcctttctgtggcgcaactttgcaagggaaggattcatatcctatttacagacgtcgtgatgatgggcgtaaggaaaaggttcgaggatacgaattggacaatagatgggttgtcccttacaacccttacctccttcggctcttcaactgtcacatcaatgttgaggcgtgcgggagcatcaaggctgttaaatacttgttcaagtacatatacaaaggccatgatcgtgcgtctgttgttatgagagatgcgagcaaggcagatgatgatgtagatgagatcaagcagtacagagatgcaaggtgggtgacccctccagaggccttatggaggatatacggctttgagcttagtcagaactctccacctgtgatgcagttgcagctccatcttccaaacatgcacatggtggcatttcacgagcgccaaatggtcgagcgagtcgtccaccgtccaggtgctgataggtcaatgctcacagcatattttgagacaaataggctacatgaggaggctcggggcatcctatatcgtgacttccctgagtggttgaaagggaattaggcttacacctagtccctaattaattttggtggttgaatcacccaacacaaacaatgggactaactagtttgctctagattatatgtaatacaggtgccaaaggttcatctataactatactaaatcgactgtccggaataccgtagattattccggacaggagaagctttttggaaaaacaggccaagcgcggaccgtccgggcccttgcggcggaccgtccgcgacacaaggatgtctctcggacagaaccaatgcaaaaatacaagtttccactacggactgtccggaggaaaagctaagaccgtccgagccctcgcgcggaccgtccggcctcaggcgcggaccgtccggtcggtaagaaaccaaaaaacccgaaggtaacgggttcggaaaaatgaattatagggggcctcgcgaaccgtccggggtacacgaccggaccgtccgcgactggctctgtctgacatctgacgacgcattaaatgcaatatagccgttgatatagccgttactgctgaccgttgcattttcagccgttgatctacaggggcggaccgtccggacctggctcgcggaccgtccgcgctcagcagaatggcccaacggctaggaagtggttggtggctataaatacaaccccaaccacctccattcaacacatccaagtattccaaccttcaacattcaatacaagagctagcaatccattccaagacacattcaaagcctccatctctccaagtttcactattgagataagagatcattagtgatccgtgtgtcatttgtcgctcttgttgcttggcttcttttttcgtgctttcttgattctctcattgcaatcaaactcacttgtaattgaggcaagagacaccaatcttgtggtggtccttgcgggaactttgtgttccaagtgattgagaagagaaagctcactcgatccgtggatcgtttgagagagggaagggttgaaagagacccggcctttgtggcctcctcaacggggagtaggtttgcaagaaccgaacctcggtaaaacaaatctccgtgtctcacttgctcattcgcttgggatttgttttgcgccctctcccgcggactcgtttctttattactaacgctaaccccggcttgtagttgtgtttatatttgtaaatttcagtttcgccctattcaccccccctctaggcgactatcaattggtatcagagcccggtgcttcattagagcctaaccgctcgaagtgatgtcgggagatcacgccaagaaggagatggagaccggcgaaaagcccactacaagccatgggagcacttcatcggaagagtcccgcaccaagaggaaggaaaagaagaaggactcctccaaacggaaggagaaaaagtcttcctcctctcaccacaaagagaagaaggaaaagtcttcttctcacaagccgcatcggagaggagacaagcacaaaaggatgaggaaggtggtctactacgagaccgacacttcatcaacatcgacctccgactccgatgcgccctccgtcacttctaagcgccaagagcgcaagaagtatagtaagatccccctacgctaccctcgcatttccaaacatacacctttactttccgtcccattaggcaaaccaccaacttttgatggtgaagattacgctaggtggagcgatttaatgcgatttcatctaacctcgctccacaaaagcatatgggatgttgttgagtttggtgcgcaggtaccatccgtaggggatgagaactatgatgaggatgaggtggcccaaatcgagcacttcaactctcaagcaacaacaatactcctagcctctttgagtagagaggagtataacaaagttcaagggttgaagaacgcaaaggagatttgggatttactcaagaccgcgcatgaaggtgatgagctcaccaagatcaccaagcgggaaacgattgagggggagctcggtcggttccggcttcgcaaaggggaggagccacaacacatgtacaatcggctcaagaccttggtgaaccaagcgcgcaacctcgggagcataaagtgggatgaccacgaggtggttaaggttattctaagatcacttattttccttaaccctactcaagttcaattaattcgtggtaatcctagatatactaaaatgacccccgaggaagttatcgggaattttgtaagttttgagtgcatgatcgaaggctcgaggaagatcaatgagcttgatgatgccaccacatccgaagctcaacccgttgcattcaaggcaacggaggagaagaaggaggagtctacaccaagtcgacaacccatagacgcctccaagctcgacaatgaggaaatggcgctcgtcatcaagagcttccgccaaatcctcaagcaaaggagggggaaggattacaagtcccgctccaagaaggtttgctacaagtgtggtaagcctggtcattttattgctaaatgtcctatatctagtgacagtgaccgaggcgacgacaagaaggggagaagaaaggagaagaagaggtattacaagaagaagggcggcgatgcccatgtttgtcgcgagtgggactccgacgagagctcaagcgactcctccgacgacgaggacgccgccaacatcgccgtcaccaaggggcttctcttccccaacgtcggccacaagtgcctcatggcaaaggacggcaaaaagaaggttaaatctaaatcctccactaaatatgaatcctctagtgatgacaatgctagtgatgaggaagataatttgcgttccctttttgccgaccttaacatagctcaaaaggaaaaattaaatgaattggttagtgctattcatgaaaaggatgaccttttggattcccaagaggattgtctaattaaagaaaacaaaaaacatgttaaagttaaaaaggcttatgctctagaaattgagaaatgtgaaaaattatctagtgagctaagcacttgccgtgagatgattgacaaccttagacatgaaaatgctagtttaaatgctaaggttgattcacatgttcgtaatgtttcaattcccaatcctagagataataatgatttgcttgctaggattgaagaattaaacatttcacttgctagccttagagtagaaaatgagaatttaattgctaaggctaaagaactagatgtttgcaatgctaccatttccaatcttagagataaaaatgatattcttcatgctaagattgttgaacttaattcttgcaaaccttctacatctattgttgagcatgtatctatttgtactagatgtagagatgttgatgttaatgctattcatgatcatatggctttaattaaacaacaaaatgatcgtatagcaaaattagatgctaaaattgccgagcacaacttagaaaatgagaaatttaaatttgctcgtagcatgctttataatgggagatgccctggcattaaggatggcattggctaccaaaggggagacaatgtcaaacttagtgcccctcctaaaaaattgtcaaattttgttaagggcaaggctcccatgcctcaggataacgagggttacattttgtaccctgccggttatcccgagagcaaaattaggagaattcactctaggaagtctcactctggccctaatcatgctttcatgtataagggtgagacatctagctctaggcaaccaacccgtgctaagttgcctaataagaaaactcctaatgcatcaaatgaacatagtctttcatttaaaacttttgatgcatcttatgtgcttactaacaaatccggcaaggtagttgccaagtttgttgggggcaaacacaagggctccaagacttgtgtttgggtacccaaagttcttgtgtctaatgccaaaggacccaaaaccgtttgggtacctaaagtcaagaactaaaattgttttgtaggtttatgcatccgggggctcaagttggatactcgacagcgggtgcacaaaccacatgacaggggagaaaaagatgttctcctcatatgagaaaaaccaagatccccaaagagcaatcacattcggggatggaaatcaaggtttggtcaaaggtttgggtaaaattgctatatctcctgaccattccatttccaatgtttttctcgttgattctttagattacaatttgctttctgtttctcaattatgtcaaatgggctacaactgtctttttactgatattggtgtcactgtctttagaagaagtgacgattcaatagcatttaagggagtgttagagggtcagctatacttggtagattttgatagagctgaactcgacacttgcttaattgctaatactaacatgggttggctctggcaccgccgactagcccatgttgggatgaagaatcttcacaagcttctaaagggagaacacattttaggattaacaaatgttcattttgagaaagacaggatttgtagcgcatgccaggccgggaagcaagttggctctcatcatccacacaagaacatcatgactagtgacaggccactggagctcctacacatggacctattcggcccgattgcttatataagcatcggcgggagtaagtactgtctagttattgtggatgattattctcgcttcacttggatattctttttacaggaaaaatctcaaacccaagagaccttaaagggattcttgagacgggctcaaaatgagttcgacttaaggatcaagaaaataagaagcgacaacgggacggagttcaagaactcacaaattgaaggctttcttgaggaggagggcatcaagcatgagttctcttctccctacacccctcaacaaaatggtatagtagaaaggaagaatcgaactctattggacatggcaagaaccatgcttgatgagtacaagacaccggaccggttttgggccgaagcggtcaacaccgcctgctacgccatcaaccggctatatcttcaccgaatcctcaagaagacatcctatgaactcctaatcggtaaaaagcccaacatttcatactttagagtttttggtagcaaatgctttattcttgttaaaagaggtagaaaatctaaatttgctcctaaaactatagaaggctttttacttggttatgactcaaacacaagggcatatagagtctttaacaagtccactggactagttgaagtctcatgtgacgttgtgtttgatgaaactaacggctctcaagtagagcaagttgatcttgatgaaataggtaatgaagaggctccatgcatagcgctaaggaacatgtccattggggatgtgtgtcctaaggaatccaaagagcctccaagtgcacaagatcaaccgtcctccaccacgcaagcatctccaccaactcaaaatgaggatgaggctcaagttgataaagggcaaagtcaagaagatgagccacctcaagatgatagcaatgatcaagggggagatgcaaatgatcaagaaaaggaggatgaggaagaaccaaggccgccacacccaagagtccaccaagcaatccaacgagatcaccccgtcgacaccatcctcggcgatattcataagggggtaaccactagatctcgtgttgctcatttttgtgaacattactcttttgtttcctctattgagccacacagggtagaggacgcacttcaagattcggattgggtggtggcgatgcaagaggagctcaacaacttcacgaggaatgaagtatggcatttagttccacgtcctaaccaaaatgttgtatgaaccaaatgggtcttccgcaacaaacaagatgagcatggtgtggtgacaaggaacaaagctcgacttgtggccaagggatactcccaagtcgaaggtttggatttcggtgaaacctatgcacccgtagctaggcttgagtcaattcgcatattattggcctatgctacttaccatggctttaagctttatcaaatggacgtgaaaagtgctttcctcaatggaccaatcaaggaagaggtctatgttgagcaacctcccggctttgaagacagtgagtatcctaaccatgtttataggctctctaaggcgctttatgggctcaagcaagccccaagagcatggtatgaatgcctaagagatttccttattgctaatggcttcaaagtcggcaaggccgatcctacactctttactaaaactcttgaaaatgacttgtttgtatgccaaatttatgttgatgatattatatttgggtctactaacgagtctacatgtgaagagtttagtaggatcatgacacagaaattcgagatgtcgatgatgggggagttgaagtattttctaggattccaagtcaagcaactccaagagggcaccttcattagccaaacgaagtacactcaagacattctaaccaagtttggaatgaaggatgccaagcccatcaagactcccatgggaaccaatgggcatctcgacctcgacacgggaggtaagtccgtggatcaaaaggtataccggtcgatgattggttcattgctttatttatgtgcatctcgaccggacattatgctttccgtttgcatgtgtgcaagattccaatccgaccctaaggaatcccaccttacggccgtaaaacgaatcttgagatatttggcttatactcctaagtttgggctttggtacccttggggatccacatttgatttgattggttattcggatgccgattgggcggggtgcaaaattaatagaaagagcacatcggggacttgccagttcttgggaagatccttggtgtcttgggcttcaaagaagcaaaattcggtcgctctttctaccgccgaagccgagtacattgccgcaggtcattgttgcgcgcaattgctttggatgaggcaaaccctgcgggactatggttacaatttaaccaaagtccctttgctatgtgataatgagagtgcaatcaaaatggccgacaatcccgtcgagcatagccgcactaagcacatagccattcggtatcattttcttagggatcaccaacaaaagggagatatcgagatttcttacattaacactaaagatcaattagccgatatctttaccaagcctcttgatgaacaatcttttaccagacttaggcatgagctaaatattcttgattctagaaatttcttctgctagattgcacacatagctcatttgaatacctttgatcatatctcttttatatgttatgactaatgtgttttcaagtctatttcaaaccaagtcacaggtatattgaaagggaattggagtcttcggcgaagacaaaggcttccactccgtaactcatccttcgccatcgctccaagaaaaggaccttgtctttggggagaaagtaaaagcccaaagcaaaaggaccggatttcgtctttggtataatcttaactcatttacgtatgaccaaaggggaagaaattacttcgagggctctaatgattccgtttttggcgcttcatgccaaagggggagaaagtaagagcccaaagcaaacggaccgcaccaccaccaatttcaaaaacttcgtgtttccaagaatattataaattggttttcctactgtgttcaaaagggggagaaagtagtatttcaaaaatatatcaaaaccctcttgaacactaagaggaggatctcatttagggggagttttgtttagttaaaggaaaagcatttgaaacagggggagaaaatttcaaatcttgaaaatgcttctcaaaatcttattcatttgcctttgaccatttgcaaaagaactttgaaaaggatttacaaaagaatttgcaaaaacaaaacatgtggtgcaagcgtggtccaaaatgttataagtaagaaacaatccatgcatatcttgtaagtatttatattggctcaattccaagcaacctttgcacatacattatgcaaactagttcaattatgcacttccatatttgctttggtttgtgttggcatcaatcaccaaaaagggggagattgaaaggaaattaggcttacacctagtccctaattaattttggtggttgaatcacccaacacaaacaatgggactaactagtttgctctagattatatgtaatacaggtgccaaaggttcatctataactatactaaatcgactgtccggaataccgtagattattccggacaggagaagctttttggaaaaacaggccaagcgcggaccgtccgggcccttgcggcggaccgtccgcgacacaaggatgtctctcggacagaaccaatgcaaaaatacaagtttccactacggactgtccggaggaaaagctaagaccgtccgagccctcgcgcggaccgtccggcctcaggcgcggaccgtccggtcggtaagaaaccaaaaaacccgaaggtaacgggttcggaaaaatgaattatagggggcctcgcggaccgtccggggtacacgaccggaccgtccgcgactggctctgtctgacatctgacgacgcattaaatgcaatatagccgttgatatagccgttactgctgaccgttgcattttcagccgttgatctacaggggcggaccgtccggacctggctcgcggaccgtccgcgctcagcagaatggcccaacggctaggaagtggttggtggctataaatacaaccccaaccacctccattcaacacatccaagcattccaaccttcaacattcaatacaagagctagcaatccattccaagacacattcaaagcctccatctctccaagtttcactattgagataagagatcattagtgatccgtgtgtcatttgtcgctcttgttgcttggcttcttttttcgtgctttcttgattctctcattgcaatcaaactcacttgtaattgaggcaagagacaccaatcttgtggtggtcattgcgggaactttgtgttccaagtgattgagaagagaaagctcactcgatccgtggatcgtttgagagagggaagggttgaaagagacccggcctttgtggcctcctcaacggggagtaggtttgcaagaaccgaacctcggtaaaacaaatctccgtgtctcacttgctcattcgcttgggatttgttttgcgccctctcccgcggactcgtttctttattactaacgctaaccccggcttgtagttgtgtttatatttgtaaatttcagtttcgccctattcacccccccctctaggcgactatcagtggtacacttggcaaagcggtaagggcaaagtatggcaacggaggaaacgggatacgggtggacaagtcggtagaatagtctctgctcatccggccgagggggagcgctactatctccgtgttctcctaaaccacgtgactggtgccacctcctatgtgaatctaaggacagtagatggtgtcatgctaccgactttttgtgaggcagcagagagaaggggactgcttgagtcggacaacacactagatgactgtctcaccgaacgtgctcttttccagatgccatcggcgctgcgacgactttttgccacaatattggtgtactgtgagccaagcgatgtggctgtactctggcggaaacacctagatgctatgtcagaggactatcaacgcaggagtcagagcaaaactcatgttgaacagatggtattgattgacattaggaacatgctgcagtcaatgggaaaggacatacagacattccctcttccacctatcatcgacgcgtatgacgatgctataggtaccgctagggaggtttacgaggaggaaagtatcgaactggcatcgacagatatggctctcaaggactctcttaacgaggaacaatgggtcgcctatgataagattatgtctgtcgttaacactaatcagggtggattgttctttgtggatggacctggtggcaccgggaagacttatctatacagagtgctgctcgcgacgctacgtagccagggcaagattgcagtggcaacggctacatctggtgttgcggcttccataatgcctggaggaagaaccgcacattcacgcttcaagatacctctcactattgacgatggcgttgtatgtagcttcacaaagcagagtggaaccgcagagttgctacgaaaatcatctctcattatctgggacgaggcttctatgactaagagacaagccgtggaggcactagacaatagcatgcgcgatataatgggtcgccccggactgccattcggtggtaaaaccattgtcttcggtggggattttagacaggtcttgcctgttattcgtaaagggtcaagggctcaagtggtcgcttcttcgctacggatgtcttacctatgggagtctatgtcccacttaaagcttgttagcaatatgagggcaaaaaacgacccttggtttgcggagtatttgctacgcgtaggtggtggaactgaggtcacaaatagtgatggcgacatccgtcttcctgacgaggtatgtgtgccttatagtgggagtgacaatgatcttgataatctaatagacttcgttttcccaaatctcaacgaaaatatgtcagattccacctacattacttcaagggcgatactgtcaacgcggaacaactgggtggatatgataaatactaagatgatcgatcgttttcaaggggagcatatggtgtaccatagtttcgatagcgccatggatgatccccataactactacccacctgagttcctaaacacgctgacacctaatgggctgcccccgcatgttttgaagctcaagattgggtgccctgttatattgcttcggaatatagaccctgcgaatggactttgcaatggcaccaggctggtggttcgtggtttccaaagaaatagcattgacgcagaaattgtactgggtcagtacgctggaaaacggattttcctgccccgtatacctctgtgtccctccgatgacgagatattccctttccagttcaaaagaaagcaatttcctatacggcttagttttgcaatgacagttaacaaagcacagggtcagactattcccaatgttggcgtgtacttgcccgaaccagtgttctctcatggccaactatatgttgctctatctagagcgacagcccgatcgaacataaagatccttgccatcccagccatcaatgggaagaagaggtcgaggaagggtgtaagaaagaatcccacagtagatggtgggacatataccaagaacatcgtctacaaggaggttctaacaaactagacctaggtaagtcaaatctcccataaaaagatttgtcttttttgtttttccatatacaagttgaatttaaagtttatattttttgtgattaaggacatcataacttattctagaaaaatatgttaagaattttttatcattattttatatttagttttgtaccattaaagttattatcttatctgatccctaacctatcaaaataattataaaaaatataatatattttttctaggctaaattatgctattatatctaataaccaacaaaatttaaactaaaaacttggtttgtacataaagaaataaaaagacaaaaaaattaaggggtaaattaaaccaactcaaaagagtgtcggggtaaaataaactaaaaaatactttagggggttatgtgaatattgtccataggtgaggggagtaatttggactttttcctttaacaaataacatggagattggtagtcgattatttctgctgcatatcttgctagccattttcttaattatttcctcatagcctgtttgtgtgcagggggatacaaatataattaaatttgagggtgatcataattctccaagacctcaatcatattatgattcagtttttatattcttctacaaatctttgcatcctcctctactgtctgcagcacgatcaatgcttcatatgggagcatttaaagttggtaacataaccaatgaggtaaattaactgaatacctgatgctacatttccgtagctatctactcaaataaccccaacagtatccgttatgtgatctgtattgtctcccatgaatgaatcaataaatcatgtaaaatattgtggtaaataacttatggtttttagaagacacataagattgaacattggtgctgttgttcaaatcatgttattctgtagtgaatcctttatttgcagctcacgcttgggaatttggttctaatattcctttg

SEQ ID NO: 824 - DNA, 1117 bp, Zea mays
  Intron number 3 from transcript GRMZM2G321810_T01 (locus G RMZM2G321810) derived from phytozome v7.0 (chr-ID 3; pos 1 65453087 to 165454203 reverse strand)
tttccctggagcgtatcacagcgggttcagtcgtgagtggtctcaaaagatagcctccatggaaatcttcccttttatgttgctgagatgagagcaatgtagaacaatgcctgcctcattaaatcgctgcattctagttttttctgaacaatggccgaataatgtattaatgccccccctccccccccccacccacccacacacaaattctatctctagatttgtggaactagatatgatttattaggaatggtatggtgggaaattcttcttttttgcttaaacatttaaatttggtagatatgttgcggaacggatacaaggcgtaacggaaggaaagaagcgtaacagatacaaggtataacagaatagattgagttttaaaacggacaagtgtaggacatttaggcttgggtttaacattttctaataaaaggaaactatttattcttcagaaatcgaactatttcctttctggtaaagttcttcagtttcaccatttacctagtaggtttggtcatgctactctgcattgagtcttcgtaaatacataccatatagactgccagaccggtgtttcgtatgcaaatgtaaggtacatgtttgtcaaaatgcaacagtgcatgtgcatatggcacattaggatttccttctctatcactgtatcacatgttatcgtaaaagtaagcttgtgtctgtttggttgggctgtggctgtgaaaaaacccgatgtgggctgtgaaaaagctgttgtgggttgtgagctgttaaaagttctaaaatcgtttggaagaaccattaaaagcagctaaaagttcttccatatatattttcacagttgcatccgaaagccgctaaaagcgggtcaagaggtgctttcagttttacactgtgagaaagttagcttttagaaaaagctgcttcccagccctttgttttggcttttagcttttagggacaaaaagccaaaactaaaagtcaaaccaaatacacccttaagttgtcatttggtcactgctttgctgtgtattgtgtgttagtccttccggtcagcttgtgaggactttttggatatgtggcaggtttcaattgtggggaagcatcaaatatagctact

SEQ ID NO: 825 - DNA, 18344 bp, Zea mays
  Intron number 2 from transcript GRMZM2G118286_T01 (locus G RMZM2G118286) derived from phytozome v7.0 (chr-ID 10; pos 9380539 to 9398882)
ctgagacacgggctgagtggcagattgggttgcaggtattcttttttaccctgtcattttacagatagatttatagaccgatttgtgggctttatttctcttcacatgcgactgccacatgtttcttcagtaaattgaaggaaccagccacttcatatctgggatgcatctaatgcagaaatacatatttggagtgtgaactatgcctggactatgcaaattctcagttccctggaccggattacttataattgtaggttactaagtgacatgcaccactgagacttgtgttaaaatatctacaggctgaattgttaatttgttattcagcttatagatgatttcctacaccacttagggttagtttggcagccgatagtaattaatccagggataaaacccccacgctgtaggattccatggacagctagagcccgggagagatatccctgcacagtggaattcccttttgctctttggaaccgaatggcccagggaagctgcacatggtggaacagaatactactctgctcctttgctcgttagaacagaaccactataatccaccaacaggatagatgacgccttgtagcatacatgacttgaaaccaacacagcaaaataataatctatataaatcacaaagtttgtatcaacccaacaagataaaaaaatgtcacatggataatcataatcaaatcgttttctgttgacacagttctggaaaattcaggaaaaaaacatcatgacgttagcccgtacaacagacattttggagagatacaagtcacataaacagactattaaaaatgcagtgcattcactgcattgtagcatagcagctgtccatgcctatcgtccaagattttagaaccaatgatcatttcgaataggaaataacaatagttgagaggtggttgttgttgaggtagggataaatcaacgaacagatttctacctagaccatgagggtaagaaagaaaccaagaggaggaaatcaccactaggaaatgctaggaccaagcgagcagacgaccatgagggaagtgttgtgcgggatgctttatagcgtgggtagaacaacagcacgcgttcgagaagatccagagtcagttctaccacgatccccaggcctcaacaacatgtgttcgtcaccgtcgtccccagaccccgaaatacaagctgccgcgctcgctcctaccatccgtccagcccacgttcgtcgccatccaagaagaaggagcgaaaacagagaaaataaatcctagcaagaccaagaaggtgcggaagaggttggatttacccgacaaaatcgccggcggagtggtggcggcgaccagcggaggaggggtggcggcgtgtccgaccgtgttgttagaggtaaataattgtatattattagggctaaccctagagggtagctatatagtgtttgtacatgggccatatgggcctagccacatgggcctaaccacatataatctaacaccccccgcagtctgaacatccgtcgcagcggagtttacagactggatccaaaaagaagaagtacatcacacactaggatccccccacagactcaactagccactactgatgttgaggctggagcgaaactcgacgaaggtcgaggatgggagacccttggtgaagatgtcggcaaactaggaggtggtcgggacgtggaggacccgaacatcaccgacggcgaccagatctcggacgaagtgtagatcgatctccacatgcttggtccgctggtgctgcaccgggttggtggagaggtagacggcgctgacgttgtcgcagtagaccaacgtgctcctggagaggggactgtggagctcggcgaggagctgccggagccacgcagcctccgccacgccgttggccacggcacggtactccacctcagcgctcgagcgggagacgaccggctggcgcttcgacgaccaggacaccaggttaccgcctaagaagacggcgtagccggaggtggagcgccgagtgtccgggcacccagcccagtcagcgtcggtgtagacgaccagctcggaggaggtagaccggtgaagaagcagcccgtagtcgacagtgccccggaggtagcggaggaggcgcttgagagccgcgaggtggggctctcgggggtcgtgcatatggagacagacctgctgcacagtgtaggagatgtccggcctagtgaaggtgaggtactgaagggcaccggcaagactcctgtacccggtggggtcctcgactgggtcacccatggcctcagagagcttcgcctgcgtgtcgactggggtagagcaggacttgcagtcaatcatcttggcccgctccagaatgtcaagagtgtactgccgctggtgaagtaggagtcctgaggggcgaggctcagcagtgacccccaggaaatggtgaagtacacccagatccttgatcggaaactcccgctgaagtgcgtcgacgaggcggcgaagaagtgactgactggaggcggtgaggacaatgtcatccacgtagaggagcaagtaggcagtctctgctccatgatggtggatgaacagagacgtgtctgacttggcctccacgaagcccagtgtcaccagaaacgtagccagtctggagtgccacgctcggggggcctgcttgaggccgtagagggacctgttgaggcggcagaccatggtagggcgagaggagtcgacgaaccccgctggctgacagcagtagacggtctcggtgagagcgccgtgcaggaaggcgttcttgacgtcgagctggtgaactggccaggagcgagcaagggccagcgatagcaccgtgcggacggtggccggcttcacaaccgggctgaaggtctcatcgtaatcgactccggggcgctgagtgaagccccgaagaacccagcgagccttgtaccgctccagggtaccatcggcccgccgcttgtgcgtccagatccacttgccggtgacgacgttggtgccgggcggacgaggcaccagatcccacgtctggttggcgacgagcgccgcgtactcctcctccatcgctcgacgccagtgggggtccagcagggcggtgcgaacggaggagggtaccggagaaatctgcgagtctgcggtcgtggccaccaggacacggggcggcagggtaccagccgcgtgccgtgtcaccatcgggtggacgtgccgcgggtcgcggtgaaggagcggtgggtggtacaccggcgtctcgacacgggccgcgggtggcggaggcggaggtgtgggtgtccctggcggggactgggccaccggcggtgacagcggcaggggcggcgacggtggaggtgcgaaccccggcggcggcagccggcgctggtagacccgcaccggctgggcgaagcgggtcggaggggtcagaaccgatggccccgtaggcggtgcagtcccaccaccctcgctcggcccaggggcgattgatagtcgcctagaggggcggtgaatagggcgaaactgaaatttacaaatataaacacaactacaagccgggttagcgttagaaatataaatgagtccgcgagagagggcgcaaaacaaatcgcaagcgaataatgaagtgagacacacggatttgttttaccgaggttcggttctcgcaaacctactccccattgaggaggccacaaaggccgggtctctttcaacccttccctctctcaaacggtccctcggaccgagtgagcttctcttctcaaatcaaagccgggaacaaaacttccccgcaagggccaccacacaattggtgcctcttgccttgattacaatggagttttgatctcaagaacaagtgagaaagaaaagaagcaatccaagcgcaagagctcaaaagaacacgacaaatctctctcgctaatcactaaagccttttgtggaattggagaggatttgatctctttggtgtgtctagaattgaatgactagctcttgtaagtggttgagaagtggaaaacttggatgcaatgaatggtggggtggttggggtatttatagccccaaccaccaaacttgaccgttggcagggctgtctgttcgatggcgcaccggacagtccggtgcacaccggacagtccggtgccccctgccacgtcatcactgccgttggattctgaccgttggagcttctgacttgtgggcccacctgggtgtccggtgcacaccggacaggtactgtttgctgtccggtgtgccagcatgggcgattctgactcctgcgcgcgctgtgcgcgcattaaatgccacagcaggtagccgttggcgcgaagtagccgttgctctggagtcgcaccggacagtccggtgcacaccggacagtccggtgaattatagtgggctagccgttggagtttcccgaagctggcgagttcctgaggccgacctcccttggcgcaccggacactgtccggtgtacaccggacagtccggtgaattatagccgagtcgcctctggaaattcccgaaggtggcgaggttgagtctgagtccccctggtgcaccggacatgtccggtggcacaccggacagtccggtgcgccagaccaggggtgccttcggttgcccctttgctcctttgttgaatccaaaacttggtctttttattggctgagtgtgaaccttttacacctgtataatctatacactttgggcaaactagttagtccaaagatttgtgttgggcaattcaaccaccaaaattatataggaactaggtgtaagcctaattccctttcaatctcccccttttttggtgattgatgccaacacaaaccaaagcaaatatagaagtgcataattgaactagtttgcatagtgtaaatgtaaaggttgcttggaattgagccaatataaatacttacaagatatgcatggattgtttctttcatttttaacattttggaccacttttgcaccacatgttttgtttttgcaaattcttttgtaaatccatttcaaggatcttttgcaaatagtcaaaggtaaatgaataagagtttgcaaagcattttcaagatttgaaattttctccccctgtttcaaatgcttttcctttgacttaacaaaactccccctaaattgagatccacctcttagtgttcaagagggttttgatatatcatttttgaaatactactgtctcccccttcttgagcataatagaataccaattgagaatactctttgaaaaactaaggttttgaaattggtggtggtgcggtccttttgctttgggctcatactttctccctctttggcatgaatcgccaaaaacggaatcattagagcccattaagtactatcttcccctttggtcataattaaatgagttaagattataccaaagacgaagtccggtccttttgctttgggctcttacactctcccccaaagacaaggtccttttcttggagcgatggcgaaggatgagttacggagtggaagcctttgtcttcgccgaagactccaatttcctttcaatacacctatgacttggtttgaaatacacttgaaaaacacattagtcatagcatatgaaagagatatgatcaaatgtatataaatgagctatgtgtgcaagttagcaaaagaaatttctggaatcaagaatattgagctcatgcctaagtttggtaaaagattgttcatcaagtggcttggtaaagatatcggctaattgatctttagtattaatgtaagaaatctcgatatctcccttttgttggtgatccctaagaaaatgataccgaatggctatgtgcttagtgcggctatgctcgacgggattgtcggccattttgattgcactctcattatcacatagcaaagggactttggttaatttgtaaccatagtcccgcagggtttgcctcatccaaagcaattgcgcgcaacaatgacctgcggcaatgtactcggcttcggcggtggaaagagcgaccgaattttgcttctttgaagcccaagacaccaaggatcttcccaagaactggcaagtccccgatgtgctcttcctattaatcttacaccctgcccaatcggcatccgaataaccaatcaaatcaaaagtggatccccgagggtaccaaagcccaaacttaggtgtataagccaaatatctcaagattcgttttacggccgtaaggtgggattccttagggtcagattggaatcttgcacacatgcaaacggaaagcataatgtccggtcgagatgcacataaatagagtaatgatcctatcatcgaccggtataccttttgatccacggacttacctcccgtgtcgaggtcgagatgcccattggttcccatgggtgtcttgatgggcttggcatccttcattccaaacttgcttaggatgtcttgcgtgtacttcgtttggctaatgaaggtgccctcttggagttgttttacttggaatcctaagaaatacttcaactcccccatcatagacatctcgaatttctgtgtcataatcctactaaactcttcacatgtagactcgttagtagacccaaatataatatcatcaacataaatttggcatacaaacaagtcattttcaagagttttagtaaagagtgtaggatcggcttttccgaccttgaagccattagcaataaggaaatctctaaggcattcataccatgctcttggggcttgtttgagcccataaagcgccttagagagcctatagacatggttaggatactcactgtcttcaaagccgggaggttgctcaacgtagacctcttccttgattggtccgttgaggaaggcacttttcacgtccatttgataaagcttaaagccatggtaagtagcataggcccaataatatgcgaattgattcaagcctagctacgggtgcataggtttcaccgaaatccaaaccttcgacttgggagtatcccttggccacaagtcgtgctttgttccttgtcaccacaccatgctcatcttgcttgttgcggaagacccatttggttcctacaacattttggttaggacgtggaaccaaatgccatacctcatttctagtgaagttgttgagctcctcttgcatcgccaccacccaatccgaatcttgtagagcttcctctaccctgtgtggctcaatagaggaaacaaaagaataatgctcacaaaaatgggcaacccgagatctagtagttacccccttatgaatgtcgccgaggatggtgtcgacggggtgatctcgttggattgcttggtggactcttgggtgtggcggcctttgttcctcttcctccttgtcttcctcatttgcatctcccccttggttattgctattatcttgaggtggcttatttgcttgatcttctacttcatcaacttgagcttcatcctcattttgtgttggtggagatgcttgcgtggaggaggacggttgatcttgtgttcttggagactcttcgggttccttaggacacacatccccaatggacatgttcctttagcgctatgcatggagcctcttcatcacctatctcatcaagatcaactgctctacttgagagccgttagtttcatcaaacacaacgtcacatgagacttcaactagtccagtggacttgttaaagactctatatgcccttgtgtttgagtcataaccaagtaaaaggccttctacagtcttaggagcaaatttagattttctacctcttttaacaagaataaagcatttgctaccaaagactctaaaatatgaaatgttgggctttttaccggttaggagttcatatgatgtcttcttgaggattcggtgtagatacaaccggttgatggcgtagcaagcggtgttgactgcctccgcccaaaaccgatccgaagtcttgtattcatcaagcatggttctagccatatccaatagagttcgattcttcctctccactacaccattttgttgtggcgtgtagggagaagagaactcatgcttgatgccctcctcctcaagaaagccttcgatttgagagttcttgaactccgtcccgttgtcgcttcttattttcttgatccttaagccgaactcattttgagcccgtctcaagaatccctttaaggtctcttgggtttgagatttttcctgtaaaaagaattcccaagtgaagcgagaataatcatccaaaagggggagacagtagacaatattggctcccgccgaggtctaagtaagcaatcgggccgaatagatccatgtgaagtagctcaagcggcctgtcggtcgtcatgatgttcttgtgtggatgatgggtgccaacttgcttttcggcttggcatgcgctacaaatcctgtctttctcaaaatgaacattggttagtcccaaaatgtgttctccctttagaagcttgtgaagattcttcattccaacatgggctagtcggcggtgccagagccaacccaagttagtcttagcaaccaagcaagtgtcgagttcagttctatcaaaatctaccaagtatagctgaccctctaacactcccttaaacgctattgaatcatcacttcttctaaagacagtaacacctacatcagtaaatagacagttgtagcccatttgacataattgggatacggaaagcaaattgtaatctaaagaatcaacaagaaaaacattggaaatagaatggtcaggagatatagcaattttacccaatcctttgaccaaaccttgatttccatccccgaatgtgatagctcgttggggatcttggtttttctcatatgaggagaacatctttttctccccagtcatgtggtttgtgcacccgctgtcgagtatccaacttgagcccccggatgcataaacctacaaaacaagtttagttcttgactttaggtacccaaactgttttgggtcctttggcattagaaacaagaactttgggtacccaaacacaagtcttggagcccttgtgtttgcccccaacaaatttggcaacgaccttgccggatttgttagtcaaaacataagatgcatcaaaagttttaaatgaaagactatgttcatttgatgcagtaggagttttcttaggcaacttagcacgggttggttgcctagaactagatgtctcacccttatacataaaagcatgatttgggccagagtgagacttcctagaatgaattctcctaattttgctctcgggataaccggcagggtataaaatgtaaccctcgttatcctgaggcatgggagccttgcccttaacaaaatttgacaatcttttaggaggggcactaagtttgacattgtctcccctttgatagccaatgccatccttaatgccagggcgtctcccattataaagcatgctacgagcaaacttaaatttctcattctctaggttgtgctcggcaattttagcatctagtgttgctatatgatcattttgttgtttaattaaagccatatgatcatgaatagcatcaatatcaacattttctacatctagtacaaatagtgacatgctcaatggtagatgtagatggtttgcatgaattaagttcaacaatcttagcacgaagtatatcattcttatttctaagatcggcaattgtaactttgcaaacatcaaaatctttagccttagcaatcaaattttcattctctaatctaaggctagcaagagaaatgtttaattcttcaatcttagcaagcaaatcatcattactacctctaggattgggaattaaaatattacaaacatgagaatcaaccttagcatttaaactagcattttcatttctaaggttgtcaataatctcatggcaagtgcttagctcactagacaatttttcacatttttcaacttgtagagcgtaagcatttttaaccttaacatgtttcttgttttctttaattagataatcctcttgggagtccaaaaggttatccttttcatgaatagcactaatcaattcatttaatttttccttttgctccatgttaagattggcaaagagaatacgcaagttatcttcctcatcactattattatcatcactagaagactcatatttagtggaggagttagatttaaccttctttcgtttgccgtccttcgccatgagacacttgtggccgacgttggggaagaggagtcccttggtgacggcgatgttggcggcgtcctcgtcgtcggaggagtcgcttgagctttcgtcggagtcccactcccgacaaacatgtgcatcaccgcccttcttcttgtagtacctcttcttctcctttctcctccccttcttgtcgtcacctcggtcactgtcactagatataggacatttagcaataaaatgaccgggcttaccacacttgtagcaaaccttcttggagcgggatttgtaatccttccccctcctttgcttgaggatttggcggaagctcttgatgacgagcgccatttcctcattgtcgagcttggaggcgtctattggttgtcgacttggtgtagactcctccttcttctcctccattgccttgaatgcaacgggttgagcttcggatgtggtggcatcatcaagctcattgatcttcctcgagccttcgatcatgcattcaaaactcacaaaattcccgataacttcctcgggggtcattttagtatatctaggattaccacggattaattgaacttgagtagggttaaggaaaataagagatcttagaataaccttaaccatctcgtggtcatcccactttacgctcccgaggttgcgtacttgattcaccaaggtcttgagccggttgtacatgtgttgtggctcctcccctttgcgaagccggaaccgaccgagctccccctcgatcgtttcccgcttggtgatcttggtgagctcgtctccctcgtgcgcggttttgagcacatcccaaatctccttggcgctcttcaacccttgtactttgttatactcctctctacttagagaggcaaggagtattgttgttgcttgagagttgaagtgctcgatttgggccacctcatcctcatcatagtcctcatcccctactgacggtacctgtgcaccaaactcaacaacatcccatatacttttgtggagcgaggttagatgaaatcgcattaaatcgctccacctagcgtaatcttcaccatcaaaagttggtggtttgcctaatgggacggaaagtaaaggtgtatgtttggaaatgcgagggtagtgtagggggatcttactatacttcttgcgctcttggcgcttagaagtgacggagggagcatcggagtcggaggtcgatgttgatgaagtgtcggtctcgtagtagaccactttcctcatcctcttgtgcttgtcgcctttccgatgcggcttgtgggaagaagatttttccttcttctctttgtggtgagaagaggaagactttttctcctttcgtttggaggagtccttcttctccttcctcttggtgcgggactcttccgatgaagtgctcccgtggcttgtagtgggcttttcgccggtctccatctctttcttggcgtgatctcccgacatcacttcgagcggttaggctctaatgaagcaccgggctctgataccaattgatagtcgcctagagggggggtgaatagggcgaaactgaaatttacaaatataaacacaactacaagccgggttagcgttagaaatataaatgagtccgcgagagagggcgcaaaacaaatcgcaagcgaataatgaagtgagacacacggatttgttttaccgaggttcggttctcgcaaacctactccccattgaggaggccacaaaggccgggtctctttcaacccttccctctctcaaacggtccctcggaccgagtgagcttctcttctcaaatcaaagccgggaacaaaacttccccgcaagggccaccacacaattggtgcctcttgccttgattacaatggagttttgatctcaagaacaagtgagaaagaaaagaagcaatccaagcgcaagagctcaaaagaacacggcaaatctctctcgctaatcactaaagccttttgtggaattggagaggatttgatctctttggtgtgtctagaattgaatgactagctcttgtaagtggttgagaagtggaaaacttggatgcaatgaatggtggggtggttggggtatttatagccccaaccaccaaacttgaccgttggcagggctgtctgttcgatggcgcaccggacagtccggtgcacaccggacagtccggtgccccctgccacgtcatcactgccgttggattctgaccgttggagcttctgacttgtgggcccacctgggtgtccggtgcacaccggacaggtactgtttgctgtccggtgtgccagcatgggcgattctgactcctgcgcgcgctgtgcgcgcattaaatgccacagcaggtagccgttggcgcgaagtagccgttgctctagagtcgcaccggacagtccggtgcacaccggacagtccggtgaattatagtgggctagccgttggagtttcccgaagctggcgagttcctgaggccgacctcccttggcgcaccggacactgtccggtgtacaccggacagtccggtgaattatagccgagtcgcctctggaaattcccgaaggtggcgaggttgagtctgagtccccctggtgcaccggacatgtccggtggcacaccggacagtccggtgcgccagaccaggggtgccttcggttgcccctttgctcctttgttgaatccaaaacttggtctttttattggctgagtgtgaaccttttacacctgtataatctatacacttgggcaaactagttagtccaaagatttgtgttgggcaattcaaccaccaaaattatataggaactaggtgtaagcctaattccctttcagcgatcggagacggagctccgcggagaggcgacagcaccgtaggcgacaccaccggacccgggcaaggtaccgggccgggggtaggaccgacaggtggtgagcgagtacctgcagagagaggaaggagaggtggctcgaccaccgtgtcagtcggaaagagagtgaaagggtcaaggtcagggtcggaggagggtggtgtggtggtggaggagtagggaaatacggactcatcaaacaccacatggcgagagatgaggacccggcgagagcagaggtcaaagcagcggtagcctttgtggtccggggagtacccgagaaacacacagagggtggaacagggtgctagtttgtgaggagcagtggcagtggtgttcgggtagcaagcacacccgaagacacggaggtggtcatagcgcggaggggtaccgaagagtgcctggtgaggagtgggggccggacacgcagtggaagggagacggttgaggaggtaggtagaggtgtggagggcctcggcccagaaacatgccggaaggtgcgcctggagaagaagagtgcggatggtgtcgttggtcgtgcggatcatgcgctcagccttgctgttctgggaggaggtatacgggcaagacatccgcaactgcatcccgtgggagagaaagaagtcgcgggaggtggagttatcgaactcccgaccattgtcacactgaacgaccttaatggtgaggccgaactgagtggacacccaggcgaagaagtggcggagggcggggaaagtctcagacttggcacgcaaaggaaaagtccacacataatgagaaaaatcatcaagcaccacaagatagtatttgtagcctgacatactggtaatgggtgaagtccacaaatcgtagtgtacaagatcaaaagcatgagtagcatgagaggaagaagaagaaaaaggaagacgaacatggcggcctaactggcacgcatgacaaagatgctcatcatgggatctagtacatgggatagtggcactacgagtaagctgcatcaaggcatcgcgtccggggtgaccaaggcgacgatgccaggtggtagaagacgtggcggcagcaaaaacagcagctgtgtcaggtgacgaagacgaagaagatgtggcgtgcggaagccgaagggtgtagagggggccggtgctgtcacatctgaggagggggcgccgagttgccgagtccttcacagtaagaccaaaagagtcaaactcgacagaacaagaattatcagcagtaaaccgacgaatagaaagaagattgtggaccaaagaaggagcgacaagaacatcgggaatgcgaaaagagccgggagggctggcggcacccacagatgtgacaggaagacatgagccattcgtcaccatgatggacgaagggagagaggaagaaggagggcgaacagaggtgagtataccagggtcgggggtggtgtggtaggtagcaccggtgtccgcgatccactcgggacccatcggcggagtcagagtaggagtctgaaaggcagccagggtggccgcgtcccaaccaaccagcccggacggaggagtagccggtggcgtggggccacgacgaagcggcaggtgtcgaggtccatggcgacggggaggcgaaggcgaaccctggctgcgcaccagcgaacatggccgccggggaccgagcctcagagcctggcccctggaacggccacatggagatgcgccctgaccacaggtggtgaaaagtgggccaaggcgcaccctgctggggtcccggcgtcggtgcgtggccacgggcaccacccccggaaccaccaccgcggccaccacggcggcgacgaccaccaccgcccccgcctccgccacctcgacccccgccgcccatgctcggcccgggagggcgagggccaagggcagactgtgacggagtaggaggacgggtcggggtgaaagccgccagtgctgtcgaagaggacgaggaccccgtgccagagatcgatgcagcctgagcgcccagagtgatctcctccagggcgaggtcgtcgcgaacctggaggaaggtaggaaaggggcgctggcgcatgatcaacgaccggaggtgggtgtagcgatcgccgaggccgcggaggacgttgaggactaggatgcggtcctccacggggcaacccagatcgccaagagagtccgccatggtcttcatcttgcggcagtacgcactgacactgaggtccccctggacgaaggtgcgaaaagcagcgtcgaggcggagagcccgggcctcggcgttgcccatgaactggccctcgatggcaagccaaacagcccgagcgtgaggaaggttccggaggaggctgtggaggtcaacggagatcgtccccacgatccaggtgagtacgatgctgtcaaggcgcacccacgtggcagtcggcgccacgccggtggggtcgcagaggacatggtcgtccagagcgtagcgacgaagggtgaggaggagtaagtcccgccagcgtgcgtaggacggcgactcgggctccaggacgacaggaaccatcaggcgaatgttctggacactcccagcctgaaggtggagctgagccactagcgggtcagccgggtcatgccagagcaccgtggggatggtgcggggcccggttccgacggtcggtgcggtcgggaccccgtacacgccgcccatggtgtcagaggaggtgaccccgccgtcgtgggtcgcaggcgaggcgaggagctgttccgccgtggcaatctgagcagcgatagcgtcggcggcctcgcgctcacgctcccatacgagggccgcttcccgcaagcgggcctgtcgtgccgcgtgctccgcacgggcagcagtgagagcggcgacggtgtatccctggtgggtgatcggtggaggaggtggctgatcgacgaccggaggcggatcaacgaccagcgacgggggaattggcgggggagggtcctccggaccggcaaccctcgcgggaactgcatccgccacagccgcaagggccgaggcggtgcgcgcagcggtgagggccccaccggcggcggtgggcccgtccccccacgtcggcccgagcgcaggggaggcgggcacggacccccacgcccctgccaccagcgcctgcgcacctgcaggggagacagcggcggcggctgggagggggtggggaggggccaggggggcacgcccacgcacggtggctgcagcagcggcaggagaggcggcgacggcgggcctgccaggggagacagcccgcgcccaggaggagaggggagggaaagtggagggggacagaggaggctgctcgccagccatgggagggtcgctggcgtgcaggggcggcgcgcggacggcaggctggaggcgcggcctggcgcgcagggactcctggcggcggccgccaggcgcggaagcacagccggacggccggacgcagacggcggcgcggatccctgggcggcgctcggtcggctggctccgggcgcggcctggcgcacaggggctggacggcggcgcggagtcctgggcggcgcttggtcggctggcggcgcggcctggcgcgcagggctcctggcggcggcgaccaggcacgcaggggcaggtcccggcggcggcgctgggggcgcgcggcctggcgcgcagggactccgggcggcggccgcctggcgcgcaggggcagatcccagcggcggcggctggagaaaccctagcaggggctgccaggcggctggaggaaaacctaggctaggctgataccatgttagaggtaaataattgtatattattagggctaaccctagagggtagctatatagtgtttgtacatgggccatatgggcctagccacatgggcctaaccacatataatctaacgtgtccgtgacgagaggaggcgagaggaagtgacgagtcggggtctcggggatagtcacccgacgtccgaaggccggacgagtttccacgtggaagttgggctcggactaggccattatcccgcggagccggtttccaaacaggacagagcggtggtctgtggaagcttcccgcgtgggccgaagacaccgggaaaatagcaaattccccgcgaggatttgggctcccaaactaggccttattctctccactagcattctgatgtaagtcagaaaggcatgcaaatgtatatttcgctgggcaatgtttgctattttatacaattgtgcagacatgagtctttatagcagtcatattaaatgatgtatattcttatttttttttatcaaacacacaagagagctgcgtatcattatattaagaagaaaaaaaggaatacaaaatcaaatacaaacaaagggaaaagatcccaaagcctccacagaacactcacgcctacagggttccccacccctgctggctccagactagcagcagcagcagcagggagcacactgacggcacaagtagacacccctacacttagctgaaactaaactgtaggaatctgcgcttgaaggaaggacaaccccttagcaccagccaacgaccataataaggattcctccttggccaacctaacagtaacatccttgaaagacagaggcattcctctgtttccataaaatatgtatattcttattgatgaggccattctcaatgagagtttcattgcatgattttcaacattgccacatcatcattcaagagtgagataaagtaaataatgaaacatacactctcaatataaagtttcacttcacaatttcataggctacaatgtcaattaaatattgcatctaaatagccaaaagaaatgtatgaaatgaatggaaatgaaacaaattgctctcaatggtggtttcatgtgttttccattgtattggaaatgagatgacgtggtttcatggtgatgaaactgcttccacccatttcacagtaaatatagtgccaatgtatccaaaaacctgatgtggcactctaattaatgtatgaaacttctcatgaaactttgcattgagaatggattgagaaggcttgcctggtgcagtgatgagagttgcctcactaagctaccaagtcatggattcgaagtagcctctccgcatttgtgggggtggtttgcctcggtttatctcttcgaccccactcatgtgggagcctccggcattggatccacccttatgttcgtatagatgataaatgctttaccatgaaaaaatataaaacctgatgagcatatgtcaacaggaacagtttgcatgctgaatattttttagaaaatcatttttttttcactttctttcccttttttcttgcttgtcttcatttaccatcttcttcatatcatgttacattgaattcttgcacgctaaattctgagttacttttttttccatttgcaaggc

SEQ ID NO: 826 - DNA, 7424 bp, Zea mays
  Intron number 4 from transcript GRMZM2G164852_T01 (locus G RMZM2G164852) derived from phytozome v7.0 (chr-ID 6; pos 1 68234313 to 168241736)
tggctatttattatttgattgttggggaccttcggcgtccgaaggtcctcaaaaacaggatttaacagtatttctgtagtacaatgtgtgaacaggtaccctcggactaaagtcggcattgcagtaaaccggaataatacgaagcttgatacagagccgaaggtgttgagcaggaaagcttcggcgtaacagcaaagagtggaaccgacttaaagatgaaaaggctattcagacctcgatagactactatagagttattatcaaatgtaaagggcatgaatgtaattttgtaagggctgtgtcccgtgtctataaataggtgaacagtatccccgtactgttcacgctgacttggcattcgctttttgcgtcacgcttgtactgtcatttccttccgattgaaggtacacttgtagttcaataacatttttgtttatactcaataataataaatgattgttcatgttttcttttacattctttatatttcatccttcgtcattgtttgaatttatgaaggtatgaccttcataaccttcgtccgtaagtcattatatcctaggggaaataatgcttcggaggacgaagggcgttaacgattaacattttctatgttgccttgttcttaactcttagcacttgagaacaagtccccaacattggcgcccacctccggtgaactcacttccatttcttgagcttttcaacatcttcggcaagcatcaccttcgtcatgccgccgaagaaggcttcagcaccaggggctggcacgctgcagccgccccaatcaagatgtcctttctcttagagaggcacgaagccagaagaggaaggctaccagtccaacacctccagaggatgatctagatcaggagattcaaaatctagaaatccttcagcagcaggttcaacgcaagaaggaaaagatggccagggtagctgaactgcagaggcagatagacgaagcctctgaagaagttcgtcatcttgctcaggacgagcaacaccgaaggcctcagcatcaagaccttcatcaggagggttttcccaacgaagatgattggtatgacaatttccatcatgggaattttgtttttgatgatgcttctcctctgtccgctgagctgcaggctacaccttggcccccgtcctacaagccgccccagctccctgtattcgatggccactcagacccgaagcagtttttgatgagctacgaagcaacagtgtcttcgtacggtggcaatgcttcagtcatggccaaatctttcgttatggctgtcagaagtgttgctcaaacctggtattcctcccttcgaccaggaacgatcacttcatggcagaagctgaaggatttgttgttaaccagctttcaaggatttcagacgaagccggtcactgctcaggctctgttccagtgcactcaggaccacgaagaataccttcaggcatatgtccgaaggttcttgcgtctgagggcacaagcaccaacggtgcccaatgaaattgtcatcgaggccatgatcaaggggcttcggccaggtccgtcagctcagtacttcgccaggaagcctcctcaaactttggagaagcttctccagaaaatggatgaatatattcgggccgataatgattttcgccaaagaagggaggaggctttcaggttttctgaaatgaccaggggcttcggagggaggttttacccgaggcatgtgagatcaattcacaattctacacaaaatgatgacagaggaagccaacagcaaaggccacaatgctcctcacaggcttctggacaacagcaaagctccttccggccaccagctccaagaggcagaggcgccaggggcttcggaggaagatttggcgatcaaccgagaagaatcttttgcttattctgcggtgagaacaaaggccatactaccaggatgtgccatgttactatacagaagctaaaggaaatagctgaagcagcagcacaacaagcccagccgaagcaggtcatgcatacagcttcgtatcattcgccctacatcccagaatatgtgggcaaccatcctgcagtctctgctgcttcggcgagtcagcctcaagcttcctggcaacagcctccgcctccacctccgttgcaacaaggccagcagccagaagggagccaatatgctccgcatcaaagggacttcagagaacagtccgaagctcgcacggtcaatagcactgtgccagaatcaaagcacatctattgacaaatatcctaccttaatagcaatctttttcattcagttttattttctgtaataaaggacattgtttaggtttcatgtaattagtttcgttgattcctacaagagaaatatgttttcttcacaggcttgtgataataaaaaggaccttcggactatcgaaaattcttcgaagcaacaaaaagtcattctaaggaacgcagagtaagtttgacgaagtcacaaaaagtcgttccgaagggagcgcagtgtaagttttctgctccaaagtcgttccaaaaggaatgcagagcatacagcgaaaagtcaacgctgataccgcctaagtaaaaggcgaagaagctccaaagacgttcctaagggaatgcagagcttacagcgaaaagtcaacgctgataccgcctaagtaaaaggcgaagaagctccaaagacgttcctaagggaatgcagagcttacagcgaaaagtcaacgctgattccgctgaagtaaaaggcgaagaagctcctaagggaggcttatagtgaaaagtcaatgctgattcacaaaaagattatgtgttttatcgcgcaaatatgcgtgtatcttcggaatatcgccttacatagcatagcatcatcacatcatctttgcataacataagcatcatacatcatactgcatgtgacataaggaaatatgatattaatcttcggaaaaacgctttgaaaaaggggcaaatcatgccaagtaacaaggcgaaacaatattgatctctgaagtatagccttgaagaatgtttctacgaagcttcaaaactttccaggatgcttcggatattgttgtgataaatggtaattcttcttcacgaagcatgaaaagaagggaaggtgttttttcgccaaagactcaaaaaggtacgtatgtaaagtttcatgcatcgtaaagaattgaaccataaagaaaaataaaacaaatatgttacatacaggattacaagatattacacatgttacatttaaaatgtttttacaatagcatctagtcttccctaagtaccacttctgcagcttcattcaacagtcgatcgacaacttcatccataatagcttcagccatctttttaatctcgtcatcacccttaggccgtgcacccggagatacttcagtaggatctgaggaaggacaggacacggctactttgctattacaaatcataaacaaatcttaaagcctaagattacaacacgataaaaactattagttgatacctaattgaccttcggcctctgcgctctttttagcagcctcagctacttctctagcatcgtgaatacccttttcacttcttcgaataatttctccggccatctctcggccaccattatcccagatatcagtaaaaaactttccaccaattatgctagcttcggccgaaggatcttttgtatcttcaaaggacaaagcagcttcggactgtgctaaaatttttacatgttcacagccctccttctctaagatagtggcaatccctctggcgccagagaaggcacatatatctcctcggctatttaaaatttcttcaaaggcttcggcttcgtggttaatccattcgatgacaccttcgggattgcctcttgaaaagttttcctcacttgagaatgtgccgaccttggcaaagctagcctttaatttcttgacacaatctatagatttattatagcatctctttttggacgaacgaagctcttcaacagtcacttctaggtgatctgcccattgatcgctgagttcacgctttgtttcttcaagtatgcgttcttccttggctctggccagttgtttccgaaggtcttcaatttcgcgtttctgagcttcagcttgaattttaaaagcagcttcgtcctcttttattttatttatcaatgagtataatattttgtctttttcgagaccttcgttcctcagttcaattacttcggaacgaaggttgctcagggctattgtacacccttcgtcttcagcatctttctgtgctctaagagcattgctaagtatcaagccctgcaaaaagaaatatgtgtgtgtgtcagtgggtttaaacgaacggaaaaatacaaggatttcatatatcgtacctttaagctattgtaagccaggctgtcggccagatcgttcttcgacagcactgagagcccgtcttctaaagtcgggaatccgaagctcttgctcatctcccggcagacagaaatttccttgctgtcgggaagacaatacaagaagtcttcttctccactgccattaaatattaacgccccctttggatatttcagtttttgggcataatgctgggcctcttgttcttctttttctgataattttttccccgaagcatgacggaaaatataatcacgaattttgggggatgcttcgggggcaacaacaccggtttcttcaacaaaagttggttttgttattttttctgcctcactttccaaaggttttccctttacgggctctgagggcccagcttcggcttcagccccttgctctgggattgtagaaccagaagtttcaactgttgttccaggagtaacaacagccttcttcggaggtgtgctcgaagatttgatcgtttctagtacatctagcacattagccattctctttctcttcggagttacggctggcactttttcattttttgctgtcccaatgattgctgtaggactcaaaacttctgatgttttggagctctcagttgcttcctttatctcttccattttttctgtgagtggcgcttcggccttctctttcgtttctggtaacaaaatctttgattgctccaattttgtctttgttggcacttcggccgtttctgcaacttctggcagcaaagttggctcggctggttttttagcttcggtggccgaagaagtttctccggtaaactcaggcaccgaagctggttcaatatagcgcggccgatgcgtgagaacctttatcttcttccttttcggttctggctcgctaggagcagctgcagtttcttcttttgcagaggttgtgttttttcttttctgccttcgggtgggatagcaatagtcagggtagacaaacccaatagcatcaaatacccgattcagcctcttcttttttcggcctccgaaggctgctgacattgcagtatcttcggccttcgagtaggtaccaagcagctcatcacttaaattatcaatgcttttcaaccactcatcatctggttcaataaatttatctccaaacttaaaagtgtacttaaacctgacaagtccaccttcgtcggcctctttaatggtttcttgtggcatttcccatttctctgcaagcggccacaccctgaaagcaatgtgctcttgtactaagtcccttgttcctataaaagaacagacaatgccgaaggctctctggcattcttcggcagcttcattcatttcaaccttcggcctgcgaaggccgaagctttgccaaatagggcgcataattatacccttgatatcttctcgtgctttcagatcattttttacatagaaccattctgtcatccagccgctgggccatcttttccgaaaagttggcacggggcagcttgatccagaccgagaaacaaaattgtagcagccaaagttattgtgatactgttccttaccccaaggtattgtctcgtatgataattcgtgcatattgcagaaactttttgcatcaggcttcagaccttggcttcgcacggcccacacaaagatattcagccttatgattgcctcgggggtaagttggtgaagatagacttcaaaaatcttcagcacctccacgacgaagctgctcaagggcaatcgcagcccagccttcaaaaagcttcggaatactacgacttcattctcttcggggtgtggacaagtcttctccccttcgtcggccctcacaacggacaaatcccggaaataccttcctctcatgttagcaagatgattctctttgatagttgatttaccataaactgaatggcttggtcgccaggggcgatcttcggagtcttcgccaccgctgtccacatcataactttcactgtcaccagtatcttcagacagcccttccagaatctccttggtgattttttctgtgttggtcttcgacatcgctataagaaatcctaagttcttctcttcatcaagactcagcttcatctcaccagcagccttcttagcagcttcagacatcttcggaaacactaaaaactgttttcaaagccgaagcttcaaagctgaaagcttagcaaatcacagcgcacaagagctaaaaattgagtgagcgggagtggttggccagaaagcgtgcaaaatgagtttgcggtatggccgtatttatacgctcggtgcgttgaaagttgaaagaccccacttgtcattgaatgttgctattctagcaaagggaaggtgttttttcggaccttcggcgtaaagccttcgtccatatcgcaatctaaatttattatttcaaacaaattaatattgcgaggggctactgttggggaccttcggcgtccgaaggtcctcaaaaacaggatttaacagtatttctgtagtacaatgtgtgaacaggtaccctcggactaaagtcggcattgcagtaaaccggaataatacgaagcttgatacagagccgaaggtgttgagcaggaaagcttcggcgtaacagcaaagagtggaaccgacttaaagatgaaaaggctattcagacctcgatagactactatagagttattatcaaatgtaaagggcatgaatgtaattttgtaagggctgtgtcccgtgtctataaataggtgaacagtatccccgtactgttcacgctgacttggcattcgctttttgcgtcacgcttgtactgtcatttccttccgattgaaggtacacttgtagttcaataacatttttgtttatactcaataataataaatgattgttcatgttttcttttacattctttatatttcatccttcgtcattgtttgaatttatgaaggtatgaccttcataaccttcgtccgtaagtcattatatcctaggggaaataatgcttcggaggacgaagggcgttaacgattaacattttctatgttgccttgttcttaactcttagcacttgagaacaagtccccaacaatg

SEQ ID NO: 827 - DNA, 3346 bp, Zea mays
  Intron number 2 from transcript GRMZM2G090715_T02 (locus G RMZM2G090715) derived from phytozome v7.0 (chr-ID 7; pos 1 62418024 to 162421369 reverse strand)
ctgtaagctatttacatgtccattccttttcctttggatctttgttcttctgtagttatttttccttcatgtgaaatcaatttgcttgaaattctgattatgcaatttaccatgtaaaaaagtaatctagcttcagaagttatcaatagtatttgtggctaaaactgcactagtgccatctttttaacttttttgccttgcataaaagaagttaaacatcttaatgactcctaggtaagtttacacttccctagatagaatcatacttctacttttgtacaatccgcttctccttgaagccttttcatgtccattagctaataactgtgttagaaagtactgatcggcctagagcctggcttaatagccggccggcccttgtatagtatagatggctaattggctatagatggatagagatatttgtggggaggagtctggattctgtgggatagactcaaaccccccttattcaggtcgtttccatgatccaggatgcttccttagatgtgataggttttcttttgcctcgcgtcctccttccctgtgtatgtaaccatactgtctctcaattattcaatctacaattcttccaaatctctattactttcaaactgtatccttcgtttttctcttattctcttggctgttgctttgcaaacgaccttctggattacaagtacactgttgactggtgcacctacaattccttctgatcggttttgcatgtcatatcccctaataatatatctaatattgatgccgtgtatatttacttttttctctctttcctttgacttttcattagtggttcatggtgggtttctactcttgcctaccccaagtcccaatttgcttgggactaaacgactttgttgttgttgtaggttttgcatttcaccgcagctgagtgtctttgacttggtcctacttcaactaattttgagaagactaagtacctgggcagtcctcaaacttgcactgtgttgtctaggtctttaagtcttaaaatgcagatctagggaattaaacttgttaattgtgccattcgaggtccatatatctcttaattgttcccctgaaggtccaaagctccataaccaacatactttcttacatcatctgcatgttggttccgagctgtgtgttcatgctaactaaagtaattggatcttgagtgatactcaacaagtctaagagttcggatctgtattttactagtacattgcgtgcgctatgcgcacgcgtttgtaagcaattaggtacaaatatagaaccgtctattaatcacaaggttatatatttaacatttgtagttgtacaaacacaaagatcattcacctgtacatcaggaatgtatgaagtttgcatcgatgaagacatggcgacttcccactgcaagcaaacatattagaaatatcaaataatgaacatatattggtcaatgtcacacccgtattttaggggtccaaaacccgggcgcgaaataatcaccaagtatgctaggatcaagtctcacacatatgatgacacatgatacagaaacgaatgtcacaacattaatatataacggagttctgtacaaaatagttaaataattacatcatacgaagacaacgatccagcaaccaaagttgactgggagacgacgacctagacctcccacgaacacatcacaccatctttcacgcgcctcatcctgtggtacctgttcttgacctgggggatgtgagtacagcaagggtgagctcacatacgttcatcgctcaacaagttgtgggaaataatgtgcatgaactcaccaaaggtgggaggtcatgtgaagtgaaaggcttaccaaagaaaatggttaaatttgagcattgcttttagagttggtcaaaattttattagcagttactaagtgtaagtagataccaacccaaataagtaagagatcaaattaatatcaacacccacaatgcaattcaaatgacaaattaagtttaattccatgaattaataatttgagggtccgagccactcatgaccgtgagcacgactgatataccagttttacactctacagagattgcacatctttacctacaagtcgtgttacccatttgtcacggagttgatcagaccccatacacctctaccaaggaagcgagacagggtaccactacgaggcctttacaaagttccactagcttcagaaaacccgctacagtttctaggaagcgcagtataggaatcccccgtctgaaaagccatcgcagcaaaatcagcccgagaacctccctataccgaccaatcccctactgctcttgcccctttcgtgtaaggtagtcctccactagctttcctaattagtcagccaagggtgtcccatagcacccttatggtagcactgttttcccggatggttctccatgttccaattccaattaataaaacattagtttcccaaaaccaggtagagcaatagcaaatctatccaataattcatctgtttgcaaggtgggggataaacaatgctagggaaacgtattaggtcccatcaatttaacatgagcatgtcacagtgattaacaacgaacattattaggtaaaaatgagtgatcaagggcacatgtcgggggagtgcgcgacgaggcggcgacaaaagagcgggagcgcgaacgcgtgtgacaaggagagtgcggcgttgaagcaggggagcgagggtatcattgagccacggagacggaggtggggaggaggagcgtgatggaggggtgtgcaggggtgcagcacgaccgctgattaaggatcggacgactatagtaaaaaaacaacgtggacatgttaggcttcggcttttgcacccgactctaataataaggaaagagtttagggacctagatgacactgttggaatataatataagtgaattgtccatctctttctatcaacttaagcttttgtattgaactgattggtgcatgtaacttagtatggtattggtattagagccagatgtcttgagttgaaatcctggttagcgcaatttaataaaataattgttgctcgctcttatttctacgtctgagagctaagagagccttgacgtgacgtggagtattgaaatgtaatataagtaaattgttcatctcttcctatcaacttaagcttttgtgttgaattggttgatgtatgtaacttaatagacaccttggacaattttgaaaaccaccagtatatcttgctcttaaaaatgaatcggtggtggactggtggttatgttcctgaagaaatatgtttactgattccatgtttcaattgacaggtgacaagtaaagtgcattctctcaagaaaattcg

SEQ ID NO: 828 - DNA, 9436 bp, Zea mays
  Intron number 5 from transcript GRMZM2G168760_T01 (locus G RMZM2G168760) derived from phytozome v7.0 (chr-ID 9; pos 1 56426441 to 156435876 reverse strand)
gtgctgcactatcaaaggtttctcactttgacttaaaatatgtggctattttatttaataaactgtagcttttagcagtaatgattttgttcttctctatctttacatatacacaaagagtaatagtgcatggacatgttattaaatgaaatttggtttagtgagttggtcaccccaacagagtgccattttccatcttgatcttgggcagtactcttcactggacattgcgtgctgattttgttcttctctatctttacatatacacaaagagtaatagtgcatggacatgttattaaatgaaatttggtttagtgagttggtcaccccaacagagtgccattttccatcttgatcttgggcagtactccttactggacattgcgtgctgggcacagacacaatttcttcatcgtcgatgaggcaagaagcagaagaacaagtgatacttctgtattagatgtattcaatgtaaaacatgcaactgtactggatagaatatgcttatgcttgaacctgcctggggttgcaaggccttaaaggtgcagccagggcgatggattaaaagttagaagtgtttgattttagggaatgaaccaactaatagtttatattgagttagagatgttcggatctctgtcacacatacatctcagatttccagtgacgtcgagaacagccttactaccatgtgacgccgagaacaaccttactaccatgattacaggtaggcgaaacaggaatgtgtttgaatcataaagaggggtagtgattggtggtgaagactgccttggagcggccaatgcagatggttttatgtaactctgtgcagcttttgaagggagtgaagtgcaaccaatgtgagctattaagaaataaggattagggaaccaaaggggaagattgtcccttcagactatttaggagtggattggagctctaccaagcagcagcagtttcaatcctccaactctctcgttaaggctcgagcagctcagtctcgaagcacgtgaccttatcggggttggtgctggtgaggttcatggccctttacactccctctcagcatgctcgaccacaacgccgggcaggcttggaatccaggacaacaacattggcagtggtggtgtttggggcgacgatgcattgaagatcggagctcgggtcatggaggtgggtgggggctggggcattgttactcagggcagcagagttcaagttgatggtgtgtgttggagtggagcaccagtcaggaggctgggagcaaggtggcagtgtcctccaaacagccactgcccatggcaaaggccaaagggcatctctctgtgtggtagtattgcagtgctgaccttggcggggacttgataccgaccttgctggggttgctgaggttgacgagggaggactggggtgtggagacgggctggttagtttgctgggggtggttccacatcacttttttagtgatgttctggctgctcgatgaatatagaggaaagtagcgatccatgtatcaatctgctccaaaagaacatggagttgccctgtttagggttgtcaatgagccaagttcaagcgagcctagaatttccttcgaggttggagtcaagctcaagcttggctcaaatgaagctaaaaaaggctcgagcttggcttggctaagcacaactgatgacatcctctgctaaaggaatacacaacactttcaaaagttgctgcataggaaatcaaatttggagctgtttggttcttttatttccctcttttggttccaatggtttctgctgggtttgacacattattttgttgtgtgatgagcctcgctaggggggtgggggtgttggcgtatgagcaagaggtggcagaagctagaggagggtgcagcgcagggagggaggcacacatagatggagagaggggtggggtggggagagagatagagtgagagcaattgctctactcttgcttaagatccaaatggttacatgacccctgtatttgtagtccctatcggacttactgccaagcaaattagagatgagtgcttatagatttagaccctcctttcctaagcaagccaatccttatttcctaacaaactcttcctttttattctcaaccttactaaatctatctctaatttccatatgtttcagtctcttccgggtgggagggggctagtggcaccgtgggccaggtacgaccagctagggccctcttctgggcctcgcttggcctggctcgagggggcgtagataggcccgtgacatgttacgtatttgcaaaaatgatggacggtttcctagagaaaaaataagctccaaacatctagagtgcaaaaatattgcaaaatgttttgatatatagggtaattgtcaatatcaaatcatttatttgaggtcattgttaaaatagggcataaatgggaaggttttgaatatcaatggtgcctaatgaagtcactactcattaagagtaaataccatggtttttaaagcggtaaggcggtccaaggcgttggaccaccgcctggacgcctaggcggcgcctaggcgaggtaggcgggcaaggcgcctaggcgttagaccaccgcccggaagcgtaggcgacaccttaagaacagtggtaaataccgttagataagagcagaaggtaactgggaaatatgaagaaaacgtaaatgaaatgcttgtccttcttcaaaatctactgattggaaattgaaattaaatttcaaatttcagcagtgcggtcagtagtagcatccacctctctcaagttaatatgctactggtattctcaaaagagttggtatgatgaactgtaaacctgttactgcactctcacctcggaaaaacagagtatcaatatcaacattgttggagttttacaatattttttccccgaaagcgcaggagaactgcgcatcatttaattagagaagaaaaaaggtccaaaatggaccaaggtacaaagccctaagcgcaggcttaatcaaaacaaaaaactcacaccactccctagaccctgtgaaggttacgcgcgagctctaaaccaaagctctgaagatgcttggctccagccgtaatccaacacccaatctcatcgagaaagacgcatctgatagagcttagcgaaggggtctccccattaaagacaactttgttgcggtggatccataaacagcaggcccccaaaatgatgatgctgttcatgccctttctcttggttttatggatcttcttacttgtttttcgccaccaatcagcaaaggaggtctcatctcctgatggagagagattacctacatccaacacaaacagaatggaatgccagaattgtcttgcaaagacacaggtacacaaaatatgttgtatggtttcctgcgattgattgcagaataggcaagacactgggggcgtgtttgcgaccatgcaccaggctggctcggcctgccctactggcccaaccctaggttggcatggcccagttggtgcaaatccctttgtttgtgttgctgtacaaaatgagctcggcctaggcgagaacgtgtttgtgacccttacagacagctgggctaagaggccaactgcccaactgggaatatgtttggcagctggctgtggtcggtctggcccatagacaggaaatagagatggacattgctaacataaaaaagagatggacattactgacagaaaatagaggattagaacaacatatgtcaattgaacaatacaagcatcaactgagttagccttagacaaatttaacttaacttcatcaattattgtcattgctggctacaagttacaatcaaagaagccatctctattttcatgtgatcttcctcagaataacatatccatctgcaacaggtagttgggcatccatctgcaacatatccatcaaagaagccaggcaagattgacaatagcaatgattttcgtcagatataattgccattttcatgtgatcttttaacttggagcataagaacatagctgggcagccatgaaaccatgatattcatccaacccagccatcaagtcatctatggtggataacagttgcattgggcatggatgtgccccatggttccatggcaataatcacaacatggtggaaacaacataattttcagcatatgcccagtacctcacaatttaaagatcatccacattaacacgggcaataatgacaacatggttccatggcaattatgtcatcataggcataaaggaaagcacaagtaaacacgggcctcagctgcactacaacacatcaaatgcaaatgctcctcagattagtgtatatagcatcattggccaagtaaaaacttcaatcatagtatgaaatgtttgagccttacagtaaaaacttcaatcatagtaaaaacttcaatcatagtaagaatacaaatagtgccttacaataagtttgagcccaatagcttagggttcaaatggtgtccacccaaatgttacctattgttagccaccctcctaggtaaaatagacaaaaggactggtgggagtaaaccagactgcacaccaaaatgtctacaacaaactatttctagttgtagtcaaaagagagagtgggcaggaagagagagtggtggtggtgcacaccaacatgtaattcacctacatgtagtagttcttggctaggaaggtcctaagccaaatgtttctatgtgcctcagtcatgtgaacaaagcccctgccttgagccatcctcctaagaataaatccagaggtgttgttgttccacctcattgccctaggacccccgggaacagcagcaacaagaccagctgctgctggagcagcaccggcactagatgcagtagcatcatcagcgttagctgctgcactagcaccaacccttatcatctcagtcatcacatcagtagctgggacaaacccaccctgatcaccagctgggactgaaggcatcttaccactggtttgcatgtacaaattagtataataatatcagcacaacaagaagagacaaatgggaataaaaaaattggtctcagccatgtccatcatattattacattatcatcaaacaaacatgagttccatagcagggtaaacaaaccatcatatcctagagcttcccctcccttcccacataacattgcaaatggcatccctctttgcagccatggcactggattcttggctctggctaccattgtcatctagtggatcttgttgtgtgccagtgaaaccctcctcatcaggcactacttcatcaatgccaaagcctaaaatccagttatgcaagatcgagcatgccaacacaagcttgacttgtgtcttatacttgtgaaagggcttgttgtccaagatacgaaacctgttcttcaatgcacctatagccctctccacagttactctaagtgatgagtgtctcaggttgaacagttctcttgcattggtaggtcgatttctgctcccaaactcactcaaatggtacctaaccccccctgaagggggtagaaagccagtgcggcatgcataccccgcatctaccaagtagaatttacctacaatgtgaaatctactgtgagcttgtgtgacattgtagaatttacctacaatgtgaacttggtagtgcaattaccttgtgggacagtgaacccatcatccctctcaatggcatcagccaggataagtgcatcatgggcagacccctcccagccagctagaacgtatgtgaacttgaggtcaaagtccacaacaaccatcacattttgtgtcgggttagttttcctacccctgaaagcttgctgcatgtgtctaggcacccttgccagcacatgggtgccatcaatggcaccaatgcagtcctaaaaaccatatatgtaagataaatgaacatgtgaatatgaacaactaatgaacccaaggtaggcaaatacctttaaatatggattccatctatagcttccagtgatctttgggtgagtggtagggctaggtgccttgataagttccttcctaagctctccaacaacatacaaaacctgatgaaagtgcttgtgtactgtctgaatggacctcctaaaggcctggtgcacaactctgaacctttggttgtgaccaacaacatgcaagaacatggcaacttgctcctctactgacaccccctccctatcagttaccagtcccctctctctaaaggtcgtgcataaagcaaaaaaaggggctctcttcatcctaagcatggaaatgcactctacatcagtggagttgtaaatcatgttgagggtcctctgtctgtgaagttcactttgttccctaagtacatagactagagggtcaggctctacttcaggatcaaacctttttcttttaagcctagttgtaacaaatgaaaccatcactactgtcaaggcagctgcttgcttacacaacagctcgcggctcaaagagggatccatctacatgcatataacaatgatacaagaattaatctaatcataccctgcttggcctcagcatatttgcaaaatgaatcagtaaggaaaaagaacacggctgcatcatctatatgatacctccaagtgaacgtaaaggacaacatcatcgaccaatttaatataaatccaaagcaaaccacatgaaaatcaaactcgcagcaggtataacatgaacaacacactgtaccaaaccctaactcatgaagcatgaaccagaaaatagaacgattgggggttgatttcaccttggggtcaaggtcgtagcaacggagacgaagcagatctagaagtataggaagcagatcgaccagagacgaagcgacgaagcagatgcccaacgcctcggagtcccggcaccaggcggagctggacgcagccgcgacgaacagccactcgccgccggtctctcacgagggagggagggggtggaagaggaacgagcagcgagaggaggggaaaaggagggtgcaccgtcgccatatatatccgcaagaggattcaccggagcgctccttcccgcgcgcgcgaaaacctcaccattcccgcgcgagcccccgccagccacctcgcccgccgccacattccgccagtgcgccgcgcgcagccgtgctcccaggaaacgaaccctagccgcgtttcctgggagccacccagaaggcagccttttggctgttttcagccaggccgcgaaacgggccaaccttgcaaacaaggctagttgcagcccacgggcgcaaccgggctattgggccaccctcccaaacacgccctgggtggtccagacctctcttctccaatctatcagaagtccaacatttattccgaatagccagccacaagaaatacttgcactttggggggagcccaagatttccaaagcctcttccaaggttcaaaaataatagttcccataaaaaaagttctgtaacaagacctagaagaaaaatgaccagaggaagtatgcagccaggtgtgaatatccgcctcctgtgttaacgcaatattgcttacagcatcccaaatcagcaaaaattgttggatccccgtccaggaaagaggtgtcaagatgtcactgatccattgctgtcctccaagagcctgggccaaccttgactcgacctgatttgagctattcagttaacaaggtgtgtcagtttttgcatgcaccaaccacccaacattggacaacaacgaagaggatactgagatatttaaaacacacattacaacatgggtcgtagattgtgaagtcttcttcattgcttgtaagtgtattttctgatttagattgggctggtgatgtagatgataggcactgtacaagaggatttgcaatgtttcttggtagcaaccttgtatcttggagtgctcctaaacaatcaatggtatctaggtcgagcactgaagctgagtataaagctctagcaaatgccactgcagaattgatgtggttttttttttcgaaaacgcatgagagctgcgtatcattatattaagaagaaaatgtgaggtaaagatagaaacctcatacaactccacacaaacccacacacactagattataggtagaaatacaacaatataaacagctagactcgtgaccatggagaccctaaaacaaagatcaccgattggttcgctggagcataaggatgctagataaaccaccggctccagccctacaccagaggtgagactcctccttgacccaattgatgaccatgctagaactaggctgcactgcacaccattgaatacacaacggttgcggtgattccagatggcccaagctccaagtatgatcaaagaattcaggcccttgtgcagccccttatatgctggatcaacaggaactgcgacaactccttcccaccaagcctcaaagaagagttctcatggctaggagcaaggtactgcaacctgacagatttcataatctgaaaccaaacttcccgtgagaaaacgcaggagactaacaaatggtttagcgtctcctcctcctgatcacacagcagacagaattgagggtgaggcagccccttcttgggttcaatctcttctacaagaactgaaagttgctagttccccaacattgagaatttggtgtgataacattgagaatctgtccaggtctctttgatctggacttatctcttcttcttaatatattgaggcgcagttctcctgcgttttccaaaaaaaacattggatctatatatctcacgtcaaatccaatattttatggtcgagtaaaacatcttgaaactgtttttcactttgtgcgtgaaaggatagttagaatgctactggatgtgagattaatatccacagatgaccagattgcagatgggttcaccaaggcactcactaccactaagatggaacagtttaaaataatcttgtataatttatgactgaggggggctgttagaatatagaaggattaattatttaggcttgcatgccttgttctatacagatagagatgtattctaattatagatagagttgtaaccaaacaggactagttatagaatcctgatcgattatcgctattgtaattgagttggacaacttgttggcagtttctgcccatataaatatatatcatgtggcctcctctagaggatatacacttaaccaatctggtggttttgttatcattattttgttaatgaaaccttttgaggcatgtcttgtctacaagtcggcccaagtgtgacatgaactgttgtgaagggtagcaaaatcatagttttcttgtgtaggaattgatagtttcttgtggagtaggcgagtagcaaactagcaatttaaaagggttatgcattcacttgagattccttgcatgcatatattctaacttgttattgatatgacctttcctataataacaatgcagaacaaggatcttgaaaagcaagtaagatttttcca

SEQ ID NO: 829 - DNA, 2830 bp, Zea mays
  Intron number 3 from transcript GRMZM2G072205_T02 (locus G RMZM2G072205) derived from phytozome v7.0 (chr-ID 7; pos 1 65535229 to 165538058 reverse strand)
gtggactcactgaagaactaaggaatgagttggacaaaaccaggtgtggggttcttattggttctgcaatgggtggcatgaaggttctattcttccagtatactagtatttagttgtatatctcgatgaattccaaccatgcatggaacatggttcccatgtcctgatacaagttatgatggactgtcgagcaggtttttaatgatgcaattgaagcactgagggtctcttacaagaaaatgaacccattttgtgttccttttgcaactacgaatatgggctctgcgatccttgcaatggatctggtgtgacatgatctgattcctttttctaattttctatttaggaaacagtgattaccacagctcatactttctgtgacttgcagggatggatgggaccaaactattctatttccacagcttgtgctaccagtaacttctgtatccttaatgcagcaaaccacatcagaagaggcgaagctgtaagtaacttcaaacatccatgttgtatttgaaaagtaacctttttattttcaacctaattcataatctttcaggacgttatgctctgcggtggttctgatgcacctcttatcccaatcggtttgtggtcccaaatcccaattcctcattattatgcctccagttttccacagttttttttgcagtttcaagtgttttgaccatgacatgcaggattgggaggttttgtggcatgcagagctctttcacagaggaacagtgacccaacaaaagcttctcggccttgggacatggttagtatcttttattgcaaaccctattatgacaacattttgctggataagtaattatcatcatctagtacaaccacatcagcaccatgttggtttaattaactatttaacttaccagcttggtccatttgttgtgctagagtgagatatttgatctttatgttacagggacgtgatggttttgttatgggggaaggggctggtgtcctcgtattggaagaacttgagcatgccaaggttttaaacatgcaatttatgttgtccctctttatcgatctttcagctgtttgtttccagttcaatggcttgttattatgttcaaacattactgcctcctgagatctgtgaaccttctccaggaaagaggtgcaacaatatatgctgaatttcttggtggaagcttcacatgtgatgcttaccacatgactgagccacatcctgaaggtgaagtgtatatcttggctttgccatgccctttcttttcctcctacttaaatctaatgaaaccttctgatgtagccttttcactaataaatatcaggaagagggattactctctgcatcgaaaaggcactagctgatgcaggggtagcaagggaagaaatcaactacgtgaatgcccatgcaacatctacacaagcaggtgacttgaaggagtatgaggctatcgtgcgctgttttcgccagaaccctcaagtatgccacctgatgcaagcgattgtacagcaaatttttattgcaaaccatcgtactgcgaaccatctaaatccatttttttctgttatgaagctgagggtgaactcgaccaaatcaatgactgggcatcttataggagcagctggtggaatagaagcagttgcttctatacaagtaaggaattcttagtacccttacagggaacatatttacttggcattattctattaataatacaaaatttacttcacggaatatgagctatgcatttatagcattgaattgtatatgttcattgtatctttctgtatgtccaatatagtgaatttccagtgcaataagtaatttattggaagacatgaactctgtaactttttttttctaaagttatattaagcagtagaaaagaaaggccttagaggccagacatgatacaaaggattgccaccttagggcggccaaactctttaactgaaaaattcagcacataacctattacttttattttgaaaaataatcagatcacacagtatcacccttcaatttctcactcaaatatatgttgaacatagtggaactgaagctaagttatgctaaaatgaaatttagctacatctgccttttttctagattatgttgtggtcgtctggctgaatttatttacagatacatttatctttttctttcattcatttatttatctccaaacaataaatttgcatcacccagttttctggaagattaataggcacttttcgattggatataactccaattatccccgcaaaagaaaatacccaatcatcctagaccaggaatggtcaatatgatattgcagacagttattcttttgcagtgaacattggcatttggtttcattctcatgtagccatgaactctcttttgttacatttaccacagctctcggtgttttgggcattttggcttcaaccagcatgaattgaaatcacaacagagcatgtgctttgttatcggtttcattgcaaaactggctcatcaggaaaatgtttttttagaattttaggcatcatgggaaacttcttgttcattgcaggctataagaactggttgggtccatccaaatttgaatttagaaaatccagaggacaccgtggtaagctccttttagtgatgcatgatttaatgccactgttatcatcttctctacttctagatatatgaatgaaagagcagaatctatatattgaatggtgttttaatgcttatctttgatacaggacgtgggcgtcttggtagggtcacagaaggagagatgtgaagtgaaggtggcgttgtccaactcattcggattcggtgggcacaactcatcgattc

SEQ ID NO: 830 - DNA, 2228 bp, Zea mays
  Intron number 4 from transcript GRMZM2G320681_T01 (locus G RMZM2G320681) derived from phytozome v7.0 (chr-ID 3; pos 2 27778083 to 227780310 reverse strand)
agtacctgcttcccgcattggtcaaaagcaaggtcggttagtccctttccctttctgtcgtgaactaaattggtttgttgtcagtccatggaatatggctttaaaggtgctaaaagaggacaggtatgattattgctctgaattctttgaacttgcaactgaattctcgagttcagataatggtgaagatggtgctactttactgatgtataaacattatgttgcaactgctattcccaaaggaatccattgattgtctctgcgccttactgacaaacatacgagctcgaaggtgcagggaagaaatatttaccaaaaccgaaagaattcctttgggcactatgaacacaaaggtctttatacaatgattactcgactgccaaatgagcactatgaacacataccagaataagctaaattgtactgatgcacaagatacataaaaataccattgccgttttagtagattattaaccatgtttgtgctctccacatgtcatagtctaatgccattaaattttgagggtagcgatattgttttcaccctattgaatagggtatatgatgatgttggcaatcgctagagcaggtaatattttgttattaaagttttcatgtcgttcctccactgccatggcttgatctgtgaggatccatacatgtgtgtggtttatgcttgtaagttttctccttcccttgctttacacatctgccatatcatgcttgacaaacacatcagttttggccctaatgttccggtgtgtttttgtgtaactttgccactttctttgtgccaagattttgttcattgggtctgcgtgagctaccagggattaaggttaatgattcaattatgctctttgtattatgcttatggttgagtatggcgtttaacactaactatgagataggtcagaacagaattggaagaccagcttctctacacatatagatgccattttctcgatggggagttcagtgatttcaaggcgctgcctagagcaagtggagaattgagtgattttcaggagctcctacgctatcttttatagatgccattttctcgatggggagaacagaattgggacgggaatggagatggaggaagacgatcgagccgctcgagtgctgctgagctcccagtgtctctgtctctgatgaggttagtacctgcactgcaccgctcctcctgctctgccatgctctccgccgcattcctcacccagccttgctcgcagctactattgttccttgctgttgctgctttcggcactgatctggctagcggctcttggctgagaaagataaaaaaacactaccagccaccgccatctcacacaggctaaatatctaaactggtctgaaactctaaattacttgcatagcaattagttaggtcatgatgttggatgctgattttttgttttgaacttctcctctggtcgaatctccacggttcaacacgttgtgtggcattggaattctcaccacaacttatggaattaaggaagggggatggttaagcctcctactgctccccttgttggatgtttgaaatggttagtttatgaaagccacagaatttattatatcacggtaacagtaaagaatggctatatgaacgaatgacatattaaaatctggatattagacttatgtatgactttggtagcatattcatatcctgccttgattatttttgtcttgctacttacgcctttacttttcttttgaatgtcatcgaataaggtgatgttgttgtgttgcctgcatttggagctgctgtggaggaggtacacactaaatgagaagaaagtgcagattgttgatacgacttgcccttgtttttcaaaggttaattttgcttttgaagacatccccttgcgttcttccaaattgaatagctaagtaatttgcttaaaggaatttgatatagtagagtgcctatctgacatctgggctttggcattgtaggaggcacttttaaattcgctacctagacttgtgggctcgctgtcttcttcagtttggtggtaataatattcagtattatgactttatgagtagcattgtagctcaagcctttaagttataaaatcctcgtgacaagcattgatataattttaaaacaacttattgtcgctcacctaatataccttcttcaatagtgcagattctactgttgtggctattacaactacagaataatattgcagaacacggacaca

SEQ ID NO: 831 - DNA, 997 bp, Zea mays
  Intron number 1 from transcript GRMZM2G085713_T01 (locus G RMZM2G085713) derived from phytozome v7.0 (chr-ID 3; pos 1 8028343 to 18029339 reverse strand)
cgataccgccacgccttcctcgcagccctccccaggttcccctaccctcctcgcatccgctgtctccaataaatacgctatgcgcgcatcaggtccgctttgtacaatcaggtctagatcttatcggattacaactctctgttgcctcggcgtgatgcgatttagttgaatttcagttggaagctgtttttctgatctagattggtctaagtcaccttgagtgtgtggctttagtttggctctaaataaatcaattcctagaatctgtacaagtcgaactactaactttataaaaaaagtaacagcgtctatgacatacatggaacatattatcaaagtatattctatgtatatctaacggtattaatttgatgtcataaatcttgacagattttttctagaaattcagtcaaaatttaaattaagataaccctaaacctatttatttagggaaagaatttagttggtttgatcctttgtattggctaaattactacgtctggaacttaagcatcagttgggggtaatcagtagtgggtctgatgcttttgagccttggatttttgttgcgatttggttccagtatcaattgtaagcttgcagtgtcgctaatatttgcatgtgtttgatcattcatgtgtaatgactgtgctaggcatccgaaatcatggttcattattcatatgagatggtgtgcgttgagtgtgacaacatttctactcatgatgtattgcttgctggttgtcagaaaaccatttgatgccatgctggtggaagttctagttaatctgaaaacatacagtggcttttccttgtgggattctaactagtttttatataatttattaacataaatgttccttgttttctttttgctttgcagttaccttaaaactgtctctgtgttgcttttctaagttcagtagttcgacggggcacactcattacaatattctttgcagggcaagaagcaaatactggacacccatctcctcct

SEQ ID NO: 832 - DNA, 12838 bp, Zea mays
  Intron number 3 from transcript GRMZM2G157922_T01 (locus G RMZM2G157922) derived from phytozome v7.0 (chr-ID 3; pos 1 86047677 to 186060514)
aggtaaatagtcagttaagtttttatcaaactacagtacttttgatcttttctatgctttattactgcttacatgcatttgatcactatattttcgtagttagacacattttccgttataattttgtaagctctgaaaggaagggtatttaaataggatttgaaaattggatgttggtttggcatgctgagctagttagtatacataactgtgtcaattctgttgtatatttttatcatatgtctaattatagcctatcaggctaccatttagttatttaacttgaatcctgcttaattaccctgctaggtaatctcataccatgataatattgatattcttatatgaagtaaaattgtatttgttttgtacaatctagctccagtaagctgtatttgttatacatctggaagtcggtaacagctctagcaaaccattggtactctatgctgttgcaaccattctcagcaaataaatggcatatatgtgtcccatttttacttcatcaatgagaggttatgtagactttttatccgattttattagttttttttgggggggggggggtctttctcactggtttcctatagatgtttatagatttactacaaaacaaagaactttattaaatggtgcaaccatggaaaacacattctgataatttaatgtttttcttcttaaagaaatatttggtagctataagaggtatacagttgtcaactatattatttggaatctcaccgaaaggatttgtttgtcctgatagttccctacttcttctcttctgtaataaagcaaatattgccccagaagttacagcaatcagaataagaccacatgctactgcaattccagcgacagcacctgtgcttacttgcgattttccaccgtcatctgctcctgagacaagatagcctaatgtatttcatgcataattacttgcatatagacataattttacatgattagatttgattattttaatacctgcaaagtggacatatggatctgcaacaaagtaataaggtccaaaaccttgtggtggcttgtaagtttgattgctaagatcaaagcctatcctcgttatttccgacaagttaaaggatgttccggtcgatggaaatagtctgacttgaacttggaggtaatcatcactggtgaagtggatatcagaaaggaaaactgaaccaggttgcagtcccagttctgttgagaggctagcttccaatagctgaaagtgctcattgtttctcaagtctgcaaacagtggtgacctgaagaaaaccctacccatgtagggataggcacagccacaatttgcagggtctagactttgatcgctggaacaagaagttgaaccacaatgggttacactagtagtgtatgatattatgctatcttgctggatactgcaaaagtggctactggagaattcaggatccaagcacacaggatttcccacaagtctgccgatagaggaagaggcaattctagtcagtaaatggagactagaagcagcatgtggtctttggttttgaagcatgcaagtactcacactagtattccgttgtagctttgtgttatttttgccgcaactatacgattatttaacagaatgactcgctgcagttgttgagtgatgttgccagtcatgttaagcgtcccattgaaggcattattgcttagaatactgtctgatcagtgacaaaaataagcaaacatgtgaaactttgctagttactaaaattttaacttgtatgtttccagaaaattacacttgctgcagtccgggtaaggtaaagatcctgttgggaatctgaccatacagtcctccagaagctattgctctgcatgttaggattttataacgtgatatggtttcactaaatgagaaaatatagtacattgagcattgtagtgcatgtcttaaacaactcacactgaagctagtgttttcagtgtcagcatccaggttggtatggcagacggatcaaatgaattgttgcttaaatcactggatgtgaaaagaaaattcattagtacttgcaccatgtttatatgttatgacagtgtagaatagaagacaagggcgatatcttacaccacattaagttttgtcagggtactgagatctggcattgttccacgcagctggttgcctgcaaaattcctgcagaagatagttattcaaatgaaatacactggaaattcttgacttacacaaatatgttagtcatttgaccgtgaggtcaaaaatcatacatcacttacagtacattgaggtcaactaggttactgatattggtcggaactgctcctgtgaatttattattgtctaatcggctgatcaagatgcaaagaagtcaacataatgctgagaatatggttggaagaaataaaaatgccaagatactcacagaatctggagggtggtgatgctaccaagttcagcagggataggaccagtcaattggttgttgtcaaataatctcatgaagataaacaaagtgatcagtacagtactttaatgtgtaagaattgctagcataaaaaattagtactgccttacatatgttcgagtctcatgctagggctgaagaggccattgagattaccggttaattggtttccactgaaatgactgttaattaatcggaacagagtatcagcatggtaggaacacgagtaaaagcatgcatactgatcatctgttcttgacttataggagattagaaatgttggaggatcttacaaatgtttggtgtgtgtaagtaggtcaagtcctggagaagtggctgatgaaatcggaacaggaccagaaagttgattttctgacaagtctagccagaagaggttgttgagtaggccaattgaagcaggaattctgcctgtaaatctgtttgaattcattgccctgcagagtatatttcattgctagttcattgcatcagtataggcaaagcagcagcagaggtaacaagaacagagttgggattatgattttctatcaatttaatagttcttacaagaatgagagctgcaccaagtttcctaattcttcggggatgcctcctgtgaagctgcacccagccaagattctgaagattacaacgcattaggtaagcttcattgattcattatgatatataagaatttgccccggtcaggacatacagtgttgtgagctgcctgaggttgccaatcgaagtgggtagtgggccactaagaccactgttggaggagaggtccctgcatgcaccataacatatgagtgaacatgatgtctttttcccctcaagcacataagagacatgtatcatttctttaagagagaaaagactacacaagagggacatagcccccccccccccccaaaaaaaaaaagcacacacacacacccaaaacttacataaacacacccacaccacaatcaatcaggagaaaataagacacaaatgcccctttttcaacagtaggcaaacatcaatctaccaggacgtacacatcacttgaaagtttgaaatctgggggttgttgactgatacgatcacccctactacgaaggttgtatgtgtggctgttgggaagagggttgaaggagggccgtgcgggaaccgtgatgaacttgagaagagcaccatgcctggcgaagaacaggtaacaagatgaggcaagtgcaatctttctttagattaaacttgcttacagatgaatacaatgaagaggcttttacacagccttggcctaacagactctagctttatttcaggggatctaacaactctctcctatttttactccctagccttatctgctggctgatcgtcacacttatctaactaggccgaggcccctattgctggctcgcttacaggctgtttaggccgacagccatatactcttccaatcataacatctctccctccctcgacgaacagctcgtccttgagctggaactgtggataggaagatgtgcactgctatagtggctcccatgtggcttcttctggatgctcttcattccacctgaccaaaacaactctactttcagctcatccaagttctataatcttacttttcagtcaatttagccccctgctgcctataattggatttggcagtccaaggttggtaagaaattgaagatctttgtgtggctggtcttcagagatagaattaactcaaagaacatcctcagaagaaagggtttcctggcgcctgacagtaactttggctacactctaaggagaaaggtacgcgtgctggatttatcaaactcgtcgctgttgttgcactggatgggcttcacagaggcgtcgaactgtgtagaggcgtaggcaatgaaggtcgcgagagtgcagaaagtgtcagatttaacacgaagaggaaaagtccacaaataatgtgtgaaatcatcaagaatgaccaaataatatttataaccagatacactaacgattggagatgtccataggtcacaatgtacaagatcaaacttattagacgcacgagaggtagacacatgaaagggtaagcgaacatggtgccctaactgacaagcatggcataaatatgaggaatcctccaagtgaagggggatgctagacgggagcttcgatagagcttcatgaccaggatgaccgagagggcgatgccacaagggtgaggtggacttggcgaccaaggactgagctagagagaggtgcaaggggtacagagccttggagctattgcacctgacgatcacgttctgagtttgcagatccttcacagaacaaccagcagggtcgaactcaacagagcaattgttgccgatagtaggggcacgggcacagatgtggaggatcctggtgtggactcaactgcagcgatccgagacgacatggaagacatctaggtggcgaagtctccgagctgtcgctggacgtcggtgatcgtctccagcgttggtgactgggtggcggaggccatgtgatcatcattattggaaccttgcatgaccgataccaagttgatacgatcacccctactacgaaggttgtatgtgtggctgttgggaagagggttggaggagggccgtgcgcgtgatgaacttgaaaagagcaccacgcccgacaaagaacaggtaacaagatgaggcaagtgtaatctctttctttagattaaacttgcttacagatgaatacaatgaagatgcttttacatagccttggcctaacaaactctaactttatttcaggggatctaacaactctctcctatttttactccctagccttatctgctggctgatcggcgatcgccgcacttatctaactaggccgaggcccctattgctggcccgcttacaggctgtttaggccggcggccatatactcttccagtcataacatgacactgtaagctgaaatcttttctattagttttaactatttagtgcacacatgaaagccatattacacagttgaattaggaaactcgtccataaactctagatatatgaataggatattaggatggaactacaacagcaatcattttcttgaatgtttttaacatgtattgaagactgggcttggccggaagggactaacttgcaatttcagcccccacatctgggagccaaaatctttcagttacagcttaaattttttttttctggaatacgcaggagagctgcgtatcattgcattaatagaaagaatagaaagggggatagaatcccggtacagaacacacacacacaccacttataaactaactaaggatcaccgactatcatggaggaaacacgacccacaacactgatctaagctagcaactcatcaacttggaggaaggacagagccttggcaccagtcagggaccatagcaccgcctcttccctagccactctaagggcagtgaccaggctgggattacaaccatcaaaaacgcatctattcctatgcttccaaatggtccaagcacctaggatcacaagagaattaaaaccttttctcaaaaaatcagatgcccgagagctgctagacttccaccacgactcaaaggaatcctcatgagctggacatagaacctgcagccccactaaactaaggaactgaaaccagaactgcttggcaaaaacacatttgaccagcaaatgattcatggtttcagcctcttggtcgcatagggggcactgctcaggtcggtctagtcctctttttataagcctgtcagcagtccaacacctattatgttccacaagccatataaagaacttgcacttgccaggagcccaagatttccacacacgttctgctggttcgaactggaccgaaccaaggaaaagagctttataagcagaactagttgtatactcccctgaagcgctgaatttccataagtggcgatcccttattccaggttggagctcaactgcatcaagcacttcacagagttccaagaattcagcaatgactctaactgaaattgccccattcacatcggagatccactgaaaattagggagcacatctttaaccaactgtttgttggcaagacgcgggggcaccaaatcaaacactgcaggagctatgtctttaatacatttcccatccaaccatctatccttccagaaaagagtattggctccatcaccgagcttagtaataatggctgcagcgatcagatttttaaccaccttacatacacgaatggggaagtccgtccagggcctactggggtctgttttctgcagccatggccaacgagctctcagagcccaacataggttctttagctcactaatcccaagaccacccagctccttgggacgggtaaccttaggccaagccaagaggcaatgaccaccacggaactctttcctgcccctccaaaggaagcctttcctcaatttatcaatagctttgatggcccaaacaggaaggtcgagtgccaaagctgcataaatcatctttgccgtcatgacaaactgcatatgaatagctctaccagccctggtcataagttcagctttccatcctggcagaaggctagctactctatcaacgatggcctgaacctggtcccttgtgagtttcttgggagacagaggcagaccaaggtacttacacggaaaatctgaaatattacatggtagcaagtcttgtaaacaatttaaatcttcttccccacagcagattgggaacacactactcttctggatattagtccttagacccgaagctgaaccaaataaatggagaatatccataaccatactgatgtctggggcagtcggacatagaaatatcactgcgtcatccgcgtacagcgagatacggtgctgcatattccttgtagagagaggttgaagaagcccttcctcagaagctcgctgcacaagcagattcaagacatccattacaagaataaataacataggcgatagtggatcaccctgcctcagcccacgttgatgtccaatccaatcccctggcagaccatttagtaaaatcctggtagaagaggtagctaacagcccacatattatatcacaccagacctgaccaaaaccaagttttttcaagacctcgagaaggaaggcccacgaaaccgagtcaaaagcctttgaaatgtcaagcttgagaaggatacgagcctgcttctgacaatgtaggaatttggtcgtctgctggaccagcataaagttgtccagaataaaccgtttcttaataaaagcggtttgattgggggaaaccatattttgcagccggcctgctaaccggttagccaacaatttagtcaccaacttcgcgaaactatgaaccagacttattgggcggaaatccctcacactggtggccccctccaccttgggaagaagagtaatgaaagctgaattcagaggacccaggtttctgaattttttagcccaaatgcagcgaacggctgccatgaaatcagtcatgattaccgaccagcagcttttgtaaaatctaccagtgaacccgtcgggacccggggatttgtccgaaggaagggccttaattgtatcccagacttcctcctcagagacaggcacatcaagggcagcaaggtcaaaagatggcatccctagagcatccagatccactgtaacattccttatttctgcagtaccaagtaacccttgataaaaattgaagagggctgctgcctttccttcctgggcagtccaaatctgcccatcttctgattgaattgctgcaatgaaattctttttcttcctgaaccttgtttgtgcatgaaaaagagaggtattggcatccccttctttgagccatccaatccgcgatttcaaccttgccatggtacgagaaatagaggagagggaaagggagtgctttttgagcatgtttcggagccacaattcagcaggagataaagagcgattatcttgcgccacctctaattgatgtagaagctccctagccatctcaagctgcagtttaatcttcccaacttttttgtcattccagctctgcaaacatctagccgttgtctttaatttcttggccaaggtgataagtgggcaaggccctgcaggaacagacgcccaggcctgagttaccacatcctgaaaaccctccatcttagtccagaaagcttggaagtgaaacctcccttttcctctgctgaaatcatgaagcccaagcagcaaagggcaatggtcggagtcatccgtggctgagctctggagaagagaatctgggaattgttcctcccaatctgttgtgcagaaaaccctatccaatttgaccagggtaggattagagtgcccatttgaccatgtatacttccggccaatcaacggaatttcattaagagccaaatcatttgcccatctcctgaatctacccatcatggcacggtctaaattattattattcttttcttcctcccttaaaatcagattgaagtccccgagcacaagccatggcccattacagagagctctaacttctctaagagattgcaaaaactgaatcttgtcacggttcccttgtggaccatacacacaagtaagccaccaaggagagctggtgctagaatgaaaattcacagagacactatattcatccactctactgccagcacaaacaccaatgctatttttccaagctaccaaaatgccaccactagcaccaacagaaggtaggaaaacaaaattatcaaaagctggtcctagcatccgcaacaaaaggaaccgagaaacatccaccattttagtctcttgaagacaaaccacatcaacttgagctgaatccaccaaagtgcgtacagcatcctgcctagcagccccattaaggcctcgtacattccagattagaattttggagggatccataaggaatgaaagaagaacgactaccagtgagggacacccaaaaaaaaatcatcagcagattggtccgccttgcagcatctccataggcctagaccacccaaatagcgctgccatggccgtgatctgcacctctgaaagccctttgctgaaaaccctggcatactcatcaaggtcttctggccttagactttcagtttcttccgcattcccaatacccagttccttcaaaatgcgcttcttgccctgcgtggccggtggaggaggaggcaacctctccactcctactccagcgacccttctgctgcgtcgggggaccacctcattggctgtaactttgccttgtcgcggccttctgactggcgccctcagaattccacctgctggtttggtcagcctatcaataaactttatagcagccgaagggggggggcgtggacgtgtgtaacagctgctttggttgactgtccttcttcctcctctgccgaaaatatgtaatgatgcccgaagccgctgcagaacaggggggcggcatcaccagctcaacagcgacaggctcatcaacaggacaaggatcgccctggacaagcgctgcagccggaactgtggcgcccttaggtgtcccgcagtctagaagagaaaccggtaacaaaggctcaacatcagcaggttcatcgacagggctgggggggtcgccctggacaaacacaggagaaatatcaacagaatcattccctgtcgcagccaaatcatcagaagtcattcccccccccccccccccccccggcttcagacggagtctgggagactaccacgtccacagccggagagaatgaaaggtgaggggggcaggtgccaccatggacccgctgcgatgcttcggaccttgagcccaaacggtcaaaaattgatctccttccccgaggttccccaccgacttccctgccgtcgttatcatcaccgccatgaggaggagagcgggaacgatgacgcctcctctgtcttgaagaaccaccatttactccggaatcctgagaagggatcaaccgatcactcctcaacgtcgagaaactaatagaaatctgatatacaaggccaagccttccatcttcagtgttaactcccgtaggttccacaatccaaaggtctctggcagcagggatggttgccgggtcaaaacaccatccagaacaacgaaagacgtcaagattccggagctccagggtatcaggatggacttcatgcacccaaacacactgattcagtagctgctgaactgttgataactcccatgcatgtaaaggaataccagtcagttgcacttccacagggatcggcaggctcactccagacgaacccaaaaacttggaccatttcttggacagcaacgagaacgtgctggatctgatcaagctccacctctctgttagtaccagagctaagcgctcatttggaagcatgagcaatagattggccttggtaaactgccgcagaaccaaagaagatgcctcaacatccaacttaagcgcaatcgcctctgcaatctctgcaagcggaatcaccaagtcactgataacagcaatagacactgcattcttcaaatcatcttcagcttgcgttagaggattattccagccaatgatgcaaggcacatgaggctgtactgctattccttccaaaggggtctcatcacttcctggcaagacagctccatcttggccttgaccaggatccgaaccacccctcgacgatgaacggcgcttgcgatggcgcctgcgacgtgggcgaggcgggaggggttgctgcgagtgtgcggcagttgcgatctccatgaccgtggacgatgtcgcgacggtcgtcgacacagtctccttcctcttctcaccttcagcactagggggtgaaatcctgcgccaaaccttattacgaccctcgaatcgacttggatgagaagccgggatgcggagccggttccaaactggcgctttagaagcctgctgcgaaagcttggttacagacgtcgtcttcactacagtctgaacaccagccgccggcgcagctgaacccagtctatcccacacggagcctctagataaccgccggtgaaccgtgagcctgttgtcgttacgcaccggccctggacatgtataggatcgatgtcccagagccttgcagcgaaaacaccttggctccctgcggcacgacacagcgaagtggtcgtcggcaaagcagttgaaacagcggccgatcaagtcgacgggcacagccttgctagcccgcagcaatttagcactccgctgccttgtcttcttcgaccttacttcaacccaaccgtcggcatccctcttcggggctctctccagaccacgtacagcttaaatttggagtcatgctttctagtaaatagaaataacacaggattccagactttgaaaactacttttcaatacatggaaacaaagtaatcatgcagtcaaattttgagcagactattctgatttctatcaattgaaaccagaaaaaaatggtgccgatgataatttatgaactttaaatatagattctacttttcaatatatggaaataaagtaattatgcagtcaaatgatgagcagattcttctggcatgtctatcaattggaactagaaaatgcagtactaaagatagtttataaactttaattatctatgcaaaatgactcacaagtaagcaagctcgctgaactggcctatactgttgcttaatgtgccttgaagattgatgcttgatagcctcctggaaacatggattttgaattttatagatggaaagttaaagtaaaaactagtaaaacattattagttagtacccacattgatatgactcgcccattgttgcacataatgccatcccattgtgcaccacatggatcatttgatgcttcccaacttgatgggaagttctgccaccctttaattagagactgaagtgcagccactgtcaattcgttctgtgttattatcaattgaacaatttacatagcactgaattgagttacattctcatttgtatggtttgatactgccatctcttttattgttagctgttttttatttgctaactcacaatataaatttggaaaggtcaccaacttagagaaataaagaagaatggtacttttttcaattgacatggtgcttatcatagcaatatttcattggatcttacatacttgaagataaaggcatgctaaaacattaaacattttgttctttggagagaagaatactgtttcttgaaaactgagtggcatataaaaggtttttcatctagcaaatttatgtgttctgctaggcttcaagatgcttaagctataactttgcaaggctaatttaagtaagaatagaaagtttcagagaccaaggttaatatagttaccatcttggggatctgtatcacagaatagtgcacgaagactggccaaaatc

SEQ ID NO: 833 - DNA, 2243 bp, Zea mays
  Intron number 3 from transcript GRMZM2G006107_T02 (locus G RMZM2G006107) derived from phytozome v7.0 (chr-ID 5; pos 1 11255754 to 111257996)
cacaggtaatcctctctccacttccttttcattaaattagtaaaaatcatctgttatctaatgttacatattattgtgtaatttggtttatgtgacaagttgaacatgttgttttagctttctaatggttgtggtgtcacataatgtgtccatcaaaatactgaagtttttgttgtgatctgttcaaactattaaatatttcaagtagcattactttcaagtggtattatatgatgtaaaattcagtaaattcacaaagccacacttttctgaaattataaaaagatgacaattccaagaacttgctttgagcaacaacacttcttattgtttacagttttagatcgaaactcttttagtgcttgatggttactgagtagtcaagcactcaagcccactgggcaatcagaccatgcttacgaagttacgatggccacttaatgacatggtgctaggaaccatgtgcggatcatgtcatgttgtttatgagggaatgtgatgttatcaccaaattgctaggattatgctacaatcacccctgtttatctagatatgggtcttaaccagggagggttggacttagatctgctgatgccccatccaaacagtaataatgaaaactgtttcactgaaagagtttctgttgtgaataatgttccagtgctaaggattgtaatcctttttaattttagggaactacaaatctagtttcatgttcaaatgtagctttcttttaattaccttgggatgttcctgaaatttcactattttattgaaatagcatcacatattttttttgctgtgtttaatttcgctccagtggttctagttgaggcaatattttccctatatttatgtacaaatgttgtacttcctatcctcactaacacaagcccattaggacattagcacagtgtccaatacttcagtttgactagcaatatcaagaaaaagtggatagattaaattaaacggatttgtattttgaaaataattatcccaatgaatctacttgtggcgatcttctgttgcaaatctatgtgaattttagatattgatgtctggagctgaaaagaatttgacctaagacaaatctaaatggacatgtacttgtggtcaatggaagtactgcatagcttctctttgcaacatggaataataccacaaatgtattttattctgatgaatctactaattgcaatcttctattgcaaatctatgtcaatttagatattgatgtctggagctaaacagaatttgatctaggacaaacctaaatggacttgtatttgtgtatcactggaagtaatgtgtagctactctctgcaaccttgaagaatacctcaataatgtattttattactgctcttactgcattttatttttattatctgcactaagcagttgtgactgatactgttgttatactagtctttttatcggcacttggtaatcctaatggtttttattgttctttctttgcttaaaaacactctttggaatatttattcaaacttgaactctcgtctactttcagctatatccaatatgccattttgtgattctgtttgaatatttctgaaatctgagaacctaatctattctttccatgttgattaactggcaaagtaattctgcatgcttaatgcttactatatctacgtgactacaaatttgtaattgctctttatattatgaaacttcatcttgaaattttgagcaaggcgatgatgttactacatgggagtctcttacagatttcaagtaaaactggatgcatgatacaacagctgatgtttctacttttttgacagttttgttttgtcagacaatttgttatgatgttcttcagttatgacatcaaataaaattaggatatgaaatgaagattctgaacttgtctacatcagtaaacacaaacatactcacatgtaattagtataacttgagctatagacttctatcaaaatcttgtgttctaagctgccaatctaatctacgcataaaaaagctaatttgatgatgagcggttaatatactattatgtgttttcgaaatcttctgatagtgtagtggttaccattgttctttttgccacagcccaccttgtgaatagtcgaacctacagattatatccaattctcagttaaaaaactccttcctgttcctagcattgttgctcttgctaattgatgtcgcatgctttaggtgagctgggaattggacagaagactaagaagccc

SEQ ID NO: 834 - DNA, 5987 bp, Zea mays
  Intron number 1 from transcript GRMZM2G107985_T03 (locus G RMZM2G107985) derived from phytozome v7.0 (chr-ID 8; pos 1 55017744 to 155023730 reverse strand)
catcgtgcccttcaccagcgacgagcacccaacaggtatgcccaccctctgtctccattgagggaccttcacgggcggaaccaggataaaatgtgattgagggtatacttccaacaactaacgagataattgccattatggacgaagagaggagaggattcgacgaaatggaggcgttggcgttggcttctctgttctggagacgcagcgacagccaaactccaaaacggaaatgagacagcgcttggagctgcgttaacaggtattagtttcctctctccgtttaccgttcgcctgcgcagacggcgtacctggctgttcgtctctacgccgtctctggcaggttctcccccccactcctctccgtctccgatcccgtccgcattgcttcgcgccggaccaaggaggaagggtcggcgtcgcaggcattgcagtctgctagccacgaggccatggacccgtgcccgttcgtgcgggtgctggtcggcaacctggcgctgaagatgccggcatcaggggggaaggaacttggtgccactgccactaaccgcgagcgcaggtcgctgttgctgcggcaggagaacttgcacgtgaacatgggctgcttcatgctccccttaacctggagcaactgcgggctgcactcggtctcgccgtcgaactcgaagacgaacctcgggtcaggctcgcccaggactcttgtaccatactgtattattagttttcgcatcactagcagaaactttggcaatcgtaactttgcaaagcattaggtcagtggcgaagactaaaaatcgtatcgatcttataactaaaaaatgtatcaatatttggtcagtggcggagactatgcaaatctgagtatatgacagataaacagaacaaaagaacttcaatttcagaatggagataagcatatctcgaagctgctggagactcgagaaaaagagacatacaaaaaaatctgtaacagagaccatcatacacacatctggaatcttgagcactgcttgcgtccaaactactcataaactaggggctgcttcatgctccccttaacctggagctgcttcatgctccccttaacctggagcacctgcgggctgtactcggtctcgccgtcgaactcgaagacgaacctcgggtcaggctcgcccaggacggtgaggttgagctgcacgcgcggcgttggccgccgctggcttcccggcgccgcgcttgccgatgtcgaaccagccgttgaggaagacgaagggctcggccacggcgcgcctgcatgtcagacaatcagaagatgtagcattcaaattgatacatggtgacaaacaaatattttgcaggtcgccgctggctcatatccttgccgggtgtgccagagttcgctgagcgcgcggaggcggtgggagtagtcggcgacggcgaggaagcaccgcgctgactgccacaccgtcaggatctgcggcagccggtgcagcgtctgcagcctaagcgcgtccgcctgcaatgtaacccatgtacgccgcaagaagagacggtgtagagacgagtgcgccagacggcgtctgcgcaggcgaacggtaaacggagagaggaaactaatacctgttaacgcagctccaagcgttgtcttctttccgttttggagtttggctgtcgcctgcgtctccagaacagagaagccaacgccaacgcctccatttcgtcgaatcccctcctctcttcgtccataatggcaattatctcacaactaacactaaaatgtcagagcgaggacatctaatctattaggctctactacttgcaatagacaaatgagcagaggcatatgcccttactaggttacatgtaggtccgcccctgggttccttaatcgatgacaaaccatgttttcaccctcgcccgtcgctccttccaccaccgctccctctgctcgtctgcccgctacggtgttgcctcgtcaccttttgttttgaaacaaatcgggggcgatgccgacctatcattgatagactgaagacgtcagcattcgagtagaatgataaacgcagtatacagtgacggacccagaaatctttgagagcctgggcaaatatagtactcatactataaaatatagttttgtctagttttttatctacatttaactatattttactgcttggtgcatgtttacaagttgagtaaaatacattttcggtccttaaacttgtcgccctgtgtcatccttgtccacaaacttttaaagtgtatcggcccgatccttaatcgatgttcgggtctcagttaggttcaaatgggtcgcgattgacatatagaccgcacatgtcagccgacaatgattttaagtcgcctagtcgtctggtcgaaccctgagaccgaccaggcgactagtcgcgattaggtgacgactagggcgactagtcgacccctaatcggtcctagccggtccctggtcgttctagactagtagttatacttatataggtatatatataaatataattgtatacattatataaattagaacaaacaactaggataaacaaagtaacatattgcttcattgtttagggtttagggggagaagtgggggagcaggagggaccttcagatgacgtgctcatctcgtcactggttcgcagccaccgccggttggagactgcagcagtgcagcaggcgagcagaactgcaggagaaggggcaggggacacagggtgttgtagccgccggcaatcaggagttcaggactgcaggggcggtgccaagagaggagaggagaggagacgagacgtgtagattggagactgttggcggctaggttagaacagagaggagagggtactctaaattagactgtagatgggctaaaaaagtcccaataactaaaccctagccgggatgactaggacacataactcggatgactagtcgtcctagtcgacgattagtcggacgaccaagacgactaggtcttctagtcgagtcgtccagcaaatcgtgtcataattgccgaccagcccgactaatcgtgatcggacgacttgaaatcattgtcagccggtgtatctgttttctctcttttcttggttctctctcaccggacacgtggaaaagggagagaaaacatatacacaggctgacatgtggggtccatatatcaaacacgacccgtttggacctaactgagacccgaatagcgattaaggaccgagatgacacactttagaagtttgtggaccgggatgacatagggcgacaagtttaaggaccgaaaatgtattttactcatacaagttcattagcactaatgcaggagtctgggcaagagcccgggcttgcttgcacttgggtccagtcgtggcggtacatgagttcagaagttacatgtgtgccccattgaacaatagactccctgtcacgagcggggaatcaatggcaccaaatgttgaggtcactagtaatctttgcgagaagcacacgcacaggagggtcctcgttcctgaagacataaattatttctatcctcacatattctccacagaatgacgcctcggaccaccggctgaattccctgcgaacaacgtcggcatgattggggggggggggagaccgttccaagctggcaacctgaaggctaagcaagcgccacaaactcttgatcctagcacattctacaaagttgtgaaggttgtcttccagcgcctcgccacaatgggcacacctagcgtcggggagaatgttcttcttgaacaagtttcctcgagtatttaacctgttcttaaaaagaggccataggaaaatcttcagtttgcctcaccacctttcttgtgtccgaggcccgaggggacgggatgcagctgccgcagcctgtaggcgcctgctttttcttggatcttcattttgttgattgccggtgctagacatcttgaggcattgggtcttagtgctgcagttattaggttcagggatcttttgggtgattagtgaagagcagttgtgtgcagttgggtgtgtgtggcctgctggcacttttgctgtttgtctccttttgcgtactgctgttttcatgcgcagaaagaggctgcagttctgtgcgcagcaggagtctggtggtcttatgttctgccttttttggcattgtactttggtccattttggactgtttttctctcttaatttaatggtgcgcaactctcctgcgcgttcacgattttttttttgttgatgattgggtgagaggtttcttaggttatttatttagtaccagcactagcatcttccctagatggctacattgctataggttttgtgatggatggttcatctgttgaagtttgtaccagcactagcatcttccctagatggctacattgtgttaggttttgtgatggatggttcatcagtggaagtttggtggcatatgaaagtttgctctatctatcaataaaatattactggaatggacgaaatgctgtatctatgttgaattttgcttttattttgttgaagctgctactcattctggtctgtggatgctgtgcttgccaattgtgctaactgcagtatgaaattcttctgtttgatacttcgattcgctactataatcttcagaggaatgcaccctactcgcttccaacttggtcgcatgtttagtctgttatgattttccagtacttacgaggatgtgctgaaatgtgattgattaaactgtcaattttaccgattataatcttagctattgcctgtgaatgattttatggtagctatgttcgtgcctgaaccttgacttgtggcttcggttgggtttcaactctagcctactccaacttgcttgggactaaaaggctttgtcgttgttgtacgtttgttctgaaaattttcagaaaccctgcccttgtgtccaaagagagagattatttctgcttcagtgcaattccctcgagatttgagcaatgcaagtccttcaaatttacgtattcatcaatattatatatcaacttatcaaggcattgtatattcacctctctggagttgtataaatgcttcttagacttagtgcactaaggctccatttctgctcttttaaatccgagggcggtgtttattttggttgatgtaagatctacatgtgatgtttataggttagtagtttaaagttgaatttcaattgattggcatgactcccgagccaacttgtcacagcttacaatgtcttttctgttctgtatttagaaaatcaactccttcaatttgtgtgaggaattgagtttactgctaccgcttcctgcaaagttttatgcagttgtcagttatatgtttagtatatagtacagggtatactccgttgctgttacaattagcataaactcaagagaattcattgtttttgaccatgatttccagtctgataaatatttctgcactctgttttattgcttatgctaggaagaaggccagggctgaggtgacagttgggcatctatgtggccattcattttttttctttgtctagagacttggtattaaaccgaaaagtcatgtgcagtcatatggttgtcttgtcatttgcaaaccagaattgtcttcctgacttacaatccattgttgtcttgtcagaacacaagatcaatcaattttggtatcactatttttgtgaactataggaaccagagttgtcttgtgacaagtctaagcatcatagaagttttgaatctttctaattggttgttgatctgtccccaggtaatcatacacatgatttgtttgccactactttttagatgcacaagatcctatgctgtacatgccaatggttaccttctcctttatgtttttctcttgttcttagacaatatatgtgctttctgaagtgtcttttggaactagacactatttcccaatagcaaatctcgaatactgatgcctgacaatgatgcaacttaaaacctgtagactactcctgctgtttcttattgccaataagcaca

SEQ ID NO: 835 - DNA, 786 bp, Zea mays
  Intron number 7 from transcript GRMZM2G075737_T01 (locus G RMZM2G075737) derived from phytozome v7.0 (chr-ID 2; pos 1 24549584 to 124550369)
gccttatatttcaggtaagattttttctgtaggaattgcattgttttgggatcatttattgaaggaatgagcctgatgatgacattttttactgtttgtttcaatgtgcagtgctttggtagataaaatttacagatacttatttgatagaattcttgtctttgttggacttattatgtaactgtacatttctatttttagttatgaccatgccgatttcctttcttttttttttggggggggggggggagggaggggttgcacctccggctatgtttggatactctagtattcactcaaatacacattggttaaggtggattatggtgtaaattagtttaacttacacctcaacctccctcgacccatgtgtattgggacgaatactaaagcatccaaacaagccctcatggggatttatggtattcatattgagataaagccaatcattttatttctcgttgctcatttgataattcacacaaatattgtttccatttttactgttcatgtatggatgttatgtgactgtttacagttggtttcaacttaagttctatattttttgtccactcatggagtagtttcctatttgttgagacatgtagctagaacattttgtcgtggatgtgtaattggtggaccaaattttaaacggtgctggatatggaactcctctccctagtgtgacccctaacattctttgtaattattcattctgtggttatttatatgtaaatgttgcttttatttggctgatgcttcaattgttcttacagggctggg

SEQ ID NO: 836 - DNA, 4711 bp, Zea mays
  Intron number 1 from transcript GRMZM5G842813_T01 (locus G RMZM5G842813) derived from phytozome v7.0 (chr-ID 7; pos 1 56205215 to 156209925)
catcaacgaggtcaagcatctgcagaaattgcaccacttctagatattagcctaattaaccacaaaggtccattgatatgatacatgcaaactgtttttttccattaaagccaccataaaaattaatgagaatgatgcagtaaattcaaacgttaaaacatttgagaacagttcagtttttcaggcactaactaataagaaaacattagctcacagcttgatatggaatagcacacagatgatgaaaactcagctaaaggaatctaagcgtaagctaaccctttcactgatcaaagctgtgactgtgatacataaactaattggattttttggataggaataacgattgccatcaagctatttcacaaatatgaaactatggtgcaacagtaaagtttgtgatgcttaatatattttccattgaaagcataacagaaaaggcagagttatgtcaacatcttcaacttgttaatgacagctacttgctattttatccaagctgagcaggtgggggtaccatgccgaaggccagcagacatgatgtcctcagtggcctccacatgcagatccaccaaggcagggaggcgggaacatcagtggtgacgagcatggctggattggaactggggccaccgaacaggggaggggagagcatcaatcagcaattggataaggtgggagcataagaataaggactggccattcagacttgggcttgggctgctttgacaggcctttctgtccaatgctaggccggtaggcccactgatctcttgttaagtgtatggcacatgccaaggcacatataaactcaaggtggaggccagagagcgcctagcgccttccctagttccctcacattgatttattaacaaaaacctgtgaaatgacatcacccattctataaaatttaaccagccaaccgaagagcatatgttaaagtttgcacatattgaatatcaatgacaaagggagcataacgattcagataactaatagtatcatctaattttgagaaggggagggatagatcaagatccatatccaaatcggaccaagacgcatccgatataagattttatggcaggtggaggcaggggggggcaccttgtgagcagtgccgtgcagattagattggtctggtttgttacaaaaaagataagtttgactggtttggttagttagtatgagaaaagatttggttagttaggataaggaaagtgattaattagattgatttggttaggatattttcttaggggtcaattaagcctctctatataagtagagaagatgtgtcaatctaataaagcaagactaagaaggaaaaccattcccacttgcttgaccatgaacaaggcaccagtcgggccccttgtgctccctcaacccaacaggtgtgcactacatagcactgctgcattccataaccagcctctaggagggcatctctgctagtcgtcgttgcgaacactcccaggtctcaacacccaccagactacgacatgtgatccaggtggttgtacacatgcaactccatcgtctgaatggtgcccttgtaagccccgcgtctccatgggaatatcgacatctgcaaccatggccactagcacaactcaaggatgagctgtcttggaagggtggagtagtgttatgaaaagtggagccggtccaggggcccacgtggcactataacgcataaacaatatcttgtgaacagtgttgggcagattagattggtttggtttgttagaaaagaaataagttagattgatttggttagttagtactacctccgttctcgaatatttgtcgctcgctagttcatttttgaactaaaacgcgacaaataaaaaatggagcgattataaggaaagagataagttagattgttttggttaggatattttcttagggggtcaagtaagcctctctacataaggagagggatgtattaatctaatcgagcaaaaattaaagaaaacccttccctcttgctaagccgtgggcaaggcccccaaccgccccccttacgctccctcaatctagctgcggccataacagatatgtccatatctaattcaatccaattgcttacgggccttttagctgagttggttagatggtctgagtagcactcctgagatcccgagttcgactccccgtggagcaaattttagactggggttaaaaaaattccctcgaccagtcgttctcacatgggctacggtaccactatgcatgggtgggaaggggttcgggggttttctcctcgaccaagggttttctaaagtttgtattatgtatgtgttgtggcaaggtgctcacctacatgacaatccaagtggtggcgcagcaggttgattgagcttatggcagacgtggcacttccaggagccgtgaggcgtgacgcattggaagcacatgagctgtgacgccacaactggcattggtagaaagatgagctaggagcattggtaggccggagagcaacattgtgccgtgcgaatggggaaatcatgcacccgacctatcacatgaaagcaaagagtctacctatttatttactaaatacttgccacacagaactacatggtctttcctcccttttagcatgatttggataacacccaaatagatcccactacctaaaaacttataaatccagtaccaccctattctgttcccctaatgacctcatggaagttattttgtaaaaaaaataccaaagaaccccaaggaagactaactcatacaagcacaccaaactgcaactgcagtttgtctccatttcagctaaagccaacgacaaaggtacataacttggtagctacatatgcttaagtgtaggcttacagctcacagaatggataagggaaagacaagcttctttacacaggacatttttaatacattgatcgattggttgcatgaagcaaacagatgacatcatgctgcggccagatatcatggattccagtcacctctatctccaaaggggacatagtatgggtatcctggaatagatggtcatgtagaagctagcacttcgttgtgatctgcatactgcaggtgactcgcactcatggcagtacaggagactaagcacaaagatcgatttgatcaccaagtggcacaagctcagtctccttccagccctaattgacaatagtagggagaaggccatgttttggtttaattactaaaatggataacagcgtcaggtttccaaaatatgggcattttctttaatgggttatgcaattgcaagaacatgtctaggttagtatatgacagatgttacagctaattctgcttactgaagaacattcagcaactgtatttcagaggccaaaaatgcatccaaccatatagttgtcaactttccactgatgcaaaggagaagtgatagaagtaaaattctgagaatgctgtccccacttctttttttgtgtttactgatttatatggcctcgaaatgctatcctatataatgaacctaaccataagaagaaaaaaatgttctagtaaatccccgctttagcattaataagttgtggcataaccacatatcagtacctctttcttttataggaaaacaaggctaaatctaccattgaaattttaattcaggtgtctccagccaaatgttataataggcaagaacaaacataaagtgatgatcaataaactgtcttctcaggctgatagtgaaaatgaggtttcataattagttcctgccaaaatctcaaaacttaatagaactaaatggactattaccagagcatgtagaatagtagaatgcttgcagcctaaattctagacgcttcagtaggaaaaactgaaccaaggagacatagaattgatgaaacgtggttaccacaaccctacatgggcaatcttacatcactaaaaagggcccatggttactaaacctagtcttgatacaccaggttgttccaccaaacaatcaagttccacaaagtactgtaataccatatgaagcagacgtcctagaggataaccagaaccaaatattgttcatataaaggaaatgtgtagcagcaatccttgctacgtacttctattcaagttagaatgactgcttagacctagtgcagtggtgagagctgtctcactgagtcaccaggtagcggttcgaagcaacctctcggtatttgcgggggaaggcttacccgaattttttgtattttagcccttttcttgataaatattcacgtttagacacttggatgacttaatctcttttttggaccctttgttcggcgccacagatcttggcgccgaggcgcgtgctccgctggcgacgaaggctgacacggcgccgacgtggccgagctcggcgccatgaactctgggtgttcagattcagtgacgtgttttgagaacttcctattttcatggtaaaaaaactctgaacacttagctgccgtgaagtaacaaactacgagcttccatcatggaagaaagaatgacgaactctgcggttgggagcagaataacccagagttcgtcagagtcaatgaatcgatagtaaatttgttgcgggcattgtcctatcccattgttattgtgagttaaattttggtgcattttcgtatggatgatgaaggcaacctccctatgacatgcacaacaagcaaatataagagtagaaacccagtttacccttgtgctcctccgcagcgtc

SEQ ID NO: 837 - DNA, 6778 bp, Zea mays
  Intron number 4 from transcript GRMZM2G327311_T01 (locus G RMZM2G327311) derived from phytozome v7.0 (chr-ID 3; pos 2 22425560 to 222432337)
aggtaagcattatcagttgtgcattctgcatctccacactcttgcagatattgttggaaacaatcgctgctatatcatatttttgtgtgtatggtttctactctgtaccgatacaggcattatctagtgcacaaatagattgggttgctgctaattttactcttgctttggtgcttccttagtgcactatactgccttgtctccttttctttttgtcaaacaaggtatttgtagtctgtggtacatggccaaaaggccactgatgcatggtgccttaagtttataaaaaataggaaagctataaattagaggtatatccatatatgcttgttcagtcatatacccatatctaagttttgttttattggaagattgagcatatagatgactgaatgcaccactaaacagggataatcgctcccctatcagttgtggatttgattatttcatgatacttaccatctacaggattatatttaacacctaccccattgatacatggttttgcaagtcataggccctgtttgacattttgcttctcagccagattttgcttaaaaataagtcaaccatgtaccaaacgagtggagcctaacctggcagtgctcctccaaaatttactggaggtaatctttttctggaagggaaataccagcttctcgcagcttttcgtttctctctaccactatgcagggcccctcagcctaccacaccgtcctccgctgcatgagctgcctgccgcacccgaggtggcaccactgattgagattcctccacatgccatgccacccttagcccccacctgtttcgccattctctgctggctgagatctcctccacatgctgacctccatagcagtggtgaaaggagccaagcagctgcgatagcgaaagggaggcatggcactggggcggtgatggctaaggggggtgtggtgctgtggagaagatgacagcgtggcacggcaggcagaggcagctcagattacagtcgctgacatgtgggtcccacatgtcagcgtgaacaagcagtagagaacatctggcttttttcagaatcagcttctccaacaagctatttctgtgggcagctagcaaaaagctggcttgaaaataatgtaaactcctacagaatgaagttgcctgattgtgaatgatttctttttttttcgaaaaacgcaggagaactgtgcctcattatattaagaagaaaaaaacaaggtttaagcagaccagatacaaaacgaccgacttccttacggaggtcgaaaaactaaaaaaccaaaatagtccatctgggacagaaataaactactgaagaaaaaacgtccaacgaggctaaacctcaagaacgggggcagacagataggaaagccctttagctccagccatttcccacatccatctttcctccatagccatcctaatggctaaagtcacattaggaatccagttatcaaagacacatctgttgcggtggttccaaataatgtaagctcccaacgcaatcggagaattcaacccctttctaaccagaccactgaccgaagaagaggctttctcccaccagctcacgaaggaggtcaaaccaaactgaggggcgagcctatgaaggtcgaaagtcctcagaagctgaaactagaaaatccttgagaaaacacaggaaaccaggagatggtctaaggtttactcctcttgatcacacggagggcataacggagggtgatccagccctcttctagctaatctgtcagcggtccaacacctgttgtgcgcaacaagccaaagaaaaaatctgcatttaggcggggcccaagttctccacaccctggaatagtggctgaaaaaggtagatcccatgaagaatccttcgtaagccacttttgctgaatagataccgtctggggcaatactgaaaatatgtttgtcttcaatagtaggctgcagcactatcacagacataaggttccaaatctgaaggtattccaccaaaactcccaccgagagggcgcccttaatatctaagatccatcttctatttaggagagcctcttgcacagttcttctttttgtgaccctcttgggaatacactgaaaaatccttggagcaatatcacaaattctctgccctgagatccatttatcagtctagaaaagggtgttggcaccattgccaacttctgaaactagaacagtggagaagaaagcccgaaccttattcggcacatgaaaagggagctgcgcccagggacgagatggattagttttgtgcaaccacagccatctcatacgaagagcccaacacatctcgggcagactggagatgcccaggccaccaagcctgagagggcgacaaactctcccccaggacacaagacaatgaccacccttggcctctttgcgacctctccaaagaaagccttttctgattttgtcaatggcttcccaggcccaagaagggaaatcgatagccattgctaaataaaccatcattccagtcaaaacatgctgaacctgcactagcatgaaattgtcgtgaattgaccttcctctaataaaagcactctggttagctgccactaggtcttgaaggtatggtcccaaacgattagcgaggatcttagtgaccagcttagcaaaactatgaatcaagctaattggtcgaaaatcaccagctgaggaagcatcttccctctttggaagaagaatgagatacgctgagttcagcaaatcaagtttataggcatttccatggtaaagggaattaagagcagccattatgtcgaccttaatgatgtcccagcatgtcttccttcataagaggaagatctctagtttgctgctgaaactggatatttccaaggctttcgactcagtctcgtgggcgtttttgttggagattttgacacatttggggtttggtcctgtttggcgtaatctgatctccaacttgttattcacttcttctactcaggtgcttttgaatggctcgcctggtaaccctatttttcatcggagaggtcttcgccagggagatcctctttctcccatgttatttgtgatggttatggatgtgcttagcagcttgttccgggttgctgaaaatagaggcttgttgcagggccttgggggagctgatgttcgcagtcgtgtctccatctatgcggatgatgtggtccttttcataaagccaattgaagcagatctgaattgtgctaagataatgctaaactgttttggttcggcttctggtctggtaaccaatatgctcaagagcagtgctattccaattagatgtgatgatcagcaggtgcttgctggttgcagtgtgctgcattgcagtcccgctgcgtttccttgcaggtatctggggctgtccatttctgataaaaaattgaggaaatgtgaccttaagttatggattgagaagatcgcagatcgactgcctaactggaaggctcggttgctcaacctggctgggcggactgcgttggtgaagtttgttctatcggccattccgacttatcttcttattgcaatcaatgtccctcagtgggttattaaatcaattgataaaattcggcgaggatttctttggagaggaagaaaggaggttaatggtggtagttgtcttgttccatgggaagttgtcacgaggcctctgaggcttggtgggcttgggatccctaaccttaagctcaaaagctgggcattgcaggcaaaatggttatggttggaaaagacggatcagagcagaccttggcgtgggttgtccctcccagtgcaacgtcaggttagacagttctttgatttgtcggtttttaccattttagggaatggggctactactctcttctggtcggatagatggattcatggaaatactatccaggacattgccctgaggtggtgggtatggttggccgcaaggcgtattcttccagaacggtggcacaggctctggataattggcattgggtcagtgatattcgtggtgctctttccttgagtgggttgcagcaatatctgttgttatgggatactttgggggacgttaggctctctcatgatgctgacagacatgtttggatgcactcttcttctgggatgttctcctcaaagtcctgctataaggcttttttcatgggttcaatttcgtttgagccatggaaacgtttgtggaaatcctgggctcccccaaaatgcaagttcttcctctggctggcgataaggaataagtgttggactgctgatagactaaggaggagagggctgcaacatccggctgtttgtgttctttgtgaccaagagcaggaaacagtgcaacatcttttgtgtacttgcagttttgccaggcaattttggcatgctattcttgttcccttgtgtcttggggatctcattcctgctgttgatgaaatctcatttgctgattggtagaggaaggcgcttaagaaggtgcccaaattcagaaagaaaggcttcaacagtctcattattttggggtcttggtgcatatggctgactagaaacaaagctgtttttgatggtgtaaacccttccatgtgttttgttaaaagcttatttctgaatgagttaagttgttgggagagggctggggctaagcagctagcaagttttggtcttcctgctattatgagtagggtctagagtgtggtcaagtgttctgtttgccctacgggcattgtactttggtcctcttggaccttttcctttcttaatataatgacgtgcagtcctcctgcgcgttcgagaaaaaaaacatgctgaacctgaatccttctaaccgctcttgtcaatagatcagccttccagttagggagctgccttgcaattttatccacaaaaggttgtacttggtctttagtaagcttgactagagagagaggaagaccaagatactgacagggaaacactgacagcgcacaaagcaacagattttgagtaaccgtaatatcctccacagagcattggataggatagacattagacttgctttcatcattctgaaggcccgaggaggcaccaaacaaatgcaaaatctccaaagctgctaggatatcatccgccaccgggtgcaggaataatgccacatcgtcagcatacatagagacccgatgcagtctttgtgatggtgacaaaggttgtaaaagtcctgcatcttctgctctagcaaataacaaacccagaatgtccatggaaagaataacaagcagtcaagcatgggagaaagtggatctccttgcctaaaaccccttcgatggataatgcactttctgggaaaaccgttaagaagtactcgagtggaagaagaggagagcagcccacagataatatccctccaaatttgaccaaaaccgaggtgtttcattgaaaaaggccaagagaccgaatcgaaagccttagtgatatccaacttaaggagaagactgacctttttctgatgatgaagtagccgcgaggtctgctgtaccaacatgaagttatcctgaataaattgcccctttatgaaagcactttgattgggagagaccatctcatgaagccttgtagccaatcgattggcgaggattttagtgatgagcttagcaacactacgaaccaaacttataggcctaaaatctgtaacctgggcaacaccctcctttttaaggatcaaagtgatgtatgttgaattgagtttgccaaagttgttgaattttctgccccaaactgctgacaccactttcatgaaatcatgtttgattatgtgccaacagactctgtagaatcgtccagtaaaaccatcaggtccaggtgccttatcagggggcagacttacaatagtgtcccatacctctttttcagaaaaaggtgcatccaactcagagagttcatgactgggaatatcaagagcatctaaatcaatgattctatctctgcccacatttgtaccaatcaggttgaagaagaaatgatccactgctacaaccttctcatcatgcccagttaaggtgacatccccttcccttagagaggttacaatgttcttccttttacggtgtctggcatgcaaatggaatatcttagagtttgcatatccatccttgagccacgaaattcttgatcgcagtctggccatgatccttctcaaggaagaaagcagcagggtatgcttctttaacttattctttagccatagttcattcatggaaaggatcctgtcatcctgagcaatctccaacctatgaaggatttccttagccatggctaattggaacctgatgtgtcccacctgattattattactccaggaaataagacttttagctgtcttctttaacttcagaaaaaaggattggaaaggacacatctccccatcaacagaatcccaggcggtctgaacaacatcgtggaacccctccaatttaatccagaaggcttcaaaatgaaatcttctttttcctgagatattatcatgaaggcccaagatcaagggacaatgatctgagtcaatagatttcagttgttagcattgaaacctactgtgctcaacttcaagtgttttctgctgaagggcattctaactatcagtttcccttcattttcttttttcccttagtttggtgcttgaattccttttgcacaatttttctctgtcagtcagtgatcccaattagagtgttgtacaatatggccatttgcagttatattgcttcattgcttttggcacgacatacatgagttgacattatttttcctcatacaggcaacaagc

SEQ ID NO: 838 - DNA, 991 bp, Zea mays
  Intron number 6 from transcript GRMZM2G323182_T01 (locus G RMZM2G323182) derived from phytozome v7.0 (chr-ID 7; pos 1 70901222 to 170902212)
ctggggccaaggtatgtgtgtagcatgttacaactaattcagacatttttcccccaaatgagaaatctgaagattatagctgctcgtggaattgcagggaacaagccgtcctacgcattaccatgtgctacgagatgacaacaagttcaccgcagatgcttacgggctgaatgcatcttcttttctatgcgttgcaattctgggtacttatctggaagcagcttgctccaattgaaccagaaaattgaagttgtccatatccctagaggttcttacatgtttgtttggtgtctatacagtcctaattttctcccagtcttgcaaatttcgggctaaacttgaaagcagatacattaaacaacctagatactgcagaatacatgcttatgtgtatgtattatgtaggtcatcttccttcatgtttggtgcactgtgctcaaaattttaacatgtcccatattgtttttctctctttttaccaacatcatgtgaacccactcctttttttgtaaccacgaaattaactctgtgtattttgcttgcaaaaccaattcaagttcaattatgctacatttttaattagttacacttgtatgtatgtgcattttccatgcaatttcatagttttgcattagttgtaggtttgaaactgcattagcatgattgcaggaatacattggattttatgttttatcttgaggtaacgccccattttttcgagccaatacatgcatgttaacattatgtaaattcatgtatctaggaacccgcctgacttagttcaataagatacaccaataccttgagcatgggtcctccacaatgtataagtttatctctaaatttcttaaatttagcgtgatttatatgatcagtgtatttttcatatatttctttgctaaatttgtgagcagtaatatttcatacaacagacacacatttttatatgatctgtcggcctggcgcttttcttgtccagctttgcctctgg

SEQ ID NO: 839 - DNA, 22417 bp, Zea mays
  Intron number 2 from transcript GRMZM2G043238_T02 (locus G RMZM2G043238) derived from phytozome v7.0 (chr-ID 8; pos 4 8089142 to 48111558)
ttgcaggtaaagcttgaatcgtgtccttgtctttgtgattcttttggttgggattgtatggattgctttagaaataagtagcataaaatctgtacattccccagttgttcttgcattatttgtttagaacgtcaggtgcacttgaggtcaacactcaactttcacaaaactacacgagcaatatcgaatgtggggaaatctgttgcttacttgcttttaataaattttggacatcttaacatgcacttttcctaaatgaaggcatagcatttcattttctatccctattgaacttgtctaacactgacccatatatttctttggaagtgattagtatagttggtgttatatcaaattgagcatggctctgttctttgatttggtcctgctttgttgtaagttatttggcaactacaactttttttacttaccttgctagcaattgcctttgctatggttggatcatagcgccacaatcatggtgttcatttcattgattactatgatctttattgtcattacattgaacattgtagtttttcagagaaaacatattttctttgtctgtagtatctttgtattgtacttctgtagttcattattgtttgcctgtgtccagcgcaagcacaagagctaagagcatataaatgaccaagacaaaattatccatagtaaatgcagtgtacttgtattcttttactgtaattgctgtaaatcaccataggttcacctctcatatacttggattacaatctgtgcacagatggagttgcttccctggatccagagtaattcttattaacttttacaacagaaaacgggaacccgtttattttcttgcatcattcactgcatgaacctagcattgatttaacaagctgatgaataaaagttgagccaacaaaaattatcgaaggaattcagaatgatcagatcagtgctggagtctgatagaaaaataacagaggtctatctgagcaagccaaaagcaacaataacaacaacaaagcctcttattccattataagttggggtaggatagagatgaaactcaacatgaggaaaaagaagaaaataaataattgaatagggtaaaaagaaaaaataagaggtatcaataatagtaatgaaaacaataaatgtcatgtggggcctcacgtacaacaggcgccggcgggctcgagacatccgtcgcgccgcggagcgcgctgggcgcatgcaggaacaggccacagatagtggctaaattagaaaggataaatattagttcccctttattagcttcccttgttatccctttaattgtaggagtgattggttattagcttcccttattatctccttaatcttaggagttagttattagcttcccttatcatctccttaatcttaggagtgattggttagccggtgggctatttatgtaccgagacaatgaggaaaggcaacacaaataaattccatctactccctatctctctatctcaagccgccggtcagggggggggtacacccaaccagcgaagaacggcgagggggcataaccccgccagctaccacgggccgggactacgagctccgtagtcgaggtccggcgtccttgggcacttacgcccttgacaacctggtatcgcgagtcaggcaatcttcgtcgtccacagcctctatccaccaaccttccccgtcgccatccaccgcgtcaacgaccatgggcgaccaacccaccctcgccgatttgatgaagcagctgatggacttgtccaccgagatgacagccgacatggcgggcatgaaggagaaggccgagtcgtcgccaagcggcggcggccgcatcgagggccagcacgaccctgatcggccccccaagttacagaagctcgactttcctcgatatgatggcaagaccgatccaatgttgttcatcaacaaatgcgagtcgtactttcggcagcagcgcaccatggccgaggagcgcgtttggatggcgtcttacaacctggaagacgtcgcccaactttggtacatacaacttatggaagatgagggcacgcctctatgggggcgcttcaaggagctcctaaatttaaggtttggtccacccctccgatcagcgcccttgttcgaattggctgaatgccgccgcacgagttcggtggaggattactccaatcgtttccaagtcctactcgcgcgtgctggccatctcgatgaagcccagcgggtccagctcttcgctggtggcctccttccgccactgagccacgccgttcggattcataattcggagacgctggcggtggccatgagcctggcccgccaagtcgaattgatggagcttgaccggctgcaacaggcgccagccaaaaccatgcctcgggcgctactgccggtcccggcaccatgccaggcgccaaccacggcaccagcgccgctcgcactgcctgcaccagggacaatcgtcttaccagcgccccagcctgtgcttcctgcaccgtcgatccgcaacacaggcaacccgataaggcgcctgtcgcgtgaggagcaagcggaacgacgacggctcgacctctgctacaattgcaacgagccatactcccgcggccacaaccgtgtctgtcgccggttattcttcatcgtcggcgtggagatcgacgacggcaccgttggggatgctgcgccgaacttggaggccccggttttctccctgcatgtcgtggcaggggtgccactctacgacaccatgcaggttcgcgcgtccctgggcacgacaacggtggtcgccctcctcgacacggggtcgacacacaatttcatcggcgagcgtgccgcccaccgctctgggctgcccatccagccctgtccacggctcaccgcgacggtggccaacggcgaaaagatcacctgtccgggggtcatccgcgacgcactggtcaccgtccacggcacgacgttccacgtcaacatcttcgtcatgccgttggcgggctttgatcgtccttggaacccagtggctctacacgctggggctcatcatttgggacgtctccgcgcgcaccatgcagttccagcgcgatggccgaaccgtcggaccatctgctggacaggggccagcgacactacgggcctagggccgtgcgtgtccacagggccccctgcaccggtcctcaccattcagccgaccaaggagccactccttgacgccctgctcagtacctttgaggatgccttcgccgagccacgtgggctgcccacacagccgtattttttgtattttggctctttttcggaaaaaaacacgtttggaccctagaaaattttaattgcatttttggaccctttgctcggcgccatagcttatggcgccgaggtaacacagctcggcgccataagttatggcgccgaggtacgtgatgcgttggcacaacccgacgccgtggcgttgacgtggcaccgagctcggcgccatagatcttggcgccgagctcggttgtgttattaacggttttgttgcaaagaaataggcaaatagcacaaagccatctagctcagttggtggagcacaatgttttaaaccatgaggttgggggttcgagccctacaacttgcctagatttttttatcttttaaataacccatttttttaaataactcattaggtatactatttagaatgcaagattattatataaatcaatacatgaattttgtagtctcaccagtttaactttatacaaaccgattttgtattttccacagttgaaatcatgatcaatagttcaataccatctttgttaatttgattacgctcgttcacacacctaatgctataaatatggttgttaatattttttctagattaaactggtactgaattaatttgactaactacctaacagacgttattactttcgtcgcatggttttagcacgctagctagctataggcgcagctagtagttgcctggacatgcggctgctgttcacgtccctccataatccatatggcagatgcgatctatatatgtcgtcgccttcagcacgcgcgcaatcgcgcggcgcggggccagtgtccgtctcgatcagtcacgttaatagctgcatgatctttgttaccccggacaacactgctctaaacaccaggtggtggtggggtggacatgcccgacccatggaattaatgtattgaaaaattaatgtattgatttatataaaattaatagctgcattatctttgttaccccggtttgtataaaattaaactggtgagactacaaaattaatgtattgatttatataataatcttgcattccaaatagtatacctaatgagttatttaaaaaaaaataagttatttaaaagataaaaaaatctatgcgagttgtagggcttgaacccccaacctcatggtttaaaaacttgtgtccaccaactgagctagatggctttgtgctatttctttgcaacaaaactattaataacataaccaagctcggcgccaagatctgtggcgccgagctcgatgccacgtcaacgccacggcgtcgggttgtgccaacgcatcacgtacctcggcgccataacctatggcgccgagctgtgttacctcggcgccataacctatggcgccgagcaaagggtccaaaaatgcaattaaaattttctagggtctaaacgtgtttttttttccgaaaaatggccaaaatacaaaaaatacggcccacacagcgcgcccgcgaccatcgcattgttctcaagctcggctcgctgctggtggctgttcggccttactggtacctggcggtgcacaaggacgaactcgaacaacagtgcacgtccatgatggaacagggcatcgtacgtcgcagcgactcggcgttctcctcgtcaagaaaccagacgggacctggcgattttgcgtcgactaccgggcgctgaacgccctcaccgtcaaggacgcgttccccattccggtggtggacgagctcctcgacgaactgcacggcgccaagttcttcaccaagttggacccgcgctcgggatactatcaggtccggatgcggtcagaagacgtacacaagacgacgtttcgtacacacgacgggctatacgatgccatttgggctatgcaacgctccgacaacgttccaggcattgatgaatgatgtgcttcgcccatacctccgccgttttgtagttgtgttctttgatgatattttgatctacagttcgagctgggccgatcaccttcgccacatccgcgccgtcctggaggagctctgttgtcaccagctgctcctcaaacgcaccaagtgtgcgttcggcgcggcctcggtcgcctacctcggccacatcatttcagcggcatgtgtcgccatggatcctgccaagatccaagccatccgcgagtggccagctcctcgctcggctcgtgcggtgcgaggctttcttggcctggcaggctactacacgaagttcgtccacaactacggcgccgtggatgccccactgaccgccttgttaaagaaggacgggttctcctggaatgaggctgtcggcgtttcgaccccggggggtccctggaccgacgagtaaattgtcgctgcatgtcccagcccagatgggtcggcgcgagatggaacacaagggggaacaaaagagggaaccgcggctcgtgttatcctgcgcccagggtggatgcgcttgcagtagggggttacaagcgttcgcgagggggagagagagagagagagcctgtccgtcagcccgtcctcccgcgcgaccaccttctcgtacgagggccctggacctcccttttatatatgtaaggagagggtccagatgtacaatggggagtgtagcaatgtgctaacgtgtctagcagagaggagccagagccctatgtacatgccatcgtggcagtcggagaggtgcttagagccctgttcatgtgatgtcgtggtcgtcggaggagcgcttgagccctgtagaagcacagctgtcggggccgtcgggtccttgctgacgtctccttgcttccgtaaggggctgagaaccgccgtcgtcatgcgagcacgcggggtgccatcattacctgttcaccggggcgagccagatgggacgccggtcttgttccccgtagcctgagctagctaggggtagggtaatgatgtatcccttgtaacgtggtcggtccgagcccaaggtcgggcgaggcggtgactcctccgaggtcgaggctgagtccgagccctggggtcgggtgaggcggagaccgtcttccggggtcgaggttgagtccgagccctggggtcgggcgaggcgaagaccgtcttccgaggccgagacgggggccgagccctggggtcgggcgaggcggagcttcctatggcgcctgaggctagacttggttgcggtcagcctcaccctggcgggtggcacaacagtcggagcagggcaggcgacgctgttttcctgtcaggtcagtcagtggagggacgaaatgactgcggtcactgcggccctgtcgactgaggaacgcgcgtcaggataaggtgtcagacgatccttgcattgaatgctcctgcgatacggtcggttggcgaggcgatctggccaaggttgcttctccgcgaagcctgcccgagctgggcctcgggcgagtcgaaggtgcgtccgttgcttgaggagaccctcgggcaagacgtgaatccacctgggtctgctgttcttgcccgaggctgggcttgggcgaggcgagatcgtgtcccttgcgtgggcggagctttgacctgtattgcgcccatcaggcctttgcagctttgtgctgatggtggttaccagccgagtttaggagtcttgggggtacccctaattatggtccccgatagtagcccccgagcctcaaagggagtgttggtactcgcttggaggctttgtcgcacttttttgcaaggggaccgacctttctcgggtgcatttcgttccggtgggtgcgcgcgagcgcacccgccgggtgtagcccccgaggcctcggaggagtggtttgactccttcgaggtcttagtgtctttcgtgacgcctaggccagtctggttgttccctcatgcgatctaatcgtaacccgggtgcatggtcaggttccgagttctcgggctggtatgttgacgctgtcaacggtttggccggagccggatttgcgagagcagcccccgagcctctgcacagagcgagaggacggtcaaggactgactcggcttttatcatacgccccttcgtcgcctttccgcaaggaggagggggggaaagcgccatgttgccctcggagggcgccgaacatggtgtctccagtgagttgctaatgggtgatccgagtggacgcccgtgccccgttcgataagggtcggctagtggcccagaggcgcgctccaaaagtacctacaggtgatttgccgggacccggtcccgtttgatagggtccgagggctcgatgcctccctctgatgggattccgttacagaatcgctcctgccggtctcggaaatgtcctagggtacctcgggagcgtagcccgagcctcggccatgtatcagacgtacccagagtcatccctcgctccgcgtgttttgaggcggctgtcgaacccttcggggggccagccttcgaacccctgatcagtagtgggcgcggagcccgagtggcctgaggcggctgtcgaacccttccgaggggccaaccttcgaacctctgaccagtagtgggcgcagagctcgagtgctctgaggcggctgtcgaacccttccgaggggccagccttcgaacctctgatcagtaggagggctcggggcccgcttccttcgcggagaaggatccctttcggagtatcccctttcccggtccctgtagcaagagagagaaaggggaagaggaaaaggatacgaaattgaacgacgtggcgcaccttttttgacgtggtcatcatggcggaggtgaagcgtcgtccgcttcgcctgccaaaggtgtcgcctaccctgccgtggagttaatgcgacgggacgagtggttcgcgggacagccgttgcgcgagctgttcgaggaacggaacacgggcgcgtcgtcttcacgccgtgggagagggctctctcgctgtcccaggaggggacgtgagcctgcagatgatttgactgctgcttccgcccgcctgccgcagccactactgccggcccacttttggccatatcgaccgtcgcgccttctcccgcggctgactgacccgtgaccgatgtgctcggtttggcactgttgggccatgcgcagggttgcctcgagtcgcggcaccggttccgcagccgagaaggcgcggtactggcgcaagaggcggtgcagtttttcgcacgtagtaaccggcgcgccggttacatgacatgtgggcctgggccttcatgctggacgcgtcgaagtcgaaagggtgcgcccctatggtgcagttgcatgccgcctgcatggcggtccgccctttcacccgttggtttaggtgaagatggaggagtgcttgtaaccgctgggcggttacacgctccgcgcgcggcggtttggctttttctgtcctgggccagctcgcatgacgcgtgggacctagcccccgtgtcgtagggggaggaccttggagcgtgttggtgaaagacttagtccgcgacgcctgacgacgcaagtggggagagtcgcctttaaaaagggggcgacccccttgggtggcagccatgccttcgcactcccctcatgcattgcgcccttccaccttccgagccctcggatggggagcgcccgcgttgcttccgtcttgctgttgttggaggagcgcaacttcgcggaagttggtacctttcagccatcgctcggcttcaaggatttcaatcgggcagcccggctgcatcccctcaccaatggtcacccaagacggtagcatcttgagcttgaggtaggtgtagttggggacgaccatgaacttggcgtagcatggtctccccagcactgcgtggtaggttcctcggaacccgaccacctcgaacgtgagggtttccttttggaagttggagggagtcccgaagcagacgggcagatcgagttgcccaaggggttggacgcgcttcccggggatgatcccgtgaaagggcgccgcaccggcccggattgtggacagatcgatctgcaaaagcccgagggtctcggcgtagatgatgtttgtaagtagagggattctaactctcatcaagaggatgacactatgagttggggcaatttttctgtttatttcctcaaacactacacaatgccatacccatctaagggttggagacccatatttatagccctagaggctgcactaccacaccttctcacacacactacacaacaggattgtcctctagatgctaaagagactacagaggacagtcaaaagcgactgttgtcctctagatgctaaagcgactacagaggacagtcaaaaagcgactgctgtcctctagatgctaaaaagactacagaggacagtcaagctgtcctctagatgctcaagacttacagaggacagtcaaaagcgactgctgtcctctagatgctcaagacttacagaggacagtcaaaagcgaccgctgtcctctagatgctcaagacttattccatcattctccccctaagtcttgggcgtcgtcttgtgagaaagttgggccatcccggacctggagcaaagctcaacaaacttgatcttcccaaggggcttggtgagcaggtctgcaagctgatccttggtgttgatgtaacgcgccttgatgctcccttctgccaagcagtctcggatgaagtggtatctcagccggatgtgcttgctccgtttatggacacggggttcttggccaatgccagagcggactggctgtccaccctgagttccaccgctccagtgtctctcccgaggagatcaccgagcagtcgagccagccagagcgcctgagtcgaagcagtggacgccgctatgtactcggcctcgcagctggacatggccaccacctgctgcttgaccgactgccagctaatgaggcacttgccgaggaagaagaggatcccgcttgtgctcttgctattgtcgatgtcaccggcgtggtcgctgtcgctgtacctgacaaggtgtgcctccccagggcacctcgggtagtagagactgtggtcgagagtccccgcaacatagcggatgatcctcttcacagcctgctcatgctccgtcgtcggtcgctgcaagaaccgactaacgtagccgacggagtatgccaagtcaggccgtgtgtggacgaggtagcgaaggctccccacaagacgccggtactgtgtagcatccacctcctccgtcgtgctgtcgcgactcaacttcagcctctcctccatcggagtgagagctgggttgcagtcggtgagcccagctagctcaacaatgcgcttggcgtaggcggtttggcgaagtgtgatctcggagtctccctagtgcacctcaatccccaggtagaaggagagatgccccaggtcactcatttggaaggtggccttcatctcttccttgaacgctaccacctctgcatccttggcgccggtgatcaccaagtcgtcgacgtagacacccaccagcagggcacttcctccattgccccgccgatagatggccgcctcgtgcgggcttggcgtgaaacccattcctttgaacgtggaatccagcttggcattccacgccctcggtgcctgtcgcaggccatagagagccttgcgtaggcgcaacaccttgccctccttgccagggatcgcaaaaccatgcggctggtgtacgtagacctcctcctttaagtcgccgttaagaaacgccgacttgacgtccatgtgatgaacgtgccagccctgctgggctgacagcgcaaggaggagtcacacggattccatccgtgccacaggggcgaaagcatcgtcgaagtcgatcccctcctgctgtaggaaaccgcgtgccaccaagcgagccttgtgcttgacgatggcgccggcttcatccctcttcagtttgaacacccatttaagggtgatcgcgcgatgaccatgagggagatcagcgagctcccaggtgcggttcgtctcaaccgcgtccatctccgactgcatcgcggcatgccaagccgcatgtttctcggcctccgcgaaagaccgaggctcaccatcgtcgcatgcaagatgcaactctcctgtcagaatgcgagatgcagggcctggcaccgacgagtcgatgagaaggccctccacccttcgataccgcaacggctcgccgtcatagcacgcgtcgacgcgctcctcgtcgcgggacagaggggtcacgagctccactgggtcgtgctcgacacgagctggtgtcggagaggacgttcccggagagggtaccgtcagtgctggagtacgtggtggcgaagagctcgctgtagccggagtcgtggctggagtgcgtggtggtgaagagctcgttgtagcaggagctggagagtgtggcgctggagtcggtggagacttgggggctggggtagacctgctcggagaagagttgcctactcccccagctccctcaaagtggacgtactcgatggtgaagtcgtacgtcggagtcgtgccgtcgtccaccgccttgtcccacgcccatcctcgcccttcgtcgaacactacgtcgcgcgccgtgcgcacacgctgtgttcttggatcaaggatgcggtaggccttcgagccctccgcctggccaatgaacacccctgtggtgctcctatcgtcgagcttgctgatgtggccaagctccttggtgaacgcgaggcagccgaagacccgtaggtgagagaccgctggcttgcgcccatgccaagcctcgtatggtgtcatcccgttgagagccttggtgggcgagcggttgaggatgtaaaccgctgtcaccaccgcctctttccagaagacagctggcattcctctctgcttgaggagagccagagccatccccacaaccgtctggttgcgccgctcgacgacgccgttctgctgcgggctgtacggcgcggagtagtggcgctgaacgccctcatccgcgcagtacgacgcgaactcagccgccgtgaattcgccgccgttgtcggtgcgcagcacgcgtagcttgcggccgcactccgcctccgcagcaacctgcacacgcctgatggcgttcacagtctctcccttgctgccaaggatcatcacccacatgtagcgggagagatcgtcgacgagcagcaagaagtagcgtcgtcctcctggtgtggctggtgtcaccgggccacacaagtccccatgcacgagctcgagcctctccttggctcggaagctcgactgctggggaaaggggagccgtctctgctttgtcaacacgcagacatcgcagaattgctccacatggtcaaggcacggcaggcctcgtaccatctccttggcactgagccgcttcagggcctcgaagttaaggtgcccgaagcgctcgtgccactgccatgccccgtcgtctcgacgagcagcaaggcagcaaggttgtgccaccttcacattgaggatgtatagccgatttggactcctgcgtaccttggcaagaaggcgacgagagggatcctagatcctcatgactccgtgctcgacctccacgcgcgaaccgttctcatccagctgtcccaagctgatgatagagtttctcaacgcggggatgtagtagactccggtgagcagcctgtgctcaccagacgcggcggtgaagacgactgagccggcgcccttgatctctacgccggaggcgtccccaaacttgacggagcctcgaacgctagagtcaagctcggtgaagaactcccgtcggccggtcatgtgatgagtggcgccggtgtcgaggcaccatccttcgatcatgtccttgttggagccgtcgccgaggaaagcgcgtgctttcgactcatcaaggtggaggagtgccgctgcggccggtgccgttggagatggctcgatgcttgcatgtgccaggagcagggcctcctcctcctcctccgcctgtgcgacgttggcctgaccacgtcgtggctgccgacagtccctggcccagtggccaagcttgccgcagttgtgacagccgtcgtctcgtgccggcttcttgttgccgacggcgccgccttgggcacctccacgtgcaccaccctcagcatgttctcgcgccccggcctgggcgcctccacgtgccttgcgctgcttgccgcgtttgcggcctcgtgtcgaggaggactcccccttcttcttgtcaccctggcaagcctcccactgctcccgagtgagatgtagcttcccgccgatagtgatgggcccagagggagcctgtggttcgtcgccgtcgaccaccttgagacgacctatcgcctcttcgatcgtcatcgtggagagatctagcagagactcgatcaagcgagcaatctgcttgtacttctcggggatgcaacggaagagcttctcaacagctctctcctcatcgtaggtgtcgtcgccgaactgcaccatcttctgcaacagagtgttgaagcggagagcaaagtcatcaacatcctcacctggcttgaaggcctggttctcctactccttgcgaagtgtctgcagtgtggtcttgcgggcacggtcgctgccgatgcgggtcgcagcgatggcgtcctaggcctccttggcagtccacttctgggaaagcgaaaactgcatctcgggcgggactgcagcaatgagggcatccagtacccgccgatcctcgtggtagtcgacgtcgtcgtaccgaactgcttcccacatgtggcgaacctggagccgtaccctcatcaccgcggcccactcgacgtagttggtcttggtgagggtaggccacccaccgccgggaccgatgtccctgacaatggcctaggccatgcggcgaccatggtaccgatccggggagggagagtcgcgccgcctgtagaggccgcgatctccgtcgactcggtcgccgccgccgagagcatcgccggcgtgtctacgcccatctgggctgccaccgcgtgcgccctcgcccggagcgccgtcagcgcgtcgacgcctatctgggctgccgccacgcgcgcccccatggggatgcgcggctgcccactgtgctgcctgctctcgcgctgcttccctcgccagcctgagctcttcgtcggtgttgtcgtcgacagaagcagagctgttagctctactgccgcgcagaacctcgagctctgctgccgtcgcacatgcagcatccgccgcctccgctgcttctacttccgctctcgccgctgctagttccgccgctgccaaccgtgctgccctcgccgctgtcgctgcagccgctgctgctgctcgctcgcgttcttgtgccgcggcgacctcggcctcctgctggcgccgcacactcgaagtggtcaagcgtagggacatggtgggctagtgaggggtcgctgcgtgtggaagaggctgtctcagacgaaaggctgctcgtctgagcaggggagagaggaacagttggagctcttgctgccgactgagtgtggggagaggcgcgggaaggagatgagcacgagatgtttaggctgcaggatagtttggctctgataccaattgtaaatagagggattctaactctcatcaagaggatgacactatgagttggggcaatttttctgtttatttcctcaaacactacacaatgccatacccatctaagggttggagacccatatttatagccctagaggctgcactaccacaccttctcacacacactacacaacaggattgtcctctagatgctaaagagactacagaggacagtcaaaagcgactgttgtcctctagatgctaaagcgactacagaggacagtcaaaaagcgactgctgtcctctagatgctaaaaagactacagaggacaatcaagctgtcctctagatgctaaaggactacaaaggacagtcaaaagcgactgctgtcctctagatgctcaagacttacagaggacagtcaaaagcgactgttgtcctctagatgctcaagacttattccatcaatgttgaggctgctgcctccatccatgaggaccttggtgagcctgacgttgccgatgacgggatcgacaacgagcgggtacttccccgggctcggcacgcggtcggggtggtcgcctcggtcgaaggtgatggacttgtcggaccagtctaggtagattggcgctgccaccttcaccgagcagacctcccggcgctcctgcttgcggtgccgagccgaggcgttcgccacttgcccaccgtagatcatgaagcagtcgtggacctcggggaactcttctgccttgtggccctccttgtcgttgtcgtgggctctgccaccttccgccgggggcccgaccttgtggaagtagcgccgaagcatgacgcaatcctcaagggtgtgcttgacgggaccctgatgataggggcacgactccttgagcatcttgtcgaacaggttggcgcctccgggaggcttccgagggttcctgtgctcggcggcggcgacaaggcctgcgtcggcgcgtcgcgtttcgcttgcgacttcttcttgcccttcttcttggtgccgcgctgagcggactcctcggggacgtcttccggctggcgcccctgaggctgcttgtccttccggaagatggcctcgaccgcctcctgaccagaggcgaacttggtggcgatgtccatcagctcgctcgccctggtgggagtcttgcgacccagcttgttcaccaggtcgcgacaagtggtgccggcgaggaacgcgtcgatgacatctgagtcggtgatgttgggcagctcggtgcgctgcttcgaaaatcgccggatgtagtcccgcagggattctcccggctgctggcggcagcttcggagatcccaggagttcccagggcgcacgtatgtgccctggaagttgccggcgaaggctttgaccaggccgtcccagttggagatctgcgcaggaggcagatgctccagccaggctcgggcggcgtcggagaggaacagtgggaggttgcggatgatgaggttgtcatcgtccgttccacccagctggcaggccagctggtagtccgcgagccacagttccggccttgtttcccccgaatacttggtgatggtagttggggttcggaaccgggtcgggaacgacgcccgtcgtatggcccggctgaaagcctgcggaccaggtggttcgggcgagggactccgatcctccccgctgtcgtagcgtcccccacgcctagcctcggcgcaccttctcgtcgaagtgggctcgacggtcgtggcgggctcgacggtcgcggcgggctcgacggtcgcggcggtggtgctcgttgccgaggcgacctggggccgcaggcgctgtgtcccgcgtgcgcccggtgtggaccgaggcttcccgcatgaatcgggaagtcgcgacgcgatgctccggggggtacccctgccttcgggaggtagagctttcggcccgtcggaccgcgacatcctccaggagattcttgagctctccctggatacgccgcccctcggtggtggatggttccggcatcgctcggagtagtattgccgctgcagccaggttctggccggccccactggaagccgggggcagccttgccctggcatcgtcggcgatgcggtgctggacgtcctgggccaaatgacgcgcttctccggctggtgctcggcctgcccactcctgcccgatgttctgccagagctgcacaagttgtcctgcttcctcgtcgagcctggcctgcatctcgcggatttgctcgagctgtgcgtcctgacccccgcagggactgggaccacagctagctcccgaaggatgtcaacgcgaggcacatgcctagggggatcgccgtcctccgacataccaagatggttgccttcgtcgagaccccctagatcgacgtggaaacattcgcgacttgggccacagtcctcgtcgtcaaggctgtgaccatcatcggagcaatcggagaggcagtagtcacatgcggccatgaagtcctgcatggcaccggggttatcgagcccggagaaatcccaaccagagtcgggcttgtcatcttcctcggaacccgggggcccgtaggtcgagacggccgtcagtcggtccaaggttgaccacatatggtaccccggaaggttaggatatgcctttataaagcgtccaccgaagcggggtcgcttggtggggtcaaagctgaatctaaaagtcacggggtggagaacggacggtacctcttgatcgacggatggtgacgaagtcgcgtcggggacggactgcaccgttatctcaggtacgaggctaacgcccagcaagtccttcgcgagcgttatggcgtcgtccgtctgcttggggttggcgtgttgcggggaaacgacgctcgtcttcgtctcagacgcgaggtcaacgtccgccgtgtcccccgctgcggcgccgacgttgtcgactcgctcgacagccaacgaggtgccgcctcctgcttggccatggttgcccagcctcctccatcagcggggaaggtgacgggacagacccggatgctgctcttccgtcacgcggggaagacgtcgtcgattccgccgtcgtcgggcgggctgacggccgccgttgtcgttgtcgcgcggcggaggaaggagtaccatgtcgtagctgccgtcgagggacatgaactcgagactcccgaaacggagcagcgtcccgggctggagaggttgctggagactacccatctggagcttgacgggaagctgttcgtcaacacgcagcaggcccctacctggcgcgccaactgtcggcgtttcgaccccggagggtccctggatcaacgagtaaattgtcgctgcgtgtcccagcccagatgggtcggcgcgagatggaacacaagggggaacaaaagagggaaccacggctcgtgttatcctgcgcccagggcggatgcgcttgcagtaggtggttacaagcgttcgcgagggagagagagagagcctgttcgtcagcccgtcctcccgcgcgaccaccttctcgtacgagggccctggacctcccttttatagatgtaaggagagggtccaggtgtacaatggggagtgtagcaatgtgctaacttgtctagcagagaggagccagagccctatgtacatgccatcgtggcagtcggagaagtgcttagagccctgttaatgtgatgtcgtggtcgtcggaggagcacttgagccctgtagaagcacaactgtcggggttgtcgggtccttgctgacgtctccttgcttccgtaagaggctgagaaccgccgtcgtcatgggagcacgcggggtgccatcattacctgttcaccggggcgagccagatgggacaccgatcttgttccccgtagcctgagctagcaagggtagggtaatgatgtatccccttgtaacgtggtcggtccgagcccaaggtcggcgaggcggtgactcctccgaggtcgaggctgagtccgagccctggggtcgggcgaggcggagaccgtcttccggggtcgaggttgagtccgagccctagggtcgggcgaggcggagaccgtcttccggggtcgaggttgagtccgagccctagggtcgggcgaggcggagaccgtcttccggggtcgaggttgagtccgagccctagggtcgggcgaggcggagaccgtcttccggggttgaggttgagtccgagccctagggtcgggcgaggcggagaccgtcttccggggttgaggttgagtccgagccctagggtcgggcgaggcggagaccgtctcccgaggccgagacggggatcgagccccggggtcgggcgaggcggagcttcctatggcgcctgaggctagacttggctgcggtcagcctcaccctggcgggtggcacaacagtcggagcagggcaggtggcgctgttttcctgtcaggtcagtcagtggaggggcgaaatgactgcggtcacttcgaccctgtcgactgaggaacgcgcgtcaggataaggtgtcagacgatccttgcattgaatgctcctgcgatacggtcggttggcgaggcgatctggccaaggttgcttctccgtgaagcctgcccgagctgggcctcgggcgagtcgaaggtgcgcccgttgcttgaggagaccctcgggcgagacgtgaatccacctgggtctgctgttcttgtccgaggctgggctcgggcgaggcgagatcgtgtcccttgagtgggcggagctttgacctgtattgctcccatcaggcctttgcagctttgtgctgatggtggttaccagccgagtttaggagtcttgggggtacccctaattatggtccccgacagaggccgccactacgacgtttgcagcgctcaaggatgcggtcacttcggcccctgtactagccatgccagacttctccaagctcttcgtggtggaatgcgacgcctcctcccatggcttgggcgcattgttgatcgtagagggccactccattgccttcttcagccgggctgtcgccccgcgacaccgggcattggctgcatacgagcgggagctcatcggcctcgtccgcgcggtctggcactggaggccgtacctatggggcaggttcgtcgtcaaaacagaccactacaacctcaagtatctgctggaccagaggcttgcgacgatcccacaacaccattgggtgggcaagctcttgggctttgatttcaccgtcgaatacaagcccgggtcgtccaatgtggtggcggacgcgctgtcccgccgcgactcccggaagacgggaccatttggttctctccgcaccgcgtttcgacgtcctcgaccgcctccgtctggcacaactcaccgatcccgccctcatcgccattcgggacaaggtcctggcgggtacccgccgggcgccgtgggcggtcattgacgacatgatccactacacaggccgcctatatgtgccaccagcctcggcactgctccaggagctgttggcggccatccatgaggaggggcgcgagggtgtccagcgcacgatgcaccggcttcgccgtgactttcattttcctaacatgaagcaggtcgtccaggactacgtgcgggcatgcgcgacgtgccaacgtcataaatctgagcaccttcatcctgcgggcctcctccttcctctaccggtgccccaaggcgtctggacggatgtagcgcttgacttcatctaagccctgcctcgggtccgtggcaagtccatcatattgacggtggtggatagattcagcaagtactgccactttattccactcgcacatccttattctgcggaatcagtggcctagggtttcttcgccgagatcgttcgcttgcacgatgttccacaatccatggtgtccgaccttgacgccgtgttcacctccaaattttggcggtagctcatgcgactgatgggcaccaaactccacatgacgtcggccttccacccgcagtccaatggtcaaaccgagtcggccaaccgcgtcatcatcatgtacctgaggtgcctcaccggtgatcgaccccgccagcggttgcagtggcttccgtgggcggagtacgtcttcaacactgcctaccagagctccctccgcgacacgccattcagggtcgtctacggccgtgaccctccttccatccgctcctatgagccgggggaaacacgtgtggcagatgtggctcgcacgatggaagaataggatgagttcctggctgacgttcgacatcacttggagcaggcctaggcggaagtactatgataaggcgcaccgcgacatcatctatcaggtgggtgaatgggtatttctccgactccgccaccgttccccatcgtcactggccaccaatgtcgccggcaaactgaagccccggtactacgggccataccgggtgacggagatcatcaacaccgtcgctgtccgcctggagctgccctcccgtgcccgcatccacgacgtgttccacgtgggcgttctcaagaagttccatggcactccacctacgacaacacctcccctgccggccctgcaccatggcgtggtcacctccgaacctgaacgcgtcatcaagactagagtcgcccgcggcatacgccaagtgctcatccagtggaaggattagtcccctgcgtcagctacatgggaagacgttgactccttcgtggccaagtttccggcgttccagctcgaggacgagctgactcttgaggcggggagagatgtcatgtggggccttgcgtacagcaggcgccggcgggctcgggacatctgtcgcgccgcggagcgcgctgggcgcatgcaggaacaggccacagatagtggctaaattagaaaggataaatattagttcccctttattagcttcccttgttatccccttaattgtaggaatgattggttattagcttcccttattatctccttaatcttaggagttagttattagcttcccttatcatctccttaatcttaggagttggttattagcttcccttatcatctccttaatcttaggagtgattggttagccggtgggctatttataatttatatatgtaccgagacaatgaggaaaggcaacaaagattaattccatctactccctatctctctctctctcaagccgccggtcaggggggtacaccccaactagcgaagaaaggcgagggggcataaccccgccaactaccacgggccgggactacgagctccgtagtcgaggtccggcgtccttgggcacttatgcccttgacagtaaatggggaccaaccgtctagccagtgttatgggtatgtggattgttttttttccatgtgttcctaaccaatgcttgttcttgctagctgctttaccttaattgttgccacccctgatcaagtgattatattcattgttggtttaaacttgatccttcttattatgaccacaaatctatctcaacatgcacatccctactatgcttagctgctggatgtgcagctgttttagtaggtcaatattctgtgccaggcaacatcactggcgcaattggcttatcgccatggtggaacttatcctttagctatactagaatttataatcatgaatgtactgtacagccttttattatagaagcagaactatatcttggtggtatccgttagtccattactctctctcctggatcaattgatgatttcttacttatctttgcagcacctggtaaggttgaggtgggaggagctcagtgc

SEQ ID NO: 840 - DNA, 16307 bp, Zea mays
  Intron number 2 from transcript GRMZM2G057778_T01 (locus G RMZM2G057778) derived from phytozome v7.0 (chr-ID 1; pos 6 018706 to 6035012)
gtggaatttacggtgctttccaacggctcggagaggtattgttcttgttgacctttttctacataccttggaaaaatattttcagatttatttatggcagaaattatctagcgaatataggaagcaacaacacttcaatttgttttaatgaagattattaacagttgtccactactggtaaaatagaggaaatgtttttattagaatcttggaataacccatgcggtaaatcctagtacttgagtccctaaccctgagaaaggatttttttgctgtttgtttaattaattctggtgaatggaatgtgctcaatacgttcagaggtcaggagtaactaaaaaatatatctagaacgttatagattaccctaaatagatctatgactttgttgtcgatgcttttctaggcaagcactacaagcgctggcccatgtctagtggggcccagctggcgccttctttagcccaaccgacgacaggagaggcccaggagttgtggctgacatagatattgatagaaaataattagataatattgctagttaatatctttggaaggtttagatttgtttgagtttcttaaggatcaagttaggagtcctgtctaggcgactaggctatagttgggacctacgatagcaaaaggcagagaagaaacaacccttaagggcatgttttgggagcaaggggattgaaggggattgagggtgctaggatccccttcctattctagccccctcaatcccctccaattccattgtcccaaacaaaccctaaagcgtgccgcaggtcaggggtctctctccctgttctgctataatcttgccctaattcctaacatcttggtactctaagccaagatcatgtgtgcttgtgcggccccaccacgacccctgcggcacccccactcccaccaccaccaccccgacgctacccatcagttccatcaccacccttgccccaccatgtcgaacaacaaggcacttgccacgacgccaactgccaccaacaatctcctagcctccatggcccaaatactggttagcctgtccgatatccaacctcgtcaagtggccatggacgacaaggttgttggaataagtctcgtggtctgtggggatgacaacaacaacatcatctcagtctttttgactgcaggactgcaggtgtggaggactgcagttaggacaacaatacctttgtgctgcagtttttgactgtactttagcatctagaagacaacatcttgttatttagcatctagaggacaacacctttgtgtagcgtgtagtgctacaatttttgactgcactttagcatcaagaggacaacatcctgtgtagtgtgtagtgttgcagtttttgactgcactttagcatctaaaggacaacatcttatgctttagcttctagaggacaacacttttgtgtagtgtgtagtgtagtgtgtagtgcagcccctatggttataaatatgtatctccaaccgttagatcggtatggcatttcggtagtgtgtgagaaataaacgaaaaattgccccaacttgtagtgtcatcctctcgatgagaataagagtcctgttgcttacaattggtatcagagccaaactatcctgcaacctaaacatctcttgctcatctccttcccgcacctctccccatattcagtcggcagcaagagctccaactgtttcttcctctcctgctcggacgagcagcctttcgtttgagacatcctcttccacacgcagcgacccctcgctagcacaccatgtctctacgctcgatcatatcgagtgcgcgacgccagcaggaggctgaggtcgctgcgggacaataacgcgagcgagcagcagtagaggatgcagtgacagcggcgtgggcaacacggctagcggcggtggaactagcagcagcgagagaggaagtagaagcagcggaggcggcggatgctgcacgtgcggcggcggcagagctcaaggctctaagcggcagtagcgccgacaactctgtttctggcgacgacaacaccaacgacgagctcaggctggcaagggaggcagcacaagagcaggcagcacaatgggcagccgtgcacgacggcaccctagataggcacagacgtgccgacggcgctccagacgagaacgcgcaaagcggcagcctagacgtgcgtgaacgtgccgggggtgctcccgacgcggcggtcgggtcgacgaaaatcatgacctttacaggcggcgtggctctccctccccaaatctgtaccatggttaccgcggggtccaagccgttgccagggacatcggtctcagcgatgggtggcctaccctcaccaagaccaactacgtcgagtgggtcgaggtgatgagggtacgcctctaggttcgccacatgtgggaagcagtttggtacgacgacgtcgactactacgaggatcgacggacgctggatgccctcattactgtagtcccactcgagatgcagttttagctttctcagaagcggactgccaaggaggcctgagacgccatcgctacgacctgcatcgacagagaccgtgcccgcaagaccacactgcagacacttcgcaaggagtgagagaatctggcctcaagtcaggtgaggatgtcgatgactttgctctgcgcctcaacactctattgcagaatatggtgcagttcggcaacgacacctacgatgaggagacagctggatgagaatggtccgcacgtggaggtcgagcacggagtcatgaggatcttggacccctcttgtcgccttcttgccaaggtacgcaggagtccaaatcggctttacatcttcgacgtgaaggtggcacaaccttgctgccctgctgctcgtcgggacgacgtggcatggcagtgacacgagcgcttcgggcaccttaactttgaggccctaaagcggcttagtgcctaagagatggtacgaggcctgccctgccttgaccatgtggagcagttctgcgatgtctacgtgttgacaaagcagagatggctcccctttctccagcagtcgagcttccgagccaaggagaggctcgagctcgtgcatggagacttgtgtggcccggtgacaccagccacaccaggaggacgacgctacttcttgctactcgtcgacgacctctcccgctacatgtgggtgatggtccttggtagcaagggagaggctgcgaacgtcatcaggcgtgtgcaggtcactgcggaggcaaagtgtggccgcaagctgcttctgctgcacatcgacaacggtggcaaattcacggcggctgagttcgcgtcgtactgcgcggatgagggcgttcagtgccactacttcgcgccgtgcagcccgtagcagaacggcgtcgtcgagcagcgcaaccagacggttgtggggatggctcgggctctcctcaagcagaggggaatgccgactgccttctggggagaggcggtggtgacagcggtctacattttcaaccgctcgcccaccaaggcactcaacgggatgacaccatacgaggcttggcatgggcgcaagccggcggtctctcacctatgggtcttcggctgcctcacgttcactaaggagattggccacatcggcaagctcgacaataggagcactccggtggtgttcattggctacgaggagggctcgaaggcctaccacatccttgacctaggaacacagcgtgtgcgcatggtcctctacggcttgcgacaggctccgagggcgtggaatgccaagctggattccacgctcaagaggatgggcttcatgccatgcccgcacgaggcggccatctattggcagggcaatgaagaaaatgccctgctggtgggtgtctacgtcgacgacttggtgatcactggcgccaaggatgtagaggtggcggcgttcaaggaagaaatgaaggccatcttacagatgagtaagctggggcatctctcctacctggggattgaggtgcaccagggtgactctgggatcatacttcgccagacggcctacgccaagcgcattgtttagctagctgggtcaccaattgtaacccagctctcactccgatggaggagaggctgaagctgagtcgtgacagcacgacataggaggtgtacgctacacagtaccgacgtcttgtggggagccttcgctacctcgtccacacacgaccgaacttggcatactccgtcggctacgttagtcggttcctgcagtggccgacgacggagcacgagaaggctctgaagaggatcgtctgctgcgttgcggggactctcgaccagtgtctctactactcgaggtggcctgggaaggcacaccttgtcgggtacagcgacagcgaccatgccggcgacatcgacaccagcaagaggacaagcgggatccccttcttcctcggcaagtgccccatcagctgacagtcggtgaagcagcagatggtggccatgtccagttgcgaggctgagtacatagtggtctccaccttcaactcagacgccctggcttgctcgactgctcgatgatctcctcaggcgagacactggagcggtggaactaagggtggatagctagtccgccctggcaaagaaccccttgttacatgaacggagcaagcacatccgggtgaggtaccacttcatctgtgactgcttggcaaaagggagcatcaaggcacgctacatcaacaccaaggatcagcttgcagacctactcaccaagcccttggcaggatcaagttccttgagttttgctccaggtccgggatgcccaactatcctacaagacggcgcacaagacttaggggaagaattgttagaataagtctattggtctgtggtaaggacaacagcaacagcatctcagtttttttgactgcaggacaacatccttgctgcgttgtggaggactgcaggtgtggaggacagcagctaggacaactgcacctttgtgctgctgtttttgactgcaatttagcatctataggacaacatcttgtgctttagcatctagaggacaacacctttgtgtagcgtgtagtgctgcagtttttgactgcactttagcatctagaggacaacatcttgtgtagtgtgtagtgctgcagttttttactgcactttagcatctagaggacaacatcttgtgctttagcatctagaggacatcacctttgtgtaaagtgtagtgtattgtgtagtgcagcccctatggttataaatatatatccccaacccttagatgggtatggcatttgagtagtgtgtgagaaataaacggaaaattgctccaactcgtagtgtcatcctcgtgatcatgtaagagtcccgttgcttacaaaggtgacgacactatcgatcaaggaaccctctactagcggccacctttctgagagatagggttgttgtcttcatcaacgctgccatctacacttccccaagtacgatggcttcgaggatctgctacgttggctccaccgctatgagcagttcttccgagcagcacgtacgctggacatggagaaggtctggcttgccttcttctaaatggagggcaccacttagcagtgttattattggtgggagaggaaccgagaggaaccagggcaccccgtattggacacgcttcatggagctcgccaacgcacacctccgccttcaggggtccctcgacgagtacatcaatgcgttctactaacacctcacccactacgacgacctctccaagttgcaacatatctccatcttcatcgtaggcctgggcaaaccattgaagaccgtcatcaagcttgacacacccgccaccctagaggaggcaacgaccctagctcacacctacacccgtcgcaatactgtggcggctcgggcaccagcaccatccacacatcgttcattggcccgcgctacaccatcccctccaagacttcccgccacgccagttgcccctagctatccggctacaacccgtccacctactggcagacacatgactagattgacgcccgacgagatgattcacctcatgaaggtctttgcttcaattgccttgagttctcacggacgcacctgaagacaagcaccagtagggcatttacctcctcgacatcagcgatgtcgaccccctcgactttgacggcgacaataagatgaccccattgtctggcacttgcacaggcgaaaccatgcacttggacgtctttgtgcaggacgagacactcaccgctcctgttgactccgtctctacacacttcttcatggtggttcaagtggcacgccggctccacttgagtcctacgaccaaggacggtacgacggtgggggtgacaatggcgagcgactgccatgccttggggcctgctctgcgctcgcgttctccatcaacgacgagtcgttccgcattgacttcctcgtcatcaccttagagggttacgaggtggtactcgggtgcaagtggctttgcaccctcggaccgatcatctggggcttctcgtgcctcaccatggcgttctcgtgcctcactacgggtgttcgctctcctatgataatctcctgcaattctcacagagttcgcgaacatatttgccgagcccgccggtctgcctctgccacaacacttcgaccactgcatcaacctcttgtcggacacaatgcctatcgccgtcaggccataccgctactagcagttgccagttgttgaaggacgagatggagcgggagtgcgacaacatgcttcggcaaggcatcatcagacccagtatgttgatgttctccgcacccgtctcgctcgtgcgcaagaaggacaagtcatggcgtttcaacgttgactaccgcgccctcaacaccaagaccgtgaaggataaattcccaaatcggatcgacaatgacctgcttgatgagctcaaggagtcaagagggtacacttcttcaccaagttggacctccccaacaacaattactaggtgtagatgtatccgaaggacatcaccaagacgacgttctagacacatcatggcaacattaagttttttgtcatggcgttcaggctcatgaacaccccctccaccttccaggcgctgatgaacgacgtgttgtacgcctacctccgatgtttcgtgctggtgttattcgacgacatcctcatctacaatagcacatgggccgagcatttacaacatgttcgattggccttccttaggcagcacaagctgtctgtcaagcaaaccaagagctccttcggtgccccatcgaactcctacctcggtgttggatcctggcaggtggacccaaacactcagggatagaaaagggggcacaatgcacaacaaaacgttaggtagggactgtagcgtgttatgcgtgtcccatgcagctacaggacgtgggtatttatagggcaatctgagtgtaggtggccgaaagtacattcgtaccctcggttaccaactacattactagaatataccgtgtaatgaggtaattagaacaccgcagtgtcctgtggacatgcgcactcacaagtctaccctctggacctgttggagctgctcagcaagggagaggcctccgttaagtggttggtagtggatggcctcgctgtatatgtcgattgcatcttcatgccatccgtgcccgccctgtgacccactatccttgccatgactcacagggtgggatatgagggcatctagaagaccgcacaccgtctatgcgcctcattctataatgtccacgtcaccaagttcatcaaagacatcaagagttgtgctttttgtcagcgtaacaagtctgtgcacctccacccggcagaatactgcagcccctcgagttgcctagccctagctcgatgtgggccgacatttccatggactttgttgagggcttgccacatgtgggagcaagtctgtcatcttcatggtggtcgtctgcttctccaagtatgcccatttcctttcgttggaccacccgtacactgatgtctccgtcttcaccagcgccttctagacggagctcttttgtctcttgggtgtcaaattgcgaatgaatattgccttccacccgcagactgacgaccaatctgatctgaaaaatcacattttgggcatccaccttcactgcctcgcaggtgatcgtccacgtagttggctttgttggctgccatgggctgcatgctgctacaacacctaccagaccgcacagcggacgacacccttcaaggtggtctatggctgtgagtcgctgacgcctatctcctatgaagccggcgaattcaaggttcctgcagcggatcaccggctccacgatcgcgatgagttcctgactgcaattcatgaacggctgtagcatgcccaagacttgatgaaaggcaactatgatcaacatcacctcgagttggaatttcaagagggcgatgggtttagtcgtgcctccatcaacgtcttgctgactccctgattgacagagctaagggcaagttggcacctaagttctatgtgtcatttcaggtgttggcccgctgggttctattgcctacaagccggcactgtctcctaagtgtcgtctacatactgtgttttacgcaatgttcctcaagcagttcaatggctccccgcctacggttgcgccaacactccccccttctaagcctggtcatgtgctaccttagctggacaaggtttggtgtgcctgccttaaccgcacgtgttatggtcgctagatcggtgagggattggagaggggtatcgatgggcaggaacgtcggccgggggcctctgcccacggccgagcaagaggagggtttgtcccttctaattcttgcctactttatttctcatccattgattacataaatagaccagttggccgcccctatctagctagagatccttatctcctaaaaactctactaaaaactctcaacaaactaactgataaccttcttagataatctcaactaatctcctaaataatctcaactaatcttctaatcttatctctaactatccttatctaatctcccttggagggcccatggctgttgctactgcagcccctccatgggccttcttaggccctgacactacacccctcctggacaagcagctcgtcctcgagctgcagcatgacgggtgctcaaaggccgagtctacttgacccaaaaccagacacctagaagacaagccttttacatctcgacttatcttattatttcgaatctgattttttttgaccccataagataaggcggacaccctccgcgcattggacttgcacgtgtgcagccacctggatcccatggacgccatctagacgaaaggggagcacatggacggacacctggaataggtcgcaacaataaccagcagaggcgccctcgtggcggccggtagcggaatgtggtggcgctaaatagtgcgcccttgccgatgacgaggggagtgccttccttaccgccgctgccgtagagttgaagttcgtcgcccgcgggacacgtacaatgctcgcacttggagatagcggcccggagccgttgctgatggccgtccgacagggcgaggtcgcgcccccgtgtgccgaggttaaccgtcaccaaggctgcctcgagcatctgtcggcgcatctcccgcactctccgtcgtgcaaggaagccacgagcagcagcttgtatgcccacaaccgccgacgtctggagctgtgcggacaacgccagctggtgctgctcatgttgcactgctaccttgatttgcagcagcccttgctcaaccttctggagcgtggcttgcatctttgctagatcagcccttatgttggtccacaagtctcccatcgatggagctgatgattgctgagccgtggctgctcctagtggcgttgcccatggggacggagacgccgtcaacgaagatgatgtgacgaaatttggcgttgtccctggagttgggcacgtcggcgtgcaggatgtggtgacaaaattggcaggcgatgctgcccatggagatggggacaccggttgccaggatggcgtgacgaaggtggcatacggcgcaacccatggagatggggacgttggctagccgataccagatgttatggttgctagatcgatgagggattagagaggggtatcgatgggcaggaacgtcggccgggggcctctgcccacggccgagcaagaggagggtttgtcccttctaattcttgcctactttatttctcatccattgattacataaataggccagttggccgcccctatctagctagagatcattatgtcctaaaaactctcctaaaaactctcaacaaactaaccgataaccttcctagataatctcaactaatctcctaaataatctcaactaatcttctaatcttatctctaactatccttatctaatctcccttggagggcccatggctgttgctaccgcagcccctccatgggcctccttaggccctgacagcgcgtgtggcagatcctcatcaagtggactggtcaagctgctgcagatgctacatgggagaaggttcctgaattcaaggaggttttcccctctttttagcttgaggacgagctatttgataatgggtggggcagtgttgtagatgcttttatggccatgcactacaagcatcagctcaggtctggtggggcccagttggcgccctcttcagcccaaccgacgccaggagaggcccaggaggtggccgacatagataaggatatagaataattagataagcttgttagttaatatctttggaaggtttagatctgtttgagttacttgagggtcaagttaggagtcctgtctacgctatatataattggactctacggcagcaaaaggcaaagaagaaacaacccttaaccttgctgtaggtcagggggctctctctccctgttctgctgtaatcttgccctgattcccaccagactttctgtcaaggacaccaaatccccgactggccggaccccggctacgtaactcgtagccgctgtccgtcacgccggcgaggttatacccctcagccgtcggtttgtagagaagagagggagattaggactgacttattccttattccaaatgatctctcgtacatgcttatatagccacagagggggcagctataaggaaataactaacaaggaaacaactagtaaggaaataactaacaaggtaacaactcacaaggaaataactaacaaggaaacgactaataagggaataactaacacatgaaacaactaattaggtggctaactttccttctagccacttgccttcccttcctgtgtcctggctgcgcgctctgttcccctgcgcacctcacgcgcgcgcctggcgtatgtgcgcccgcacatcacatctctcccgccgtcgaagaccagctcgtcctcaagctggaaatcagagaagcgagcgcgaaagtcgtcgtagtcctcccagcttgctgacgcagctggctcaccttgccactggaccaatagctggcgaatcccacgagccaggcgcccggctgtgaccactgctggcacgggcaccacagcgccgttgtgcgtggggggtaatgccgggggtgttgccggtggtgtgccgacgaacttcttgagcactccaacatggaacacatcatggaggcgggcccctggcggaagctcgagccggacagccacggcgttgatgatctccaggacgcgatacggtccaacgaaccgtggcttgagcttgccggtggagctccgtggtagtgatgctgccgggcgttgccggagtcgtagtagtgcccagtccccaatttggtactccaccggacgatggtgctgatcatagacacgcttttggactgcctgggcctgttcgaggcggtagcggacgtcggcgagaaaagccgtgcggtcctccatctcctgtgcaacagctgccatagaccacgtggaacgacgtctcccggagcgacgattggaaagccgtgttgtaggtgtattcggcccacggaagccagcgaagccactgccgaggacgatcgcctgtgaaacaacggaggtacatgacgattaccctgttggcggcctccgtctgtccatccgtttgcgggtgaaaagccgacgacatgaagagcttggtgccagtgagccgcatgagctcggtccagaatgtcgacgtgaacaccgggtcgcggtccgagacgatggattgcggcacaccatgaaggcggacgatgtcgctgaagaacgcttgggcgacggactcggcggtgtaggggtgtgctaacgggatgaagtggcagtacttgctgaagcggtcgacgacggagaggattactgtcttgccctgcacccgggacagtgcttcaatgaaatcgatgccgatgtcggcccacacgctggacggaatgggcagtggctggagcagcccggccggcctcaggtggtcagtcttgtacctctgacatgtggcgcacgccttcacaaagtcctgcaccacacgacgcatgttggggaaatgaaaatcacgccgcaggcggtgcagcgtgcgatgaacgccttcatggccgtcgtcgtggaccgcggccaggatttcctgaagtagtggcgatgctggcgggatgtagaggcgcccctccagggcgaccatgccgtcggtgatggtccacggcgccgtgcgggtccccgcccggagctcatcgtggacggctaccagcgccgggtcggtggtctgggcatggcggaggcgctcgatgaagtcgaaccgggcgctgaggtggccagcagttctccttcctcgttgtcgcggcgggatagggcgtcgacgacagtattcgtggccccggagcggtactccactgtgaaatcgaagcccaagagcttgccgacccagtggtgctgcggaatcgtggcgaggcgctggtcgaggaggtatttcaagctatagtggtccgtcttgacgaggaagcagcgcccccataggtatggcctccaatgccgaaccgcctggaccatgccaatgagctctcgctcgtaggcggccagcgcgcggtggcgcggcgctactggccggctgaagtatgccaccgggtgtccctcctggaccaggaccgccccaaagccgatggttgacgcgtcgcatttgacgacgaacagcttggcgaagtcgggcatggcgaggactggtgccgaagtgaccgccgctttgagcgcggagaacgccgtggccgctgcatcatcccaagtgaaaccgtccttcttgagcaacgccgtcaggggcgcggccaccgtgccatagttatgtacgaacttgcggtagtaccccgcgagaccgaggaagccacggacggcacgggaggatcgcggcgtcggccaatcatggatggcttgcaccttgacgggatccatggcgacgcccgccgcagagataacgtggccgaggtaggcgacggcggagaccccgaaggaacatttggtgcgcttgacgaagagctggtgacggcgcagttcttccaggacagcacacaggtgccggaggtgatctgcccaagtcctgctgtagatcaaaatatcgtcaaaaaatacgaggacgaagcgacggaggaacggcctcaggacgtcgttcatgagggcttggaatgtggccggcgcgttgcagagtccgaacgccatgaccaggaactcatataggccgtcatgcgtgcggaacgccgtcttgtggatgtcctcgggtcgcatgcggacctggtggtatcccgaccgtaggtcgagcttggagaaaaatttggcgccgttgagctcatccaatagctcgtccaccaccgggatcgggaaggcgtccttgaccgtcatggcgttcagggcccggtagtcgacgcagaagcgccaggatccatcggccttcttgacaaggaggatcggcgacgaaaacggggagtcgctgcgtcggacgatcccttgttccatcatggctgcacactgccgctccaactcatctttgtgggcagctgggtaccgataggcgcacggcgaccgtttgtgcatcgggcttcagcaggatgcggtgatcatgtgcgcgcttggggggcagtcccgttggagtggcgaagacccttgcaaacgctccgaggagagcatccaagagcgattcttcagcggacaaggcgcacaccgccgggcccgacgtcgtggatagacccgcccatgagatggtgcggcccctcgctggaaggacatgcgcctgttggccaggtcccagacaatgggccccaacgcgccgagccatttggtgccgaggacgatgtcgtacccggccaagggcatgacgaacagctccgccgggaacgcagcaccagcgatgattagtggggctttgcggatgacgccggcgcaggtgatgttctcaccattggccaccatggccgttaggcggggacattgttggagcggaagacccgttcgtcgagcggcttcttcggagatgaaattgtgggtgctgccggagtcgaggagggctacgagctgggcggcccctagtgtgaccgcgagctgcgtggtgtccgtcatggacaccccagccaccgcctgcagcgagaagcagggggcatccctgtccccgtcgtcggtgacgggttcggtgtcatcaatctcaaccccgtccacgaagaaaatccgcttgcaaaacctgttatggccacgagaatacttttcgtcacagttaaaacaaaggccaaggcgacatcgttccgcctgctccgccgtagagaggcgccgctggttgccctcgcgtcgtccctggtcgttacccgccggcgggtttggaagagccagctgctggggtggcgcggccggagcggttcgaggcggcggtggtggaagtagaccgcgcgctccctgtcgtaccggcggtcgctcgagctccatgagctccacttgccgcgccaggctcatcgcagcggcgagcgtggtcggattatggatgcgcaccgcatgactgagaggcgggaggaggcctccggtgaagagttgcactcgttgagcttcgtccagccgaccggcacggggcaggagcgtctggaaacgactagagtactcctccacagatccggtgcgtcggcactccgaaagttcgaacagcggcgcggaacggagtggaggtccgaacctctcattcaggaagtctttgaatcgaccccatgacggggcaccatcatcttcttcaagctggctgtaccacaggtgcgcgacgtcgtccagatggtatgatgccatccgaacacgttcctcccccaaggtgcggtgatgccggaagtatgattcacatttgttgatgaacaacatcggatcgacggagccgtcgaagcgggggaagtcccacttgcggtgctggatgtacggatcgtggtcgcgctgcccctcgggtcgccgaccgtggcccccgttgtccgaggccgacgcggacttgtccttcatggccgccatgtcgaactgcagcgtgttgacgtccgtgcggagtgctcgcaactcagcgaggacgtcggcaatggtgggctcggccatggctgtggtggaggctggggaaggtggtggcgttggcggctgctgggcgtggttggagcgggtgggtgaggatcgacgagaccgtgataccaggttgtcaaggacaccaaatccccgactggccggaccccggctacgtaactcgtagccgctgtccgtcacgccggcgaggttatacccctcagccgtcggtttgtagagaagagagggagattaggactgacttattccttattccaaatgatctctcgtacatgcttatatagccacagagggggcagctataaggaaataactaacaaggaaacaacaactagtaaggaaataactaacaaggtaacaactcacaaggaaataactaacaaggaaacgactaataagggaataactaacacaggaaacaactaattaggtggctaactttccttctagccacttgccttcccttcctgtgtcctggctgcgcgctctgttcccctgcgcacctcacgcgtgcgcctggcgtatgtgcgcccgcacatcacactttctgattacacaattattttatgtgtacttcaaattactaaatgcagttttgcaaaaaaaattcacatttaccattcattctgaagagacagattcagacactggatgtggtgacattcttctattcaatacctttagcctcttatgtgtgtctaattttggttgaaaaaattgataaaaagcaaaccttcattttttggatgagacagattcgtactctgggg

SEQ ID NO: 841 - DNA, 747 bp, Zea mays
  Intron number 6 from transcript GRMZM2G474656_T01 (locus G RMZM2G474656) derived from phytozome v7.0 (chr-ID 6; pos 1 60723649 to 160724395 reverse strand)
atgtattccctcaacctacatctgtgattctgtgcatgtttaaaatccttcttttttggtgttttagtcttcaataatgcctattgtgtgtctgtttttcatacaatcgattgctttagaccaagtttgaatgcactagagctaacagttagctactaaaattagctgaagacatccaaatagttaagctaatagtttagctactttgagtaaattagctaatagttacttagttatttgttagctagctaatttcactaccaattttttagtcaactaactattagctctagtgcattcaaacacccccttagtttcatgtaggaattgggcaaaattcaaaagtacaattatgagcttaaccatggaatgtgatcttagacatatgtgcataatctagaagtcaataaaccagcataatctaggtaaattcaaaatatgttgaaaaggcatgtgggcaaatctaggttatgtcctgtgtcttgaatttaggtatttccagtagtgctcttagcttatacctatgtgctgctgcattcaatcttgatactgatttgtgcaactaaactcagtagccttttttagcaactcaaatgtatgtactatactatgttaatattacatgaggttatgaattttttgcctgaggctgtatgctctttgatgcatgcttgcatgtgagaagtttcttttctgaccatgaagtcatgacataatcttattcttgctggactcaaaaggaggcat

SEQ ID NO: 842 - DNA, 5779 bp, Zea mays
  Intron number 2 from transcript GRMZM2G388911_T01 (locus G RMZM2G388911) derived from phytozome v7.0 (chr-ID 1; pos 2 61890640 to 261896418)
cagtggaggagagccaggctgttgaaggacacaaggtgaaatcatacttttattttgctttcgtcaatgtttggctggctttcgtaatatttgggtttaggttatcaaaacatcacatgaatatactacctcaattccaaattataagaccttttacctttccttgttacatagcttttactatgcacttacatatacaatatgtctagatacaaagtaaacaaagtcaaacatctcataatttggaatgaagggagtacatctctgtgctcttttccaaacgatttgttactttgatgttttggaaatagtaatgcgttgaatggaaaattagtttgtgtgcttgtctcatttgttctttttttgtgtgctgagtaagaaatgatttcagaatcaaacaatatcatggttattaaagcggtaaaacgataaaacgttaggaaccaccatttcaacatttaaacgctgaaatgtcttttcagacttgacgtaaaacgacacggtagaatatgttcatactcataagttgagtatttaaacaaataacataaaaaggaaacagatcaagttcaaccacacaagtctacgcaaccaatgatttcaagtcgcctggtcgcctggtcgatccctgggactgaccaggcgactagtcgcgattaggcgacgactagggcgattagtcgactcctagtcggtcctagtcgttccctggtcgtcctagtctagtagttatacttatatagctatatatataaatgtacatgtatacaactacattatataaattagaaagtcactacttagcacaggcttaggattagggcagccagcaaccatccactaatttggcagaactgcggagaagggggagatggggggagagcaggaggaaccttgagatgacgagctcatctcctcaatggtgcaggtctgctggagcttgggaaggggcagggtggagactacagttggtgaaccttaagacattcgccgcatgtggagactgcagcaggcgagcatgagaaggggcagggtggtgtagccgctgatgatgtagccgtcggtgagctgtaggtctgaaggggcagccaccggcgaccaagtgtgaataagggctggaacagtcgagctagcaagagaggagagtaggagacgtagtgcactgtttgacggctaggtattacattggagaggagagggtagtctaaagtatactgtagatgggttgaaaatggcccaataacaaaaccctagccaggacgaccaggaaacagtaatcgggcgattagttgccctaatcggcgattagtcggacgaccaggacgaccagcctatctagtcgagtcgtccatctaatcgagcccaaatcgcaactatgtaacatgcaagctagaccttgcatctaggatcagtaaccatcatcctactcatcaatatcaagagcatgaacatccctggaagtctggaacctgatggttgcagctattgacggcgttggctgctagaggagctggcgggcagtgtgctggcgttagaggcggccggcgctggaggagggagaggggagggggcgctcgggcgctggaggaggtggtctgcggttggcgctattggggagtgtcgtggaggtggcggacctggcagtgctggaggatggagggtgcagaggagaagagggaggcacgaggcggtggacgggcagagctggcggcgctggaggagggaggcgagcgacggcgtagcaggagctggacgagaggaggaggcgggctacgctgcacaggtaagaggctgtcttgacctagttttttggggcctttgagaggccaacaacataaaacgtctgaaacacacctaaaacgtttaaacgacgcaaaatgacgtttaaacgtgtttaatggacgttatacgcgatttgtttaaaacgttcagacattctaccctgtaatcacgttttatcgttaaacgacgcttaaacggcgtttaagcgtcattttaaaaacctcgaacaatatgttgattttagagtattacaaatctgtattctgtggtggaactaagaccaggtctttttgttttttggggtgttcatatcattaatggggtaccatgtcagtgtttttgtttcatgcatcctggatggctggatcttagtgctgaattagacttgtattgtaagacattgatgttactttttgtattgttctagtgacaggaagctagttccttttacattatatcttgtcatggaacaaaacataccattacttgttttgtttaatacaatgattttatgattttcaatggtcttgctgataacactggctattgttgattttaaccttttactgtattctctccgtccctgaaagaatgacattctagattttctttaattatactatcttaagtttgaccaagaatgcctatttttcttagtaaataagagtcaacagattcatcatgaaatgtagttctatgatggacctatattagtgtcctaaattttgataagcttcctataaacttggtcaaagttaaaatagttggacttcagacaaactggtgtcattcttttttggaatgagggagtatcttggatattgttttgtatcatcatacatatggggacgttgaaaagccataacagataggttttagctaaagaaaatgtgatgtaactatgtaggctctagggtttattaggaaaatcagtagtacttatttgtttagatgttggaaatttaggttacatcttttattttgggcagtagatactgactttcaaattgatattttaaaatttactaataatagtttccattgccgcagcaattttatgtcatgacaatgagattgtagtgtctggagctgttatctcatgttgtcctagacatagtttggggtttctatgatgacatagctaaactttttaataaaggctggggttttttcccatagacacctgggtttcatagatttaaaaacttggtccatgaagtcatgagagcttaaatagaacttttctctctgttcagtcaaattacaaaaaaatggttccttggtctgtcctgtagatttcctgagtcctgacattcatactacctccgttcataaatatgacaccgttgacttttttagaaaactttgaccacttgtgttattcaaaaaaataatgagttatcatttattttttgtgatttgtttttatcaaattaaggtagtttgtgcttaacttaaaatttcacattttttaataaatattttgaataagacgagcggtcgaagtttttgaaaaaaagtcaacggtgtcatatatttgtgaacggaggtagtatttgtcagtcatgccaactcccttcacacctatagctactgcattaacaatatgtatggcatgttgttatccctagtatatgtttttttcctttcgatgacactgactgaaccgagacaaatgcaggttcataaaaaagtacattttttctgtatatatgttgtaaaagttatatcaggatattgtctgatcaagtcttctgtcagatgcgaatgccaccatcagtcttaactaactggaagtcataaaatttagagctcatcttagtttttgcataaaacagacacactggcctatccatcatatattggggggaaatgtcatttttgtgcaaaaatgcatctgcagtaatcatgtgatttagtctactgatagctctacaaatgagacaaataaaacctgtgtgtaaagtgtaaacattaaggagaacaatctatgcgtgggatgaaaacattatggtagctatttaagataatttagtaagcctcacattttaattagttctaaaaaattggaaaaaacaagaaggaaaactttacccgccttaagttatcaacttcttatacaggggacagacatatattcagttctgaattatgtagcattgtaccaatagatgacaaatgcgtactaacggaatgaactttagactggaatccataatcaggccttagtcatctaattgaatgtttgtatacaggataatgctcacaattcacaaatttgtttatgaaatttaacttgcaggttcattcattatagtaggaagaacaattgtagctgtagctttttgtagaacattttttagcatgcagattcattttgttgtcagaacaatacccattgtaaacctgacagtatttcttacacttatgcttttattcctttgatagcttgcttatttatagattttagtttaacatagtttataacatgtagccagagtggatagagcggatgatagctagcattttgtggttttcagtatacaataaactttagtaggtttgaaattgagctaaacaaatttggtcaccagacaaggttatcctatgtctacataacagggataaactacccttgtaacgacctagataggtgacacgtaagaaccatgttgctggaaaatgtgtatcaccaaattcatctgtagtcagtgcatggctatcagttatcacggcgccccagcgaggcaagtcgcctctggggcgcttggactcctaggcgcctgccgaggcggtagttaggcgaccaactaagcagagcatcttgcctcgcgcacaacaaagcagagcatctcaagaaggcaaggcggtggtgcggaggcgcgcagcagagggcggagccacgctggcgcgtggaggggcggagtggagccacatgtgcggaggtgaggcgcgctgcaacgcacggtgatgcggcgcagatgcgctgaagggggagcgctgcaggtgaagctagcaggcgctgcacggaaaagcagagcgggaaggggaggaggatgggcatgaggattaccggtgtcatgcgtccatcgaacaagcaagagcaactgagggagtcgagcgagcatgcgttttgcggctggcggctggaggcagtggggttttcccttcttcagccttaaataccaaagttgtattgacttccctagacctaggcgctctactgggtggcacatgcactagacgacgcctaggcatccatgccgcgacggcttgacctgcaggcgttcgcttagatgtcttctggcgaggcgcaacatcatggcgagcttagccgggcacctagacgcctagtcggtgcctaggcgtcaccatgataaccatgagttagtgttttcctaaacactaaatggtaaacagtcagcaacctaccatttatccattattcgggtagaacagctatttcaatgggtgggataaacagatgattaagtggaaactgcatgccaccatgtggtgtttacccggtgtataaacgtgctaaatgacacttcagatgtatagtgtttgtattatgcaatatctcatgagttaattctttgtatttagtgattgttgaaatgtatctttgaaaatgtaggaaaattttttagttgctaactgggtttcataaaaaataaccaaaatcatatctcatcttaaataaatgatacacagctctcctatgtcgttcaagggaagaaagcaataaccaaagtcactgaaacagtgaaaaatagcttgttatcatatatatatatatatatatatatatatatatatatatatatatatatatatatatatatatatatacatacatacacacacacacacttgaatgtgctcatatatatatttacttacgcccatcatggacattgttttcgttttactattttgtctcccctggatttcatctctattttttttactgatgtatgtgttcactaacaga

SEQ ID NO: 843 - DNA, 2569 bp, Zea mays
  Intron number 2 from transcript GRMZM2G063945_T01 (locus G RMZM2G063945) derived from phytozome v7.0 (chr-ID 5; pos 1 61082651 to 161085219)
cgaagatcctgagccattctgcataccagcacgtaaatgaagtgatttctagattgctctcatttcagactttgctaaaaatttcgttctccatggagttatggaggcatatacgttcttgctgttagttggtgcttattctcttctaaattccttaatcaactgcatcatgtttacaaattcattagtccctgattcttagtaaacaacgaacaaaccttctacagtaccacattgtttttgcagttctcattgtgttgtgcaacaaccaaaatcaatccacagacatgctaattgtggtaaggacataagatttgaccaaatccaccagtccaaaaaagggggagaatctatctataaactggattagaaatatagggacacataatagctgaatattagatagagaaaacaatatcttgtgagctaatggtttcttaggatgagcatacatgtacactgaattcgttcaactggaacatcaaatggcctaagttaagcccaagcacggaaacataaacgtgcagttcctcaagcattagaaagcagtaatgcaaacacctgctttgaagatatcacatgaaacacctttcatatgcattcatgtccaataatcagggaataagtaatctgttagcaaatgctaccagtagatcttcaaatttcttgctgaattctgcttcagtattagatgaatcccattcaaaattgtactcttgggcaatagccttcatgacttcagctttgatccatttgatggagcattcaccgagagcttttcgattatctgtatgaaagagatcttcacttttgtgagcaaacaattctgaattctgaaatagaaaaggcacatgttggagtttccacttactgtgcggttgacactgctgtcagggcgcaattccacagcgccaacaacaaactcctttccatacttggtggtaataaattacggagatgcattagctcaggcaagtctgaacatcttcctaatgcaaagattatactagcaattgcttcacgcagttctaaggggcattccctgctccatgataaaactaataggtgctgatcatattctgttaagtgaaaaaagaatcttgagccatggcttagaaaattgtaattcaatcacagttcataaagcagaacctacttttggacctcaacagtagggacttttgccaggacaaattcaccgaaaagctctaaaatctcgtaggcagccaatatattttgctccctaataatgtgctccagctatgattaataatgatattattagaaaatgttaagaagaaaaagggaaaaggccaaattacctgcccccaccccacgcacgcgtgggagggagtgtgcatctggtactatgtatcctttttattcatcaatctccatgcgactaaggaggtgaggttaatatgtcctttaataagatttgtcttcttgtttctcctcgtaagttcaaattctatagttggagaacatcaaaacttatcttacaaaaatacgttgaaagtttcatcattatttgtatttttaaataggttttgtatctatatggttagtttattataagatgtactgatctataaataatagtaacgaaatatctataatatatatttctaacataagttatgatgttctctaaaactacaaatttaaactaaaaactcagttggggtaggggtgtagattgtacacaaaattggttcaagaggttatccaggcaatgttcatatgtggggccctgtttgtttcccttctagattataaaaactagattatgatggaagtgtatgatgataaattatcatttggagattacaaaataagctgaaataagctacccaatactagctgatttcaacttatttatgatactaaagcggtattttacctcctaccattttaccataatccaacttatataatttaggagggaaacaaacacacccttaagatattgaaccatttctttgtgcatatttcaaaacttactaccatgaagaagttcccttaggccccgtttgtttcttttcattttgaggaattggaatcttactaatagaataggctatttttttagaatgtgacattccaccactttccaaagttatcatataagcctatgtcaaattcatggggtgagagatggaaattgattctatagatttacatgttatttttccgatgtacaacttatagcacactcttctatttgcttcgctataacataaatgtagtatataactatctctctcatatgatttaggataatatacaaatatattacatatataaatatataaacttaattagttttttctaaattataattattaaaatggaattcaattccaacgaaacaaacggggccttagttttttttgctgtcaggaattctaaaatcttacaggaagttcactaccattaaaaggctcagaaacacaaatgcacacccttgctaaaaacatcactgggacttctttggtctacacaaaatattttattctattgtgatatgcaagtcctgatcccatgcaaaatgtttgcaggataaaca

SEQ ID NO: 844 - DNA, 800 bp, Zea mays
  Intron number 19 from transcript GRMZM2G577191_T01 (locus GRMZM2G577191) derived from phytozome v7.0 (chr-ID 3; pos 186047653 to 186048452 reverse strand)
aagtagggaactatcaggacaaacaaatcctttcggtgagattccaaataatatagttgacaactgtatacctcttatagctaccaaatatttctttaagaagaaaaacattaaattatcagaatgtgttttccatggttgcaccatttaataaagttctttgttttgtagtaaatctataaacatctataggaaaccagtgagaaagacccccccccccccaaaaaaaactaataaaatcggataaaaagtctacataacctctcattgatgaagtaaaaatgggacacatatatgccatttatttgctgagaatggttgcaacagcatagagtaccaatggtttgctagagctgttaccgacttccagatgtataacaaatacagcttactggagctagattgtacaaaacaaatacaattttacttcatataagaatatcaatattatcatggtatgagattacctagcagggtaattaagcaggattcaagttaaataactaaatggtagcctgataggctataattagacatatgataaaaatatacaacagaattgacacagttatgtatactaactagctcagcatgccaaaccaacatccaattttcaaatcctatttaaatacccttcctttcagagcttacaaaattataacggaaaatgtgtctaactacgaaaatatagtgatcaaatgcatgtaagcagtaataaagcatagaaaagatcaaaagtactgtagtttgataaaaacttaactgactatttacctcatgcatattcaatttttagcttc

SEQ ID NO: 845 - DNA, 12548 bp, Zea mays
  Intron number 6 from transcript GRMZM2G094595_T01 (locus G RMZM2G094595) derived from phytozome v7.0 (chr-ID 8; pos 1 37206173 to 137218720 reverse strand)
atcttgcatccctgaaggaaaagcttgagcaagaggtatgcaaaatacccaactccaagtttggcgtcaatctgacagctataactgttaactgtgcgaaagtgaaagtgtgaaacaattcttttttagctaaaataattcgcggtgaaccaaaacaagcatgagcaattagtattttagtcttactagatatatgctgtgtgttgcaccaaggtcacgattttttagactgaacttcaataatcggacgtcggacgcgtaagctccaaggacttaatattagacgtggacatgtggatccggtctttgtaccgaaaccaaataggatgtggatgcataagctcagtgtggatgatgattcatattagacacgaatgtgtgattaaggattgagatttggtatcatcaggtagacgatgacagtatggtctttttaggtgtatagatatagcagagaacttagaagggtaggtctgatgcagtggtgagagatgtcttactgagtcataggttcgaaatagtctctccacatttgtgaggaaggcttgcctcaatttatccatttctcagatcccactcgtgggaggctgggagccttcacaactgggtttgtcccttttctagatatagcggagaacttgtagaaaggtcatgtgaattagtttgagtcttatcattgacatccatttttagatttggctagatcttgtgctggaagagaatagaattggtggaatagtagttgtatcacattaggcctcatgggttgattatgtagagtgcataggactaacatctcacgtgggtagacaatgtggcactatttctatttactctaacaccccccttgcagtcacagcggggtcggcactgaggctagggcagactgacaagctaacatctcccacaatcataatgatgtgatcaggaagacgttgatgagtcctcatgcatgacagttaccctttgcgctgatgtcacgatagctgaacatgaggtggaggagttggggtcgaggataaccgtggtcaacgtagcaattgaggtagccaatgtcaaggcagccacacatgaagtcatgagtgcaaagaggcgtcgtggtgatgacaaagacgcgttgaagcagttgtcgtgtagggggcaatgtcgaggtcgacacaatcagggtcgttgaggacatagacgcaagacgatgaagcaatcgaggtagacgaggtgaaaatggagggtcaatgccaaagtcaatgcagttgagccgcatgaaccgaggcatgtgttgggcttaccagacctagcaacgtgttggggatgaaagcatgtactactattgtcaatactgattgtacaaggtagaaggcccttaccatgcatcaacgccttagggactagcagagatctcaatgatggttgtgatgagcagaacaatagagtagaaggtcctgacgtaccccgtagtggttggaatagacaaagtaggtagagaaaagatgacgatgctaaagatgttgtgctggacaagaagctttgtggtggtagacgagtctaagccaaaggcaagtagtccaagcgaagacgtctgcccaacgacagtggtccgaatgcaaggtacgatggtggtgacagtgctcgatgtaggtggtgaactcaaatagcttgacaaacaccttgtacaaatggattgcacaacaaagattgtgtagcaaagctatcaatgcataggtcatggcgatgtagacgcaacgacgaagcagatacacgggtggcggtgctgtgacccaacgaggcaacacaacagtagccttgttgctcaaagaagatgcgtgtagtactcgacgatggacatcacaagagcctggtggatcgtacacaattggttgtacaaaccgagtatgtgcgaggtggaatgatgattgcagaagtcgggcagaagcatcacaatcaatggtgacaatgatgaattgacaatgtagacttgtggatagggtgaccgagaagcgatgcgggaaggcaccccctaggcattgcataccctgtcaggctgcatagtcgaagatgtagatattggtgtagttgatactagagtaggtacacgcgaggtcgacgagctgtgggcaacttaatctcaatcaatgatcgagcaaacccaagaaaaggtatgagcaaaagcaacaccagattagaactagtgatggcggaggacgacaaggtagcccaacgagaggtgtcctctagcaacacacgcgacatggcccactagcaagtgccctttgcggatataatggatcttgacagtgtaggagggagcggtggtgcagagatgacgtgggtcgatggcgtggtgggttggtaacggtggcggaacgtcgatgtgcatggttggggcgcacctggccctactcgccaccacaatggagcagggagccagggacagtttacggctagtcccggttaccacaacagctgcacgaggacaaggcatggccgacaacggggatctagacgaaggctgcgtgtggagaagaggtagacaatttgctgttgtgacccacgctagaatgacgacaaggttggcaaatcaataggatccagtgcctaaatggtggtgctgcctccagcggaaatcaatctctcgagggcgtgcgatgcggaaggtgtggtggctatgtctaggggctaaacctagacttgtgataggatgtaggagaatagaattggtgaaatattggttgggttgcataaatgcagtgtctcatgggctaatcatatagagtatataggactaaacctcacgtggttagagaatgtggtactattcctatttactctaatactccctccgtcccaaaatatagttctttgtaaccctctttatattcgaatgtgttgggtctatgcttcgtcgccgaaggtcttgtagaaagaagtggtcctcggctgaagctgttagcataagatagccgaagggtcctcttcgtgaagcttcagcattacaaaccgacttaaacatagaatgaccttttagtccataaaggtctgagtcaatgttgtaagcttttataaggggcatacttgtaatttctcacaggctgcgtcctgtgcctataaatagtgaacaatattccgttactgttcacgcattctggtaattgcaatcgcatctctcggaattcaacctttgccaaggcataggtatcattgtatttaatgattcaatatattaagtaaatataatataatgcatctgtgatttattcattcatattataccttttattttacgttatcttacagtgtctattgaaagtttattacgaaggtttaacttcgtaattattctctcatcaaccttcgtccaagactcattatcctcaagggaataatgtttcacggacgaaggacgttaacatttaacactttatgttgccttgttcttaattcatagcgtttgagaacaagtccccaacattggcgcccacctccggtgaactcacttccactttttgagctgatggcttcgttcaacgaccaagctggagctgcttcggacccgaagctggtgctcccgatcacaggtggctcgtcctcagagccagctaacaagaaacaaaagaaggaagcacagagaagggtacagcatgttggggtgcaaggaccctttatcaagtcaagatggtctcacattcctattaccttctcccaagaggaccttcagctcaaagattacccacacaacgatgccatggttatctcttgtgttatcaaaggatttctggtccacaatgtcttggttgacacaggcagtgcagctgacattatatttgctaaggccttcagacaaatgcaagagccagaagataagatccatgatgctacacatcctctctgtggcttcggaggaagacagattgtagcactgggcaagatcaccatgtcagtgaccttcgggttcatcaacaacactagaactgagcaagttgtgtttgacattgttgacatggaatacccttacaatgcaattattggtcgtggtaccctcaatgccttcgaagcaatccttcatcctgcctatctttgcatgaagataccttcggatcagggacccattgctatccatggaagtcaggaagctgcaagaagggccgaaggcaattggactgactcaaaagcaatccataacatagatggagctgaagcttgtgaacagtacaaattcagaagggagaaagcagcttcagcagatcagccgaagcctatgctcttatgtgaggacatagcagagcagaaggtgctgttaggatctcaattatccgaagagcaggagaaaaccttgataaggtttttgttcaataacaaagatgtttttgcatggtcagccaatgatctctgcggagttaatagagatgttattgagcactcgctcaatgtcgatccatccttcagacccagaaagcaaaggcttcggaaaatgtcagatgataaggccgaaggtgctcgcaacgaagtcaaaagactcctcagtgcaggagttatcagagaagtgaagtacccagaatggctagctaacactgttatggtaaaaaaggccaatgacaagtgacgaatgtgcatcgattttacagatcttaacaaggcttgtccgaaggatgaatttccactaccaagaatagactctttagttgatgcagcagcttcttcagagctcatgagtctgttagactgttattcaggctatcaccaaatttggatgaagaaggaagatgagccgaagactagcttcataactccaagtggcacatattgctatcttcggatgcctgaggggctcaaaaacgctggagggagtttcaaccgaatgactgcgaaggttctccaatctcaaataggcagaaatgtgctaacttatgttgatgacatcattgtaaaaagcacgaagcaggagaatcatattgctgatctgcaggagaccttcgccagtttcaggcaagcgggcttaaagttaaatccagaaaaatgcgtcttcggagtaaagaaggggaaatttcttggatgcttggtttcaacaaagggaattgaagctaatccaagtaaaattgaagctatacttcggatggagccaccaactacaaagaagggggctcaaagattgacaggaagattggcatctcttaatagattcatatccagatcagcagagagaaacttaccattcttcgaagtgctgaagtcagctgaagtctttcaatgaggaccaatccagcagaaggcttttgaagagctgaaacagtatttgatagatctaacaacattgactccaccaatgccaggggcttctttattattatatgtggcagcttcgcactcagcggtaagtgcagcgcttgtccaggagaagcttgatgttcaagtcaagaggcaggccccaatatattttgtttccgaggttcttagtttatcaaagaaaaattatacagagttggagaaggtactgtatgctgtcttgatggcctccaggaagcttcggcactatttccaagcttacaacataattgttccttcttcacaacctctgaaggatattatgaggaaccgagaagctactggaaggattggaaaatgggctgcagagctcaatgaattttgtattgaatatgttcatagatcttcgattcagtcccaggcgttggcagacttcattgctgactggacgccaggggctcaggaggaagaaacgaataaagacaacgaagcatggacagtgttttgtgatggatcttggggaaccttcggagcaggagcggctgctgtgttggtttcaccttccagagtcaaaacttgttatgcggcaaagcttgattttagttgcacaaataacattgccgagtacgaagcattgcttctaggtcttcggaagttaaaagcaatgagaatcagaagggccatacttaaaactgattcccaggttgtttcgggtcatattgacaagagttgcaaggctaaggatccgaagcttgaaaaatatctggatatggttcgaagagttgaagcttccttcgaagggttttctgtcaaaaatatccctcgaggacaaaatgagcatgctgatttgctagctaagtcagcagcacagaggctgcctttaccttcggatgtgttcttcgaaacaataaaagcaccttcggtggaacttcttgaaagagcagttctcaacatatctcctgtttatagcgaggattggagaactgagatcatctcttaccttcaggggaaattcctttcagatgacgaagcttataacaggaggatagaggcaagagctcgttcatatgtcatgatagaaggagagttgtacaagcatggagtttgtgctccactactcaagtgtttatccagaaccgaaggtatagagttgatgaaagaaatacatgcaggcctctgtggatctcacattggatccaggccgttacttggaaaaattttccgccaaggattttattggccgaaggcagcttcggatgcagcggaattagttcaaaagtgcgaaggttgtcagaaatgtgcacgagatcaaaaacaaccttcgtccctaacacaactcatacaacccatttggccattgcaaaggtggggccttgacttgttaggtccgttaccaccggctcaagggaacctaagatatgttgtagtggcggtggaatatttttctaaatggattgaggcaaagcctctagctacaataacttcggccaccgtccaaaagtttttctggcagaatattgtttgtcgtttcggggtaccaaaggctatcactgtggataatggaacacagtttgactccgaagcctttagggatttctgtgatcaaattggtacgaagatccattttgcatcagtcagacatccggagtcaaatggactcgttgaaagagccaatggcattataatgacaggaataatgaagtcaatcttcaatcaaccaaggggaaagtggccagatcagttaaccaaagtggtgtggagccataatacaacagcatcaaggtctacaggctttatcccattcaagttattattcggtgacgaagcaataactccagaagaagctaaaaccggatcaataagggtagtagcttcggcagcatcaggctccgaagctgattattctgtggaaaaagatgctttagaagggatcaggttgcaagccgtggaaaacatcaacaaatatcaagccgaaacaattaaatggcgagatagaaaggttcggctaaagaatattgagccaggacacttggtgcttcggagagtggccaacccagaaacagtgggcaagttgcagttgaaatgggatggacctttcttagtagcatcttcgtcaagacccggttcatacagattgaaggatatggacggcaacgacattcctaggtcttggaatgcggatgagcttcggcgatattatgtataactcgatgtaatttttcatattttttatttttctttcatggcacccttttcctttccgaagggggagaaaggtttttaatggggccagcacatgtaatttccttttttagttctataagagcaaaatccctcaaggaatgtaaatgtaaaagctgagaatgcaccatcgagtgccaaaaagtaaaggcgaagaagctccaaagtcgttcctaagggaatgcagagcttacagcgaaaagtcaacgctgattccgccaaaagtaaaggcgaagaagctccaaagtcgttcctaagggaatgcagagcttacagcgaaaagtcaacgctgattccgccaaaagtaaagacgaagaagctccaaagtcgttcctaagggaatgcagagcttacagcgaaaagtcaacgctgattccgccaaaagtaaaggcgaaggagctccaaagtcgttcctaagggaatgcagagctggggtgcgattgtttttaagaaaattatggctatgaatatggcttcggatacgtgtttggccattcatttgcacatcacattacatcatagcatttgcattcataaacattcatctaggcatatgtaggataatcatcttcatggcataaatggttgcttcggcaaaaagaggaaaaagaaggggaagaaagagcttcgtgtacaaaaaggagagcttcggaaataaggaaaatgttgttttctatgcttcgctgcgtacgaaaagaagggaaggtgttttttcgccttcggctcaaaagaaaatttcgtccacatcaaagcatttctcatacatcaatggaaggataaggatatataacaaggtatgaacagaattcattaaagacaagttttagttacatttacaaagttatctcaaaagtttctcaagtattgtctacagtctactatctaatctccaaggagcttcggcttcggcgtcattttttgatcttcggcttcggcttcatcatcctacatgagtaaggtcgttgtaagtcaaaatcaagcttacaggaaaaggtaagcacaaggtatggtttcttactggttcaaggtggctacgagcttcgtctccagccttttctcgcccaccttttgtccatatcatttttacaaatctattcgagatacttcgggcgagatcaggaatgtcatccaggattgatggtgataaagtgaaatttggcctattgacaatctttccatgatcgcagccagccttcaggaaagctgcagcagtgcctcgagaagccacccaggcacagaagtcaccatgcccagctatgacttcgtcgagctcgtcaatctccccctcaatatgttcgaaggttttcggtagatcttcagctgagggggtgaatttttcactgctggctccaactgagtgaaaaatctttcttaatcgttgaatgtatttgttgctaaatcccaagcatttttcttgaagacttgtcagtagctttctcaaatctgaattttgttgagcttcggcttcaagttttgcattaagatcttgtttttctcgttcgaactgctcagactggcggagaagcttcgtgttcagttctgatatttttgcttcagcttccgccaataaaccttcggttgcatggagctcaaagttctttttctcgaaagcatctgattgctcccttattctgctttctaaattttcaattataacttcgtgctttttatcttcaaaatcttgctgcatttgcaaggctttgctcaacagcatactctgcgcgaaaacaaccttcgttagacatgttttcattatcagaaacaataaaagttaagggaaaagtagttcaccttgaagttggaataaaataaactaccaacgatatgttgtcgtcggtagcggctgatgtctgtttctagcttcggaaagccgatactcttggacagagtaccgataaccttggctccggtatgatctcgaatacaatctagcttttcatcatcaacgcctccgaagaggagcgccccgggtttgtatccgcatgatttagcgtactctctaagtttatctatttcagcttttgatagttgttcttcaaccaaattctggaacataaaggtttcgttctccgaagcttcatcagcaatttctttccctttctccgacgctacggtcgcggcctcttcggcggcggtggtagcttcttctgcagccatgtcttctgcagccatgtctagcagcatttggtcaatgtgttcaattgtgctctctaggttcaaatcttcagctgaggcagcttcggcagctgcggcctccgaaggtgcaatttcaatatctgtcccctctgcagccgctggtgttttctgggctggagctcttggcggcgtcttgtcaattacctctgtcacagtgataattctttgtttctttgccttgattgttttcttcgatttttcaggctccttgtccttctgaaaaaactttgtcagttcagggcccagtggacttagcttcgcaggtaaggattcagtcattaccttcagaatttcctcaacaacagcagcagaaggtgatgcgggggtttcttctgcttcggatatttgttgcttcggagaagaagccttcctcttcttcggatttttcttctttaatggttctttttcttcattcatggcctcagttatcctttttcttttttggcccccagcacctttgttcagattttcataatcagggtaatcaaagcccaaggcgtccaacactcgatttagccttcgcttcgggcgggtgccgaaggccgcggtcatcaattgatcttcttttttggagtagttcccaagtatttcgttgcacattacttcaattgtttccagccactcttggcaaggtgttttaaagtatttcttaaatttgaaatagtaaggcaaacgcacaagttcaccttctttctttttccccttcaacttcggcatttcccattcctttaaactaggaaaaactttgaaggccaaaaactcctgaaccaggtcccttgtgctgatatgctctgcaataattctgaattcattcattgcttttttgtgttggaccttcgggtgtcatatcgcagcgaggacgggtttctccgaagattaattcgagtggactctgcacaagcttttccttgtcgtcatcaaccttgacatagaaccactctgatttctagcctgctgcccatttgcttcggtaactaattacaggaaactttgtagttttccgataggcgaagttataacaaccaaaattgtcgtgtaatccatcttttctagccttcgtttgataatgcaactcgtgaacccggcaaaagctgtccgcaaatggttccactgcttggcttcggagtgcccagatataaacagtaagcctaacgatagcgttaggggtcagccggtgaaaatagataccgaacctattcagtacctctgcaataatcccatgtagggggaaccttaatccagcctttagaaagcttttgaaaataacaatttcatccttctccggctttggggtagtctcttctcccccgaagcgcaatagcttcttctgattttcagtaaaaaagcccgattttaccatcttggacagatcggccttcgaaacagtagatttcccaaagtccaagtggctgggtttgcttggcatggcaatacgatagtcatcttcgggatcagtttcctcaatatcttcttcctctgcttcagcgattgcttgttctgcatcatcactaggaatcttttccgaagtcactagcccggatcgttgcatggcttcggagatagggacggtctccgaagcttcagtttcgtccccctcacgctcaaccctggcggtagaacggactctggccatttaactatgaacttgtaaaactttaatactttctttctccgaagcaggcttcaagctggagcttcgttcgattccgacagacaagcttcggcgacggttaaaaattttggcagcaaaacagtgcaaatagcaatgaatgctgtggtaacttcacacctactcgtctgtttatatagtgctgcaggtaagaaggcgaagcgccagaatttttacaccaggcggacacccgctcgcactcgctgcgtggtggaccgcagagactgaacagtaactctgcaaggtggggccgctacacgctgggagattgaatcgtttctcgacaacgagctcagggaaggtgttttttagaccttcggcgatccgaagcttaagagacttttttcacggatcaagctcgttacgaaaaacgatctagcaccgcgaaaggggctactgttgggtctatgcttcgtcgccgaaggtcttgtagaaagaagtggtcctcggctgaagctgttagcataagatagccgaagggtcctcttcgtgaagcttcggcattacaaaccgacttaaacatagaatgaccttttagtccataaaggtctgagtcaatgttgtaagcttttataaggggcatacttgtaatttctcacaggctgcgtcctgtgcctataaatagtgaacagtattccgttactgttcacgcattctggtaattgcaatcgcatctctcggaattcaacctttgccaaggcatatgtatcattgtatttaatgattcaatatattaagtaaatataatataatgcatctgtgatttattcattcatattataccttttattttacgttatcttacagtgtctattgaaagtttattacgaaggtttaacttcgtaattattctctcatcaaccttcgtccaagactcattatcctcaagggaataatgtttcacggacgaaggacgttaacatttaacactttatgttgccttgttcttaattcatagcgtttgagaacaagtccccaacagaatgaatgataatgaatgtactgtactgaacatacattcattaattaatctataaatgtagtttgcatgtattttaggacggagggagtagtttctaattggttgtgacttgtgaattcctcacattatcacctatcagccacctgatatgtcatatcgtattctgttgaatatctcatcatttaggcaaaagagaatcttggc

SEQ ID NO: 846 - DNA, 3349 bp, Zea mays
  Intron number 2 from transcript GRMZM2G070284_T03 (locus G RMZM2G070284) derived from phytozome v7.0 (chr-ID 2; pos 1 53859203 to 153862551)
gactaccggccctccgacagcagcggtgagtgcggggagctcgagcccttgcccgcctccttgactagggttctactcctatggtttcgctttcttcagctccttactagcgaatgccaattccttggctgtgaatatgagtgggctacaaggtcgcgtcctcagtgtggttggatggattttgggggctagggtttgaacttgcctgacgggaggactttagggttagagttatccggaattcacctgttttggggaaatagtcaaacgtcgttggatgttgtggtgaactattgcttaggaatattggtttctgcattagtgaattgagtttctcatggtggatttgggtggtttctgtataattttcagtttttgggatcacgaaaatacaagctgccaaataaaactgcacgatttccttcatatggattgaatttgtctgtttcaacctcattttttttctggacagctggagatttaatggggttttgctctcttggttccctttgtttctgcaaaattgaattatgtatccaatggcgaacatttgatatatggggctctttggagcatggcactctggttgttctcatgagaaatttgtgtctgtacaatacctggctttgtgcacgctgatagtgtctgcagtttatatgttgctgaaatgcctattcagttatgtttctgaaatttaattcggtgttgaatgggttttatgggcttgactcaattaagtccctgtttgctgtttggtatggctcttgggggcgccggctcctcctcccgttcactgtaacgcaatttttgctactatagcaagcagctgttttgcttactgaggcaaaaaatgaactagaaagaagagctgaatccgtgctacagtattcttctgtggcagagctggagctgtgccaaacagcccttaaggatttaccaccttagtatttgggtttgtaaaatgacaaatttttaggtgcattacttcatttaatatttattttttgattagcagccaaaccatgcttgcataatctttagatgtctataacaacttaagcattagggtcataaatttcatgccccgagcttagagcctgattctttagctttcatgttctgggacgaatgataagtgcctgtcatgatgtcatctccaaatagccaatgtaataaagggattgcagagaaaattggtgaagtacctgaagttgccaatctggtaactgataatatcttgttatattgcttattgctagcctgtttgcttggctttaatccgtaccgacttctactgcttctacagtgtttttgtctctatggattacagctgcagcagtccaaacagctggctttaatccaatgtttacaagtcaggcgaccagctggtcgagctagagcagcgaccaggcgcctaatcgcgattagagcgacgattaggtcgactaatcggtcctggtcgacctctggtcgtccgttagtcgtcctatagatttatggacatatgtatatgtatataactatataagcaccacatttctgcaataatataggcataattagtagcagactggcagtaattcagtaaaactgtaaaacatccatccaaagtccaaagtccaaactgaaagtaatataggtactgcagggtgactgctcaaacaaaggtaatctgaactcagggtgactgctcaaacagaggtctgcaggtgcaccttcaggtgctagtgctaccagtggtaatagaaggaagggagactgggagataatcagagaagggagaccaggtgctaccttcagatgacgagctcatcttcaattcttgactagatgacagacgccggagcactggagtactggacgccggtggcagacgctggacggctggagtacttggagcagagacgttggcagaaaccagagaggacagaggagaggagtagggtttactggcggctgggagggtttctggcggctgatttactgctggaggggcgggctactgtagatgggcaaaaaactagagtgaagcccagtaccaaaattgcgacgacaaaaacgaccaggaagctttcgaacagacgactaatcgcccaggtcgacgactagttggacgactaggacgacttgaaatcctaatcgcgtcgtccacctaatcgccctcttccaggcaaccagcccgactaatcgcgattagtcggacgacttgtaaacactgctttaatccgaagcgaacagtcgcatgtgattctcactgctatgttttatcttagcatatcctatatacaaaaaaggacagaactggtgctggcggctcccacatgattgggatctaggggaggaataacctagagaagccttacctttgcatttttgcagagaggccgcatcaaactcaggacctttggtttagtgggaaggcttctcaccaccgtgctaagcctgtccttcatatcctatatacaagagtttgagatttctagcaatgaatgccccaaacgatttttagtagtcacatcaatgtattgattgaggcattgagaatagttcttttttagggcagctaggcagtttacattccaacatcccccaagtgatttggtgtaaatattatgtaagggccaaccaactggattttgatgacctatcttgttctcatggttgttagattattgatttatttaacaaacgtatctagctttttagccattgttgtgagcacctgtgtccaatctgtcacgtaagctgaactatgctgttaaaaatatgcagcctttaagctttttgtaggccttcactgttggtagaaattgcatcattttactatcttggagatttcttcacttccttatttgtttaattggtcgcagtgagtctcagtctttggatattgcactagtcttttttttctcgaacgatattgcacttattcctaaaaaacttcttttgcttttttgaaaattttacaatttaatttggttttgggaactgtgataaggttgagtggtttggtgttggtgtataatttttatacagtatgacttctcgtgcagatgggccattgtgtttagggaagttgtgaaccatttcaatctgtttcctcagaagtagtttgtgctgtgaatttaaaagtagttgctctctagaactgtgaagtgtcaactgataaatattcttgttatgaaatatatacacaactaccatttcttaatcatcaaagtatatttgtcttgctcgcaagatcattttaaatgtgccccatttgtgtattctcctaggaccatggtttttctaaatgctgttttcagtaaatgtcgcgtcctcaattctatgttggttgcaggaactg

SEQ ID NO: 847 - DNA, 32708 bp, Zea mays
  Intron number 8 from transcript GRMZM2G105245_T01 (locus G RMZM2G105245) derived from phytozome v7.0 (chr-ID 7; pos 1 47542182 to 147574889)
ctgcattcagatcctacctttgcacaggctgcagggtatgcttctttagctactagttataactcatcttcagttccaggttggaaataaaagcattgttactagagttttgtttttgttttttctagatagatattgctagagttttactattttgcataaaatcaacttgtttataaatctctatctattgccttgaatcaagagcatacatatatacatatacatacactgggagctttggtttccaaatgttaagtaagccttggccgaccacccctcacctggctggaccgcatcagcgcgcccacccacctcacgccaggctgtcaggtgcgtccctcgcccatgcaccaggtcaacctctgtagggtcgagatgacggactagaaggggtgaatagtcctttataaaactaattatgttggctaatacaaataaatgcggaattaatactattttggtctagccaagactacacacaccttctatactataacaaacatctgacaaaagatcctaattgaagcaactaaggtgccaagttagtgaaagagctctcccacataaatctagttagcaaggtcatacaaatttaggaaactataattctaaacacaccgagggctcctaaacatactagtaagcaaagcgcacaaagcacaagcactactagcaaaactcactagttgcactacaagcacaacgaaatagaaacaactacttagctacacaagctaagcaaaacgaattagctacacaagctaacaagtgagtaactattttacaacaaatatgactagatatacaagagcaacaaatactcactggcatgagtatatgaacaagtaaatacaagctagtgaggaaagttgtaaaccaacggggagatgatgacacttgacacaatgatttttttcccgtggtgtcgatgacttgtcggtcgcccctagtccacgttgaggtagatttaaagcacccaaccgctcctctatcaagtctccacttgatctcttgagccaaattggtcaatgaaccctcaaaccacgattccactagagttgcttttcaccgcttcggcgaggcaagcacaacgcctctcacaatcaccaatgcggcctcttcacaatcttcgttgaagagctcacgaggaaccaccaccaagccgtctaggagacgacaaccttgaaagttccctatttccgggtacaagatctggatgtcgcttagaggggtgaataggcaaataaaaattatcactttaaaacttaaaaacttactctattcgaagtctggatcacagtggaatgaagattgcttcgagtaggtgacagcggaaatgaagtttctgtctcagagtcctgcacttcacaagtaactcataccacagatacgagtatatgaagtgcacacaataataaagagacagagaacagaaacagagacaagacaatagtcacagcacagagtacgcaggacacaatgatttataccgaggttcggccaagcctgaaaatgcttgcctagtcctcgttggagttagccacaccttggcttggagtatcttagtccgtcctccgatgtgctcaaatctgtcaatgtgacagatagagccttctaatattttgatgattgttacaacgttgtcgcggctgcttacaaccttcttgacagcactccgatagagtaactgtcagtacactgaatcaggggtaccccttactacagtatgaaggcgcggagtccatgcggctatctctagtcacgtggcaaaatagcgcccaaaccaccgcgtgggcggctccggggccgccacgtagccagaggagacgatatactccatggtgtcaacaatgggttcggacccccccgggaaagtgtcggacccctggatacacagaccggacctccaggcgaggcctagaacctccacaggtacaaaccagacccctgggactggtcccgtatctctcggggggggggggggtctgggccactcgcaaacagggccctgggattctgagagagggagtacccgagccttaatcaagcccaggcgggggtccggagccgacacgtgtccgggtcatgccgagtactgagagcacctagagggggggggtgaataggtgatcctgtaaaagttcaaaacttaagccacaaaaacttgttaagggttagcacaagtatggccaagtggctagagagaactcaaaacacgataaccacaagaaagcaatcacatagttgacacggtggttatcccgtggttcggccaagtacaaaacttgcctactccacgttgtggcgtcccaacggacgagagttgcactcaactcctctcaagtgatccaatgatcaacttgaataccacggtgtttttctttcctttgatcttttcccgtttgcgaggaatctccacaacttggagtctctcgcccttacaattgagttcacaaagaatcacagagcaagggagggattagcaactcacacacgacacaaagatcacagcgaatacgcacacacaagacccagacttgagctcaaaagactagcacactagaacggagctcaaatcactagaatgtcgaacaagtgcgcgagattgatgtgtgagtgatcaagagtgctcaaggaatgcttggttatctcctccatgcgcctaggggtcccttttatagccccaaggcagctaggagccgttgagagcacatctggaaggctatccttgccttctgtcgtcgggcgcaccggacagtccggtgcataccggacactgtccggtgcccgatttatttccataaacagcgcatccgaccgttgctgtcagagtcagatctgcgcaccgttggcgcaccggacatgtccggtgcacaccggacagtccggtgcttccttccgaccgttggctcggccacgtgttgcgcgccgatcgcgcggccgaccgttggcccggccgaccgttggctcaccggacagtccggtgcacaccggacagtccggtgaattttagccgaagtcgccggagaaaaacccgagagcggcctcttcggccgaggcaacctggcgcaccggacactgtccggtgccccaccggacactgtccggtgcaccaccggacagtccggtgccccagaccgaaacagccccttggctgcacacagccaagtcttctcttctcttcttctttctgtttctaacacttagacaaatatattagtacacaaaaccaatgtactaagacttagaaacataccttttctctagatttgcactttgttcatccatgggcgttgattcacatttaaacacttgtgttgacactcaatcaccaaaatacttagaaatggcccaaggacacatttccctttcaatctccccctttttggtgatttatgccaacacaacataaagcaactagaacaagtgcaagatcacttcaaataaaaactaactttgagttttattcaattttggcatatatggatcatcctttgccaccacttggtttgtttttgcaaatcaaactcaaatctctatctctaagtcaaacacacatgttgaagcataaagagagtcattccaaaagagattgatcaaagatttcaaaaactccccctatttcccataatcaatacttctccccacaagaagccaatttttgacaagaaagacaataaaagagtttaacaacacaaaaactctattctattattttcaaaatctctcaagtggtagctgatccatttatcactttggcctttattttctccccctttggcatcaagcaccaaaacgggattaattttggccttttaaccccattgcctcaccaaagtcttcaattaagagcaaatggcaataagatttcatgagatgaacttggaattagttaccctctcatcggagtgcagtggaagtctttcatggtccaagtccacctgttccctttcaatcctccttcgagactaaatcaagcaaactcaagcaaatggttagtctcaaagggtcaagttgtaacacatctccccctaaacatgtgcatcactttgcaacggacttgtgaggtccagggagtgttggtacaacttgagcaccacaataagcaacaaaatgcagaatgaacctgatcaaatgcataaacacatgtatgctacaattcaatccaagttccgcgaatctaagacatttagctcactacgcaacctgcaaaaggtcttctcatctagaggcttagtgaagatatcggctagctggttctcggtgctaacatgaaacacttcgatatctcccttttgctggtggtctctcaaaaagtgatgccggatgtctatgtgctttgtgcggctgtgttcaacaggattttctgccatgcggatagcactctcattatcacataggagtgggactttgctcagattgtagccaaagtcccggagggtttgcctcatccagagtagttgcgcgcaacactgtcctgcggcaacatactcggcctcagcggtggatagggcaacggaggtttgtttcttagagttccatgacaccagggaccttcctaagaattggcacgtccctgatgtactcttcctatcgaccttacatccagcatagtcggagtctgagtatccaactaagtcaaaggtagacccctttggataccagagcccgaagcaaggcgtagcaaccaaatatctaagaattcgcttcaccgccactaagtgacactccttaggatcggattgaaatctagcacacatgcatacgctaagcataatgtccggtctactagcacataaataaagcaaagaacctatcattgaccggtatgctttttgatcaacggacttacctcctttgttgaggtcggtgtgtccgtcggttcccatcggcgtctttgcgggcttggcgtccttcatcccaaaccgctttagcagatcttgcgtgtacttcgtttgggagatgaaggtgccgtccttgagttgcttcacttgaaacccaaggaagtagttcaactcgcccatcattgacatctcgaatttctgcgtcatcaccctgctaaactcttcacaagactcttgattagtagaaccaaatattatgtcatcgacataaatttggcacacaaacaaatcaccatcacatgtctttgtaaaaagagttggatcggctttcccaaccttgaaagcattaacaattaagaaatctctaaggcattcataccatgctcttggggcttgcttaagtccatagagcgccttagagagcttacacacgtggtcggggtaccgttcatcctcgaagccagggggttgctccacgtacacctcctccttgattggcccgttgaggaaagcgctcttcacatccatttggtacaacctgaaagaatggtgagcggcatatgctagcaagattcgaattgactctagcctagccacaggagcaaaggtctcctcgaaatccaaacctgcgacttgggcataaccttttgccacaagtcgagccttgttcctcgtcaccaccccgtgctcgtcctgtttgttgcggaacacccacttggttcccacaacattttgcttgggacgaggcaccagcgtccaaacttcatttctcttgaagttgttgagctcttcctgcatggccagcacccagtccggatctagcaaggcctcctctaccctgaaaggctcaatagaagagacaaaggagtaatgctcacaaaaattaactaaacgagaacgagtagttactcccttgctaatgtcacccagaatttggtctacgggatgatccctttgaatcatcgctcgaacttgggttggaggagccggttgcgcttcttcctccatcacatgatcatcttgtgctcccccttgatcacacgcctccttttgatgaacctgttcatcgtcttgagtcggggaatgcaccataattgaggaagagggttgatgttgctcatcttgttcctgtggccgcacttctccaatcgccatggtgcgtatggcggccgtcggaacatcttcttcatctacatcatcacaatcaacaacttgctctcttggagagccattagtctcatcaaatacaacgtcgctagagacttcaaccaaacccgatgatttgttgaagactctatacgcctttgtatttgagtcataacctaataaaaacccttctacagctttgggagcaaacttagaatttctacccttcttcactagaatgtagcatttactcccaaatacacgaaagtacgatacattgggtttgttaccggttagaagctcatacgacgtcttcttgaggaggcgatgaaggtagaccctgttgatggcgtggcaagcagtgttaacggcttccgtccaaaagcactcgggggtcttgaactctcctagcatcgtcctcgccatatcgatgagcgtcctgttcttcctctctaccacaccattttgctgtggtgtgtagggagcggagaactcgtgcttgatcccttcctcttcaaggaactcctccacttgaaggttcttgaactcggatccgttgtcgctccttatcttcttcactttgagctcaaactcattttgagctctcctgaggaagcgcttgagggtcccttgggtttcagacttatcctgcaaaaagaacacccaagtgaagcgggaaaagtcatcaacaataactagaccatacttactccctcctatgcttagataggcgacgggtctgaagaggtccatatgcagcagctccagaggtcttgaagtggtcatcacattcttgctgtgatgcgctcctcccacttgtttacctgcttgacaagctgcacaaggtctatctttttcgaaatgcacgttagtcaaacctatcacgtgttctccctttagaagcttgtgaaggttcttcatccccacatgtgctaagcggcgatgccacagccagcccatgctagtcttagctattaagcatgcatctagaccggcctcttcttttgcaaaatcaactaaataaagtttgccgtctaatacacccttaaaggctaatgaaccatcgcttcttctaaagacagacacatctacatttgtaaatagacagttataccccatatgacataattgactaacagatagcagattatatccaagactctctactaaaaatacattagagatagaatgctcattagaaattgcaattttacctaaaccttttaccttgccttgattcccatcaccgaatacaattgaatcttgggaatccttatttttgacgtaggaggtgaacatcttcttctcccccgtcatatggtttgtgcatccgctgtcgataatccagcttgaacccccggatgcataaacctgcaaggcaaatttaggcttgggacttaggtacccaactcttgttgggtcctacaaggttagtcacaatttccttagggacccaaatgcaagttttatcacctttgcattttgcccctaacttcctagcaattacttttctatcctttctacaaattgcaaatgaagtattcaaagcacaataaattgtagaaggttcactcactactttcctaggagcatgaataacattctttctaggcacatgatgaatagcatttctcctagacatatttctaccatgcataacatgagaactagaagcagtcatagcataagagtcataagcatgtgaatcaaacacatcatgacctctaaaagcatttctagaatatctcctatcatggtacatgaaagcatggttcttttgcacattactagccataggggccttccctttctccttggcgggaatgggagccttatggcttgttaagttcttagcttctctcttgaagccaagtccatccttaattgaggggtgtctaccaattgtgtaggcatcccttgcaaattttagcttatcgaaatcattttgctagtcttaagttgagcattaagactagccagttcatcattaagcttggaaattgaaactaggtgttcactacaagcatcaacgtcaatatctttacacctagtacaaatttcaacatgttctacacgagagttggatttatttgctacttctaatttagcatttaaatcattgttgacacctttcaaagtagaaatggtttcatgacaagtagatagttcaaaagaaagcatttcatttcttttaacttctaaagcataggatttttgtgcctcaacaaatttatcatgctcttcatacaacaaatcctcttgcttttctaaaagtatattcttttcattcaaggcatcaattaattcattaattttgtctatcttagatctatctaagcccttgaacaaacatgaataatctacttcatcctcatcactagattcgtcctcacttgaagaagcataggtagagttgcgagtacataccttcttctcccttgccataaggcatgtgtgacgctcgttggggaagagggttgatttgttgaaggcggtggcggcgagtccttcattgtcggagtcggacgaggagcaatccgagtcccactccttgcctagatgcgcctcgccctttgccttcttataatgcttcttcttttccctcttgtttcccttttcctgatcactttcgttatcaggacagttagcaataaaatgaccaagcttaccgcatttgaagcatgatcgcttccccttggtcttagtcttgctcggctgtccattgcgacccttaagcaccgtcttgaatctcttgataatgagggccatttcttcttcattaagaccggccgcctcaatttgcgccaccttgctaggtagcgactccttgctccttgttgcctttagagcaatgggttgagactcgtgaagtggaccgttcaacgcgtcgtcgacgtatcttgcctccttgatcatcatccgcccgctcacgaattttccaagtacttcttcgggcgtcatcatcgtgtacctgggattctcacgaatattgttcacgagatgaggatcaagaacggtaaatgacctgagcattaggcggacgacgtcgtgatccgtccaacgcgtgcttccgtagctccttatcttgttgacaagggtcttgagccggttgtatgtttgagttggctcctcgccccttatcatcgcgaaccgtccaagctcgccctccaccaactccattttggtgagcaaggtagcgtcatttccctcatgagagatcttgagggtatcccagatttgcttggcgttatccaagccactcactttattatattcatccctgcacaatgaggctagaagaacagtagtagcttgtgcattcttatggatttgctcattaatgaatataggactatccgaactattaaagtgcattccactatctacaatctcccatatgctaggatggagagagaataggtgactacgcattttgtggctccaaaatccgtagtcctccccatcaaagtgtgggggcttgccgagtggaatagaaagcaaatgtgaatttgaactttgcggaatacgagagtagtcaaaagaaaagttagaattaaccggtttcctttgtttgtcgtggtcgtcgtccttttgggaagaagaggactcatcgctgtcgtagtagacgatctccttgatgcgtcttgtcttcttcttcttcccatctcttcgcttgtggcccgagcccgagtcattggacttgtcatcccttggctcgttgacgaaggactccttctccttgtcgttgatcacaattcccttccccttaggatccatctcttcgggcggttagtccctttcttgaagagaacggctctgataccaattgagagcacctagagggggggtgaataggtgatcctgtaaaagttcaaaacttaagccacaaaaacttgttaagggttagcacaagtatggccaagtggctagagagaactcaaaacacgataaccacaagaaagcaatcacagagttgacacggtggttatcccgtggttcggccaagtacaaaacttgcctactccacgttgtggcgtcccaacggacgagagttgcactcaactcctctcaagtgatccaatgatcaacttgaataccacggtgtttttctttcctttgatcttttcccgtttgcgaggaatctccacaacttggagtctctcgcccttacaattgagttcacaaagaatcacagagcaagggagggattagcaactcacacacgacacaaagatcacagcgaatacgcacacacaagacccagacttgagctcaaaagactagcacactagaacggagctcaaatcactagaatgtcgaacaagtgcgcgagattgatgtgtgagtgatcaagagtgctcaaggaatgcttggttatctcctccatgcgcctaggggtcccttttatagccccaaggcagctaggagccgttgagagcacatctggaaggctatccttgccttctgtcgtcgggcgcaccggacagtccggtgcacaccggacactgtccggtgcccgatttatttccataaacagcgcatccgaccgttgctgtcagagtcagatctgcgcaccgttggcgcaccggacatgtccggtgcacaccggacagtccggtgcttccttccgaccgttggctcggccacgtgtcgcgcgccgatcgcgcggccgaccgttggcccggccgaccgttggctcaccggacagtccggtgcacaccggacagtccggtgaattttagccgaagtcgccggagaaaaacccgagagcggcctcttcggccgaggcaacctggcgcaccggacactgtccggtgccccaccggacactgtccggtgcaccaccggacagtccggtgccccagaccgaaacagccccttggctgcacacagccaagtcttctcttctcttcttctttctgtttctaacacttagacaaatatattagtacacaaaaccaatgtactaagacttagaaacataccttttctctagatttgcactttgttcatccatgggcgttgattcacatttaaacacttgtgttgacactcaatcaccaaaatacttagaaatggcccaaggacacatttccctttcaagtacgcttcggctccccgctcaggcggagacccgatgctgccacgtggcctaccgccccgtgacgtaagctaacgggcggggcctaacgtaaggcctctaggccacgcggcctctgcatttaatgcggataaagcgcgccgcctgtccactccactggtgggcgatgtgccgcctcagcattaaatgagccctgtccactccgctggcaggtgatgtgctgcctcggcattaaatgggtcctgtccacgccgctgacggacagtggccaagccatcttgtaggcggcgtgcctgtccatcccggtggcaggcggtacgaccgtgccgcgacatacaatgtactcatcatcactcatacgttgctagggaagcttccgcggcacgccaatgctatgcagaccgcagatatcagggcacaaggagattgcactggcgaccatgatcaagtgctccaagtattacatcagttatgtccctggcccgcatgtcggggctcagtatccttgtacgtgccccccttgagctataaaagggagggcacatggcgttacatggggagactcagacacacttagactcagacacacttagatccagctcaggctcacaagttcatacaagctctcaagctcaatacatcacacagtggagtagggtattacgctccggcggcccgaaccactctaaacccttgtgtgttcttgtgttcgttcatcgcttagtagacaggcaaaacgcttaggcccctcctcatcttaggatttagggcgggtgcgttccgccacccggccggagaatttcctctccgacatttggcgcgccaggtaggggctaggctttaggtttttgcttgttttcttgctcagcatgatggtgcaaatcgttgagcaccgcgccgagacttcagagcatttcctggtggaggaggaagctgcttcttccacgccacaggttcccaaccgcctagtgccgggcattgctgctgtgcacgctgcacagcagcatacaaccgcgtagacatctcggactccgtcgagggctgctccgggggcgctgtctgcggccaaggagttactgcgtcaccctccaagctccacggcctcaccaagggccatgaagcagtggtatgacgacgtcgatcgactgctcggcatggcgcactccggctcgaccaggtctaggccgcggtcatcccgacgccaacatgaagcgacggcgtctgtgcgctcaccctcggtgagggctgcacagaccgatgacctccgggcagagctcaaccgcaggcgtgcgggagaggatgcccgggtctctctagagagggcgcgggagcgccgacaaaacttcgagggtcatgaagacgctcgagtctctctagagagggcgtgtgagcgctggctgaacatcgagggtcgcaacctcgatcaagactttgctgcggtagcaccgcagaccctggtgggcgcccggtcccaggcgggtgtccctttggccggcgtgggctgcgtcgcactcgcggatcatctccgcgcggcaacctggtcgtccaagttccggccgcacctaccggaaaagtacgacggtacgaccaacccgtcggaattcttgcaggtgtacgtcaccgccattacgacagcgggtggagacaccaccgtaatggcaacatattttcatgttgccttgtctgggtctgcccggacttggctcatgaaccttaccccaggatcaatctactcctgggaagagctctgtgcgtggttcgcagcaaacttcgccagtgcttatcagcagcatggcgtggaggctcatctccatgtagtgaggcaggagcccggggaaactctccggaccttcatctcccgcttcaccagggtacgagggactataccccgtatcttcgacgcttccgtcatcaccgctttccgccagggggtgcgtgatgaaaaaatgctggagaagttggccatgcatgacgtggaaactgtcaccacgctcttcgctctagccgacaagtgcgccagggctgccgagggccgcgcatggcactcggcaccacagaccggggttgcccagacgggtggctcgggtaccgtctctcaggacggcaaaaagaaaaataagaagaaccgcggctctgagaggccgccgtctgctgctccggtcgtcgcagctgcgactgggggccaaaacgagcgcaacaagcgcccacggtcgcagaggggtaacagcggctcatgccctgtacaccccaacagtcgtcatagcgccgcggagtgtcgcgagatcatcgaactcgcgaagcgcgtcagcgaacagcgcgagcagacctccaaggacggctccccttctcgccgccggcctggcaaggaaagggtcgacagcggcgaggtagctgtggcctgtgggagaaccggacctcgggtaccagtcacccgagggggtcctgaaggatgttatcaccggatactccgactccggcgatgacaagtcgggccaccggggagaccccgtccttcctggtctacggggttgaagcctgtcttcccccggaaacctttatgggctcctcacgggtccagtactttaacaagtctatgcaggaaaagctgtggcgtgaggacgtggaccctatcgacgaacgcagatagcaggcggcgacccgaaatgcacattgcaaccaggcgctcaggcgttaccaccaacggtccgtgcatagtagggagctccgggtcgggacctagtcctacggcgagtacagaaccaagaagggctccgcaatctctcccccagctgggaaggacccttcaaggtgacggaaatatgccgacccgggggaaaccaccttgctacagctagagaattttcctcttcccaacccctggagcatggagcatctccgtaagttctatccataggagcaagactgaggggttgagtttttctcccttatgtaactaggtcgtgcatacgtgcacgccagcccagtgaggtccgccctcataaacccggccggttggcctgcacccatgcatgtcaagttataaagagaagatttacccccccccccccagatgtgcttctatgataactttatcctcctgcaccatggttttatcccgtagtatccagatattatttttatctaacctacccgtacggttcccatcccggctgacatgatgacatctgaattgagtagccaggcttgcagtttaggacccctctgcgaaagcaggagggtccggcagcctgggggccggctctggagaacgggagctcgttccatggagtggtccggagctgcgtagccgcttagcccggttccgtaccctaggcctgcacactccaccactctgtgacgggtaccctagtatttggagctatagtcctgtgggtctggtaacctaaggtccggtcctagagaatggacgcttgtctcctgcggtggtccggagccgtgtagccgcttagcctggtcccgtaccgtaagcctgcacactccaccactctgcgatgggtgtcctagtatctagaaccgcggtccagggggtccagacacacaacttggcttcccagactaaatcctgcaggtcacgtgcctgtatcaaaggatggctagtatcaggcgatggatcctatgggtgtgctactaacgcttcctagtcgaagctgtgttcaggtccaggtctcagttgaggctgtctcctgggggccgcagccaactcttttaggtatgctggtatccagcctcgacacgtcgagcctacatcccaggggggccaggtaccagggaggagtcggcagcgccacacacaacaggggcaaatagtatgcagataagtgctaatactgctcgataagtagtactcaaaagtaccttacaaaagcaaagttattacatccgccttcaagcggggccctagccttatgtctacaggtatgacctactcgacatcagtagggtcgcgctggaagcgcgcggccgccatctccgcgacctcttgtacgacctcccgggcggcgtcttcagcagccaggccagcgatcaccattggaggcggcaccgaagccatcaaagccaaagagatggaggtgcgaaagatggaaccgcagctcagctcgcttcccgccttcacaaggctggtgaacatcctttcctccgaatgctggaggaagaagcgggaaggagcgtcgcccccacggacatcttgcagaggtaggcgatgatggccgcctgaatgatgaagcagggcgtgaagtgctaaggttggaggccgagctcctccagcagcagcatgaagaaagacgagatcggcaacgccaacccgctggggaggttgtagacgaagagcacgaactctccggcggcgagatcgccgtgaggagaggcgccggcacggatccttccggcgaacgccggcaaaccccatccgagcaggttgcgcaccaagttgagtgccacctcgggctggaggcgctcgggagggtctagcaaggccatggtggctacgatggcagaagagcacgaagaactcaagggcgaaagggtgctgcgagtgatgagaatgactaccacgctcggaggagtccctttttaaagaaatattcccccactgacgccacgagacaccgcagaagatctcgcccgacgcgcgccagggtgacccagcctctggcgcggcggcccgggcccacgagtgatgctccttgggcatcggtctccatgtgcgatgaaggcgaaccgtcgtgcctcttcatctccgccgaaagcagcggaccaatctctgacacgggggcccaggcccgcgagtcatactccttgggtgtcggcctccatgtgtggagaaggcgaaccgccgcgtgaggagcacgccgccgcctgcggtggtgcgcctcttcacctccgccgaaaccagcagcggaccagtctctgacacgggggcccgggctcgcgagtcatactccttgggcgtcagcctccgtgtgcggagaaggcgaaccgccgcgtgaggagcacgccatcgcctgcggtagtgcgcctcttcacctccgccgaaaccagcagcggaccagtctctaacacgggggcccgggcccgtgagtcatactccttgggcgtcgccctccgtgtgcggagaaggcgaaccgccacgtgaggagcacgccaccgcctacggtagtgcgcctcttcacctccgctgaaaccaacagcccagtctctaacacgggggctcgagcccacgagtcatcctccttgggcgccggttcctgggtgcagagaagtcgaaccaccgctcgcgccagtaccgcgcctcctcggggctgtcgcagaagacagagaaggtgaattttcaaaaccaatgcagcggtatcgaggcaccccgtgcgtggcccagcaaaaccatcaagtgtggaggccacgggtcagtcaaccgcggggacaggcgtggcagttggcgtgaccgaaggcggactgacagtgattacgtcagcaagcgcacggaagcagcgcgcgagtcgacaatcaatctttggccccacctgcaggctcgtgtcctcccctgaggcgggcccgggggccactgtcggtaccctgaatcaggggtaccccttactacagtatgaaggcgtggagtccatgcggctatctctagtcacgtggcaaaacagcgcccaaacccaccgcgtgggcggctccggggctgccacatagccagaggagacgataaactccatggtgtcaacaatgggtccggacccccacgggaaagtgtcagacccctggatacacagaccggacctccaggcgaggcccagaacctccacaggcacaaaccaaacccctgggactggtcccggacctctcatgggggttcgcgccactcgcaaacatggcctcgggattctgagagagggagtacccgggccttaatcaagcccaggcgggggtccagagccgacacgtgtccgggccatgccgagtacgcttcggctccccgctcaggcggagacccgatgctgtcacgtggcctaccgcccgtgacgtaagccagcgggcggggcctgacgtaaagcctctgggccacgcggcctctgcatttaatgcggataaagcgcgccgcctgtccactccactggcgggcgatgtgctgcctcagcattaaatgagccctgtccactccgttggcaggtgatgtgccgcctcagcattaaatgggtcctgtccacgccgatgactgacagcggccaggccatcttgcaggcggcattcctgtccatcccggtggcaggcggtatgaccgtgccgcggcatacactgtactcatcatcactcatacgttgccaaggaagcttccgcggcacgccaatgctacgcagaccgcggatatcagggcacaaggagattgcactggcgaccaggatcaagtgctccaagtattacatccattatgtccctgggctcgcatgtcgtggctcagtatccttgtacgtgccccccttgagctataaaagggagggcgcagcgggttacaaggggagactcagacacacttagactcagacacacttagatccagctcaggctcacaagttcatacaagctctcaagctcaatacatcacacagtggagtaggatattacgcttcagcggcccgaaccactctaaacccttgtgtgttcttgtgttcgttcatcgcttagtagacaagcaaaacgcttaggcccctcctcatcttaggatttagggcaggtgcgttccgccacccggccggagaatttcctctccgacagtaacagtgctcaagatcttgatcttgctcttagcagcatctttcctctctctaacggcttataattgtgcctctacacaaactaaagagatacacaagagagggagaaaagaattgatcataacgatatatggacttgttggctgcacttgtgtgttcaacagggtgccaagggggtccttttatagccccaaaagagcccctagccgttgccctttccatgcaaaaaagatctcaaatctaggatataattgtcgcttatgcgggggcaacgcaccgtccggcgccagcaccagactgtccggtgctccactagagcccactgtcgtgggatctgattgtctccttccttttgcgccgacggacaccggactgtccggtgcaccaccagaccatccggtgtgttagctagccgctgcctcctgaagaccaccggattgtcctgtgaccgggcatggactgtccggtgcatgggctcggactgtacgtcatttttagccgagagactcgaggctagacagttggctgcccagggcaccggactgtccggtgcaacccagccggcagcccaaacttgtttttttctccttttctttttcactttatttccactcttgggggaatcttcctatgatttagacaatcacatttagagtataaatcaattgatcgagtcctagaagattacctcttttcttatcttctcctagcttttctgtttcaccttaaacagagctctactttctagtaaccgtgtttttcatcttgagtttgatcttgagccttatgacttacaccacataactatagatgagactttattggttgtaagtcatgtccttatgtagtgatccttgatgcaccataactcttcttaactcgatcaaacgtggctttgcaagtcttcttcttcacccctagctttgggttcctcggtctcctttaccttctcccgtgcacttggtacctcgaagctcttcttgcctgcatccttggtttgaccagttgtcttcacgctacgcacaccaagtttcacataagcagtattctacttcagttgtgatgtccataacataaattcagcctttggaccatcactcttgaatactagtgttgagctttacaaactttatactaagtacctgcccaacacttaacatacttgtcggtcctttaattgggttgtcatccaaaccaccaaaaaccacaagagagctttcaaaccttcaagagtaacaagccaacgacctcacttgatgatctccctagtgcctcaaagatcaataacttgatgcaatgcactagatggctctcaatctcactagaatgtgaaagtcgcctagaggggggggggtgaatagggcgaaactgaaatttacaaatataaacacaactacaagccgggttagcgttagaaataaaatcgagtccgcgagagcgggcgcaaaacaaatcgtaagcgaataaacaagtgagacacgcggatttgttttaccgaggttcggttctcgcaaacctactccccgttgaggaggccacaaaggtcgggtctctttcaacccttccctctctcaaacggtccctcggaccgagtgagcttttcttcttctcaatcaaacgggaacaaaacttccccacaagggccaccacacaattggtgcctcttgccttggttacaattgagttttgaacacaagaacaagtgagaaagaaagaaagcgatccaagcgcaagggctcaaaagaacacggcaaatctctcttgctagtcactaaaggcttgagtggaattggagaggatttgatctcttttggtgtgtctagaattgaatgcaagagctcttgtagtagttgagaggtggaaaacttggatgcaatgaatggtggggtggttggggtatttatagccccaaccaccaaacttgaccgttggcagggttgtctgttcgatggcgcaccggacagtccggtgcacaccggacagtccggtgccccctgccacgtcatcactgccgttggattctgaccgttggagcttctgacatgtgggccctccagggtgtccggtgcacaccggacatctactgttccttgtccggtgtgccagtatgggcacgcctgccatctacgcgcgctgcgcgcgcatttattgcaccgcagagagccgttggcgcggaggtagccgttgctccggagtcgcaccggacagtccggtgcacaccggacagtcccggtgatttttagcggactagccgttggcgattcccgaagctagcgagttcctgaggccgctcctccttggcgcaccggacattgtccggtgtacaccggacagtccggtgaattatagcgcgagtgcctccggaaattcccgaaggtggcgagtttgagtctgagtccccctggtgcaccggacatgtccggtggctcaccggacagtccggtgcgccagaccaggggtgccttcggttgcccctttgctcctttgttgaatccaaaacttggtctttttattggctgagtgtgaaccttttacacctgtataatctatacacttgggcaaactagttagtccaattatttgtgttgatcaattcaaccaccaaaattaattagggattaggtgtaagcctaattccctttcaatctccccctttttggtgattgatgccaacacaaaccaaagcaaatatagaagtgcataattgaactagtttgcataatgtaagtgtgaaggttgcttgcaattgagccaatataaatacttacaagatatgtatggattgtttctttcttatataacattttggaccacgtttgcaccacatgttttgtttttgcaaactcttttgtaaatctttttcaaaattcttttgcaaatggtcaaaggtaaatgaataggatttgcaaagcattttcgagatttgaaattttctccccctgtttcaaatgtttttcctttgacttaacaaaactccccctaaaggagatccacctcttagtgttcaagagggttttgatatacatttttgaaaaactaattttctcctccttttgaacacaataggataccaattgataaatactcttggaaagcactaaattggtggtggtgcggtccttttgctttgggctcttactttctccccctttggcattaatcgccaaaaacggaatcattagagcccatttagtactatcttcccctttggtcataagtaaatgagttaagattataccaaagacgaagtccggtccttttgctttgggcttttactctctcccccaaagacaaggtccttttcttggagcgatggcgagggatgagttacggagtggaagcctttgtcttcgccgaagacaccaattccctttcaatatacttatgacttggtgtgaaatggacttgaaagacacattagtcatagcatatgaaagagatatgatcaaaggtatataaatgagctacgtgtgcaatctagcaaaagaaattgcgcgaatcaagaatattgagctcatgcctaagtttggtaaaagtttgttcatcaagaggcttggtaaagatatcggctaattgatctttagtgttaatataagaaatctcgatatctcccttttgttggtgatccctaagaaaatgataccgaatggctatgtgcttagtgcggctatgctcgacgggattgtcggccattttgattgcactctcattatcacatagcaaagggactttggttaatttgtaaccatagtcccgcagggtttgcctcatccaaagcaattgcgcgcaacaatgacctgcggcaatgtactcggcttcggcggtggaaagagcgaccgagttttgcttctttgaagcccaagacaccaaggatcttcccaagaactggcaagtccccgatgtgctcttcctattaatcttacaccctgcccaatcagcatccgaataaccaattaaatcaaaagtggatccccgagggtaccaaagcccaaacttaggagtataagccaaatatctcaagattcgttttacggccgtaaggtgtgattccttagggtcggattggaatcttgcacacatgcaaacggaaagcataatgtccggtcgagatgcacataaataaagcaatgaaccaatcatcgaccggtataccttttgatccacggacttacctcccgtgtcgaggtcgagatgcccattggttcccatgggtgtcttgatgggcttggcatccttcatcccaaacttgtttagaatgtcttgagtgtacttcgtttggctgatgaaggtgccctcttggagttgctttacttggaatcctaagaaatacttcaactcccccatcatagacatctcgaatttctgtgtcatgatcctactaaattcctcacaagtagattcgttagtagacccaaatatgatatcatcaacataaatttggcatacaaacaaatcattgtcaagagttttagtgaagagtgtaggatcggccttgccgactttgaagccattagcgataaggaaatctctaaggcattcataccatgctcttggggcttgcttgagcccataaagcgccttagagagcttatagacatggttaggatactcactgtcttcaaagccgggaggttgctcaacatagacctcttccttgattggtccgttgaggaaggcacttttcacgtccatttgataaagcttaaagccatggtaagtagcataggccaataatatgcgaattgattcaagcctagctacgggtgcataggtttcaccgaaatccaaaccttcgacttgggagtatcccttggccacaagtcgtgctttgttccttgtcaccacaccatgctcatcttgcttgttgcggaagacccatttggttcctacaacattttggttaggacgtggaaccaaatgccatacctcatttctagtgaagttgttgagctcctcttgcatcgccaccacccaatccgaatcttggagagcttcctctaccctgtgtggctcaatagaggaaacaaaagaataatgttcacaaaaatgagcaacccgagatctagtagttacccccttatgaatgtcgccgaggatggtgtcgacggggtgatctcgttggattgcttggtggactcttgggtgtggcggccttggttcttcctcatcctccttttcttgattatttgcatctcccccttgatcattgccatcatcttgaggtggctcatcttcttgattttgcctttcatcaacttgagtctcatcctcattttgagttggtggagatgcttgcgtggtggaggatggttgatcttgtgcacttagaggctcttcggattccttaggacacacatccccaatggacatgttccttagcgctatgcatggagcctgttcttcacctatctcatcaagatcaacttgctctacttgagagccgttagtttcgtcaaacacaacgtcacaagaaacttcaacaagtcctgaggacttgttaaagactctatatgcccttgtgtttgagtcataaccaagcaaaaagccttctacagttctaggagcaaatttagattttctacctcttttaacaaagaataaagcatttgctaccaaaaactctaaagtatgaaatgttgggctttttaccggttaggagttcatatgatgtcttcttgaggattcggtgaagatataaccggttgatggcgtagcaggcggtgttgaccgcttcggcccaaaaccggtccggagtcttgtactcatcaagcatggtccttgccatgtccaaaagagttcgattcttcctctccactacaccattttgttgtggcgtgtagggagaagagaactcatgcttgatgccctcctcctcaaggaagccttcgatttgagagttcttgaactccgtcccgttgtcgcttcttattttcttgatccttaagccaaactcattttgagcccgtctcaagaatccttttaaggtctcttgggtttgagatttttcctgtaaaaagaacacccaagtgaagcgagaataatcatccactattgcaagacaatacttacttccgccgatgcttatgtaagcaatcgggccaaataaatccatgtggagtagctcaagcggcctgtcggtcgtcatgatgttcttgtgtagatgatgggtgccaacttgcttcccggcttggcatgcgctacaaatcctgtctttctcaaaatgaacatttgttagtcctaaaatgtgctctccctttagaagcttatgaagattcttcatcccaacatgggctagtcggcgatgtcagagccaacccatgttagtcttagcaatcaagcaagtgtcgagttcagctctatcaaaatccaccaagtatagctgaccctctaacactcccttaaatgctattgaatcatcacttcttctaaagacagtgacacctacatcagtgaatagacagttgtagcccatttgacataattgggaaacagaaagcaagttgtaatctaatgaatcaacaagaaaaacgttggaaatagaatggtcaggagatatagcaattttaccaagacctttgaccaaaccttgatttccatccccgaatgtgattgctctttggggatcttggtttttctcatatgaggagaacatccttttctcccctgtcatgtggtttgtgcacccgctgtcgagtatccaacttgagcccccggatgcataaacctacaaaacaagtttagttcttgactttaggtacccaaacggttttgggtcctttggcattagacacaagaactttgggtacccaaacacaagtcttggagcccttgtgtttgcccccaacaaacttggcaacgaccttgccggatttgttagtcaaaacatatgatgcatcaaaagtcttaaatgaaatgctatgttcatttgatgcattaggagttttcttattaggcaacttagcacgggttggttgcctagagctagatgtctcacccttatacatgaaagcatgattagggccagagtgagacttcctagagtgaattctcctaattttgctctcgggataaccggcagggtacaaaatgtaaccctcgttatcctgaggcatgggagccttgcccttaacaaaatttgacaatcttttaggaggggcactaagtttgacattgtctcccctttggtagccaatgccatccttaatgccagggcgtctcccattataaagcatgctacgagcaaatttaaatttctcattttctaagttgtgctcggtaattttagcatctagttttgctatatgatcattttgttgtttaattaaagccatatgatcatgaatagcatcaatatcaacatttctacatctagtacaaatagtgacatgctcaatggtagatgtagatggtttgcaagaattaagttcaacaatcttagcacgaagtatatcatttttatctctaagatcggcaattgtaactttgcaaacatcaaaatctttagccttagcaatcaaattttcattctctaatctaaggctagcaagagaaatgtttaattcttcaatcttagcaagcaaatcatcattattacctctaggattgggaattaaaacattacaaacatgagaatcaaccttagcatttaaactagcattttcatttctaaggttgtcaatcatctcacggcaagtgcttagctcactagacaattttttacatttttcaacttgtagagcgtaagcatttttaaccttaacatgtttcttgttttctttaattagataatcctcttgggagtccaaaaggtcatccttttcatgaatagcactaatcaattcatttaatttttctttttgctccatgttaagattggcaaagagaacacgcaagttatcctcctcatcactattattatcatcactagaagactcatatttagtggaggagttagatttaaccttctttcgtttgccgtcctttgccatgagacacttgtggccgacgttggggaagaggagtcccttggtgacggcgatgttggcggcgtcctcgtcgtcggaggagtcgctagagctttcgtcggagtcccactcccgacaaacatgggcatcgccgcccttcttcttgtagtatctcttcttttctctcctcttgcccttcttgtcgttatccccgtcactgtcacttgataatggacatttagcaataaagtgaccgggcttaccacacttgtagcaaaccttcttggagcgggacttgtagtctttccctctcctttgcttgaggatttggcggaagctcttgatgacgagcgccatttcctcattgtcgagcttggaggcgtctattggttgtcgacttggtgtagactcctcctccttctcctccgttgccttgaatgcaacgggttgagcttcggatgtggtggcatcatcaagctcgttgatcttcctcgagccttcgatcatgcattcaaaactcacaaaattcccgataacttcctcgggggtcattttagtatatctaggattaccacggatcaattgaacttgagtagggttaaggaaaataagagatcttagaataaccttaaccatctcgtggtcatcccactttacgctcccgaggttgcgcacttgattcaccaaggtcttgagccgattgtacatgtgttgtggctcctcccctttgcgaagtcagaaccgaccgagctccccctcgatcatttcccgtttggtgatcttagtgagctcgtctccctcgtgcgcggttttgagcacatcccaaatttccttggcgctcttcaacccttgtactttgttatactcctctctacttagagaggcgaggagtattgttgttgcttgagagttgaagtgctcgatttgggccacctcatcctcatcatagttctcatcccctaccgaaggtacctgtgcaccaaactcaacaacatcccatatacctttgtggagcgaggttagatgaaatcgcattaaatcgctccacctagcgtaatcttcaccatcaaaagttggtggtttgcctaatgggacggaaagtaaaggtgtatgtttggaaatgcgagggtagtgtaggggaatcttactatacttcttgcgctcttggcgcttagaagtgacggagggcgcatcggagtcggaggtcgatgttgatgaagtgtcggtctcgtagtagaccactttcctcatcctcttgtgcttgtcgcttttccgatgcggcttgtgggaagaagatttttccttcttctctttgtggtgagaagaggaagactttttctccttccgtttggaggagtccttcttcttctccttccccttggtgcgggactcttccgatgaagtgctcccgtggcttgtagtgggcttttcgccggtctccatttccttcttggcgtgatctcccgacatcacttcgagcggttaggctctaatgaagcaccgggctccgataccaattgaaagtcgcctagagggggggtgaatagggcgaaactgaaatttacaaatataaacacaactacaagccgggttagcgttagaaataaaatcgagtccgcgagagcgggcgcaaaacaaatcgtaagcgaataaacaagtgagacacgcggatttgttttaccgaggttcggttctcgcaaacctactccccgttgaggaggccacaaaggccgggtctctttcaacccttccctctctcaaacggtccctcggaccgagtgagcttttcttcttctcaatcaaacgggaacaaaacttccccacaagggccaccacacaattggtgcctcttgccttggttacaattgagttttgaacacaagaacaagtgagaaagaaagaaagcgatccaagcgcaagggctcaaaagaacacggcaaatctctcttgctagtcactaaaggcttgagtggaattggagaggatttgatctcttttggtgtgtctagaattgaatgcaagagctcttgtagtagttgagaggtggaaaacttggatgcaatgaatggtggggtggttggggtatttatagccccaaccaccaaacttgaccgttggcagggttgtctgttcgatggcgcaccggacagtccggtgcacaccggacagtccggtgccccctgccacgtcatcactgccgttggattctgaccgttggagcttctgacatgtgggccctccagggtgtccggtgcacaccggacatctactgttccttgtccggtgtgccagtatgggcacgcctgccatctgcgcgcgctgcgcgcgcatttattgcaccgcagagagccgttggcgcggaggtagccgttgctccggagtcgcaccggacagtccgatgcacaccggacagtccggtgatttttagcggactagccgttggcgattcccgaagctggcgagttcctgaggccgctcctccttggcgcaccggacactgtccggtgtacaccggacagtccggtgaattatagcgcgagtgcctccggaaattcccgaaggtggcgagtttgagtctgagtccccctggtgcaccggacatgtccggtggctcaccggacagtccggtgtgccagaccaggggtgccttcggttgcccctttgctcctttgttgaatccaaaacttggtctttttattggctgagtgtgaaccttttacacctgtataatctatacacttgggcaaactagttagtccaattatttgtgttggtcaattcaaccaccaaaattaattagggattaggtgtaagcctaattccctttcagaatgcaatcccaaccaatatgagtgagagagagggagaggaaaggctccaatatgctcacaagtgttccaaatggcctccttaacctttttaacccgggcaacacaagtatatatagccccctctccaaaactagccgttataggccaattgccccttttttacgcacaagcggacgctctgcaattcaaacccagaccgtctgcacaagaatcccaacggctataaacaactataaaaatgttagagcattcaaaaatgacttgtggacggtctgcccctcaaggccggacggtccacgatacataaaaccgagccaaaccgaagttttgctgactctgcacatttgctgaaatttgtactatggatggtccgcacctagaccccggatggtccgcaatacaaaatatttgtactgaggatggtccgcactcaggccccggatggtccgcggttcaaaaatgaaaaccaaaacagaacttcccgagttctgtccaaacactagtccttcaactgcggacagtctgccaccgaggaccagacgatctgcagtacaaaaactttgcgaaacacagaaactcctcgtttctgcccatcacctcaagttagacctatggatggtctgccatgctggcccggacggtccgcagtacctcaattcagcgcatattcaaaaatcgcttttgaatgagttttatttcaaaaatcaaagcgttgttagcccacatgcagatggatcaactatatattctatgaggcactaagaatctcatcaagaagacattattgacccctcttgatagtacgactatctagcctactaatctggtcaatattcttctctaaacaccttttgaccggcaaaagaaaaaacctatcttttacctttgccttgactattcaattccatcttccttaaatgatgtacaatggtcatccataagtgtagccaaccatgctatcttttaccatttgtccgtagcatgaagttcttccatcatcatcaagccacttgatcaatagcctagatcaacacatggcttgataacactataatgatatgatccactccatgttatcacatggccttcttggttcatcaatctcaacatagcttgctcttcaccgttgctttatgtccattggtgccaagtccttgctcttgcttcactgccacgcagtccctcagacacgagcctctaacttgcccttcacactagccactcggtccattgaagtcaagccatatctcttgatcttctccatatagccacatgacaccatgtcatgtcttcatatgcaatgagctcctttatcacactagttgagcatctcaatatcaccaagccacatcaccaccgtggtttaaatagctcacactagtgtacctgtggactaaccacatgtgtatatcaacataaacactttttggtccacctaagttatcaatcaattaccaaaatcaaatagggtctcacaacctcccccacgtgcgttaatcaaactcctggtccaacaaccaagcttccgcgtgggacgtaagccataaattgtggttctgttttttttgcgtaaatagcgtaaatagtccacggaaatagtgtaaatagttcacagagatagtataaaaaccctgtgcagccactagaccacgtgcacatgcgcaggtgcatgcatgcagattttattcttatggtagatccaataattatggcagatcgtgggagttttcattgcatgtatgtaaatttcggatgacattttcgtttgcattgcatgcatgtaaaacttggatggcttcataaatataggatcgctccaacaaccatgcaactagactcgttagaactagtttatgatatttgctgatactaattatgctacatggtgtaggtatttatgcaatttggtgcactgcgtaaaaatcagtttcctactgcatgcacataaatttaggatgacacgaatatgcgatgaatggaaattgattggcatgcatggaaacaataaaatcttattttaaatgctacattttcctccatgaatataggatcgctctaacagccatgcaacgagactcattgcaaccagtttatgatatatatcgatactaattatgctacatggtcttggtatttatgcaatacaaaacgctacataaaaaactgccacgtggtacactggaagacgcatctccagattcgagcgtaaaaaccttaagttttgagcgtaaaaccactcagttatgtgcataaatatcgagtcatgtgagagaggttgataactctggtgcgttgtattcacgatcctatttttatggtagattcaaaaaattatgggagttgaaaccatgcggtttttatttttatgcagattcaaaaattatggcagatcgtggtagtttcattgcatgcgctaaaattttggatgatattttcgtttccactgcacgcatgcaaaaaataggatgacatggttcacgcatagcataatttcttatacaaagtcgcataaatataaacatcgtataacataattgataaaaaaacctaatatcatttcaactaacagctcccgcgggaattacggacaattttatggcaacataaaatcgtattcatcgtcataaaaatcatcactagaatgcataaatagtgtaagtagcagtcataaaacataatcatcgattacataaacatggatatgatagttcgtcgccagaggacgattccaaggtcgatagatcaaaggacgccgccgaagccaccggatcagaggagttggtcatcgaaggacgccagagccacccacgcctcgctcggccgtcggagcgacccgcatctcccgtggccaccgccgccgctgctgacgcctaccgcgcctcatgcaaccgtcgttgccaccggacctggggtgcgtcgtcgccgctcgtccgcttcgggagcgccgtcgccgcttgcccggttgcctcgagagcgccgctgtcggtcgatctttgtggagcgccattggcccccgggatcgccgccactcgcacgaccgagggaaccgttgccgccgatcgcatgccctagaaaccagtggcgaagctagagcaaaattgaggagggtgcaattaccttatggatgcataaacatcatgtgaagggggtgcatataaggtgaaaatttgatcattataactagttctgtattttttagggggtgcatctgcaccccctaaattgaatataggttcgcccctgctagaaaccgccgccgcccgttaaaacctaatccttggtggcctagagatatttttatagtcacctgaaccttgttcggctgaaccggatgacaccattggactagtgcttactctagtaattgaaagcccaatactttatcaccagttaaccaactaatcctggcgttggttgttgctaagtaactgcagctgctgttcccgtgatgtgaatcatcatatcctcaggccgaagcatataacaaattaatgcagtttttctgatgctgaagtaatgtcaatttcatattactgaggctctctccaaccgtttacctattctcgtctcctattttaaacttctcactataaacaacgttttatacgaccatataaacgatctgctcctccagctggccataagcctaagttggtagtcggtaggactatatacaaaatggtggagtttttgctccatttctggatggtctctatatttacgactgcctgtgctcttcaactccctagcatttcccgctctggtcttacaaatgtatttgtacgtctatccgatccatcttgcatggacaattgtattttaaagggatgtacggtttatatgaactaattttatagtttctaagttgttaaacacagagactaaaagagagattatctttattttagtctctgtgtttggcaatttagggactaaaatgaatggactaaaaattatttcctagaaaccaaacaccccctaaaacagattaacctatacttaaaacttgaaggtttacacgcccaata

SEQ ID NO: 848 - DNA, 1548 bp, Zea mays
  Intron number 1 from transcript GRMZM2G384339_T01 (locus G RMZM2G384339) derived from phytozome v7.0 (chr-ID 5; pos 8 90484 to 892031 reverse strand)
acttctcctcgttcgtcaggcagctcaacacctacgtaagtcaccgcatacccgctgacgctacgctcgcgctgctgttcgttatatctggctgcgcacaaatgggatgtcacaaatccggaaggtacgctactaaagagtggaacgatgtacggtgttaactcaactgaacggtagcttctacgtactttgctttgccagcttttacttcgatggctggatcagcacgaccgtttattagctctgaatatttggtactgcctgatatatatttcttcaagtcaaatgtgagcagaacagctatcgcacctgcttttatatgtccgcttacctacacttacttggaatgagaatcttcttcacatgctgaattacatgattcacctgacactttattgtgtcatttgttcagcaggctcttgaacttcgccatttatcaaattgagcaccatctgatttaaagtcagatttgtctggttgagatggtggcatcatttttttttggggtctggtagtacctttcctaaaataatgtgcttgttggatgcttccgttcgctttccttctttacctactagactagactcacctcgtggcctaagcacatgtgattgattagatctgtatgtcaccttctccattttatgctcaacatgtatttgctagtcacctaaagaattcataaattcagttcagcatatgatccattgtactagatttgtcacattatgtttgagtacatgtgccttttaggtacccattctcttaccattcaaggttacacctcaaaacatggttcataaccataaattcagcatttctatgctagaatattattcatgtatatccattatgcctcagaatttatgagatgccaatgcatcgagacatggaaacagagactgtttctgttgcacgtttactgccactcacattcaaactatttctggtgcctcgtgtttagtagataataggtgccacttagaacaaagtttgtgagcttacttgcacataaaccatgaaactgttctttctcagctaaatgtgtttcttgcccgattcagggtgtactatctcatcatctttatgataaaccattctttaggaatttacatttagtttgcaaatgatttttaggtgttttgatcaggtctaaatacaataaaactgacagaatatgttaccgccagacattttgcagcaacaagcagtcagttcataaccctacagagttgtaaaagttcaaaacgatgctatgtagagcatatgctaatttgttctttcagtttgtgagttagttattgccctggattaggataagtcgtgttgatttgacatttgtgtgaacatccggtgaagcactatatgtgtcattcagaccatctttatatggttgtagtttgtacgttgttgacgtgatttccttaatttgatttgcactcagctgacaatcgggagagattattttctcagctaacaattatattgcgccctaacgatctcatcggtgccttcttaccaggggtttagaaaggttgatccagacag

SEQ ID NO: 849 - DNA, 13638 bp, Zea mays
  Intron number 1 from transcript GRMZM2G104739_T01 (locus G RMZM2G104739) derived from phytozome v7.0 (chr-ID 4; pos 1 22539016 to 122552653)
cgtcgattctccctggacgatctcaagcgccctcgttgtcggtgttttgggtccgaccgcacacccggggttgcccctcaaggtgttttaggagtaggacggtgtcgccgactgtagataaatggttcgtgccagatgcacgaggaacaatggacagtgtttataggttcgggccgctttgagatgcgtaacaccctacatcctggcgagtatgctttatgtaatgggttacaagggagctctctaagaacgtagagagttggggtggatggctgagtagtgggatcgattgttctgaagggatgccccctaggccttatatattcgaccgtgaggcaatacatgtggatacgataacaatgtgcacctaaaagatagtgaactgtttgagtctatcttcctatagttctgccgacttatcttcacctggctccgttgtacagggttccagcgcgggaaagtcgggtcttctgttgtggtttcttgctcaacgttgtcgggccattcgggctcgcaccgatctggccttatgtcgatctgctttactggtcgctcctccccaggcccatgaaggagtgaccttacgatttattgggcccttgggcctttcgtgaggtcttttatccttccagtggaaccgggggatatctgtcccccacaagcccccgatctttgggttgattttgagataatcggcccaaggatcctaggtccagcttgcggtcttcgtttatgacaagaaatgctttccgggcagtttggtaaaaacgatttcttactgtctccttctactttgatcactcgaaaactggagctttatctcatactcatgccttggagatcggcatttcgtattgtaggaccctgaacttcattgggtgcaccggaggtgcacccaatgggtgtagcccccgagcttcgagtggattttggaaaataatccactcgaaggtcttcatcagaaatcatttttattttccacttgcactttggttggaggtcagccttgtctttaatcttgccttatgccttagaagttggcattgtcttgacttgaaatggtgattcatggggtgcaccgaaggtgcacccaatgggtgtagcccccgagctttgagtggatttttgaaaataatccactcgaaggtcttcatttcgtatccttttgctgagagtcatcttttctttttttcgaatgccttagaagtcagcattatgtcatcgatattatgctttagaggtcagcattatgtcatcgatattatgctttagaggtcatcatgtattttgtcttttgcggccgagctcgtgatccgcccatatcttgctaggtggtgcaatttatttgctctgcgactgattggacgtttgatggacgttccctggctagtcttcacgtcgcttctgtcggtcagattttgtctctcccccggcgtcgtctgacgattcagacgactcccaagggcttgccgcggaggtctggacttatatccgggtcgtcgagcgctccgggctcgagggctcggatgagtcggagtactcctcggatgaggaggactcgtccgaggagggcggtggcggcgatggcggagacgacgacgacaacgacgaaggcgacggtgacaatggcgacgatgacggcgacggcggcagcaggggcagcaacggcggcagcaagggcggcatcggcggcagcagcaggggcagcaacggcggcggcaacagcaagggcagcaacaaggccagtggctagatgccactggtctttagatgttagtataggttagaagtagtataatgaaataatgtagtagtatttagtagtgtagagtagtatagtgtagcgtagtagtagtagtagtagcagtagggaagtatcaactcataatgagttgatttgtaagtactgtaacttcccttaatgaagaatgatttcgtttccttctgtgtcgattattttgcttcgtagtcagttgatctctgtcgtgatatttattgcccgtgatgttctctatctgttatgtttgtggcataacttagagttcttgaatcattcctccgtttgccttatttgtgaaattgattcctctggaatagtgactgagtaactcgggcgtcatatcgttgcttttaggggtgatggccgagctattattgtcagcatctacgcttttgaaatagcgtccgagtgatgacgaaaccacgccagcgtcggaatgattgatgaccacgtcggcgctcttagaggtaccagccgagtgacttatgacgacattggcgttttagaggtaactaccaagcgactgaaaatgacgtcggcgttttagaggtaactgccgagcgactgaagacgactacagcgttttagagataactgccgagcgactggtggtaacgtcggtgttttagaaataacagccgagttagaatgggctgcgtcggccaatttgaggataatagccgagtgatgatgtggcataccggtgttttagaagtaaccgccgggtgatgacatggcacgccggtgttttagaagtaaccgccgggtgatgacatggcatgccggtgttttagaagtaaccgtcgggtgatgacatggcacgccggtgttttagaagtaaccgccgggtgctgactggccgctttttggaaacggtatctgactcgggaatatcccataagtactgcgctttcagcggcctctgctttccgcaccctagttcttgctttcctgcctccagatcctctctgcaattcggctcccgatctgttcgctagtggagttgagatggcgcccaagcgaaaggcctcgagttcatccgctgcggtgattccccccatcgaccccaacagccagttgcctttcgcaggtaaccatatgtctgttgtctccgagcctgaccttctccatctcgtgtccatcgaggtccttcccccgagggagctctgttcttggcggatttgccatagggtcactgttccgacagaggatacccatgaatccgtgatttatgttccttttcttctccgcggtctcgctcttcctatttctccctttttccgcggcctccttgatttctatcgtcttaatttgacacatctgaatcccaattccattctgcaaatttccatttacgttcatttatgtgaagcttttcttggcgtcctgcctcattttggactgttgaagtacttgtatcactgtcgccctgggatggccggggggcagcatcagctggttgggggtgctagtttggagatgcgccgtgggaggaagactgactatcttgaaatccctctcaaggatagtatcaagggatggcacttggagtggtttattgttgagaaccatggaagttctctcccccaacggtcggggagacagccggatgtccgcactccgagttggactgagaccccacggatcaggaggtggctaaggcaggggctttgctagctgaagttggactgctgaaggagaggggtctgactgcagagggtgtggttgctgattttgttttcaagaacattcagccgttgaaggatagggcatacccaacttatctgtaccaaggtctagctgactcaactcgggttaccaacagaagaattcccactgtagatttggtgaaccgacttgaaatgattcttagaggcaaggtatcaaatgttggcgccccattggcatactcagcctggaacctgcccccttccaaggccttcactctttttgtgtcgaatccacctgtcgctgatggcggtttgggccttagagtgcgaccctctactgaagaagttagcgctttggttgcctcgctcggggaaattcctgatgatgaacggcaggtccactttgaggtgcctttggatcctagtgatgcagagataagtgctatgcttgatatgctggctgaggactcttctgatgctgctcctgctgggacattggtggtggcgcctctcccagaagctggtacaaccttggatattcagagacctgtcagtgttcgcccgagacgcccttgccgagccaatcaacttgattctcctgctgatgagcagaaaaagaaaaagagacgtcttcggcgagtatctagtttggatcgggacgttggtccttcggttcctctgctgctgaggaagtgcttgtgcctgagtttactgacgctgaccccaatgggtgtgctccatctgctgctgatcccaatgggggtgttgtttgtgttgctgatgaaaacgatggggaggaagaagatgaggtccctttgactcggaagaacagtcggcagtatgtcgccagtggggaaagtagtggagttccttctcctgctctgtctgccctcattggtctacaagaattgtccctggcgaactttgatcagactcttgaagatatggttctagaggatctgttatcagagccagcggatcatggtgcgacggatgtttgtgctgatgtgctcgaagctgggttggggtcatcccgggcagcgtcccgcgcctcatcgaccttagagcgcagtcttgagggtcaggaaactgacttggatcgtcttgttcccattgaagtaactgagggaccctcagccttagaggcggctattgccgagaacttggtcctcaaggatggtgttgacacttacccagcccccgaggatgttgccggggatgattcggctcgggtgggaagcgcaagccactgcctagcccccgagggtactgccggagatgatccggctcaagtgggtagcgcaacctatggcccaggccccgagggtgtccgagcggggtctccctcttgtacttccatggatgttcacgcgggatctcctcacactctggttgcatggtggtagcccaagctttgggccagggagtcgctttagaggctagcgttcccgccgaccaagttttgggctctgttgatggcactgagttggttcctgctggttcattgtgagctgcttcgggtggtgaccctatgccaagtcatcaattgatctctcacgatttgggagtcccttcattcttctccaacctccaggtactgtgatatattctagcctgacttctaccccgtacgaactgttgtcattacactcatctgttctgcatatcaggcattggtggatgggatggctagtcagctgaggttgcaaggtgcttctgttcccgaaggagcttcgtctctggcacgttggaatccggtgttgcttcaacatcgtgtctctgacttggaggcgacaaatgctggttagtgctcttttgcttctcttcgtctaccttattgaactgctttacactttgaccctttttgcttgattgtctctcgccagatatggctcagcagatttccgttcttgaagaaaaacattctcaaggttaggccgaactggtccggcggtgttctgattttgaggaaaagtattctcaaagccagactgagctggcccaggtctctgctgctctaaatgacgctaacacgctgaactctactcttcgcgctcaacttgattctgaaaaggtgacttatgaaactgtgccttgtattgatgtgttcttattgcttgcttgatgtttgaaggagttgattcttgtttgcaggaagaaaaatgtgcccttgttgcttctcgcgacaatcttgacagactatattgtgattctagcaactcgttgaccatcctggagaggagtcatcgcttcaccatggaggagttagacaaccatcgctgtaagctgcaggaatccacggatgacgtgatccgtctccggcagttgatatcgactaaggatgctgctatcaaagaactccgtgcttccaagaagtccatcgcccaggagctagagaccgctcagttggctgccaaagttgctgaagaaacttccattactctgagggcccagcgcgacagagccatggataaagccattcgcgtggggtggatcttgatgaggagacccggcgtggttgtttctgatgatataagggctgacgtgaacgctgctcctgattcctcaagtcacccttcttcgtcggttgctcctgagaaagatattgcaaaatagagaaatatttgcgtgctttgagcgcgcggttatcatgatcggatattttgttagaggacactagttcggcatttgaatgatattgttactctcctattgttttagaattcggcagtacgtaaatttgctgaagtaaaatgctgtgtgatgactttgaaacttgtttacgggatatagaggtcatccctatatatgagtaatcgtaagcatgtgaaatcgccttaagtcgttgctggcttaaatcgattgcttttgttaatagggcatagtggtcatcccaagttaagtaagcgtgagcatgttgcaccgtcttaagtcgctgccgacttaagccgattgctccgttagctgggtatagtggtcaccccgaattaagtaagcatgagcatgttgcaccggcttaagtcgttgccgacttaagccgattgctccgttagcagggcatagtggtcaccctgagttaagtaagtgcgagcatgttgcaccgtcttaagtcgttgccgacttaagccgattgctccgttagcagggcatagtggtcaccccgaattaagtaagcgcgagcatgttgcaccgtcttaagtcgttgtcgacttaagccgattgctccgttagcagggcatagtggtcaccccgagttaagtaagcgcgagcatgttgcaccgtcttaagtcgttgccgacttaagacgattgctccgttagtagggcatagtggtcaccccgagttaaataagaatgccggtcaatcatgaacaaactgagtattcttgaagcccttttttattgatgacatatttccccttttacagagtacattatcgtcccgatagcttttgaaatatagctaggggtaaaacttcctgaggtgttctatattccaggagttcccaatttctgtgccgtccatttgagtgagacgatatgatcccggtcgagtgacttctgctactatgaatggtccttcccatgagggcgacaacttgtgccgtccctcccccgttagaatttggcggaggacgagatctcccactgaaaaggatcgttgtcgcacgaccttgtcgtgatagcgtcttagagtctgttggtatcgtgctgattgaattactgcattcagccgttcctcttcgagtacatcaatgtcctccagcctagtagcttcggcttctgctatgctttagaagatcaacctcggcaccccaaacttgagatcagcgggtaataccgcctctgacccatagaccatgaagaaaggagtgtttccatgtagagctcggctgggttgggttcttaggctccaaacgacgtagggcaattcccttatcaactttcctgcaaacttttcattcttatcgaagaccttttttctgagtgcctccaatatcatctcgttagctcgttcaacctgcccgttggctcttgggtgtgctactaaagcatacttgatctgaatgcttttttgctcgcagaaatcgaagaactctgaacttgtgaagttggatcctaggtcagttatgatattgttcggtatcccgaacctgaatattatgtcttgtatgaattccacggccttagctgaggttaaagaagcaatgggtttgaactctatccatttagtgaatttgtcgattgctaccagtacatgagtgtatcctccttgagctttcttgaaaggtccaatcatatccagtccctagcatgcgaagggccaagttactggtatggtctgtagttgctgtgctggtagatgttgttgctttgacaagtactggcaagcttcgcacctctgaactaactcggctgcgtcacttttcgctgttggccaatagaatcgtgacctgaagaccttcccgactagcgtcttggatgctgcgtgtattccacattgcccagcatggacctcatctagaagtcgcttcccagtagatgagagaatgcacttcatgaagacgcctgatgcaccccttctgtataatgtctccccaatgagtgtgtagtgagctgactgtctagcgatgcgctcggctgcatttttgtcatctggttcctcttcattctttatatatttgatgatcggccttctccagtcatcagagtctgactctggttgattcacgatattacactcttctgcctgatccattgagatgcttggttgtggtatttcttgtacaaacactccaggtgggacctgagttcgactggaccctagcttggacagtacatcggctgtcgtgtttcgatctctttctacgtgatgaaattccagaccttcaaatttatcttctagttttcggacggcagtgtagtactttcccattgaatcgcttgaacaatcccattctttgtttatctggcttatgactaccaaagaatctccgtacaccatcagtctcttgatgcctagtgatatagcaatgttcagtccatgaattagggcttcatactcggctgcgttgttggaggctggaaatagcaactggagggcatatttgaggtgctcgcctccaggtgcggtgaagagaattcccgtgcctgctccctgcagcctcagtgagccatcaaaatacattcgccatacttctgcagtttctgggttatctggtacttgttgttcagtccattctgatacgaagtcaaccagcgcttgagttttgatggcagtgtgaggtcgaaattcgatgtcatgagatcccagttcacaggcccacttggctattcggccaatggcttccttattgtgaagaatatcccctatcggaaaaccagtgactactatgactttgtggtcgtcaaagtagtgacgcagcttgcgggcagttagaagtactgcatataatagcttctgaacttgaggatactttttctttgagggacccagaacttcactgatgaaataaacaggatgttgcactgggtaggcatgtccttctttggctcgctcgactaccaacgcggtgctcaccacgtgagtcgtgcaagagatatacaacagcaagtcttcagctggttgagttgacgtggctcgccgcggcggcttcagcactggtggtgtcgtcaagaattttttcagtgcccctagggcttcctgtgcttctgaagtccactgaaacttatccactttcttgagcagcttgtaaaatggtaaacctttttctcccagcctggatatgaatctgctcagggctgccatacatccggtaagtcgctgaagtttcttttgtgatcgtggtgcctccattttcatgatagcttcaatcttatccagattagcttcaattccccggtggctgacaataaatccgagtagctttcctgctggtaccccaaagacacatttttcgggattaagcttccatcgatatcgccgtagactgttgaaaccagttgtaagaattcgatgaagttttctgagttctccgttttgattaccacatcatctacataggcttccacacgcttgccccagtgatcggctaagcatgtttgaatggctctctgataagtcgctccagcgtttttgaggccaaacggcatggaggtatagcagaaagcaccgaacggagtgatgaacgctgttttttcctcgtcttcctttgccaagctaatctgatgatatccggaatagcagtccaggaaagacagcacagaacacccagcggtggagtctaccacctgatctatcctagggagcccgaagggatcctttggacaatgtttgttgagatccgtatagtcgacgcacatgcgccaatccactttattctttttgagtacaagaacagggttggctaaccactcaggatgtaacacctctctaataaacccagccgcgaccaagcgagccagctcagcgcgaatggcctctctcttgtcgggcgtgaagcgacgtagtttttgccggatcggcctcacctggggatagaccttcagtttgtgctcggccagttctctcgggacccccggcatatccgcaggttgccatgcgaatacgtctcggttatcttgcagaaactggacgagcgagccttcctatttatcatccaggctggagctgatgatggcagtcttgcattcatcagcgaaccccaggttgatccttttagtttcttcagtcggccgcatagaggtcgcggcttgagcttcatttgctggtggcgcgaggtcttcctcaggcttagagtttgtcggcgttgaagaagttgccgacggtttggtggtgagggccgcctggatggccactcggaaacattctgcggcgccttggaagtcagcgtgcatagttatgattctttgtggtcctggcatcttcaatatcatatacgtgtaatgcggaatggccatgaattttgccaatcccggcctcccgataatggcgttgtacccgcagtcgaagttcgccacttcgaacctcaggaactcggttctgtagttctccggagttccgaaggtgacgggcatgtagatgtggcccagcgggtattccccttcagtcggcacgataccgaagaaaggagtatctgactcgtggagctctttgaggtgaactcccaagccttggagtgtccgggggaaggtgacgttgatgctgctccccccatccactaacaccttcttcaccctgctctctcggatcgccggatcgacaaggagcgggtatttgcctgggtggtcgaagttgagccattgatctgcccgagtgaaggtgatcgggtgctccgactatcggtatggagcgggaggaccggtggtcgccaccaatatctggcgatcgttgagcttttgttgtcttctgttctcctgcgatctgtgtccgccgaagatgacgttgacctccctgtcaacgcgcgggaaggctcctcctcctccctcctcctgctgctggggttgtcgtggttcttctggtcctcccacggcggaggaggaggtagaggttggaagggtcggccgtgtccgacggagtgcttgaagtccctgcagttccgaagggtgtggcgcatgtccttgtggtacgggcactaggcgtcgaggatgtcgtccaacgtgcgctcgcctccgcgaggtcctccccgggcgcgagaggcaggtggtccgacggcgtgcacttcttcgcgaggtctcttctcccagcgtttgtcgggttgctggttcgcgtcgcatcgtggtgctgccggtgcgagtttcgctcccccgatgaggtcctgagctcgctcgtcggcggtgatgtagaggtcggcttcccggaacagctgctcggaggtagtcggcgccttctgcaatatggctcgaacgaaggccgagtcattggatcctctgtagaagtcctcgatcacggccgcctccgtgacctcggggatacgatttctcatggtctggaaccttttgaggtacgaccggagagtttcgtccccccggcgcttgatggatttgaggtctcatggttgagctggtttgtcggagagggactgaaagttgggaagcgtcgactgaagtcgctccagtcgtcgatgcagtgtcggggtagatgtcgtagccattgtagtgcgtcttgcccgaggacaatggtaagtatgcagtcatcacgtcctcggacgctccggcggctcgagcggcggtggtgtagacggccagccagccccctggatcctgcttaggttcatatttgtcgacactggataccttgaaattagggggccattgaatggccctaaggcgtggagtgagggcagacactccacacgtgtcttcctgacgtcggggatgatgtctgtccccgggaggggagtagttgttgtggttcctcgaccgtccccgggtagtaccgccagtcgaggacgtcgctgactcagttctggtggcctaagtccgagctgggatgccatgatccctgtcgtactcctcccggcggcggatctcgttctcatgtcgtcgttcacgcggagcattgatggagtttcgcgtgtcccggcgactgttgatggcgtgtcgcagatcgttcgatgggtgagcaagaggtagaagatggttggctgcctgggtaaacagtcgccgatagccctcggcgtcgggagtctgagggagtccgtcagctatccgagctagtacccctccaacttcacttggcgtgttcatggctcgggcgaagtcgggattcaggttgcgcccgaagagtggattttcccgacgttgtcttgcatcatgctcggcttgttcctgagttcgtcggcgatcacgccgtcgggagttccttcgttctctgaagacgcgttcctccggagtttctcctatctctgagacctcgtctcgcgagataggctgctctggatcccgctctccggcctcgtgatgtcgccggatgtttcagcgtcgatttctccgtcgacgggactcccgctgaggtggttcttctccaggcgcggtcggctcgtcgtcggagacggggggcgactccactctcccaatgaaaagaacgtcggggtagaatggtgcggctgtcgtggcgatcttctttctgttctcctttgagggcggagacacagaaagaacgacttgcttcctcccggtctctttcttccttgcgatttgtgtccattctttcatcggggaagtagacagtggagttctccgggtcagcgggccctcgacccctggcttgctgaaggcgatcttttttcggagcgctggaggctgcactttttctttccttactatgatattctcggagtttgttggaggagacttcttctttggcggatctgcaatgcggtgtagagttccctcttcatctgctatggatgagattgttccaaagcagaatacagatccgggacggagggtgatcttgcggtggaaggtgacggccattgagctagcttagatcggcgacacaccccctacctggcgcgccagctgtcggtgttttgggtccgaccgcacacccggggttgcccctcaaggtgttttaggagtaggacggtgtcgccgactgtagctaaatggttagtgcaagatgcacgaggaacaatggatagtgtttacaggttcgggccgctttgagatgcataacaccctatgtcctggcgagtatgctttatgtaatgggttacaagggagctctctaagaacgtagagagttggggtggatggctgagtagtgggatcgatcgttctgaagggatgccccctaggccttatatattcgaccgtgaggcaatacatgtggatacaataacaatgtgcacctaaaagatagtgaactgtttgagtctatcttcctatagttctgccgacttatcttcacctggctccgttgtatagggttccagcgcgggaaagtcgggtcttctgttgtggtttcttgctcaatgttgtcgggccattcgggctcgcaccgatctggccttatgttgatctgctttactagtcactcctccccagacccatgaaggagtgaccttacgatttattgggcccttgggcctttcatgaggtcttttatccttccagtggacccgggggatatctgtcccccacactcgcctctggtggttttagcttgtcgtcgtctgtcctt

SEQ ID NO: 850 - DNA, 9559 bp, Zea mays
  Intron number 1 from transcript GRMZM2G079777_T01 (locus G RMZM2G079777) derived from phytozome v7.0 (chr-ID 10; pos 60143730 to 60153288)
ctggaggggagaaggacgacgacatcatcttttgatcgcctctttccatgctcatccaatcattcaatcggtgcgtagaatcatcaaagccttattctggatctggttttagaacatccacaatgtgtttcctctcatgttttttttttcttctgtgaagactgctgatgtagttgctttgattgtacaatatcaatcgtgtatttcaattaattagtagatgcatccaaattaccttccctagatgtgtgacccaaaagtgttcatgcctgtgataattcatctgaattttgcttgacattaatgtgaacaagatatgctaacacaaccacatggttgatatttccatacatacatggcatcagtgtctcactttacataatgtacagcataatagcttgcagattggtcgcattgattttattcctgcatgcgatagtttatttgaactctaaagtgagacactcgcagatttgttcatggaaaacaaatattttgtaatgacgaacacattgatttattcatgactacatgatattacaattgcacttcgtctggaaacaatgtgcgctttaggattttatagaaaccagatcttcgcttcatattgctttgatgttgctggcaactggcagttaagatttgctgagcttcttattattagattcacttttagattggaaacagtgtgtgctttaggattttatagaaaccagatcttcgctccataatgctttgatgttaatggccactggcagttaagatttggtgagtttgttattattagattaacttttagattggtcacacaggatctattaccagaaaatgaagatactgtgtatattattaaatcaatagcaatcagtgtgatagggtaaacagattagcagtttatctttggtgcaaattagcagaagacgtacagaacttcatatactcgttgttatatcatatatgttatagttccttgttgatgaatgttatgtttctcaggaaaattagctccaactattaaaattttacacaccgtttattgctccaagcctctaagacatagagagatggcaatggtagaactatgttttgggttctaggccaaatggcccatgggggtcccttagcaactgtaattctgtaatgatgccatcaaagtgatctagtgacaaacttgcccattggagaatagattactattgctagccccttccttattttccttcaagctccgccactgggagctagaggaacatggtgatatggcctaatagagatggcagggctgttggtagctccagcattatacagataatttcacttcacccctaattacagtgtcaaacatcaggataaagtttatgtgcacgagggactccattctctataaatggacggcaaacgaagcatattccactcgctcggcatactgaatacagttcggtggctcctacgggcctttccggttggcctcatctggaatgctcatgctgaaaacaagtgcaaggtatttgcatggaccatggcaagggagaaaattctcatcgcatacaatttacaaaaaaggggctggccacaacatgatcactgcgctttatgcaatgggccgcttgagacatacatccatttggtgctgctctgcccttgtgccaaagcagtatggagcctaacgctaacttgggaacaattcgacgcaaatctaatccccccgataggtgtgcctacccatctatccctatggtgggaagaagcccatgcaaagattccaaaaaatgatttacactctttggaacatcgggaaagaacggaatagaaggatcttcactggcacctttgaagtggcggcacatgttgcctctagaattgaagaggacattgagcaatggaaaagggatctgaaatgggtggtgtaatatttttgtaaaagtttagtgcactgctcccttctgttccgggatgcgctgctttaagggtgtttttcctaattaacctgtacgtactatctttttcctatcttaattgaaaggcagagctcctgtcatttcgtttcaaaaaaaaaagtttatgtgcagtttatgaagtatgaacacctgtgtaacatagcaacctgactcttgaactttgaaggccagtttagtttagctttgtatgttgaagttactccacttagtttacttgagcacacaaggttttaaagtcgagcaacgactagtcaagaagtcggtgtagaggtgatagtcgatctgagcgacttgactttctttgctagtcgctcgactagtcacgactagtcttaccatttgagccggacgacttattttggcctaggtataaaaatgtgagcccacccaaccatctcaaccctagtaggtaggatgctaatggaaaatttcctaccttattttggacgcctagtgctgcccactgcttggatctcatgctggaggttattgggaagataaaatagtttagtgactgcattgctaaagcaaagaagataaccagatttatctatgcacatggaaggttttatgacttgatgaggaccaagacaaatggtagagatcttgtgaggcatgcaactactcggtttgcagcattctttctaaccttggctagtatgtggaaacaaagacaagggctaaaagcatgtgttttagtgtgagagcaaattgaagaatggtgtgagagcaaattgaagaacactgaagtagaaaaagcatgtgttgtctgttgcattttggcaagcagtagaagattgcatgagagctttacaacctcttctaatattcttgagggtagttgatggtgatgagagaacagcaacagctgaaatgtgggctgccatgaatcatgtaaaaaagagcatgaaggaagctttggacacaaagagcgattagtggatgaagtaatttctattgttcataagaggtgggaaaattagatggataccaatcagtatggggcaacactgttttagtgtttttgaatccaaataagttctttgaaatcagagagaacaatagaagacttgctacaagactttgttcaatatttaatgatgtattgtagaagatggagatgggtgaagatatactaagggctagtttggaaaccctattttcccaagggtttttcgttttccaagggaaattagtttattttcccttgggaaattggaaatcccatgggaaaatagtgttgccaaactagctctaaacaaggtgttttttgttgttattaagtcctgtttcctaagcactctcctagttacttgtgctagttaattatagtcattaaagaccttgagcagctcaacaggtgtgtgcggctgccaaggctcctatctgattagctaagctctaatgagctgttatgtaatcaatgtgactcatctcatctttctatataatcaagcaatgatggctgaggttagcacctgcggcaaaactactctgtttacctctaacatttggtatcaaagcttaggttagacacctgagagactcaaggccgactcctctcttccctactcatgtcgacctctgctgagcgcgctgccaggctcaaggccaagggaaccagcgaaggagagctgggcgacttccccagccgggctgcacgcctgaaggctgcagaggaagcagcggcgctggcagtccaggcagcgaagcaggcagcggctgcagcagaggcagcggcaaggacggcgcaggagctgcgggccgaaatcgccgccgagaagggagaagatgaggaggactgggaggaggaagaggaaacagagaagaacaggcggatgaggactccaccgcgagataggaggcgctcgcagtcaccactgcgggaccgaaggcgctgccgtggcggcgctcgctacgagtcgccgcaaggaagggtggtgtaccgcgactccggcagcggcacgtcgtggccaatgctggacaagacgaactactacgagtggagccagaccatgaagctgaggatgcaggcgcgcgatctctgggatgccattgaaggcggtcctgtccagtttcgcgatgacagacgcgcactggaggtgatcgtcggggctgtacccaaggagatgggtctcccactgctcgacaaggctacggcgaaggaggcgtgggacgccatcgctgcgacccgcatcggcgtggacagggtccgtcgagcaacactgcagcgcctacgccgtgattgggagaacatcagcgtcaatcctggtgagcaagtggatgactttgctgtgcggttgtcaactctgcaccagcagcttgtcatccatggcgatagggacatcaccgaggagcgcgtggtggagaaattcctgcgcacggtgccggccaagtactcgcagatcgtcgtcgccattgagcagttccttgattttgaggcactgactcttgaggaggtgactggaaggcttaaggcagtggacaatcgcgaagaacaaatactgaccgagccggtggccatcaatggcaagctgttgtacactgaggagcagtggaaagcgcgatgcagaaaggaaaagaagggagacgatgcatgtggctctggtttcaggaaccagcgtggtggcggtggacgcagccgcggtggtggacgaggacgaggcagagtaggtggacgtggtggcggacgaggagacggcaatgttgctggccgtgtcggccccaacacctgcctcaactgcaaccaggaaggccactgggcacgtgagtgtccgcagccgcgccgtgaggatgcagagcgcggcggtggcggtggaaaccgtgctggccgcggcggtggcaaccgtggtggaggtcgcggcggtggaaatcaggctggacagcgtggcgggaaccaaggaaggcatgaggcgcgcgtccagtacgccgaatgtgaagaagatggtgctctgtttctggcacagggctttatcagcctagagcagagcacgccggcgcacagctacacggcgcagcacgtcgagctctctgagccacgtgcctgtgcctaccttggcgtggatgaagaagatatggacagcggttggtacctagactctggcgcaacacatcacatgaccgggcgtcaagagttctttgctgatctgaacactggcgttcgaggaacggttcgtttcggggacgcgtcgaaggtagagatcaagggcgttgggtctatcatcttccaagccaagaccggtgaacagagggttcttcatggcgtctactacattccggcgctgaagaactctatcctaagtctgggacagcttgatgaaggagggtccaaggttgtgattgaccatggcgtgcttcgcatttgggacaagaaccggcgtctgatcgccaaggtacatagagggaagaacagattatatattctgcatcttgaggctgcacaacctatctgtcttgcggcgcgcaaggatgttgaggcgtggcgatggcatgagcgttttggccatctgcacttcgacgcaatccgacgactcagcaaggaagagatggcgcgcgggatgccggtggtcgaccatgttgagcaggtgtgtgacacctgcgttaccacaaagcagaggcggcgctcttttccggccgcagcagcatatcgtgcccagaatcaactcgaattggtgcacggtgatctgtgcggcccagtcacgccagcaacaccgatgggcaaccgctacatcctgctgctcgtcgatgatgccacccgttttatgtgggctgtgttgctgccatccaaggacgcagcggcagaagcaatcaagaagatcaaggcggcagcagaggtggaaagtgggcgcaagttgaaggtcctgcgcaccgacaatggcggggaattcaccgcagcagagttcgccacatactgcgccaatgaaggtattaaaaggcatttcagtgccccttattcaccgcaacagaatggtgtggttgagcgcaggaatcaaactgtggtggccatggcacgagctctgctcaagcaacgccagatgccttctcggttttggggggaggctgtgatgacggctgtgcatattctgaatcgatctccaacaaaggcactgaagaatgtaactccgtatgaggcatggcatggccgcgcaccaacagttggccatttcaaggtatttggttgcgtggcttatacccggcagcttactcagctccagaaacttgatgatcgcggtaaggctggagtattcattggctatgcagaaggggccaaggcatatcgtgtatttgatccagtgtcccagcgcgtgcgagtcagccgtgatgtggtatttgatgaaggacgtggctgggactgggcatcagcggcagcaggtacttcagaggcagcatgcagcgattttgttgttgagtttccatgggcagaagagtttcctgaagcagaaagttcagtgttaccctctcttcagccacatcctacatcacctagtctccctttggtgggtgcaggagagtctgcagcagaaacagaggaatccgcagtggagacagaggtgcctgtgtcacctagaacacctacaccagctccaacaagcccgcagatagagcatgtgactcctctggagaatgatagtgaaagggtggatgcttgtcatgatggtgaagagcttcgttataggaaggtccatgatattattggtaataagccaacccctttgccggcacagaggttgtttgcagaactaaacctcactcatgccggtgagcccacaagctatgaagaggcaaaagatgatccagattggcaggcagcaatgaaggaagagctgagctcagttgagcagaatgggacttgggaacttgttactcctagtccaggtcatcgcccaatttcattgaagtgggtgtttaaactgaagaaggatgaacatgatgctgtgatcaggcacaaggcaagacttgtggcccgtggctttgttcagaaggaagggattgactatgaagatgcctttgcaccagttgcaagaatggaatcagtacgtgttttacttgctctagcagcacaagaaggttggacagtacatcacatggatgtgaagtctgcatttctgaatggagaactcaaggaagaggtttatgttactcagccaccaggttttgaagtatcaggagaagagaagaaagtgtacaggttacacaaggcattgtatggcctaagacaggctcctcgggcgtggaatgccaaacttgatttgactctcaaacagatgggttttgagcagaatgtatatgaggctgccatgtacaggaaaggttcaggtgattctttgctgataattggagtctatgttgatgatttgatcatcactggagtcaatcagcagaagattgaaactttcaaggcaaaaatgaagcagacattcgaaatgagtgatttgggtctgttgtctttctatcttggggttgaggtaagacaatcagagggaagcattactctgaaacagactcattatgctaagaagatacttgagctcggtggtatggcagactgtaatccagctaccacccccatggaagaaaggttgaaactgagcaaggaaagtacagcaaaggaggtaaatccaactcagtatagaagactagttggtagtctgagatatctagtgcacacaaggccagatttggcttttgctgtagggtatgttagcagatttctggagaagccaacagctgaacatcttcaggctgtaaaaaggatcttgagatatgtgactggtactctagatcatgggctatgctatactagaatgacaggcaaggcaagatttgtgggttatagtgactcagacttggctggagatattgatacaagtagaagcactactggatgtttgtttttccttggaaacagtctggtcagctggcaatctatcaagcagagagttgttgcattgtcaagctgtgaggctgaatatgtggcaatgacaacagctgcaacccaagccttgtggttgtcaaggttgtttgcagaattactgggaagagaagttgaggtggtggaacttagagtagacaataaatctgctctagctttggcaaagaatcctgttttccatgacaggagcaaacatattagaatcaagcatcacttcatcagggactgtgtggaagaaggtagcatcaaaacagaatttattcccactgcagatcagcttgctgatatactgaccaaagctttgggcaagaccaagttggaagatatgagaagcagaattgggatcaaggagatcaagatcagttgaaacaggccttagggggagaaatgttgttattaagtcctgtttcctaagcactctcctagttacttgtgctagttaattatagtcattaaagaccttgagcagctcaacaggtgtgtgcggctgccaaggctcctatctgattagctaagctctaatgagctgttatgtaatcaatgtgactcatctcatctttctatataatcaagcaatgatggctgaggttagcacctgcggcaaaactactctgtttacctctaacattttttagcgtttcagcgtgtttttagtattagcatatataaaaaattataaaaatataatcatcaacttatattcgactagtcgcgactagtctactagtcggtagttgcacgactcgactcgaaaatattgttgagcacaaagttcactcgagacactgctcagttaaatgtttttcgcaaagaacgccagagaataaattataataacttgacaacaatgttcattgtggactttatctgaaatctccaaatatttttaatgcaatattatttttccacagcaataaatgactttaaaggtaagaggagttgcagtctatttcagtcactgctttatccacaatctacagttctgctggcactaaagttcacatatctgtacatgctatatctggaaatctctgcttttcaacatagatgcagtgctgcgttctagtttagctattcactgctttatccagaaatttcttgtgtctgtaagcattatagctggtatggtgtactttatgctgagagttgattatatattggcatgtgcacttctttgttgcataaaaatcctaattgaatgtggtgaaagcacctgtataacaccgaatcttcaagccagttcaatttagcattgctatgaaaaggtgtaaggaactcagtctcggtttctttgaacttaacatgcattttgcaaagcgcaccaatgttagaaccattgtggacctgatctgaagtctatttatacaaccccattttaccacttaccaatttggctgacgcatttcacctacttagagtttgcatgccaagatgttgtactttgcttggtgaggctggacatcatctccctttgtctagcatgtgtgtgcactccccactccagattctcttgttttgagaagtgctgtatacttggatgacctgaccagatgcatcatgcaatttaattttccatgctcgttgatgtgatgatcacacatggaattagtctctttcatttagattttaatggtttgcttctccttgcagccctggaaacaataagttg

SEQ ID NO: 851 - DNA, 3083 bp, Zea mays
  Intron number 1 from transcript GRMZM5G811948_T01 (locus G RMZM5G811948) derived from phytozome v7.0 (chr-ID 3; pos 5 7665643 to 57668725 reverse strand)
ccacgcacgggcagcacggcttccaggcttcgcaggtacagttcctagccctccacgactccacggcctccacggaatcaacgcaccctagtttttagtatctttgcttttgcttgttccccagaagaaaactacaaaaacagctttctctacctgtcaaagtgttgacatattattcagaatcttttaaggtaccaaatgaactaagttggtttctgaattagagtattccatcgattttagcttatgtatatgacaactgaaaacagagtccaaataatgtgatcagtaaatattgtggagcaaatttagcaaaatatttaactcaatgtacacagaataagcaagggcaaaccatgatgatcagacctcttcaccagatatgggatcagttacaggttcccctgcagatgcctgattgaataacatgtttcctcttgtagctcgaaaaagcatccgctcaaaagcaagtgccttcgactttaatattattccactaacaaatctcactccagaatgtccatgtgctccttgatgcactccctgggaacagttcttttttgtaatggcagaacaggcaatgtaatagtgttagcattatgaatcagggctaaaatcagacctgttcgagcagataggcatttccctcatgtattccggttaacattatgaatcactgaaatatgagtaatgcacctctagctcctccagatcaatatgagcaatgtaatagtgttaacattatgaatcagggctaaaaactttctgttacaagaaatatgagtaatgcacctctagctcctccaaatcaatatccggttcaagtgcaggtcgaacagaagatcttaaacctgccctgttgatctgatcactgaaaatttttagtttgcgtgacatttctgcacatcgctttacctgcaatggaattaagatgtgtttgtcaacataactaaaaagttagtgagaccagagatttttaaatatcagcaacagcccaaacaataagttttagtactgtccgcttcatcatcatattgtttatgtactgtgctatttttagaggatgtgaagtctggttctaatttcctatcatctaccatactgtactcagtgctatgagcatattttaactggtaacttgattggcaatccagtactcatgatatcaaatagcataatgcaatgagtagattaaccccttttccccacagttgtctactgggcaaatcactatataatccacaccaatcctgaaatgaccatcccttatactgtaaaatagcctctactaaaagcaaaccactcagagcatcacctactgcctgattgatcagctgactcgctgccaacaatctcattacagcgtggtactgtgctgattgctgaacctagaaagggcattagaccaaccgcatcaaataaactgttgaaagggagaataaggacgtaaaacagatagtaagagcgtaccaatgtcagcttgagaggagagctcattgcttaatgactctagctaagagatgaaatcctctgagaataccacagtcccatgcccatttgcctcaaagtatataccaatgtcatactccaaggcccttttgtgcagatatttcactcctgtaggagtgaacaccacttcgaggccaaggctcttcagaaactgcgtcgacgccccattcgcataagctgtctgaactattccaagccttgcagacaatgacttgtttgcttggccaccattgttattaacgatatctagctgctctctgataaaaagggcaaacagagatagtatcttatctccatcaacaagatcaacccaaaaatacactgcatatgtgtttaccaaaaatcttgcttcccagctgcttccaataactttgggaaacaaagaaagttaaaagtattaaccttaaccatttgatagtcaacacaaagagaaacatatatccttaaattcgacgtatggctggttgacaaatacctggttgacaaagatacgctacaaaggactctgttttagaatgcatcagtcaaactcgccttcagtctagtggcgttgtactcccattttaacaaactgcataagtatatgattatcaatcagtgccttctttgaccctgactaagcattgtgtatctcttagcaaactgcataaatatactaatttgaagtatattgatccgtgccttgccaattgccatgagtcaatgacgtcgattgcgcggtgctccattcatatccattctgaatttctgatttgattgtccttggagtaaatcttggactgtcttcatgtgtccgaatccaaaatagtcttgtggttcgtctgcctttcagctcatttggaaggttctcagagttgctgatcccaccattggcagttcaagtatcaagaggccattggtgacagaagctgcaacatccatggttattagatgtacatgtcattttctttcacccttttcctgaataacttgttggcattaagatgcatgacactattaccttcttcctgaataactgtgagcgagatgtataaaatatgtagttttttatgttgaaaatactgaagtatggaacaatgtactcctaactagggattgtggtgggacacaaaactgacagtagcttccattttcctatagtaaattttatttgtcatgatctagctttgcatatataattttctccgagttccttacagaagctataccaagttttatatttagtccctagtatgagtggaaactttgtataactgctgtaaggaaaaacttgttcataaaactttgtatttcccaacacgccctgcatacctctctgttcctaactttttttgtgtgcatatctttttcagcagggaagttccctaaggcaagcagttgaagtttactgtctttttacactcactggcttaagtctcccgcggcacatgcacggtcttatgacacaaccactgcctttttaatataaaatggtcattagctgttaaagtttactgtgatgcccttagtctagtgataaaatggagttcagctgatcaggtacaaaggagcccctgaagtggaaagtcaggttc
